(19) United States
(12) Patent Application Publication
(10) Pub. No.: US 2003/0078396 A1
(43) Pub. Date: Apr. 24, 2003

(54) Compositions and methods for the detection, diagnosis and therapy of hematological malignancies

(75) Inventors: Alexander Gaiger, Seattle, WA (US); Paul A. Algate, Issaquah, WA (US); Jane Mannion, Edmonds, WA (US); Marc Retter, Carnation, WA (US)

Correspondence Address: TOWNSEND AND TOWNSEND AND CREW, LLP, TWO EMBARCADERO CENTER, EIGHTH FLOOR, SAN FRANCISCO, CA, 94111-3834, US

(73) Assignee: Corixa Corporation, Seattle, WA (US)

(21) Appl. No.: 10/040,862

(22) Filed: Nov. 6, 2001

Related U.S. Application Data
(63) Continuation-in-part of application No. 09/796,692, filed on Mar. 1, 2001.
(60) Provisional application No. 60/223,378, filed on Aug. 7, 2000.
(60) Provisional application No. 60/223,416, filed on Aug. 4, 2000.
(60) Provisional application No. 60/222,903, filed on Aug. 3, 2000.
(60) Provisional application No. 60/218,950, filed on Jul. 14, 2000.
(60) Provisional application No. 60/206,201, filed on May 22, 2000.
(60) Provisional application No. 60/202,084, filed on May 4, 2000.
(60) Provisional application No. 60/202,084, filed on May 4, 2000.
(60) Provisional application No. 60/200,999, filed on May 1, 2000.
(60) Provisional application No. 60/200,303, filed on Apr. 28, 2000.
(60) Provisional application No. 60/200,779, filed on Apr. 28, 2000.
(60) Provisional application No. 60/200,545, filed on Apr. 27, 2000.
(60) Provisional application No. 60/190,479, filed on Mar. 17, 2000.
(60) Provisional application No. 60/186,126, filed on Mar. 1, 2000.

(51) Int. Cl. C07H 21/02; C07H 21/04

(52) U.S. Cl. 536/23.1

(57) ABSTRACT

Disclosed are methods and compositions for the detection, diagnosis, prognosis, and therapy of hematological malignancies, and in particular, B cell leukemias, lymphomas and multiple myelomas. Disclosed are compositions, methods and kits for eliciting immune and T cell responses to specific malignancy-related antigenic polypeptides and antigenic polypeptide fragments thereof in an animal. Also disclosed are compositions and methods for use in the identification of cells and biological samples containing one or more hematological malignancy-related compositions, and methods for the detection and diagnosis of such diseases and affected cell types. Also disclosed are diagnostic and therapeutic kits, as well as methods for the diagnosis, therapy and/or prevention of a variety of leukemias and lymphomas.

### CROSS-REFERENCES TO RELATED APPLICATIONS

[0001] This application is a continuation in part of U.S. Ser. No. 09/796,692 filed Mar. 1, 2001, which claims priority to United States Provisional Patent Application Serial Nos. 60/186,126, filed Mar. 1, 2000; Serial No. 60/190,479, filed Mar. 17, 2000; Serial No. 60/200,545, filed Apr. 27, 2000; Serial No. 60/200,303, filed Apr. 28, 2000; Serial No. 60/200,779, filed Apr. 28, 2000; Serial No. 60/200,999; filed May 1, 2000; Serial No. 60/202,084, filed May 4, 2000; Serial No. 60/206,201, filed May 22, 2000; Serial No. 60/218,950, filed Jul. 14, 2000; Serial No. 60/222,903, filed Aug. 3, 2000; Serial No. 60/223,416, filed Aug. 4, 2000; and Serial No. 60/223,378, filed Aug. 7, 2000; the entire specification, claims, sequences and figures of each of which is specifically incorporated herein by reference in its entirety without disclaimer and for all purposes.

### STATEMENT AS TO RIGHTS TO INVENTIONS MADE UNDER FEDERALLY SPONSORED RESEARCH AND DEVELOPMENT

[0002] NOT APPLICABLE

### REFERENCE TO A “SEQUENCE LISTING,” A TABLE, OR A COMPUTER PROGRAM LISTING APPENDIX SUBMITTED ON A COMPACT DISK

[0003] NOT APPLICABLE

[0004] 1. Background of the Invention

[0005] 1.1 Field of the Invention

[0006] The present invention relates generally to the fields of cancer diagnosis and therapy. More particularly, it concerns the surprising discovery of compositions and methods for the detection and immunotherapy of hematological malignancies, and particularly, B cell leukemias, and lymphomas and multiple myelomas. The invention provides new, effective methods, compositions and kits for eliciting immune and T-cell response to antigenic polypeptides, and antigenic peptide fragments isolated therefrom, and methods for the use of such compositions for diagnosis, detection, treatment, monitoring, and/or prevention of various types of human hematological malignancies. In particular, the invention provides polypeptide, peptide, antibody, antigen binding fragment, hybridoma, host cell, vector, and polynucleotide compounds and compositions for use in identification and discrimination between various types of hematological malignancies, and methods for the detection, diagnosis, prognosis, monitoring, and therapy of such conditions in an affected animal.

[0007] 1.2 Description of Related Art

[0008] 1.2.1 Hematological Malignancies

[0009] Hematological malignancies, such as leukemias and lymphomas, are conditions characterized by abnormal growth and maturation of hematopoietic cells. Leukemias are generally neoplastic disorders of hematopoietic stem cells, and include adult and pediatric acute myeloid leukemia (AML), chronic myeloid leukemia (CML), acute lymphocytic leukemia (ALL), chronic lymphocytic leukemia (CLL) and secondary leukemia. Among lymphomas, there are two distinct groups: non-Hodgkin's lymphoma (NHL) and Hodgkin's disease. NHLs are the result of a clonal expansion of B- or T-cells, but the molecular pathogenesis of Hodgkin's disease, including lineage derivation and clonality, remains obscure. Other hematological malignancies include myelodysplastic syndromes (MDS), myeloproliferative syndromes (MPS) and myeloma. Hematological malignancies are generally serious disorders, resulting in a variety of symptoms, including bone marrow failure and organ failure.

[0010] NHLs are the sixth most common cause of cancer related deaths in the United States. Only prostate, breast, lung, colorectal and bladder cancer currently exceed lymphoma in annual incidence. In 1995, more than 45,000 new NHLs were diagnosed, and over 21,000 patients died of these diseases. The average age of lymphoma patients is relatively young (42 years), and the resulting number of years of life lost to these diseases renders NHLs fourth in economic impact among cancers in the United States. In the past 15 years, the American Cancer Society reported a 50% increase in the incidence of NHLs, one of the largest increases for any cancer group. Much of this increase has been attributed to the development of lymphomas in younger men who have acquired AIDS. Lymphomas are also the third most common childhood malignancy and account for approximately 10% of cancers in children. The survival rate (all ages) varies from 73% (low risk) to 26% (high risk).

[0011] 1.3 Deficiencies in the Prior Art

[0012] Treatment for many hematological malignancies, including leukemias and lymphomas, remains difficult, and existing therapies are not universally effective. While treatments involving specific immunotherapy appear to have considerable potential, such treatments have been limited by the small number of known malignancy-associated antigens. Moreover the ability to detect such hematological malignancies in their early stages can be quite difficult depending upon the particular malady. The lack of a sufficient number of specific diagnostic and prognostic markers of the diseases, and identification of cells and tissues that can be affected, has significantly limited the field of oncology.

[0013] Accordingly, there remains a need in the art for improved methods for detecting, screening, diagnosis and treatment of hematological malignancies such as B cell leukemias and lymphomas and multiple myelomas. The present invention fulfills these and other inherent needs in the field, and provides significant advantages in the detection of cells, and cell types that express one or more polypeptides that have been shown to be over-expressed in one or more of such hematological malignancies.

[0014] 2. Summary of the Invention

[0015] The present invention addresses the foregoing long-felt need and other deficiencies in the art by identifying new and effective strategies for the identification, detection, screening, diagnosis, prognosis, prophylaxis, therapy, and immunomodulation of one or more hematological malignancies, and in particular, B cell leukemias and lymphomas, and multiple myelomas.

[0016] The present invention is based, in part, upon the surprising and unexpected discovery that certain previously unknown or unidentified human polypeptides, peptides, and antigenic fragments derived therefrom have now been identified that are overexpressed in one or more types of hematological malignancies. The genes encoding several of these polypeptides are now identified and obtained in isolated form, and have been characterized using a series of molecular biology methodologies including subtractive library analysis, microarray screening, polynucleotide sequencing, peptide and epitopic identification and characterization, as well as expression profiling, and in vitro whole gene cell priming. A set of these polynucleotides, and the polypeptides, peptides, and antigenic fragments they encode are now identified and implicated in the complex processes of hematological malignancy disease onset, progression, and/or outcome, and in particular, diseases such as leukemias and lymphomas.

[0017] The inventors have further demonstrated that a number of these polynucleotides, and their encoded polypeptides, as well as antibodies, antigen presenting cells, T cells, and the antigen binding fragments derived from such antibodies are useful in the development of particularly advantageous compositions and methods for the detection, diagnosis, prognosis, prophylaxis and/or therapy of one or more of these diseases, and particularly those conditions that are characterized by (a) an increased, altered, elevated, or sustained expression of one or more polynucleotides that comprise at least a first sequence region that comprises a nucleic acid sequence as disclosed in any one of SEQ ID NO:1 through SEQ ID NO:13 or (b) an increased, altered, elevated, or sustained biological activity of one or more polypeptides that comprise at least a first sequence region that comprises an amino acid sequence as disclosed in any one of SEQ ID NO:14 through SEQ ID NO:869.

[0018] The present invention also provides methods and uses for one or more of the disclosed peptide, polypeptide, antibody, antigen binding fragment, and polynucleotide compositions of the present invention in generating an immune response or in generating a T-cell response in an animal, and in particular in a mammal such as a human. The invention also provides methods and uses for one or more of these compositions in the identification, detection, and quantitation of hematological malignancy compositions in clinical samples, isolated cells, whole tissues, and even affected individuals. The compositions and methods disclosed herein also may be used in the preparation of one or more diagnostic reagents, assays, medicaments, or therapeutics, for diagnosis and/or therapy of such diseases.

[0019] In a first important embodiment, there is provided a composition comprising at least a first isolated peptide or polypeptide that comprises an amino acid sequence that is at least about 80%, about 81%, about 82%, about 83%, about 84%, about 85%, about 86%, about 87%, about 88%, about 89%, about 90%, about 91%, about 92%, about 93%, about 94%, about 95%, about 96%, about 97%, about 98%, or about 99% identical to the amino acid sequence of any one of SEQ ID NO:14 to SEQ ID NO: 869. Exemplary preferred sequences are those that comprise at least a first coding region that comprises an amino acid sequence that is at least about 85%, about 86%, about 87%, about 88%, about 89%, about 90%, about 91%, about 92%, about 93%, or about 94% identical to the amino acid sequence of any one of SEQ ID NO:14 to SEQ ID NO:869, with those sequences that comprise at least a first coding region that comprises an amino acid sequence that is at least about 95%, about 96%, about 97%, about 98%, or about 99% identical to the amino acid sequence of any one of SEQ ID NO: 14 to SEQ ID NO:869 being examples of particularly preferred sequences in the practice of the present invention. Likewise, peptide and polypeptide compounds and compositions are also provided that comprise, consist essentially of, or consist of the amino acid sequence of any one of SEQ ID NO:14 to SEQ ID NO:869.

[0020] In a similar fashion, there are also embodiments disclosed herein that provide compositions and methods for the detection, diagnosis, prognosis, prophylaxis, treatment, and therapy of B cell leukemia, lymphoma and multiple myeloma. Exemplary preferred peptide and polypeptide compounds and compositions relating to this aspect of the invention include, but are not limited to, those peptide and polypeptide compounds or compositions that comprise at least a first isolated peptide or polypeptide that comprises an amino acid sequence that is at least about 80%, about 81%, about 82%, about 83%, about 84%, about 85%, about 86%, about 87%, about 88%, about 89%, about 90%, about 91%, about 92%, about 93%, about 94%, about 95%, about 96%, about 97%, about 98%, or about 99% identical to the amino acid sequence of any one of SEQ ID NO: 14 to SEQ ID NO:869, and those that comprise at least a first coding region that comprises an amino acid sequence that is at least about 85%, about 86%, about 87%, about 88%, about 89%, about 90%, about 91%, about 92%, about 93%, or about 94% identical to the amino acid sequence of any one of SEQ ID NO:14 to SEQ ID NO:869, and even those sequences that comprise at least a first coding region that comprises an amino acid sequence that is at least about 95%, about 96%, about 97%, about 98%, or about 99% identical to the amino acid sequence of any one of SEQ ID NO:14 to SEQ ID NO:869.

[0021] Exemplary peptides of the present invention may be of any suitable length, depending upon the particular application thereof, and encompass those peptides that are about 9, about 10, about 15, about 20, about 25, about 30, about 35, about 40, about 45, about 50, about 55, about 60, about 65, about 70, about 75, about 80, about 85, about 90, about 95, or about 100 or so amino acids in length. Of course, the peptides of the invention may also encompass any intermediate lengths or integers within the stated ranges.

[0022] Exemplary polypeptides and proteins of the present invention may be of any suitable length, depending upon the particular application thereof, and encompass those polypeptides and proteins that are about 100, about 150, about 200, about 250, about 300, about 350, or about 400 or so amino acids in length. Of course, the polypeptides and proteins of the invention may also encompass any intermediate lengths or integers within the stated ranges.

[0023] The peptides, polypeptides, proteins, antibodies, and antigen binding fragments of the present invention will preferably comprise a sequence of at least about 5, 10, 15, 20, 25, 30, 35, 40, 45, 50, 55, 60, 65, 70, 75, 80, 85, 90, 95 or 100 contiguous amino acids from any one of SEQ ID NO:14 to SEQ ID NO:869

[0024] Furthermore, the polypeptides, proteins, antibodies, and antigen binding fragments of the present invention will even more preferably comprise at least a first isolated coding region that comprises a sequence of at least about 100, 110, 120, 130, 140, 150, 160, 170, 180, 190, or 200 contiguous amino acids from any one of SEQ ID NO:14 to SEQ ID NO:869.

[0025] Likewise, the polypeptides, proteins, antibodies, and antigen binding fragments of the present invention may comprise at least a first isolated coding region that comprises a substantially longer sequence, such as for example, one of at least about 200, 220, 240, 260, 280, or 300 or more contiguous amino acids from any one of SEQ ID NO:14 to SEQ ID NO:869.

[0026] In illustrative embodiments, and particularly in those embodiments concerning methods and compositions relating to B cell leukemias, lymphomas and multiple myelomas, the polypeptides of the invention comprise an amino acid sequence that (a) comprises, (b) consists essentially of, or (c) consists of, the amino acid sequence of SEQ ID NO:14 to SEQ ID NO:869.

[0027] The polypeptides and proteins of the invention preferably comprise an amino acid sequence that is encoded by at least a first nucleic acid segment that comprises an at least 21, 22, 23, 24, 25, 26, 27, 28, 29, or 30 contiguous nucleotide sequence of any one of SEQ ID NO:1 to SEQ ID NO:13.

[0028] The polypeptides and proteins of the invention may also preferably comprise an amino acid sequence encoded by at least a first nucleic acid segment that comprises an at least about 31, 32, 33, 34, 35, 36, 37, 38, 39, or 40 contiguous nucleotide sequence of any one of SEQ ID NO: 1 to SEQ ID NO: 13. The polypeptides and proteins of the invention may also preferably comprise one or more coding regions that comprise an amino acid sequence encoded by at least a first nucleic acid segment that comprises an at least about 41, 42, 43, 44, 45, 46, 47, 48, 49, or 50 contiguous nucleotide sequence of any one of SEQ ID NO:1 to SEQ ID NO:13. The polypeptides and proteins of the invention may also preferably comprise one or more coding regions that comprise an amino acid sequence encoded by at least a first nucleic acid segment that comprises an at least about 51, 52, 53, 54, 55, 56, 57, 58, 59, or 60 contiguous nucleotide sequence of any one of SEQ ID NO:1 to SEQ ID NO:13. The polypeptides and proteins of the invention may also preferably comprise one or more coding regions that comprise an amino acid sequence encoded by at least a first nucleic acid segment that comprises an at least about 70, 80, 90, 100, 110, 120, 130, 140 or 150 contiguous nucleotide sequence of any one of SEQ ID NO:1 to SEQ ID NO:13. The polypeptides and proteins of the invention may also preferably comprise one or more coding regions that comprise an amino acid sequence encoded by at least a first nucleic acid segment that comprises an at least about 175, 200, 225, 250, 275, 300, 325, 350, 375, or 400 contiguous nucleotide sequence of any one of SEQ ID NO:1 to SEQ ID NO:13. The polypeptides and proteins of the invention may also preferably comprise one or more coding regions that comprise an amino acid sequence encoded by at least a first nucleic acid segment that comprises an at least about 500, 600, 700, 800, 900, 1000, 1100, 1200, 1300, 1400, or 1500 contiguous nucleotide sequence of any one of SEQ ID NO:1 to SEQ ID NO:13.

[0029] In a second important embodiment, there is provided a composition comprising at least a first isolated polynucleotide that comprises a nucleic acid sequence that is at least about 80%, about 81%, about 82%, about 83%, about 84%, about 85%, about 86%, about 87%, about 88%, about 89%, about 90%, about 91%, about 92%, about 93%, about 94%, about 95%, about 96%, about 97%, about 98%, or about 99% identical to the nucleic acid sequence of any one of SEQ ID NO: 1 to SEQ ID NO: 13. Exemplary preferred sequences are those that comprise a nucleic acid sequence that is at least about 85%, about 86%, about 87%, about 88%, about 89%, about 90%, about 91%, about 92%, about 93%, or about 94% identical to the nucleic acid sequence of any one of SEQ ID NO:1 to SEQ ID NO:13, with those sequences that comprise at least a nucleic acid sequence that is at least about 95%, about 96%, about 97%, about 98%, or about 99% identical to the nucleic acid sequence of any one of SEQ ID NO:1 to SEQ ID NO:13 being examples of particularly preferred sequences in the practice of the present invention.

[0030] In embodiments that relate particularly to compositions and methods for the detection, diagnosis, prognosis, prophylaxis, treatment, and therapy of B cell leukemias, lymphomas, and multiple myelomas exemplary preferred polynucleotide compositions include those compositions that comprise at least a first isolated nucleic acid segment that comprises a sequence that is at least about 80%, about 81%, about 82%, about 83%, about 84%, about 85%, about 86%, about 87%, about 88%, about 89%, about 90%, about 91%, about 92%, about 93%, about 94%, about 95%, about 96%, about 97%, about 98%, or about 99% identical to the nucleic acid sequence of any one of SEQ ID NO:1to SEQ ID NO:13.

[0031] Such polynucleotides will preferably comprise one or more isolated coding region, each of which may (a) comprise, (b) consist essentially of, or (c) consist of, the nucleic acid sequence of SEQ ID NO:1 to SEQ ID NO:13.

[0032] Exemplary polynucleotides of the present invention may be of any suitable length, depending upon the particular application thereof, and encompass those polynucleotides that (a) are at least about, or (b) comprise at least a first isolated nucleic acid segment that is at least about 27, 30, 40, 50, 60, 70, 80, 90, 100, 110, 120, 120, 140, 150, 160, 170, 180, 190, 200, 210, 220, 230, 240, 250, 260, 270, 280, 290, 300, 320, 340, 360, 380, 400, 420, 440, 460, 480, 500, 520, 540, 560, 580, 600, 625, 650, 675, 700, 750, 800, 850, 900, 950, or 1000 or so nucleic acids in length, as well as longer polynucleotides that (a) are at least about, or (b) comprise at least a first isolated nucleic acid segment that is at least about 1000, 1025, 1050, 1075, 1100, 150, 1200, 1250, 1300, 1350, 1400, 1450, 1500, 1550, 1600, 1650, 1700, 1750, 1800, 1850, 1900, 1950, 2000, 2100, 2200, 2300, 2400, 2500, 2600, 2700, 2800, 2900, or 3000 or so nucleic acids in length, as well as substantially larger polynucleotides. Of course, the polynucleotides and nucleic acid segments of the invention may also encompass any intermediate lengths or integers within the stated ranges.

[0033] The compositions of the present invention may comprise a single polypeptide or polynucleotide, or alternatively, may comprise two or more such hematological malignancy compounds, such as for example, two or more polypeptides, two or more polynucleotides, or even combinations of one or more peptides or polypeptides, along with one or more polynucleotides. When two or more polypeptides are contemplated for particular applications, the second and/or third and/or fourth, etc. isolated peptides and/or polypeptides will preferably comprise an amino acid sequence that is at least about 91%, 93%, 95%, 97%, or 99% identical to the amino acid sequence of any one of SEQ ID NO: 14 to SEQ ID NO:869. Alternatively, the polynucleotides of the invention may comprise one or more coding regions that encode a first fusion protein or peptide, such as an adjuvant-coding region fused in correct reading frame to one or more of the disclosed hematological malignancy peptides or polypeptides. Alternatively, the fusion protein may comprise a hematological malignancy polypeptide or peptide fused, in correct reading frame, to a detectable protein or peptide, or to an immunostimulant protein or peptide, or other such construct. Fusion proteins such as these are particularly useful in those embodiments relating to diagnosis, detection, and therapy of one or more of the hematological malignancies as discussed herein.

[0034] The invention also provides a composition comprising at least a first hybridoma cell line that produces a monoclonal antibody having immunospecificity for one or more of the peptides or polypeptides as disclosed herein, or at least a first monoclonal antibody, or an antigen-binding fragment thereof, that has immunospecificity for such a peptide or polypeptide. The antigen binding fragments may comprise a light chain variable region, a heavy-chain variable region, a Fab fragment, a F(ab)₂ fragment, an Fv fragment, an scFv fragment, or an antigen-binding fragment of such an antibody.

[0035] The invention also provides a composition comprising at least a first isolated antigen-presenting cell that expresses a peptide or polypeptide as disclosed herein, or a plurality of isolated T cells that specifically react with such a peptide or polypeptide. Such pluralities of isolated T cells may be stimulated or expanded by contacting the T cells with one or more peptides or polypeptides as described herein. The T cells may be cloned prior to expansion, and may be obtained from bone marrow, a bone marrow fraction, peripheral blood, or a peripheral blood fraction from a healthy mammal, or from a mammal that is afflicted with at least a first hematological malignancy such as leukemia or lymphoma.

[0036] As described above, the isolated polypeptides of the invention may be on the order of from 9 to about 1000 amino acids in length, or alternatively, may be on the order of from 50 to about 900 amino acids in length, from 75 to about 800 amino acids in length, from 100 to about 700 amino acids in length, or from 125 to about 600 amino acids in length, or any other such suitable range.

[0037] The isolated nucleic acid segments that encode such isolated polypeptides may be on the order of from 27 to about 10,000 nucleotides in length, from 150 to about 8000 nucleotides in length, from 250 to about 6000 nucleotides in length, from 350 to about 4000 nucleotides in length, or from 450 to about 2000 nucleotides in length, or any other such suitable range.

[0038] The nucleic acid segment may be operably positioned under the control of at least a first heterologous, recombinant promoter, such as a tissue-specific, cell-specific, inducible, or otherwise regulated promoter. Such promoters may be further controlled or regulated by the presence of one or more additional enhancers or regulatory regions depending upon the particular cell type in which expression of the polynucleotide is desired. The polynucleotides and nucleic acid segments of the invention may also be comprised within a vector, such as a plasmid, or viral vector. The polypeptides and polynucleotides of the invention may also be comprised within a host cell, such as a recombinant host cell, or a human host cell such as a blood or bone marrow cell.

[0039] The polynucleotides of the invention may comprise at least a first isolated nucleic acid segment operably attached, in frame, to at least a second isolated nucleic acid segment, such that the polynucleotide encodes a fusion protein in which the first peptide or polypeptide is linked to the second peptide or polypeptide.

[0040] The polypeptides of the present invention may comprise a contiguous amino acid of any suitable length, such as for example, those of about 2000, about 1900, about 1850, about 1800, about 1750, about 1700, about 1650, about 1600, about 1550, about 1500, about 1450, about 1400, about 1350, about 1300, about 1250, about 1200, about 1150, about 1100 amino acids, or about 1000 or so amino acids in length. Likewise, the polypeptides and peptides of the present invention may comprise slightly shorter contiguous amino acid coding regions, such as for example, those of about 950, about 900, about 850, about 800, about 750, about 700, about 650, about 600, about 550, about 500, about 450, about 400, about 350, about 300, about 250, about 200, about 150, or even about 100 amino acids or so in length.

[0041] In similar fashion, the polypeptides and peptides of the present invention may comprise even smaller contiguous amino acid coding regions, such as for example, those of about 95, about 90, about 85, about 80, about 75, about 70, about 65, about 60, about 55, about 50, about 45, about 40, about 35, about 30, about 25, about 20, about 15, or even about 9 amino acids or so in length.

[0042] In all such embodiments, those peptides and polypeptides having intermediate lengths including all integers within the preferred ranges (e.g., those peptides and polypeptides that comprise at least a first coding region of at least about 94, about 93, about 92, about 91, about 89, about 88, about 87, about 86, about 84, about 83, about 82, about 81, about 79, about 78, about 77, about 76, about 74, about 73, about 72, about 71, about 69, about 68, about 67, about 66 or so amino acids in length, etc.) are all contemplated to fall within the scope of the present invention.

[0043] In particular embodiments, the peptides and polypeptides of the present invention may comprise a sequence of at least about 9, or about 10, or about 11, or about 12, or about 13, or about 14, or about 15, or about 16, or about 17, or about 18, or about 19, or about 20, or about 21, or about 22, or about 23, or about 24, or about 25, or about 26, or about 27, or about 28, or about 29, or about 30, or about 31, or about 32, or about 33, or about 34, or about 35, or about 36, or about 37, or about 38, or about 39, or about 40, or about 41, or about 42, or about 43, or about 44, or about 45, or about 46, or about 47, or about 48, or about 49, or about 50 contiguous amino acids as disclosed in any one or more of SEQ ID NO: 14 through SEQ ID NO:869 herein.

[0044] In other embodiments, the peptides and polypeptides of the present invention may comprise a sequence of at least about 51, or about 52, or about 53, or about 54, or about 55, or about 56, or about 57, or about 58, or about 59, or about 60, or about 61, or about 62, or about 63, or about 64, or about 65, or about 66, or about 67, or about 68, or about 69, or about 70, or about 71, or about 72, or about 73, or about 74, or about 75, or about 76, or about 77, or about 78, or about 79, or about 80, or about 81, or about 82, or about 83, or about 84, or about 85, or about 86, or about 87, or about 88, or about 89, or about 90, about 91, or about 92, or about 93, or about 94, or about 95, or about 96, or about 97, or about 98, or about 99, or 100 contiguous amino acids as disclosed in any one or more of SEQ ID NO: 14 through SEQ ID NO:869 herein.

[0045] In still other embodiments, the preferred peptides and polypeptides of the present invention comprise a sequence of at least about 100, 125, 150, 175, 200, 225, 250, 275, 300, 325, 350, 375, or 400 or more contiguous amino acids as disclosed in any one or more of SEQ ID NO: 14 through SEQ ID NO:869 herein.

[0046] The polypeptides of the invention typically will comprise at least a first contiguous amino acid sequence according to any one of SEQ ID NO:14 through SEQ ID NO:869, but may also, optionally comprise at least a second, at least a third, or even at least a fourth or greater contiguous amino acid sequence according to any one of SEQ ID NO: 14 through SEQ ID NO:869. A single polypeptide may contain only a single coding region, or alternatively, a single polypeptide may comprise a plurality of identical or distinctly different contiguous amino acid sequences in accordance with any one of SEQ ID NO:14 through SEQ ID NO:869. In fact, the polypeptide may comprise a plurality of the same contiguous amino acid sequences, or they may comprise one or more different contiguous amino acid sequences disclosed in SEQ ID NO:14 through SEQ ID NO:869. For example, a single polypeptide can comprise a single contiguous amino acid sequence from one or more of SEQ ID NO:14 through SEQ ID NO:869, or alternatively, may comprise two or more distinctly different contiguous amino acid sequences from one or more of SEQ ID NO:14 through SEQ ID NO:869. In fact, the polypeptide may comprise 2, 3, 4, or even 5 distinct contiguous amino sequences as disclosed in any of SEQ ID NO: 14 through SEQ ID NO:869. Alternatively, a single polypeptide may comprise 2, 3, 4, or even 5 distinct coding regions. For example, a polypeptide may comprise at least a first coding region that comprises a first contiguous amino acid sequence as disclosed in any of SEQ ID NO:14 through SEQ ID NO:869, and at least a second coding region that comprises a second contiguous amino acid sequence as disclosed in any of SEQ ID NO:14 through SEQ ID NO:869. In contrast, a polypeptide may comprise at least a first coding region that comprises a first contiguous amino acid sequence as disclosed in any of SEQ ID NO: 14 through SEQ ID NO:869, and at least a second coding region that comprises a second distinctly different peptide or polypeptide, such as for example, an adjuvant or an immunostimulant peptide or polypeptide.

[0047] In such cases, the two coding regions may be separate on the same polypeptide, or the two coding regions may be operatively attached, each in the correct reading frame, such that a fusion polypeptide is produced, in which the first amino acid sequence of the first coding region is linked to the second amino acid sequence of the second coding region.

[0048] Throughout this disclosure, a phrase such as “a sequence as disclosed in SEQ ID NO:1 to SEQ ID NO:4” is intended to encompass any and all contiguous sequences disclosed by any one of these sequence identifiers. That is to say, “a sequence as disclosed in any of SEQ ID NO:1 through SEQ ID NO:4” means any sequence that is disclosed in any one of SEQ ID NO:1, SEQ ID NO:2, SEQ ID NO:3, or SEQ ID NO:4. Likewise, “a sequence as disclosed in any of SEQ ID NOs:25 to 37” means any sequence that is disclosed in any one of SEQ ID NO:25, SEQ ID NO:26, SEQ ID NO:27, SEQ ID NO:28, SEQ ID NO:29, SEQ ID NO:30, SEQ ID NO:31, SEQ ID NO:32, SEQ ID NO:33, SEQ ID NO:34, SEQ ID NO:35, SEQ ID NO:36, or SEQ ID NO:37, and so forth.

[0049] Likewise, “at least a first sequence from any one of SEQ ID NO:55 to SEQ ID NO:62” is intended to refer to a first sequence that is disclosed in any one of SEQ ID NO:55, SEQ ID NO:56, SEQ ID NO:57, SEQ ID NO:58, SEQ ID NO:59, SEQ ID NO:60, SEQ ID NO:61, or SEQ ID NO:62.

[0050] It will also be understood that the kits, and compositions of the present invention comprise in an overall and general sense at least one or more particular polynucleotides, polypeptides, and peptides that comprise one or more contiguous sequence regions from one or more of the nucleic acid sequences disclosed herein in SEQ ID NO:1 through SEQ ID NO:13 or from one or more of the amino acid sequences disclosed herein in SEQ ID NO:14 through SEQ ID NO:869, and that such peptide, polypeptide and polynucleotide compositions may be used in one or more of the particular methods and uses disclosed herein for the diagnosis, detection, prophylaxis, and therapy of one or more hematological cancers, and in particular, lymphomas of a variety of specific types. It will also be understood to the skilled artisan having benefit of the teachings of the present Specification, that the peptide and polypeptide compositions may be used to generate a T cell or an immune response in an animal, and that such compositions may also be administered to an animal from which immunospecific antibodies and antigen binding fragments may be isolated or identified that specifically bind to such peptides or polypeptides. Such an artisan will also recognize that the polynucleotides identified by the present disclosure may be used to produce such peptides, polypeptides, antibodies, and antigen binding fragments, by recombinant protein production methodologies that are also within the capability of the skilled artisan having benefit of the specific amino acid and nucleic acid sequences provided herein.

[0051] Likewise, it will be understood by a skilled artisan in the field, that one or more of the disclosed compositions may used in one or more diagnostic or detection methodologies to identify certain antibodies, peptides, polynucleotides, or polypeptides in a biological sample, in a host cell, or even within the body or tissues of an animal. It will be understood by a skilled artisan in the field, that one or more of the disclosed nucleic acid or amino acid compositions may used in the preparation or manufacture of one or more medicaments for use in the diagnosis, detection, prognosis, prophylaxis, or therapy of one or more hematological malignancies in an animal, and particularly those malignant conditions disclosed and claimed herein.

[0052] It will also be readily apparent to those of skill in the art, that the methods, kits, and uses, of the present invention preferably employ one or more of the compounds and/or compositions disclosed herein that comprise one or more contiguous nucleotide sequences as may be presented in SEQ ID NO: 1 through SEQ ID NO: 13 of the attached sequence listing.

[0053] Likewise, it will also be readily apparent to those of skill in the art, that the methods, kits, and uses, of the present invention may also employ one or more of the compounds and compositions disclosed herein that comprise one or more contiguous amino acid sequences as may be presented in SEQ ID NO: 14 through SEQ ID NO:869 of the attached sequence listing.

### BRIEF DESCRIPTION OF THE DRAWINGS AND THE APPENDICES

[0054] The invention may be understood by reference to the following description taken in conjunction with the accompanying drawings, in which like reference numerals identify like elements, and in which:

[0055] FIG. 1 illustrates a schematic outline of the microarray chip technology approach used to identify the cDNA targets of the present invention as described Section 5.1;

[0056] FIG. 2 illustrates a schematic outline of the general protocol for in vitro whole gene CD8⁺ T cell priming procedure used to generate antigen-specific lines and to identify clones of interest;

[0057] FIG. 3 illustrates a schematic outline of the general protocol for in vitro whole gene CD4⁺ T cell priming procedure used to generate antigen-specific lines and to identify clones of interest;

[0058] FIG. 4 illustrates the results of Coronin 1A mRNA expression in lymphoma patients and normal tissues as determined by real-time PCR.

[0059] FIG. 5 illustrates the results of TCL extended normal panel.

[0060] FIG. 6 is a diagram of the genomic locus encoding LY1448 protein indicating the positions of exons and introns. Also diagramed are the exons contained in the LY1448 protein, the alternatively spliced fragment LS 1384258.1 and LY1448P, and the exons in SPAP1.

[0061] FIG. 7 illustrates the results of analyzing SEQ ID NO:14 with the program TSITES.

[0062] FIG. 8 illustrates the results of a western blot containing whole cell lysates of HEK293 cells transiently transfected with control vectors and a recombinant vector encoding a LY1448-FLAG fusion protein and probed with an anti-FLAG mAb.

[0063] FIG. 9 illustrates the results of cell surface labeling experiment. HEK293 cells, transiently transfected with the recombinant vector LY1448P-FLAG/pCEP4, were biotinylated on the cell surface. The cells were washed and lysed and the FLAG fusion proteins were immunoprecipitated with anti-FLAG Sepharose, were separated on polyacrylamide gels, were electrobloted and reacted with avidin-HRP and ECL reagent.

### DESCRIPTION OF ILLUSTRATIVE EMBODIMENTS

[0064] In order that the invention herein described may be more fully understood, the following description of various illustrative embodiments is set forth.

[0065] The present invention is generally directed to compositions and methods for the immunotherapy and diagnosis of Hematological malignancies, such as B cell leukemias and lymphomas and multiple myelomas.

### 4.1 METHODS OF NUCLEIC ACID DELIVERY AND DNA TRANSFECTION

[0066] In certain embodiments, it is contemplated that one or more RNA or DNA and/or substituted polynucleotide compositions disclosed herein will be used to transfect an appropriate host cell. Technology for introduction of RNAs and DNAs, and vectors comprising them into suitable host cells is well known to those of skill in the art. In particular, such polynucleotides may be used to genetically transform one or more host cells, when therapeutic administration of one or more active peptides, compounds or vaccines is achieved through the expression of one or more polynucleotide constructs that encode one or more therapeutic compounds of interest.

[0067] A variety of means for introducing polynucleotides and/or polypeptides into suitable target cells is known to those of skill in the art. For example, when polynucleotides are contemplated for delivery to cells, several non-viral methods for the transfer of expression constructs into cultured mammalian cells are available to the skilled artisan for his use. These include, for example, calcium phosphate precipitation (Graham and Van Der Eb, 1973; Chen and Okayama, 1987; Rippe et al., 1990); DEAE-dextran precipitation (Gopal, 1985); electroporation (Wong and Neumann, 1982; Fromm et al., 1985; Tur-Kaspa et al., 1986; Potter et al., 1984; Suzuki et al., 1998; Vanbever et al., 1998), direct microinjection (Capecchi, 1980; Harland and Weintraub, 1985), DNA-loaded liposomes Nicolau and Sene, 1982; Fraley et al., 1979; Takakura, 1998) and lipofectamine-DNA complexes, cell sonication (Fechheimer et al., 1987), gene bombardment using high velocity microprojectiles (Yang et al., 1990; Klein et al., 1992), and receptor-mediated transfection (Curiel et al., 1991; Wagner et al., 1992; Wu and Wu, 1987; Wu and Wu, 1988). Some of these techniques may be successfully adapted for in vivo or ex vivo use.

[0068] A bacterial cell, a yeast cell, or an animal cell transformed with one or more of the disclosed expression vectors represent an important aspect of the present invention. Such transformed host cells are often desirable for use in the expression of the various DNA gene constructs disclosed herein. In some aspects of the invention, it is often desirable to modulate, regulate, or otherwise control the expression of the gene segments disclosed herein. Such methods are routine to those of skill in the molecular genetic arts. Typically, when increased or over-expression of a particular gene is desired, various manipulations may be employed for enhancing the expression of the messenger RNA, particularly by using an active promoter, and in particular, a tissue-specific promoter such as those disclosed herein, as well as by employing sequences, which enhance the stability of the messenger RNA in the particular transformed host cell.

[0069] Typically, the initiation and translational termination region will involve stop codon(s), a terminator region, and optionally, a polyadenylation signal. In the direction of transcription, namely in the 5′ to 3′ direction of the coding or sense sequence, the construct will involve the transcriptional regulatory region, if any, and the promoter, where the regulatory region may be either 5′ or 3′ of the promoter, the ribosomal binding site, the initiation codon, the structural gene having an open reading frame in phase with the initiation codon, the stop codon(s), the polyadenylation signal sequence, if any, and the terminator region. This sequence as a double strand may be used by itself for transformation of a microorganism or eukaryotic host, but will usually be included with a DNA sequence involving a marker, where the second DNA sequence may be joined to the expression construct during introduction of the DNA into the host.

[0070] Where no functional replication system is present, the construct will also preferably include a sequence of at least about 30 or about 40 or about 50 base pairs (bp) or so, preferably at least about 60, about 70, about 80, or about 90 to about 100 or so bp, and usually not more than about 500 to about 1000 or so bp of a sequence homologous with a sequence in the host. In this way, the probability of legitimate recombination is enhanced, so that the gene will be integrated into the host and stably maintained by the host. Desirably, the regulatory regions of the expression construct will be in close proximity to (and also operably positioned relative to) the selected therapeutic gene providing for complementation as well as the gene providing for the competitive advantage. Therefore, in the event that the therapeutic gene is lost, the resulting organism will be likely to also lose the gene providing for the competitive advantage, so that it will be unable to compete in the environment with the gene retaining the intact construct.

[0071] The selected therapeutic gene can be introduced between the transcriptional and translational initiation region and the transcriptional and translational termination region, so as to be under the regulatory control of the initiation region. This construct may be included in a plasmid, which will include at least one replication system, but may include more than one, where one replication system is employed for cloning during the development of the plasmid and the second replication system is necessary for functioning in the ultimate host, in this case, a mammalian host cell. In addition, one or more markers may be present, which have been described previously. Where integration is desired, the plasmid will desirably include a sequence homologous with the host genome.

[0072] Genes or other nucleic acid segments, as disclosed herein, can be inserted into host cells using a variety of techniques that are well known in the art. Five general methods for delivering a nucleic segment into cells have been described: (1) chemical methods (Graham and Van Der Eb, 1973); (2) physical methods such as microinjection (Capecchi, 1980), electroporation (U.S. Pat. No. 5,472,869; Wong and Neumann, 1982; Fromm et al., 1985), microprojectiles bombardment (U.S. Pat. No. 5,874,265, specifically incorporated herein by reference in its entirety), “gene gun” (Yang et al., 1990); (3) viral vectors (Eglitis and Anderson, 1988); (4) receptor-mediated mechanisms (Curiel et al., 1991; Wagner et al., 1992); and (5) bacterial-mediated transformation.

### 4.2 HEMATOLOGICAL MALIGNANCY RELATED-SPECIFIC ANTIBODIES AND ANTIGEN-BINDING FRAGMENTS THEREOF

[0073] The present invention further provides antibodies and antigen-binding fragments thereof, that specifically bind to (or are immunospecific for) at least a first peptide or peptide variant as disclosed herein. As used herein, an antibody or an antigen-binding fragment is said to “specifically bind” to a peptide if it reacts at a detectable level (within, for example, an ELISA) with the peptide, and does not react detectably with unrelated peptides or proteins under similar conditions. As used herein, “binding” refers to a non-covalent association between two separate molecules such that a “complex” is formed. The ability to bind may be evaluated by, for example, determining a binding constant for the formation of the complex. The binding constant is the value obtained when the concentration of the complex is divided by the product of the component concentrations. In the context of the present invention, in general, two compounds are said to “bind” when the binding constant for complex formation exceeds about 10³ L/mol. The binding constant maybe determined using methods well known in the art.

[0074] Any agent that satisfies the above requirements may be a binding agent. In illustrative embodiments, a binding agent is an antibody or an antigen-binding fragment thereof. Such antibodies may be prepared by any of a variety of techniques known to those of ordinary skill in the art (Harlow and Lane, 1988). In general, antibodies can be produced by cell culture techniques, including the generation of monoclonal antibodies as described herein, or via transfection of antibody genes into suitable bacterial or mammalian cell hosts, in order to allow for the production of recombinant antibodies. In one technique, an immunogen comprising the peptide is initially injected into any of a wide variety of mammals (e.g., mice, rats, rabbits, sheep or goats). In this step, the peptides of this invention may serve as the immunogen without modification. Alternatively, particularly for relatively short peptides, a superior immune response may be elicited if the peptide is joined to a carrier protein, such as bovine serum albumin or keyhole limpet hemocyanin. The immunogen is injected into the animal host, preferably according to a predetermined schedule incorporating one or more booster immunizations, and the animals are bled periodically. Polyclonal antibodies specific for the peptide may then be purified from such antisera by, for example, affinity chromatography using the peptide coupled to a suitable solid support.

[0075] Monoclonal antibodies specific for the antigenic peptide of interest may be prepared, for example, using the technique of Kohler and Milstein (1976) and improvements thereto. Briefly, these methods involve the preparation of immortal cell lines capable of producing antibodies having the desired specificity (i.e., reactivity with the peptide of interest). Such cell lines may be produced, for example, from spleen cells obtained from an animal immunized as described above. The spleen cells are then immortalized by, for example, fusion with a myeloma cell fusion partner, preferably one that is syngeneic with the immunized animal. A variety of fusion techniques may be employed. For example, the spleen cells and myeloma cells may be combined with a nonionic detergent for a few minutes and then plated at low density on a selective medium that supports the growth of hybrid cells, but not myeloma cells. A preferred selection technique uses HAT (hypoxanthine, aminopterin, thymidine) selection. After a sufficient time, usually about 1 to 2 weeks, colonies of hybrids are observed. Single colonies are selected and their culture supernatants tested for binding activity against the peptide. Hybridomas having high reactivity and specificity are preferred.

[0076] Monoclonal antibodies may be isolated from the supernatants of growing hybridoma colonies. In addition, various techniques may be employed to enhance the yield, such as injection of the hybridoma cell line into the peritoneal cavity of a suitable vertebrate host, such as a mouse. Monoclonal antibodies may then be harvested from the ascites fluid or the blood. Contaminants may be removed from the antibodies by conventional techniques, such as chromatography, gel filtration, precipitation, and extraction. The peptides of this invention may be used in the purification process in, for example, an affinity chromatography step.

[0077] Within certain embodiments, the use of antigen-binding fragments of antibodies may be preferred. Such fragments include Fab fragments, which may be prepared using standard techniques. Briefly, immunoglobulins may be purified from rabbit serum by affinity chromatography on Protein A bead columns (Harlow and Lane, 1988) and digested by papain to yield Fab and Fc fragments. The Fab and Fc fragments may be separated by affinity chromatography on Protein A bead columns.

[0078] Monoclonal antibodies and fragments thereof may be coupled to one or more therapeutic agents. Suitable agents in this regard include radioactive tracers and chemotherapeutic agents, which may be used, for example, to purge autologous bone marrow in vitro). Representative therapeutic agents include radionuclides, differentiation inducers, drugs, toxins, and derivatives thereof. Preferred radionuclides include ⁹⁰Y, ¹²³I, ¹²⁵I, ¹³¹I, ¹⁸⁶Re, ¹⁸⁸Re, ²¹¹At, and ²¹²Bi. Preferred drugs include methotrexate, and pyrimidine and purine analogs. Preferred differentiation inducers include phorbol esters and butyric acid. Preferred toxins include ricin, abrin, diptheria toxin, cholera toxin, gelonin, Pseudomonas exotoxin, Shigella toxin, and pokeweed antiviral protein. For diagnostic purposes, coupling of radioactive agents may be used to facilitate tracing of metastases or to determine the location of hematological malignancy related-positive tumors.

[0079] A therapeutic agent may be coupled (e.g., covalently bonded) to a suitable monoclonal antibody either directly or indirectly (e.g., via a linker group). A direct reaction between an agent and an antibody is possible when each possesses a substituent capable of reacting with the other. For example, a nucleophilic group, such as an amino or sulfhydryl group, on one may be capable of reacting with a carbonyl-containing group, such as an anhydride or an acid halide, or with an alkyl group containing a good leaving group (e.g., a halide) on the other.

[0080] Alternatively, it may be desirable to couple a therapeutic agent and an antibody via a linker group. A linker group can function as a spacer to distance an antibody from an agent in order to avoid interference with binding capabilities. A linker group can also serve to increase the chemical reactivity of a substituent on an agent or an antibody, and thus increase the coupling efficiency. An increase in chemical reactivity may also facilitate the use of agents, or functional groups on agents, which otherwise would not be possible.

[0081] It will be evident to those skilled in the art that a variety of bifunctional or polyfunctional reagents, both homo- and hetero-functional (such as those described in the catalog of the Pierce Chemical Co., Rockford, Ill.), may be employed as the linker group. Coupling may be affected, for example, through amino groups, carboxyl groups, and sulfhydryl groups or oxidized carbohydrate residues. There are numerous references describing such methodology, e.g., U.S. Pat. No. 4,671,958.

[0082] Where a therapeutic agent is more potent when free from the antibody portion of the immunoconjugates of the present invention, it may be desirable to use a linker group that is cleavable during or upon internalization into a cell. A number of different cleavable linker groups have been described. The mechanisms for the intracellular release of an agent from these linker groups include cleavage by reduction of a disulfide bond (U.S. Pat. No. 4,489,710), by irradiation of a photolabile bond (U.S. Pat. No. 4,625,014), by hydrolysis of derivatized amino acid side chains (U.S. Pat. No. 4,638,045), by serum complement-mediated hydrolysis (U.S. Pat. No. 4,671,958), and acid-catalyzed hydrolysis (U.S. Pat. No. 4,569,789).

[0083] It may be desirable to couple more than one agent to an antibody. In one embodiment, multiple molecules of an agent are coupled to one antibody molecule. In another embodiment, more than one type of agent may be coupled to one antibody. Regardless of the particular embodiment, immunoconjugates with more than one agent may be prepared in a variety of ways. For example, more than one agent may be coupled directly to an antibody molecule, or linkers that provide multiple sites for attachment can be used. Alternatively, a carrier can be used. A carrier may bear the agents in a variety of ways, including covalent bonding either directly or via a linker group. Suitable carriers include proteins such as albumins (U.S. Pat. No. 4,507,234), peptides and polysaccharides such as aminodextran (U.S. Pat. No. 4,699,784). A carrier may also bear an agent by noncovalent bonding or by encapsulation, such as within a liposome vesicle (U.S. Pat. No. 4,429,008 and U.S. Pat. No. 4,873,088). Carriers specific for radionuclide agents include radiohalogenated small molecules and chelating compounds. For example, U.S. Pat. No. 4,735,792 discloses representative radiohalogenated small molecules and their synthesis. A radionuclide chelate may be formed from chelating compounds that include those containing nitrogen and sulfur atoms as the donor atoms for binding the metal, or metal oxide, radionuclide. For example, U.S. Pat. No. 4,673,562 discloses representative chelating compounds and their synthesis.

[0084] A variety of routes of administration for the antibodies and immunoconjugates may be used. Typically, administration will be intravenous, intramuscular, subcutaneous or in the bed of a resected tumor. It will be evident that the precise dose of the antibody/immunoconjugate will vary depending upon the antibody used, the antigen density on the tumor, and the rate of clearance of the antibody.

[0085] Also provided herein are anti-idiotypic antibodies that mimic an immunogenic portion of hematological malignancy related. Such antibodies may be raised against an antibody, or an antigen-binding fragment thereof, that specifically binds to an immunogenic portion of hematological malignancy related, using well-known techniques. Anti-idiotypic antibodies that mimic an immunogenic portion of hematological malignancy related are those antibodies that bind to an antibody, or antigen-binding fragment thereof, that specifically binds to an immunogenic portion of hematological malignancy related, as described herein.

[0086] Irrespective of the source of the original hematological malignancy related peptide-specific antibody, the intact antibody, antibody multimers, or any one of a variety of functional, antigen-binding regions of the antibody may be used in the present invention. Exemplary functional regions include scFv, Fv, Fab′, Fab and F(ab′)₂ fragments of the hematological malignancy related peptide-specific antibodies. Techniques for preparing such constructs are well known to those in the art and are further exemplified herein.

[0087] The choice of antibody construct may be influenced by various factors. For example, prolonged half-life can result from the active readsorption of intact antibodies within the kidney, a property of the Fc piece of immunoglobulin. IgG based antibodies, therefore, are expected to exhibit slower blood clearance than their Fab′ counterparts. However, Fab′ fragment-based compositions will generally exhibit better tissue penetrating capability.

[0088] Antibody fragments can be obtained by proteolysis of the whole immunoglobulin by the non-specific thiol protease, papain. Papain digestion yields two identical antigen-binding fragments, termed “Fab fragments,” each with a single antigen-binding site, and a residual “Fc fragment.”

[0089] Papain should first be activated by reducing the sulfhydryl group in the active site with cysteine, 2-mercaptoethanol or dithiothreitol. Heavy metals in the stock enzyme should be removed by chelation with EDTA (2 mM) to ensure maximum enzyme activity. Enzyme and substrate are normally mixed together in the ratio of 1:100 by weight. After incubation, the reaction can be stopped by irreversible alkylation of the thiol group with iodoacetamide or simply by dialysis. The completeness of the digestion should be monitored by SDS-PAGE and the various fractions separated by Protein A-Sepharose or ion exchange chromatography.

[0090] The usual procedure for preparation of F(ab′)₂ fragments from IgG of rabbit and human origin is limited proteolysis by the enzyme pepsin. The conditions, 100× antibody excess wt./wt. in acetate buffer at pH 4.5, 37° C., suggest that antibody is cleaved at the C-terminal side of the inter-heavy-chain disulfide bond. Rates of digestion of mouse IgG may vary with subclass and it may be difficult to obtain high yields of active F(ab′)₂ fragments without some undigested or completely degraded IgG. In particular, IgG_{2b} is highly susceptible to complete degradation. The other subclasses require different incubation conditions to produce optimal results, all of which is known in the art.

[0091] Pepsin treatment of intact antibodies yields an F(ab′)₂ fragment that has two antigen-combining sites and is still capable of cross-linking antigen. Digestion of rat IgG by pepsin requires conditions including dialysis in 0.1 M acetate buffer, pH 4.5, and then incubation for four hrs with 1% wt./wt. pepsin; IgG₁ and IgG₂ₐ digestion is improved if first dialyzed against 0.1 M formate buffer, pH 2.8, at 4° C., for 16 hrs followed by acetate buffer. IgG_{2b} gives more consistent results with incubation in staphylococcal V8 protease (3% wt./wt.) in 0.1 M sodium phosphate buffer, pH 7.8, for four hrs at 37° C.

[0092] A Fab fragment also contains the constant domain of the light chain and the first constant domain (CH1) of the heavy chain. Fab′ fragments differ from Fab fragments by the addition of a few residues at the carboxyl terminus of the heavy chain CH1 domain including one or more cysteine(s) from the antibody hinge region. F(ab′)₂ antibody fragments were originally produced as pairs of Fab′ fragments that have hinge cysteines between them. Other chemical couplings of antibody fragments are also known.

[0093] The term “variable,” as used herein in reference to antibodies, means that certain portions of the variable domains differ extensively in sequence among antibodies, and are used in the binding and specificity of each particular antibody to its particular antigen. However, the variability is not evenly distributed throughout the variable domains of antibodies. It is concentrated in three segments termed “hypervariable regions,” both in the light chain and the heavy chain variable domains.

[0094] The more highly conserved portions of variable domains are called the framework region (FR). The variable domains of native heavy and light chains each comprise four FRs (FR1, FR2, FR3 and FR4, respectively), largely adopting a β-sheet configuration, connected by three hypervariable regions, which form loops connecting, and in some cases, forming part of, the β-sheet structure.

[0095] The hypervariable regions in each chain are held together in close proximity by the FRs and, with the hypervariable regions from the other chain, contribute to the formation of the antigen-binding site of antibodies (Kabat et al., 1991, specifically incorporated herein by reference). The constant domains are not involved directly in binding an antibody to an antigen, but exhibit various effector functions, such as participation of the antibody in antibody-dependent cellular toxicity.

[0096] The term “hypervariable region,” as used herein, refers to the amino acid residues of an antibody that are responsible for antigen-binding. The hypervariable region comprises amino acid residues from a “complementarity determining region” or “CDR” (i.e. residues 24-34 (L1), 50-56 (L2) and 89-97 (L3) in the light chain variable domain and 31-35 (HI), 50-56 (H2) and 95-102 (H3) in the heavy chain variable domain (Kabat et al., 1991, specifically incorporated herein by reference) and/or those residues from a “hypervariable loop” (i.e., residues 26-32 (L1), 50-52(L2) and 91-96 (L3) in the light chain variable domain and 26-32 (H1i), 53-55 (H2) and 96-101 (H3) in the heavy chain variable domain). “Framework” or “FR” residues are those variable domain residues other than the hypervariable region residues as herein defined.

[0097] An “Fv” fragment is the minimum antibody fragment that contains a complete antigen-recognition and binding site. This region consists of a dimer of one heavy chain and one light chain variable domain in tight, con-covalent association. It is in this configuration that three hypervariable regions of each variable domain interact to define an antigen-binding site on the surface of the V_{H}-V_{L} dimer. Collectively, six hypervariable regions confer antigen-binding specificity to the antibody. However, even a single variable domain (or half of an Fv comprising only three hypervariable regions specific for an antigen) has the ability to recognize and bind antigen, although at a lower affinity than the entire binding site.

[0098] “Single-chain Fv” or “sFv” antibody fragments comprise the V_{H} and V_{L} domains of antibody, wherein these domains are present in a single polypeptide chain. Generally, the Fv polypeptide further comprises a polypeptide linker between the V_{H} and V_{L} domains that enables the sFv to form the desired structure for antigen binding.

[0099] “Diabodies” are small antibody fragments with two antigen-binding sites, which fragments comprise a heavy chain variable domain (V_{H}) connected to a light chain variable domain (V_{L}) in the same polypeptide chain (V_{H}-V_{L}). By using a linker that is too short to allow pairing between the two domains on the same chain, the domains are forced to pair with the complementary domains of another chain and create two antigen-binding sites. Diabodies are described in European Pat. Appl. No. EP 404,097 and Intl. Pat. Appl. Publ. No. WO 93/11161, each specifically incorporated herein by reference. “Linear antibodies”, which can be bispecific or monospecific, comprise a pair of tandem Fd segments (V_{H}-C_{H}1-V_{H}-C_{H}1) that form a pair of antigen binding regions, as described in Zapata et al. (1995), specifically incorporated herein by reference.

[0100] Other types of variants are antibodies with improved biological properties relative to the parent antibody from which they are generated. Such variants, or second-generation compounds, are typically substitutional variants involving one or more substituted hypervariable region residues of a parent antibody. A convenient way for generating such substitutional variants is affinity maturation using phage display.

[0101] In affinity maturation using phage display, several hypervariable region sites (e.g., 6 to 7 sites) are mutated to generate all possible amino substitutions at each site. The antibody variants thus generated are displayed in a monovalent fashion from filamentous phage particles as fusions to the gene III product of M13 packaged within each particle. The phage-displayed variants are then screened for their biological activity (e.g., binding affinity) as herein disclosed. In order to identify candidate hypervariable region sites for modification, alanine-scanning mutagenesis can be performed on hypervariable region residues identified as contributing significantly to antigen binding.

[0102] Alternatively, or in addition, the crystal structure of the antigen-antibody complex be delineated and analyzed to identify contact points between the antibody and target. Such contact residues and neighboring residues are candidates for substitution. Once such variants are generated, the panel of variants is subjected to screening, and antibodies with analogues but different or even superior properties in one or more relevant assays are selected for further development.

[0103] In using a Fab′ or antigen binding fragment of an antibody, with the attendant benefits on tissue penetration, one may derive additional advantages from modifying the fragment to increase its half-life. A variety of techniques may be employed, such as manipulation or modification of the antibody molecule itself, and also conjugation to inert carriers. Any conjugation for the sole purpose of increasing half-life, rather than to deliver an agent to a target, should be approached carefully in that Fab′ and other fragments are chosen to penetrate tissues. Nonetheless, conjugation to non-protein polymers, such PEG and the like, is contemplated.

[0104] Modifications other than conjugation are therefore based upon modifying the structure of the antibody fragment to render it more stable, and/or to reduce the rate of catabolism in the body. One mechanism for such modifications is the use of D-amino acids in place of L-amino acids. Those of ordinary skill in the art will understand that the introduction of such modifications needs to be followed by rigorous testing of the resultant molecule to ensure that it still retains the desired biological properties. Further stabilizing modifications include the use of the addition of stabilizing moieties to either the N-terminal or the C-terminal, or both, which is generally used to prolong the half-life of biological molecules. By way of example only, one may wish to modify the termini by acylation or amination.

[0105] Moderate conjugation-type modifications for use with the present invention include incorporating a salvage receptor binding epitope into the antibody fragment. Techniques for achieving this include mutation of the appropriate region of the antibody fragment or incorporating the epitope as a peptide tag that is attached to the antibody fragment. Intl. Pat. Appl. Publ. No. WO 96/32478 is specifically incorporated herein by reference for the purposes of further exemplifying such technology. Salvage receptor binding epitopes are typically regions of three or more amino acids from one or two lops of the Fc domain that are transferred to the analogous position on the antibody fragment. The salvage receptor-binding epitopes disclosed in Intl. Pat. Appl. Publ. No. WO 98/45331 are incorporated herein by reference for use with the present invention.

### 4.3 T CELL COMPOSITIONS SPECIFIC FOR HEMATOLOGICAL MALIGNANCY-RELATED PEPTIDES

[0106] Immunotherapeutic compositions may also, or alternatively, comprise T cells specific for hematological malignancy related. Such cells may generally be prepared in vitro or ex vivo, using standard procedures. For example, T cells may be present within (or isolated from) bone marrow, peripheral blood or a fraction of bone marrow or peripheral blood of a mammal, such as a patient, using a commercially available cell separation system, such as the Isolex™ System, available from Nexell Therapeutics, Inc. (Irvine, Calif.; see also U.S. Pat. No. 5,240,856; U.S. Pat. No. 5,215,926; Intl. Pat. Appl. Publ. No. WO 89/06280; Intl. Pat. Appl. Publ. No. WO 91/16116 and Intl. Pat. Appl. Publ. No. WO 92/07243). Alternatively, T cells may be derived from related or unrelated humans, non-human mammals, cell lines or cultures.

[0107] T cells may be stimulated with hematological malignancy related peptide, polynucleotide encoding a hematological malignancy related peptide and/or an antigen-presenting cell (APC) that expresses a hematological malignancy related peptide. Such stimulation is performed under conditions and for a time sufficient to permit the generation of T cells that are specific for the hematological malignancy related peptide. Preferably, a hematological malignancy related peptide or polynucleotide is present within a delivery vehicle, such as a microsphere, to facilitate the generation of antigen-specific T cells. Briefly, T cells, which may be isolated from a patient or a related or unrelated donor by routine techniques (such as by Ficoll/Hypaque® density gradient centrifugation of peripheral blood lymphocytes), are incubated with hematological malignancy related peptide. For example, T cells may be incubated in vitro for 2-9 days (typically 4 days) at 37° C. with hematological malignancy related peptide (e.g., 5 to 25 μg/ml) or cells synthesizing a comparable amount of hematological malignancy related peptide. It may be desirable to incubate a separate aliquot of a T cell sample in the absence of hematological malignancy related peptide to serve as a control.

[0108] T cells are considered to be specific for a hematological malignancy related peptide if the T cells kill target cells coated with a hematological malignancy related peptide or expressing a gene encoding such a peptide. T cell specificity may be evaluated using any of a variety of standard techniques. For example, within a chromium release assay or proliferation assay, a stimulation index of more than two fold increase in lysis and/or proliferation, compared to negative controls, indicates T cell specificity. Such assays may be performed, for example, as described in Chen et al. (1994). Alternatively, detection of the proliferation of T cells may be accomplished by a variety of known techniques. For example, T cell proliferation can be detected by measuring an increased rate of DNA synthesis (e.g., by pulse-labeling cultures of T cells with tritiated thymidine and measuring the amount of tritiated thymidine incorporated into DNA). Other ways to detect T cell proliferation include measuring increases in interleukin-2 (IL-2) production, Ca²⁺ flux, or dye uptake, such as 3-(4,5-dimethylthiazol-2-yl)-2,5-diphenyl-tetrazolium. Alternatively, synthesis of lymphokines (such as interferon-gamma) can be measured or the relative number of T cells that can respond to a hematological malignancy related peptide may be quantified. Contact with a hematological malignancy related peptide (200 ng/ml-100 μg/ml, preferably 100 ng/ml-25 μg/ml) for 3-7 days should result in at least a two-fold increase in proliferation of the T cells and/or contact as described above for 2-3 hrs should result in activation of the T cells, as measured using standard cytokine assays in which a two-fold increase in the level of cytokine release (e.g., TNF or IFN-γ) is indicative of T cell activation (Coligan et al., 1998). hematological malignancy related specific T cells may be expanded using standard techniques. Within preferred embodiments, the T cells are derived from a patient or a related or unrelated donor and are administered to the patient following stimulation and expansion.

[0109] T cells that have been activated in response to a hematological malignancy related peptide, polynucleotide or hematological malignancy related-expressing APC may be CD4⁺ and/or CD8⁺. Specific activation of CD4⁺ or CD8⁺ T cells may be detected in a variety of ways. Methods for detecting specific T cell activation include detecting the proliferation of T cells, the production of cytokines (e.g., lymphokines), or the generation of cytolytic activity (i.e., generation of cytotoxic T cells specific for hematological malignancy related). For CD4⁺ T cells, a preferred method for detecting specific T cell activation is the detection of the proliferation of T cells. For CD8⁺ T cells, a preferred method for detecting specific T cell activation is the detection of the generation of cytolytic activity.

[0110] For therapeutic purposes, CD4⁺ or CD8⁺ T cells that proliferate in response to the hematological malignancy related peptide, polynucleotide or APC can be expanded in number either in vitro or in vivo. Proliferation of such T cells in vitro may be accomplished in a variety of ways. For example, the T cells can be re-exposed to hematological malignancy related peptide, with or without the addition of T cell growth factors, such as interleukin-2, and/or stimulator cells that synthesize a hematological malignancy related peptide. The addition of stimulator cells is preferred where generating CD8⁺ T cell responses. T cells can be grown to large numbers in vitro with retention of specificity in response to intermittent restimulation with hematological malignancy related peptide. Briefly, for the primary in vitro stimulation (IVS), large numbers of lymphocytes (e.g., greater than 4×10⁷) may be placed in flasks with media containing human serum. hematological malignancy related peptide (e.g., peptide at 10 μg/ml) may be added directly, along with tetanus toxoid (e.g., 5 μg/ml). The flasks may then be incubated (e.g., 37° C. for 7 days). For a second IVS, T cells are then harvested and placed in new flasks with 2-3×10⁷ irradiated peripheral blood mononuclear cells. hematological malignancy related peptide (e.g., 10 μg/ml) is added directly. The flasks are incubated at 37° C. for 7 days. On day 2 and day 4 after the second IVS, 2-5 units of interleukin-2 (IL-2) may be added. For a third IVS, the T cells may be placed in wells and stimulated with the individual's own EBV transformed B cells coated with the peptide. IL-2 may be added on days 2 and 4 of each cycle. As soon as the cells are shown to be specific cytotoxic T cells, they may be expanded using a 10-day stimulation cycle with higher IL-2 (20 units) on days 2, 4 and 6.

[0111] Alternatively, one or more T cells that proliferate in the presence of hematological malignancy related peptide can be expanded in number by cloning. Methods for cloning cells are well known in the art, and include limiting dilution. Responder T cells may be purified from the peripheral blood of sensitized patients by density gradient centrifugation and sheep red cell rosetting and established in culture by stimulating with the nominal antigen in the presence of irradiated autologous filler cells. In order to generate CD^{30 4} T cell lines, hematological malignancy related peptide is used as the antigenic stimulus and autologous peripheral blood lymphocytes (PBL) or lymphoblastoid cell lines (LCL) immortalized by infection with Epstein Barr virus are used as antigen-presenting cells. In order to generate CD8⁺ T cell lines, autologous antigen-presenting cells transfected with an expression vector that produces hematological malignancy related peptide may be used as stimulator cells. Established T cell lines may be cloned 2-4 days following antigen stimulation by plating stimulated T cells at a frequency of 0.5 cells per well in 96-well flat-bottom plates with 1×10⁶ irradiated PBL or LCL cells and recombinant interleukin-2 (rIL2) (50 U/ml). Wells with established clonal growth may be identified at approximately 2-3 weeks after initial plating and restimulated with appropriate antigen in the presence of autologous antigen-presenting cells, then subsequently expanded by the addition of low doses of rIL2 (10 U/ml) 2-3 days following antigen stimulation. T cell clones may be maintained in 24-well plates by periodic restimulation with antigen and rIL2 approximately every two weeks. Cloned and/or expanded cells may be administered back to the patient as described, for example, by Chang et al., (1996).

[0112] Within certain embodiments, allogeneic T-cells may be primed (i.e., sensitized to hematological malignancy related) in vivo and/or in vitro. Such priming may be achieved by contacting T cells with a hematological malignancy related peptide, a polynucleotide encoding such a peptide or a cell producing such a peptide under conditions and for a time sufficient to permit the priming of T cells. In general, T cells are considered to be primed if, for example, contact with a hematological malignancy related peptide results in proliferation and/or activation of the T cells, as measured by standard proliferation, chromium release and/or cytokine release assays as described herein. A stimulation index of more than two fold increase in proliferation or lysis, and more than three fold increase in the level of cytokine, compared to negative controls indicates T-cell specificity. Cells primed in vitro may be employed, for example, within bone marrow transplantation or as donor lymphocyte infusion.

[0113] T cells specific for hematological malignancy related can kill cells that express hematological malignancy related protein. Introduction of genes encoding T-cell receptor (TCR) chains for hematological malignancy related are used as a means to quantitatively and qualitatively improve responses to hematological malignancy related bearing leukemia and cancer cells. Vaccines to increase the number of T cells that can react to hematological malignancy related positive cells are one method of targeting hematological malignancy related bearing cells. T cell therapy with T cells specific for hematological malignancy related is another method. An alternative method is to introduce the TCR chains specific for hematological malignancy related into T cells or other cells with lytic potential. In a suitable embodiment, the TCR alpha and beta chains are cloned out from a hematological malignancy related specific T cell line and used for adoptive T cell therapy, such as described in WO 96/30516, incorporated herein by reference.

### 4.4 PHARMACEUTICAL COMPOSITIONS AND VACCINE FORMULATIONS

[0114] Within certain aspects, peptides, polynucleotides, antibodies and/or T cells may be incorporated into pharmaceutical compositions or immunogenic compositions (i.e., vaccines). Alternatively, a pharmaceutical composition may comprise an antigen-presenting cell (e.g., a dendritic cell) transfected with a hematological malignancy related polynucleotide such that the antigen-presenting cell expresses a hematological malignancy related peptide. Pharmaceutical compositions comprise one or more such compounds or cells and a physiologically acceptable carrier or excipient. Vaccines may comprise one or more such compounds or cells and an immunostimulant, such as an adjuvant or a liposome (into which the compound is incorporated). An immunostimulant may be any substance that enhances or potentiates an immune response (antibody- and/or cell-mediated) to an exogenous antigen. Examples of immunostimulants include adjuvants, biodegradable microspheres (e.g., polylactic galactide) and liposomes (into which the compound is incorporated) (U.S. Pat. No. 4,235,877). Vaccine preparation is generally described in, for example, Powell and Newman (1995). Pharmaceutical compositions and vaccines within the scope of the present invention may also contain other compounds, which may be biologically active or inactive. For example, one or more immunogenic portions of other tumor antigens may be present, either incorporated into a fusion peptide or as a separate compound, within the composition or vaccine.

[0115] Within certain embodiments, pharmaceutical compositions and vaccines are designed to elicit T cell responses specific for a hematological malignancy related peptide in a patient, such as a human. In general, T cell responses may be favored through the use of relatively short peptides (e.g., comprising less than 23 consecutive amino acid residues of a native hematological malignancy related peptide, preferably 4-16 consecutive residues, more preferably 8-16 consecutive residues and still more preferably 8-10 consecutive residues). Alternatively, or in addition, a vaccine may comprise an immunostimulant that preferentially enhances a T cell response. In other words, the immunostimulant may enhance the level of a T cell response to a hematological malignancy related peptide by an amount that is proportionally greater than the amount by which an antibody response is enhanced. For example, when compared to a standard oil based adjuvant, such as CFA, an immunostimulant that preferentially enhances a T cell response may enhance a proliferative T cell response by at least two fold, a lytic response by at least 10%, and/or T cell activation by at least two fold compared to hematological malignancy related-negative control cell lines, while not detectably enhancing an antibody response. The amount by which a T cell or antibody response to a hematological malignancy related peptide is enhanced may generally be determined using any representative technique known in the art, such as the techniques provided herein.

[0116] A pharmaceutical composition or vaccine may contain DNA encoding one or more of the peptides as described above, such that the peptide is generated in situ. As noted above, the DNA may be present within any of a variety of delivery systems known to those of ordinary skill in the art, including nucleic acid expression systems, bacterial and viral expression systems and mammalian expression systems. Numerous gene delivery techniques are well known in the art (Rolland, 1998, and references cited therein). Appropriate nucleic acid expression systems contain the necessary DNA, cDNA or RNA sequences for expression in the patient (such as a suitable promoter and terminating signal). Bacterial delivery systems involve the administration of a bacterium (such as Bacillus-Calmette-Guerrin) that expresses an immunogenic portion of the peptide on its cell surface or secretes such an epitope. In a preferred embodiment, the DNA may be introduced using a viral expression system (e.g., vaccinia or other pox virus, retrovirus, or adenovirus), which may involve the use of a non-pathogenic (defective), replication competent virus (Fisher-Hoch et al., 1989; Flexner et al., 1989; Flexner et al., 1990; U.S. Pat. No. 4,603,112, U.S. Pat. No. 4,769,330, U.S. Pat. No. 5,017,487; Intl. Pat. Appl. Publ. No. WO 89/01973; U.S. Pat. No. 4,777,127; Great Britain Patent No. GB 2,200,651; European Patent No. EP 0,345,242; Intl. Pat. Appl. Publ. No. WO 91/02805; Berkner, 1988; Rosenfeld et al., 1991; Kolls et al., 1994; Kass-Eisler et al., 1993; Guzman et al., 1993a; and Guzman et al., 1993). Techniques for incorporating DNA into such expression systems are well known to those of ordinary skill in the art. The DNA may also be “naked,” as described, for example, in Ulmer et al. (1993) and reviewed by Cohen (1993). The uptake of naked DNA may be increased by coating the DNA onto biodegradable beads, which are efficiently transported into the cells. It will be apparent that a vaccine may comprise both a polynucleotide and a peptide component. Such vaccines may provide for an enhanced immune response.

[0117] As noted above, a pharmaceutical composition or vaccine may comprise an antigen-presenting cell that expresses a hematological malignancy related peptide. For therapeutic purposes, as described herein, the antigen-presenting cell is preferably an autologous dendritic cell. Such cells may be prepared and transfected using standard techniques (Reeves et al., 1996; Tuting et al., 1998; and Nair et al., 1998). Expression of a hematological malignancy related peptide on the surface of an antigen-presenting cell may be confirmed by in vitro stimulation and standard proliferation as well as chromium release assays, as described herein.

[0118] It will be apparent to those of ordinary skill in the art having the benefit of the present teachings that a vaccine may contain pharmaceutically acceptable salts of the polynucleotides and peptides provided herein. Such salts may be prepared from pharmaceutically acceptable non-toxic bases, including organic bases (e.g., salts of primary, secondary and tertiary amines and basic amino acids) and inorganic bases (e.g., sodium, potassium, lithium, ammonium, calcium and magnesium salts). The phrases “pharmaceutically or pharmacologically acceptable” refer to molecular entities and compositions that do not produce an adverse, allergic or other significant untoward reaction when administered to an animal, or a human, as appropriate. As used herein, “pharmaceutically acceptable carrier” includes any and all solvents, dispersion media, coatings, antibacterial and antifungal agents, isotonic and absorption delaying agents and the like. The use of such media and agents for pharmaceutical active substances is well known in the art. Except insofar as any conventional media or agent is incompatible with the active ingredient, its use in the therapeutic compositions is contemplated. For human administration, preparations should meet sterility, pyrogenicity, and general safety and purity standards as required by the Food and Drug Administration Office of Biologics standards. Supplementary active ingredients can also be incorporated into the compositions.

[0119] While any suitable carrier known to those of ordinary skill in the art may be employed in the pharmaceutical compositions of this invention, the type of carrier will vary depending on the mode of administration. Compositions of the present invention may be formulated for any appropriate manner of administration, including for example, topical, oral, nasal, intravenous, intracranial, intraperitoneal, subcutaneous or intramuscular administration. For parenteral administration, such as subcutaneous injection, the carrier preferably comprises water, saline, alcohol, a fat, a wax or a buffer. For oral administration, any of the above carriers or a solid carrier, such as mannitol, lactose, starch, magnesium stearate, sodium saccharine, talcum, cellulose, glucose, sucrose, and magnesium carbonate, may be employed. Biodegradable microspheres (e.g., polylactate polyglycolate) may also be employed as carriers for the pharmaceutical compositions of this invention. Suitable biodegradable microspheres are disclosed, for example, in U.S. Pat. Nos. 4,897,268; 5,075,109; 5,928,647; 5,811,128; 5,820,883; 5,853,763; 5,814,344 and 5,942,252. For certain topical applications, formulation as a cream or lotion, using well-known components, is preferred.

[0120] Such compositions may also comprise buffers (e.g., neutral buffered saline or phosphate buffered saline), carbohydrates (e.g., glucose, mannose, sucrose or dextrans), mannitol, proteins, peptides or amino acids such as glycine, antioxidants, bacteriostats, chelating agents such as EDTA or glutathione, adjuvants (e.g., aluminum hydroxide), solutes that render the formulation isotonic, hypotonic or weakly hypertonic with the blood of a recipient, suspending agents, thickening agents and/or preservatives. Alternatively, compositions of the present invention may be formulated as a lyophilizate, or formulated with one or more liposomes, microspheres, nanoparticles, or micronized delivery systems using well-known technology.

[0121] Any of a variety of immunostimulants, such as adjuvants, may be employed in the preparation of vaccine compositions of this invention. Most adjuvants contain a substance designed to protect the antigen from rapid catabolism, such as aluminum hydroxide or mineral oil, and a stimulator of immune responses, such as lipid A, Bortadella pertussis or Mycobacterium tuberculosis derived proteins. Suitable adjuvants are commercially available as, for example, alum-based adjuvants (e.g., Alhydrogel, Rehydragel, aluminum phosphate, Algammulin, aluminum hydroxide); oil based adjuvants (Freund's Incomplete Adjuvant and Complete Adjuvant (Difco Laboratories, Detroit, Mich.), Specol, RIBI, TiterMax, Montanide ISA50 or Seppic MONTANIDE ISA 720); nonionic block copolymer-based adjuvants, cytokines (e.g., GM-CSF or Flat3-ligand); Merck Adjuvant 65 (Merck and Company, Inc., Rahway, N.J.); AS-2 (SmithKline Beecham, Philadelphia, Pa.); salts of calcium, iron or zinc; an insoluble suspension of acylated tyrosine; acylated sugars; cationically or anionically derivatized polysaccharides; polyphosphazenes; biodegradable microspheres; monophosphoryl lipid A and Quil A. Cytokines, such as GM-CSF or interleukin-2, -7, or -12, may also be used as adjuvants.

[0122] Hemocyanins and hemoerythrins may also be used in the invention. The use of hemocyanin from keyhole limpet (KLH) is particularly preferred, although other molluscan and arthropod hemocyanins and hemoerythrins may be employed. Various polysaccharide adjuvants may also be used. Polyamine varieties of polysaccharides are particularly preferred, such as chitin and chitosan, including deacetylated chitin.

[0123] A further preferred group of adjuvants are the muramyl dipeptide (MDP, N-acetylmuramyl-sc l-alanyl-d-isoglutamine) group of bacterial peptidoglycans. Derivatives of muramyl dipeptide, such as the amino acid derivative threonyl-MDP, and the fatty acid derivative MTPPE, are also contemplated.

[0124] U.S. Pat. No. 4,950,645 describes a lipophilic disaccharide-tripeptide derivative of muramyl dipeptide that is proposed for use in artificial liposomes formed from phosphatidyl choline and phosphatidyl glycerol. It is said to be effective in activating human monocytes and destroying tumor cells, but is non-toxic in generally high doses. The compounds of U.S. Pat. No. 4,950,645, and Intl. Pat. Appl. Publ. No. WO 91/16347 are also proposed for use in achieving particular aspects of the present invention.

[0125] BCG and BCG-cell wall skeleton (CWS) may also be used as adjuvants in the invention, with or without trehalose dimycolate. Trehalose dimycolate may be used itself. Azuma et al. (1988) show that trehalose dimycolate administration correlates with augmented resistance to influenza virus infection in mice. Trehalose dimycolate may be prepared as described in U.S. Pat. No. 4,579,945.

[0126] Amphipathic and surface-active agents, e.g., saponin and derivatives such as QS21 (Cambridge Biotech), form yet another group of preferred adjuvants for use with the immunogens of the present invention. Nonionic block copolymer surfactants (Rabinovich et al., 1994; Hunter et al., 1991) may also be employed. Oligonucleotides, as described by Yamamoto et al. (1988) are another useful group of adjuvants. Quil A and lentinen are also preferred adjuvants.

[0127] Superantigens are also contemplated for use as adjuvants in the present invention. “Superantigens” are generally bacterial products that stimulate a greater proportion of T lymphocytes than peptide antigens without a requirement for antigen processing (Mooney et. al., 1994). Superantigens include Staphylococcus exoproteins, such as the α, β, γ and δ enterotoxins from S. aureus and S. epidermidis, and the α, β, γ and δ E. coli exotoxins.

[0128] Common Staphylococcus enterotoxins are known as staphylococcal enterotoxin A (SEA) and staphylococcal enterotoxin B (SEB), with enterotoxins through E (SEE) being described (Rott et. al., 1992). Streptococcus pyogenes B (SEB), Clostridium perfringens enterotoxin (Bowness et. al., 1992), cytoplasmic membrane-associated protein (CAP) from S. pyogenes (Sato et. al., 1994) and toxic shock syndrome toxin-1 (TSST-1) from S. aureus (Schwab et. al., 1993) are further useful superantigens.

[0129] One group of adjuvants particularly preferred for use in the invention are the detoxified endotoxins, such as the refined detoxified endotoxin of U.S. Pat. No. 4,866,034. These refined detoxified endotoxins are effective in producing adjuvant responses in mammals.

[0130] The detoxified endotoxins may be combined with other adjuvants. Combination of detoxified endotoxins with trehalose dimycolate is contemplated, as described in U.S. Pat. No. 4,435,386. Combinations of detoxified endotoxins with trehalose dimycolate and endotoxic glycolipids is also contemplated (U.S. Pat. No. 4,505,899), as is combination of detoxified endotoxins with cell wall skeleton (CWS) or CWS and trehalose dimycolate, as described in U.S. Pat. Nos. 4,436,727, 4,436,728 and 4,505,900. Combinations of just CWS and trehalose dimycolate, without detoxified endotoxins are also envisioned to be useful, as described in U.S. Pat. No. 4,520,019.

[0131] MPL is currently one preferred immunopotentiating agent for use herein. References that concern the uses of MPL include Tomai et al. (1987), Chen et al. (1991) and Garg and Subbarao (1992), that each concern certain roles of MPL in the reactions of aging mice; Elliott et al. (1991), that concerns the D-galactosamine loaded mouse and its enhanced sensitivity to lipopolysaccharide and MPL; Chase et al. (1986), that relates to bacterial infections; and Masihi et al. (1988), that describes the effects of MPL and endotoxin on resistance of mice to Toxoplasma gondii. Fitzgerald (1991) also reported on the use of MPL to up-regulate the immunogenicty of a syphilis vaccine and to confer significant protection against challenge infection in rabbits.

[0132] Thus MPL is known to be safe for use, as shown in the above model systems. Phase-I clinical trials have also shown MPL to be safe for use (Vosika et al., 1984). Indeed, 100 μg/m² is known to be safe for human use, even on an outpatient basis (Vosika et al., 1984).

[0133] MPL generally induces polyclonal B cell activation (Baker et al., 1994), and has been shown to augment antibody production in many systems, for example, in immunologically immature mice (Baker et al., 1988); in aging mice (Tomai and Johnson, 1989); and in nude and Xid mice (Madonna and Vogel, 1986; Myers et al., 1995). Antibody production has been shown against erythrocytes (Hraba et al., 1993); T cell dependent and independent antigens; Pnu-immune vaccine (Garg and Subbarao, 1992); isolated tumor-associated antigens (U.S. Pat. No. 4,877,611); against syngeneic tumor cells (Livingston et al., 1985; Ravindranath et al., 1994a;b); and against tumor-associated gangliosides (Ravindranath et al., 1994a;b).

[0134] Another useful attribute of MPL is that is augments IgM responses, as shown by Baker et al. (1988a), who describe the ability of MPL to increase antibody responses in young mice. This is a particularly useful feature of an adjuvant for use in certain embodiments of the present invention. Myers et al. (1995) recently reported on the ability of MPL to induce IgM antibodies, by virtue T cell-independent antibody production.

[0135] In the Myers et al. (1995) studies, MPL was conjugated to the hapten, TNP. MPL was proposed for use as a carrier for other haptens, such as peptides.

[0136] MPL also activates and recruits macrophages (Verma et al., 1992). Tomai and Johnson (1989) showed that MPL-stimulated T cells enhance IL-1 secretion by macrophages. MPL is also known to activate superoxide production, lysozyme activity, phagocytosis, and killing of Candida in murine peritoneal macrophages (Chen et al., 1991).

[0137] The effects of MPL on T cells include the endogenous production of cytotoxic factors, such as TNF, in serum of BCG-primed mice by MPL (Bennett et al., 1988). Kovach et al. (1990) and Elliot et al. (1991) also show that MPL induces TNF activity. MPL is known to act with TNF-α to induce release of IFN-γ by NK cells. IFN-γ production by T cells in response to MPL was also documented by Tomai and Johnson (1989), and Odean et al. (1990).

[0138] MPL is also known to be a potent T cell adjuvant. For example, MPL stimulates proliferation of melanoma-antigen specific CTLs (Mitchell et al., 1988, 1993). Further, Baker et al. (1988b) showed that nontoxic MPL inactivated suppressor T cell activity. Naturally, in the physiological environment, the inactivation of T suppressor cells allows for increased benefit for the animal, as realized by, e.g., increased antibody production. Johnson and Tomai (1988) have reported on the possible cellular and molecular mediators of the adjuvant action of MPL.

[0139] MPL is also known to induce aggregation of platelets and to phosphorylate a platelet protein prior to induction of serotonin secretion (Grabarek et al., 1990). This study shows that MPL is involved in protein kinase C activation and signal transduction.

[0140] Many articles concern the structure and function of MPL include. These include Johnson et al. (1990), that describes the structural characterization of MPL homologs obtained from Salmonella Minnesota Re595 lipopolysaccharide. The work of Johnson et al. (1990), in common with Grabarek et al. (1990), shows that the fatty acid moieties of MPL can vary, even in commercial species. In separating MPL into eight fractions by thin layer chromatography, Johnson et al. (1990) found that three were particularly active, as assessed using human platelet responses. The chemical components of the various MPL species were characterized by Johnson et al. (1990).

[0141] Baker et al. (1992) further analyzed the structural features that influence the ability of lipid A and its analogs to abolish expression of suppressor T cell activity. They reported that decreasing the number of phosphate groups in lipid A from two to one (i.e., creating monophosphoryl lipid A, MPL) as well as decreasing the fatty acyl content, primarily by removing the residue at the 3 position, resulted in a progressive reduction in toxicity; however, these structural modifications did not influence its ability to abolish the expression of Ts function (Baker et al., 1992). These types of MPL are ideal for use in the present invention.

[0142] Baker et al. (1992) also showed that reducing the fatty acyl content from five to four (lipid A precursor IVA or Iₐ) eliminated the capacity to influence Ts function but not to induce polyclonal activation of B cells. These studies show that in order to be able to abolish the expression of Ts function, lipid A must be a glucosamine disaccharide; may have either one or two phosphate groups; and must have at least five fatty acyl groups. Also, the chain length of the nonhydroxylated fatty acid, as well as the location of acyloxyacyl groups (2′ versus 3′ position), may play an important role (Baker et al., 1992).

[0143] In examining the relationship between chain length and position of fatty acyl groups on the ability of lipid A to abolish the expression of suppressor T-cell (Ts) activity, Baker et al. (1994) found that fatty acyl chain lengths of C₁₂ to C₁₄ appeared to be optimal for bioactivity. Therefore, although their use is still possible, lipid A preparations with fatty acyl groups of relatively short chain length (C₁₀ to C₁₂ from Pseudomonas aeruginosa and Chromobacterium violaceum) or predominantly long chain length (C₁₈ from Helicobacter pylori) are less preferred for use in this invention.

[0144] Baker et al. (1994) also showed that the lipid A proximal inner core region oligosaccharides of some bacterial lipopolysaccharides increase the expression of Ts activity; due mainly to the capacity of such oligosaccharides, which are relatively conserved in structure among gram-negative bacterial, to enlarge or expand upon the population of CD8+Ts generated during the course of a normal antibody response to unrelated microbial antigens. The minimal structure required for the expression of the added immunosuppression observed was reported to be a hexasaccharide containing one 2-keto-3-deoxyoctonate residue, two glucose residues, and three heptose residues to which are attached two pyrophosphorylethanolamine groups (Baker et al., 1994). This information may be considered in utilizing or even designing further adjuvants for use in the invention.

[0145] In a generally related line of work, Tanamoto et al. (1994a;b; 1995) described the dissociation of endotoxic activities in a chemically synthesized Lipid A precursor after acetylation or succinylation. Thus, compounds such as “acetyl 406” and “succinyl 516” (Tanamoto et al., 1994a;b; 1995) are also contemplated for use in the invention.

[0146] Synthetic MPLs form a particularly preferred group of antigens. For example, Brade et al. (1993) described an artificial glycoconjugate containing the bisphosphorylated glucosamine disaccharide backbone of lipid A that binds to anti-Lipid A MAbs. This is one candidate for use in certain aspects of the invention.

[0147] The MPL derivatives described in U.S. Pat. No. 4,987,237 are particularly contemplated for use in the present invention. U.S. Pat. No. 4,987,237 describes MPL derivatives that contain one or more free groups, such as amines, on a side chain attached to the primary hydroxyl groups of the monophosphoryl lipid A nucleus through an ester group. The derivatives provide a convenient method for coupling the lipid A through coupling agents to various biologically active materials. The immunostimulant properties of lipid A are maintained. All MPL derivatives in accordance with U.S. Pat. No. 4,987,237 are envisioned for use in the MPL adjuvant-incorporated cells of this invention.

[0148] Various adjuvants, even those that are not commonly used in humans, may still be employed in animals, where, for example, one desires to raise antibodies or to subsequently obtain activated T cells. The toxicity or other adverse effects that may result from either the adjuvant or the cells, e.g., as may occur using non-irradiated tumor cells, is irrelevant in such circumstances.

[0149] Within the vaccines provided herein, the adjuvant composition is preferably designed to induce an immune response predominantly of the Th1 type. High levels of Th1-type cytokines (e.g., IFN-γ, TNFα, IL-2 and IL-12) tend to favor the induction of cell-mediated immune responses to an administered antigen. In contrast, high levels of Th2-type cytokines (e.g., IL-4, IL-5, IL-6 and IL-10) tend to favor the induction of humoral immune responses. Following application of a vaccine as provided herein, a patient will support an immune response that includes Th1- and Th2-type responses. Within a preferred embodiment, in which a response is predominantly Th1-type, the level of Th1-type cytokines will increase to a greater extent than the level of Th2-type cytokines. The levels of these cytokines may be readily assessed using standard assays. For a review of the families of cytokines see e.g., Mosmann and Coffman (1989).

[0150] Preferred adjuvants for use in eliciting a predominantly Th1-type response include, for example, a combination of monophosphoryl lipid A, preferably 3-de-O-acylated monophosphoryl lipid A (3D-MPL), together with an aluminum salt. MPL adjuvants are available from Corixa Corporation (Seattle, Wash.; see e.g., U S. Pat. Nos. 4,436,727; 4,877,611; 4,866,034 and 4,912,094, each of which is specifically incorporated herein by reference in its entirety). CpG-containing oligonucleotides (in which the CpG dinucleotide is unmethylated) also induce a predominantly Th1 response. Such oligonucleotides are well known and are described, for example, in Intl. Pat. Appl. Publ. No. WO 96/02555 and Intl. Pat. Appl. Publ. No. WO 99/33488. Immunostimulatory DNA sequences are also described, for example, by Sato et al. (1996). Another preferred adjuvant is a saponin, preferably QS21 (Aquila Biopharmaceuticals Inc., Framingham, Mass.), which may be used alone or in combination with other adjuvants. For example, an enhanced system involves the combination of a monophosphoryl lipid A and saponin derivative, such as the combination of QS21 and 3D-MPL (see e.g., Intl. Pat. Appl. Publ. No. WO 94/00153), or a less reactogenic composition where the QS21 is quenched with cholesterol (see e.g., Intl. Pat. Appl. Publ. No. WO 96/33739). Other preferred formulations comprise an oil-in-water emulsion and tocopherol. A particularly potent adjuvant formulation involving QS21, 3D-MPL and tocopherol in an oil-in-water emulsion has also been described (see e.g., Intl. Pat. Appl. Publ. No. WO 95/17210).

[0151] Other preferred adjuvants include Montanide ISA 720 (Seppic), SAF (Chiron), ISCOMS (CSL), MF-59 (Chiron), the SBAS series of adjuvants (e.g., SBAS-2 or SBAS-4, available from SmithKline Beecham, Rixensart, Belgium), Detox (Corixa Corporation), RC-529 (Corixa Corporation) and aminoalkyl glucosaminide 4-phosphates (AGPs).

[0152] Any vaccine provided herein may be prepared using well-known methods that result in a combination of one or more antigens, one or more immunostimulants or adjuvants and one or more suitable carriers, excipients, or pharmaceutically acceptable buffers. The compositions described herein may be administered as part of a sustained release formulation (i.e., a formulation such as a capsule, sponge or gel [composed of polysaccharides, for example] that effects a slow release of compound following administration). Such formulations may generally be prepared using well-known technology (Coombes et al., 1996) and administered by, for example, oral, rectal or subcutaneous implantation, or by implantation at the desired target site. Sustained-release formulations may contain a peptide, polynucleotide or antibody dispersed in a carrier matrix and/or contained within a reservoir surrounded by a rate-controlling membrane.

[0153] Carriers for use within such formulations are preferably biocompatible, and may also be biodegradable; preferably the formulation provides a relatively constant level of active component release. Such carriers include microparticles of poly(lactide-co-glycolide), as well as polyacrylate, latex, starch, cellulose and dextran. Other delayed-release carriers include supramolecular biovectors, which comprise a non-liquid hydrophilic core (e.g., a cross-linked polysaccharide or oligosaccharide) and, optionally, an external layer comprising an amphiphilic compound, such as a phospholipid (U.S. Pat. No. 5,151,254; Intl. Pat. Appl. Publ. No. WO 94/20078; Intl. Pat. Appl. Publ. No. WO/94/23701; and Intl. Pat. Appl. Publ. No. WO 96/06638). The amount of active compound contained within a sustained release formulation depends upon the site of implantation, the rate and expected duration of release and the nature of the condition to be treated or prevented.

[0154] Any of a variety of delivery vehicles may be employed within pharmaceutical compositions and vaccines to facilitate production of an antigen-specific immune response that targets tumor cells. Delivery vehicles include antigen-presenting cells (APCs), such as dendritic cells, macrophages, B cells, monocytes and other cells that may be engineered to be efficient APCs. Such cells may, but need not, be genetically modified to increase the capacity for presenting the antigen, to improve activation and/or maintenance of the T cell response, to have anti-tumor effects per se and/or to be immunologically compatible with the receiver (i.e., matched HLA haplotype). APCs may generally be isolated from any of a variety of biological fluids and organs, including tumor and peritumoral tissues, and may be autologous, allogeneic, syngeneic or xenogeneic cells.

[0155] Certain preferred embodiments of the present invention use dendritic cells or progenitors thereof as antigen-presenting cells. Dendritic cells are highly potent APCs (Banchereau and Steinman, 1998) and have been shown to be effective as a physiological adjuvant for eliciting prophylactic or therapeutic antitumor immunity (Timmerman and Levy, 1999). In general, dendritic cells may be identified based on their typical shape (stellate in situ, with marked cytoplasmic processes (dendrites) visible in vitro), their ability to take up, process and present antigens with high efficiency and their ability to activate naive T cell responses. Dendritic cells may, of course, be engineered to express specific cell-surface receptors or ligands that are not commonly found on dendritic cells in vivo or ex vivo, and such modified dendritic cells are contemplated by the present invention. As an alternative to dendritic cells, secreted vesicles antigen-loaded dendritic cells (called exosomes) may be used within a vaccine (Zitvogel et al., 1998).

[0156] Dendritic cells and progenitors may be obtained from peripheral blood, bone marrow, tumor-infiltrating cells, peritumoral tissues-infiltrating cells, lymph nodes, spleen, skin, umbilical cord blood or any other suitable tissue or fluid. For example, dendritic cells may be differentiated ex vivo by adding a combination of cytokines such as GM-CSF, IL-4, IL-13 and/or TNFα to cultures of monocytes harvested from peripheral blood. Alternatively, CD34 positive cells harvested from peripheral blood, umbilical cord blood or bone marrow may be differentiated into dendritic cells by adding to the culture medium combinations of GM-CSF, IL-3, TNFα, CD40 ligand, LPS, flt3 ligand and/or other compound(s) that induce differentiation, maturation and proliferation of dendritic cells.

[0157] Dendritic cells are conveniently categorized as “immature” and “mature” cells, which allows a simple way to discriminate between two well characterized phenotypes. However, this nomenclature should not be construed to exclude all possible intermediate stages of differentiation. Immature dendritic cells are characterized as APC with a high capacity for antigen uptake and processing, which correlates with the high expression of Fcγ receptor and mannose receptor. The mature phenotype is typically characterized by a lower expression of these markers, but a high expression of cell surface molecules responsible for T cell activation such as class I and class II MHC, adhesion molecules (e.g., CD54 and CD11) and costimulatory molecules (e.g., CD40, CD80, CD86 and 4-1BB).

[0158] APCs may generally be transfected with a polynucleotide encoding a hematological malignancy related peptide, such that the peptide, or an immunogenic portion thereof, is expressed on the cell surface. Such transfection may take place ex vivo, and a composition or vaccine comprising such transfected cells may then be used for therapeutic purposes, as described herein. Alternatively, a gene delivery vehicle that targets a dendritic or other antigen-presenting cell may be administered to a patient, resulting in transfection that occurs in vivo. In vivo and ex vivo transfection of dendritic cells, for example, may generally be performed using any methods known in the art, such as those described in Intl. Pat. Appl. Publ. No. WO 97/24447, or the gene gun approach described by Mahvi et al. (1997). Antigen loading of dendritic cells may be achieved by incubating dendritic cells or progenitor cells with the hematological malignancy related peptide, DNA (naked or within a plasmid vector) or RNA; or with antigen-expressing recombinant bacterium or viruses (e.g., vaccinia, fowlpox, adenovirus or lentivirus vectors). Prior to loading, the peptide may be covalently conjugated to an immunological partner that provides T cell help (e.g., a carrier molecule). Alternatively, a dendritic cell may be pulsed with a non-conjugated immunological partner, separately or in the presence of the peptide.

[0159] Combined therapeutics is also contemplated, and the same type of underlying pharmaceutical compositions may be employed for both single and combined medicaments. Vaccines and pharmaceutical compositions may be presented in unit-dose or multi-dose containers, such as sealed ampoules or vials. Such containers are preferably hermetically sealed to preserve sterility of the formulation until use. In general, formulations may be stored as suspensions, solutions or emulsions in oily or aqueous vehicles. Alternatively, a vaccine or pharmaceutical composition may be stored in a freeze-dried condition requiring only the addition of a sterile liquid carrier immediately prior to use.

### 4.5 DIAGNOSTIC AND PROGNOSTIC METHODS FOR HEMATOLOGICAL MALIGNANCY DISEASES

[0160] The present invention further provides methods for detecting a malignant disease associated with one or more of the polypeptide or polynucleotide compositions disclosed herein, and for monitoring the effectiveness of an immunization or therapy for such a disease. To determine the presence or absence of a malignant disease associated with one or more of the polypeptide or polynucleotide compositions disclosed herein, a patient may be tested for the level of T cells specific for one or more of such compositions. Within certain methods, a biological sample comprising CD4⁺ and/or CD8⁺ T cells isolated from a patient is incubated with one or more of the polypeptide or polynucleotide compositions disclosed herein, and/or an APC that expresses one or more of such peptides or polypeptides, and the presence or absence of specific activation of the T cells is detected, as described herein. Suitable biological samples include, but are not limited to, isolated T cells. For example, T cells may be isolated from a patient by routine techniques (such as by Ficoll/Hypaque density gradient centrifugation of peripheral blood lymphocytes). T cells may be incubated in vitro for 2-9 days (typically 4 days) at 37° C. with one or more of the disclosed peptide, polypeptide or polynucleotide compositions (e.g., 5-25 μg/ml). It may be desirable to incubate another aliquot of a T cell sample in the absence of the composition to serve as a control. For CD4⁺ T cells, activation is preferably detected by evaluating proliferation of the T cells. For CD8⁺ T cells, activation is preferably detected by evaluating cytolytic activity. A level of proliferation that is at least two fold greater and/or a level of cytolytic activity that is at least 20% greater than in disease-free patients indicates the presence of a malignant disease associated with expression or one or more of the disclosed polypeptide or polynucleotide compositions. Further correlation may be made, using methods well known in the art, between the level of proliferation and/or cytolytic activity and the predicted response to therapy. In particular, patients that display a higher antibody, proliferative and/or lytic response may be expected to show a greater response to therapy.

[0161] Within other methods, a biological sample obtained from a patient is tested for the level of antibody specific for one or more of the hematological malignancy-related peptides or polypeptide s disclosed herein. The biological sample is incubated with hematological malignancy-related peptide or polypeptide, or a polynucleotide encoding such a peptide or polypeptide, and/or an APC that expresses such a peptide or polypeptide under conditions and for a time sufficient to allow immunocomplexes to form. Immunocomplexes formed between the selected peptide or polypeptide and antibodies in the biological sample that specifically bind to the selected peptide or polypeptide are then detected. A biological sample for use within such methods may be any sample obtained from a patient that would be expected to contain antibodies. Suitable biological samples include blood, sera, ascites, bone marrow, pleural effusion, and cerebrospinal fluid.

[0162] The biological sample is incubated with the selected peptide or polypeptide in a reaction mixture under conditions and for a time sufficient to permit immunocomplexes to form between the selected peptide or polypeptide and antibodies that are immunospecific for such a peptide or polypeptide. For example, a biological sample and a selected peptide or polypeptide peptide may be incubated at 4° C. for 24-48 hrs.

[0163] Following the incubation, the reaction mixture is tested for the presence of immunocomplexes. Detection of immunocomplexes formed between the selected peptide or polypeptide and antibodies present in the biological sample may be accomplished by a variety of known techniques, such as radioimmunoassays (RIA) and enzyme linked immunosorbent assays (ELISA). Suitable assays are well known in the art and are amply described in the scientific and patent literature (Harlow and Lane, 1988). Assays that may be used include, but are not limited to, the double monoclonal antibody sandwich immunoassay technique (U.S. Pat. No. 4,376,110); monoclonal-polyclonal antibody sandwich assays (Wide et al., 1970); the “western blot” method (U.S. Pat. No. 4,452,901); immunoprecipitation of labeled ligand (Brown et al., 1980); enzyme-linked immunosorbent assays (Raines and Ross, 1982); immunocytochemical techniques, including the use of fluorochromes (Brooks et al., 1980); and neutralization of activity (Bowen-Pope et al., 1984). Other immunoassays include, but are not limited to, those described in U.S. Pat. Nos. 3,817,827; 3,850,752; 3,901,654; 3,935,074; 3,984,533; 3,996,345; 4,034,074; and 4,098,876.

[0164] For detection purposes, the selected peptide or polypeptide may either be labeled or unlabeled. Unlabeled polypeptide peptide may be used in agglutination assays or in combination with labeled detection reagents that bind to the immunocomplexes (e.g., anti-immunoglobulin, protein G, Protein A or a lectin and secondary antibodies, or antigen-binding fragments thereof, capable of binding to the antibodies that specifically bind to the selected hematological malignancy-related peptide or polypeptide). If the selected peptide or polypeptide is labeled, the reporter group may be any suitable reporter group known in the art, including radioisotopes, fluorescent groups, luminescent groups, enzymes, biotin and dye particles.

[0165] Within certain assays, unlabeled peptide or polypeptide is immobilized on a solid support. The solid support may be any material known to those of ordinary skill in the art to which the peptide may be attached. For example, the solid support may be a test well in a microtiter plate or a nitrocellulose or other suitable membrane. Alternatively, the support may be a bead or disc, such as glass, fiberglass, latex or a plastic material such as polystyrene or polyvinylchloride. The support may also be a magnetic particle or a fiber optic sensor, such as those disclosed, for example, in U.S. Pat. No. 5,359,681. The peptide may be immobilized on the solid support using a variety of techniques known to those of skill in the art, which are amply described in the patent and scientific literature. In the context of the present invention, the term “immobilization” refers to both noncovalent association, such as adsorption, and covalent attachment (which may be a direct linkage between the antigen and functional groups on the support or may be a linkage by way of a cross-linking agent). Immobilization by adsorption to a well in a microtiter plate or to a membrane is preferred. In such cases, adsorption may be achieved by contacting the selected peptide or polypeptide, in a suitable buffer, with the solid support for a suitable amount of time. The contact time varies with temperature, but is typically between about 1 hour and about 1 day. In general, contacting a well of a plastic microtiter plate (such as polystyrene or polyvinylchloride) with an amount of peptide ranging from about 10 ng to about 10 μg, and preferably about 100 ng to about 1 μg, is sufficient to immobilize an adequate amount of peptide.

[0166] Following immobilization, the remaining protein binding sites on the support are typically blocked. Any suitable blocking agent known to those of ordinary skill in the art, such as bovine serum albumin, Tween™ 20™ (Sigma Chemical Co., St. Louis, Mo.), heat-inactivated normal goat serum (NGS), or BLOTTO (buffered solution of nonfat dry milk which also contains a preservative, salts, and an antifoaming agent) may be used. The support is then incubated with a biological sample suspected of containing specific antibody. The sample can be applied neat, or, more often, it can be diluted, usually in a buffered solution which contains a small amount (0.1%-5.0% by weight) of protein, such as BSA, NGS, or BLOTTO. In general, an appropriate contact time (i.e., incubation time) is a period of time that is sufficient to detect the presence of antibody or an antigen binding fragment that is immunospecific for the selected peptide or polypeptide within a sample containing such an antibody or binding fragment thereof. Preferably, the contact time is sufficient to achieve a level of binding that is at least about 95% of that achieved at equilibrium between bound and unbound antibody or antibody fragment. Those of ordinary skill in the art will recognize that the time necessary to achieve equilibrium may be readily determined by assaying the level of binding that occurs over a period of time. At room temperature, an incubation time of about 30 min is generally sufficient.

[0167] Unbound sample may then be removed by washing the solid support with an appropriate buffer, such as PBS containing 0.1% Tween™ 20. A detection reagent that binds to the immunocomplexes and that comprises at least a first detectable label or “reporter” molecule may then be added. The detection reagent is incubated with the immunocomplex for an amount of time sufficient to detect the bound antibody or antigen binding fragment thereof. An appropriate amount of time may generally be determined by assaying the level of binding that occurs over a period of time. Unbound label or detection reagent is then removed and bound label or detection reagent is detected using a suitable assay or analytical instrument. The method employed for detecting the reporter group depends upon the nature of the reporter group. For radioactive labels, scintillation counting or autoradiographic methods are generally appropriate. Spectroscopic methods may be used to detect dyes, luminescent or chemiluminescent moieties and various chromogens, fluorescent labels and such like. Biotin may be detected using avidin, coupled to a different reporter group (commonly a radioactive or fluorescent group or an enzyme). Enzyme reporter groups (e.g., horseradish peroxidase, β-galactosidase, alkaline phosphatase and glucose oxidase) may generally be detected by the addition of substrate (generally for a specific period of time), followed by spectroscopic or other analysis of the reaction products. Regardless of the specific method employed, a level of bound detection reagent that is at least two fold greater than background (i.e., the level observed for a biological sample obtained from a disease-free individual) indicates the presence of a malignant disease associated with expression of the selected peptide or polypeptide.

[0168] In general, methods for monitoring the effectiveness of an immunization or therapy involve monitoring changes in the level of antibodies or T cells specific for the selected peptide or polypeptide in a sample, or in an animal such as a human patient. Methods in which antibody levels are monitored may comprise the steps of: (a)incubating a first biological sample, obtained from a patient prior to a therapy or immunization, with a selected peptide or polypeptide, wherein the incubation is performed under conditions and for a time sufficient to allow immunocomplexes to form; (b) detecting immunocomplexes formed between the selected peptide or polypeptide and antibodies or antigen binding fragments in the biological sample that specifically bind to the selected peptide or polypeptide; (c) repeating steps (a) and (b) using a second biological sample taken from the patient at later time, such as for example, following a given therapy or immunization; and (d) comparing the number of immunocomplexes detected in the first and second biological samples. Alternatively, a polynucleotide encoding the selected peptide or polypeptide, or an APC expressing the selected peptide or polypeptide may be employed in place of the selected peptide or polypeptide itself. Within such methods, immunocomplexes between the selected peptide or polypeptide encoded by a polynucleotide, or expressed by the APC, and antibodies and/or antigen binding fragments in the biological sample are detected.

[0169] Methods in which T cell activation and/or the number of hematological malignancy polypeptide-specific precursors are monitored may comprise the steps of: (a) incubating a first biological sample comprising CD4⁺ and/or CD8⁺ cells (e.g., bone marrow, peripheral blood or a fraction thereof), obtained from a patient prior to a therapy or immunization, with a hematological malignancy peptide or polypeptide, wherein the incubation is performed under conditions and for a time sufficient to allow specific activation, proliferation and/or lysis of T cells; (b) detecting an amount of activation, proliferation and/or lysis of the T cells; (c) repeating steps (a) and (b) using a second biological sample comprising CD4⁺ and/or CD8⁺ T cells, and taken from the same patient following therapy or immunization; and (d) comparing the amount of activation, proliferation and/or lysis of T cells in the first and second biological samples. Alternatively, a polynucleotide encoding a hematological malignancy related peptide, or an APC expressing such a peptide may be employed in place of the hematological malignancy peptide itself.

[0170] A biological sample for use within such methods may be any sample obtained from a patient that would be expected to contain antibodies, CD4⁺ T cells and/or CD8⁺ T cells. Suitable biological samples include blood, sera, ascites, bone marrow, pleural effusion and cerebrospinal fluid. A first biological sample may be obtained prior to initiation of therapy or immunization or part way through a therapy or vaccination regime. The second biological sample should be obtained in a similar manner, but at a time following additional therapy or immunization. The second biological sample may be obtained at the completion of, or part way through, therapy or immunization, provided that at least a portion of therapy or immunization takes place between the isolation of the first and second biological samples.

[0171] Incubation and detection steps for both samples may generally be performed as described above. A statistically significant increase in the number of immunocomplexes in the second sample relative to the first sample reflects successful therapy or immunization.

### 4.6 ADMINISTRATION OF PHARMACEUTICAL COMPOSITIONS AND FORMULATIONS

[0172] In certain embodiments, the present invention concerns formulation of one or more of the polynucleotide, polypeptide, peptide, antibody, or antigen binding fragment compositions disclosed herein in pharmaceutically acceptable solutions for administration to a cell or an animal, either alone, or in combination with one or more other modalities of anti-cancer therapy, or in combination with one or more diagnostic or therapeutic agents.

[0173] It will also be understood that, if desired, the nucleic acid segment, RNA, or DNA compositions disclosed herein may be administered in combination with other agents as well, such as, e.g., proteins or peptides or various pharmaceutically-active agents. As long as the composition comprises at least one of the genetic expression constructs disclosed herein, there is virtually no limit to other components that may also be included, given that the additional agents do not cause a significant adverse effect upon contact with the target cells or host tissues. The RNA- or DNA-derived compositions may thus be delivered along with various other agents as required in the particular instance. Such RNA or DNA compositions may be purified from host cells or other biological sources, or alternatively may be chemically synthesized as described herein. Likewise, such compositions may comprise substituted or derivatized RNA or DNA compositions. Such compositions may include one or more therapeutic gene constructs, either alone, or in combination with one or more modified peptide or nucleic acid substituent derivatives, and/or other anticancer therapeutics.

[0174] The formulation of pharmaceutically-acceptable excipients and carrier solutions are well-known to those of skill in the art, as is the development of suitable dosing and treatment regimens for using the particular compositions described herein in a variety of treatment regimens, including e.g., oral, intravenous, intranasal, transdermal, intraprostatic, intratumoral, and/or intramuscular administration and formulation.

### 4.6.1 INJECTABLE DELIVERY

[0175] For example, the pharmaceutical compositions disclosed herein may be administered parenterally, intravenously, intramuscularly, or even intraperitoneally as described in U.S. Pat. No. 5,543,158, U.S. Pat. No. 5,641,515 and U.S. Pat. No. 5,399,363 (each specifically incorporated herein by reference in its entirety). Solutions of the active compounds as free-base or pharmacologically acceptable salts may be prepared in water suitably mixed with a surfactant, such as hydroxypropylcellulose. Dispersions may also be prepared in glycerol, liquid polyethylene glycols, and mixtures thereof and in oils. Under ordinary conditions of storage and use, these preparations contain a preservative to prevent the growth of microorganisms.

[0176] The pharmaceutical forms suitable for injectable use include sterile aqueous solutions or dispersions and sterile powders for the extemporaneous preparation of sterile injectable solutions or dispersions (U.S. Pat. No. 5,466,468, specifically incorporated herein by reference in its entirety). In all cases the form must be sterile and must be fluid to the extent that easy syringability exists. It must be stable under the conditions of manufacture and storage and must be preserved against the contaminating action of microorganisms, such as bacteria and fungi. The carrier can be a solvent or dispersion medium containing, for example, water, ethanol, polyol (e.g., glycerol, propylene glycol, and liquid polyethylene glycol, and the like), suitable mixtures thereof, and/or vegetable oils. Proper fluidity may be maintained, for example, by the use of a coating, such as lecithin, by the maintenance of the required particle size in the case of dispersion and by the use of surfactants. The prevention of the action of microorganisms can be brought about by various antibacterial and antifungal agents, for example, parabens, chlorobutanol, phenol, sorbic acid, thimerosal, and the like. In many cases, it will be preferable to include isotonic agents, for example, sugars or sodium chloride. Prolonged absorption of the injectable compositions can be brought about by the use in the compositions of agents delaying absorption, for example, aluminum monostearate and gelatin.

[0177] For parenteral administration in an aqueous solution, for example, the solution should be suitably buffered if necessary and the liquid diluent first rendered isotonic with sufficient saline or glucose. These particular aqueous solutions are especially suitable for intravenous, intramuscular, subcutaneous and intraperitoneal administration. In this connection, sterile aqueous media that can be employed will be known to those of skill in the art in light of the present disclosure. For example, one dosage may be dissolved in 1 ml of isotonic NaCl solution and either added to 1000 ml of hypodermoclysis fluid or injected at the proposed site of infusion, (see for example, Hoover, 1975). Some variation in dosage will necessarily occur depending on the condition of the subject being treated. The person responsible for administration will, in any event, determine the appropriate dose for the individual subject. Moreover, for human administration, preparations should meet sterility, pyrogenicity, and general safety and purity standards as required by FDA Office of Biologics standards.

[0178] Sterile injectable solutions may be prepared by incorporating the gene therapy constructs in the required amount in the appropriate solvent with several of the other ingredients enumerated above, as required, followed by filtered sterilization. Generally, dispersions are prepared by incorporating the various sterilized active ingredients into a sterile vehicle which contains the basic dispersion medium and the required other ingredients from those enumerated above. In the case of sterile powders for the preparation of sterile injectable solutions, the preferred methods of preparation are vacuum-drying and freeze-drying techniques which yield a powder of the active ingredient plus any additional desired ingredient from a previously sterile-filtered solution thereof.

[0179] The compositions disclosed herein may be formulated in a neutral or salt form. Pharmaceutically-acceptable salts, include the acid addition salts and which are formed with inorganic acids such as, for example, hydrochloric or phosphoric acids, or such organic acids as acetic, oxalic, tartaric, mandelic, and the like. Salts formed with the free carboxyl groups can also be derived from inorganic bases such as, for example, sodium, potassium, ammonium, calcium, or ferric hydroxides, and such organic bases as isopropylamine, trimethylamine, histidine, procaine and the like. Upon formulation, solutions will be administered in a manner compatible with the dosage formulation and in such amount as is therapeutically effective. The formulations are easily administered in a variety of dosage forms such as injectable solutions, drug release capsules and the like.

[0180] As used herein, “carrier” includes any and all solvents, dispersion media, vehicles, coatings, diluents, antibacterial and antifungal agents, isotonic and absorption delaying agents, buffers, carrier solutions, suspensions, colloids, and the like. The use of such media and agents for pharmaceutical active substances is well known in the art. Except insofar as any conventional media or agent is incompatible with the active ingredient, its use in the therapeutic compositions is contemplated. Supplementary active ingredients can also be incorporated into the compositions.

### 4.6.2 INTRANASAL DELIVERY

[0181] One may use nasal solutions or sprays, aerosols or even inhalants for the treatment of hematological malignancies with one of more of the disclosed peptides and polynucleotides. Nasal solutions are usually aqueous solutions designed for administration to the nasal passages in drops or sprays. Nasal solutions are prepared so that they are similar in many respects to nasal secretions, so that normal ciliary action is maintained. Thus, the aqueous nasal solutions usually are isotonic and slightly buffered to maintain a pH of from about 5.5 to about 6.5. In addition, antimicrobial preservatives, similar to those used in ophthalmic preparations, and appropriate drug stabilizers, if required, may be included in the formulation. Various commercial nasal preparations are known.

[0182] Inhalations and inhalants are pharmaceutical preparations designed for delivering a drug or compound into the respiratory tree of a patient. A vapor or mist is administered and reaches the affected area, often to give relief from symptoms of bronchial and nasal congestion. However, this route can also be employed to deliver agents into the systemic circulation. Inhalations may be administered by the nasal or oral respiratory routes. The administration of inhalation solutions is only effective if the droplets are sufficiently fine and uniform in size so that the mist reaches the bronchioles.

[0183] Another group of products, also known as inhalations, and sometimes called insufflations, consists of finely powdered or liquid drugs that are carried into the respiratory passages by the use of special delivery systems, such as pharmaceutical aerosols, that hold a solution or suspension of the drug in a liquefied gas propellant. When released through a suitable valve and oral adapter, a metered does of the inhalation is propelled into the respiratory tract of the patient.

[0184] Particle size is of importance in the administration of this type of preparation. It has been reported that the optimum particle size for penetration into the pulmonary cavity is of the order of about 0.5 to about 7 μm. Fine mists are produced by pressurized aerosols and hence their use in considered advantageous.

### 4.6.3 LIPOSOME-, NANOCAPSULE-, AND MICROPARTICLE-MEDIATED DELIVERY

[0185] In certain embodiments, the inventors contemplate the use of liposomes, nanocapsules, microparticles, microspheres, lipid particles, vesicles, and the like, for the introduction of the polynucleotide compositions of the present invention into suitable host cells. In particular, the polynucleotide compositions of the present invention may be formulated for delivery either encapsulated in a lipid particle, a liposome, a vesicle, a nanosphere, or a nanoparticle or the like.

[0186] Such formulations may be preferred for the introduction of pharmaceutically acceptable formulations of the nucleic acids disclosed herein. The formation and use of liposomes is generally known to those of skill in the art (see for example, Couvreur et al., 1977; Couvreur, 1988; Lasic, 1998; which describes the use of liposomes and nanocapsules in the targeted antibiotic therapy for intracellular bacterial infections and diseases). Recently, liposomes were developed with improved serum stability and circulation half-lives (Gabizon and Papahadjopoulos, 1988; Allen and Choun, 1987; U.S. Pat. No. 5,741,516, specifically incorporated herein by reference in its entirety). Further, various methods of liposome and liposome like preparations as potential drug carriers have been reviewed (Takakura, 1998; Chandran et al., 1997; Margalit, 1995; U.S. Pat. No. 5,567,434; U.S. Pat. No. 5,552,157; U.S. Pat. No. 5,565,213; U.S. Pat. No. 5,738,868 and U.S. Pat. No. 5,795,587, each specifically incorporated herein by reference in its entirety).

[0187] Liposomes have been used successfully with a number of cell types that are normally resistant to transfection by other procedures including T cell suspensions, primary hepatocyte cultures and PC12 cells (Renneisen et al., 1990; Muller et al., 1990). In addition, liposomes are free of the DNA length constraints that are typical of viral-based delivery systems. Liposomes have been used effectively to introduce genes, drugs (Heath and Martin, 1986; Heath et al., 1986; Balazsovits et al., 1989; Fresta and Puglisi, 1996), radiotherapeutic agents (Pikul et al., 1987), enzymes (Imaizumi et al., 1990a; Imaizumi et al, 1990b), viruses (Faller and Baltimore, 1984), transcription factors and allosteric effectors (Nicolau and Gersonde, 1979) into a variety of cultured cell lines and animals. In addition, several successful clinical trails examining the effectiveness of liposome-mediated drug delivery have been completed (Lopez-Berestein et al., 1985a; 1985b; Coune, 1988; Sculier et al., 1988). Furthermore, several studies suggest that the use of liposomes is not associated with autoimmune responses, toxicity or gonadal localization after systemic delivery (Mori and Fukatsu, 1992).

[0188] Liposomes are formed from phospholipids that are dispersed in an aqueous medium and spontaneously form multilamellar concentric bilayer vesicles (also termed multilamellar vesicles (MLVs). MLVs generally have diameters of from 25 nm to 4 μm. Sonication of MLVs results in the formation of small unilamellar vesicles (SUVs) with diameters in the range of 200 to 500 Å, containing an aqueous solution in the core.

[0189] Liposomes bear resemblance to cellular membranes and are contemplated for use in connection with the present invention as carriers for the peptide compositions. They are widely suitable as both water- and lipid-soluble substances can be entrapped, i.e. in the aqueous spaces and within the bilayer itself, respectively. It is possible that the drug-bearing liposomes may even be employed for site-specific delivery of active agents by selectively modifying the liposomal formulation.

[0190] In addition to the teachings of Couvreur et al. (1977; 1988), the following information may be utilized in generating liposomal formulations. Phospholipids can form a variety of structures other than liposomes when dispersed in water, depending on the molar ratio of lipid to water. At low ratios the liposome is the preferred structure. The physical characteristics of liposomes depend on pH, ionic strength and the presence of divalent cations. Liposomes can show low permeability to ionic and polar substances, but at elevated temperatures undergo a phase transition which markedly alters their permeability. The phase transition involves a change from a closely packed, ordered structure, known as the gel state, to a loosely packed, less-ordered structure, known as the fluid state. This occurs at a characteristic phase-transition temperature and results in an increase in permeability to ions, sugars, and drugs.

[0191] Alternatively, the invention provides for pharmaceutically acceptable nanocapsule formulations of the polynucleotide compositions of the present invention. Nanocapsules can generally entrap compounds in a stable and reproducible way (Henry-Michelland et al., 1987; Quintanar-Guerrero et al., 1998; Douglas et al., 1987). To avoid side effects due to intracellular polymeric overloading, such ultrafine particles (sized around 0.1 μm) should be designed using polymers able to be degraded in vivo. Biodegradable polyalkyl-cyanoacrylate nanoparticles that meet these requirements are contemplated for use in the present invention, and such particles may be are easily made, as described (Couvreur et al., 1980; 1988; zur Muhlen et al., 1998; Zambaux et al. 1998; Pinto-Alphandry et al., 1995 and U.S. Pat. No. 5,145,684, specifically incorporated herein by reference in its entirety). In particular, methods of polynucleotide delivery to a target cell using either nanoparticles or nanospheres (Schwab et al., 1994; Truong-Le et al., 1998) are also particularly contemplated to be useful in formulating the disclosed compositions for administration to an animal, and to a human in particular.

### 4.7 THERAPEUTIC AGENTS AND KITS

[0192] The invention also provides one or more of the hematological malignancy-related compositions formulated with one or more pharmaceutically acceptable excipients, carriers, diluents, adjuvants, and/or other components for use in the preparation of medicaments, or diagnostic reagents, as well as various kits comprising one or more of such compositions, medicaments, or formulations intended for administration to an animal in need thereof, or for use in one or more diagnostic assays for identifying polynucleotides, polypeptides, and/or antibodies that are specific for one or more hematological malignancy-related compounds as described herein. In addition to the disclosed epitopes, antibodies and antigen binding fragments, antibody- or antigen binding fragment-encoding polynucleotides or additional anticancer agents, polynucleotides, peptides, antigens, or other therapeutic compounds as may be employed in the formulation of particular compositions and formulations disclosed herein, and particularly in the preparation of anticancer agents or anti-hematological malignancies therapies for administration to the affected mammal.

[0193] As such, preferred animals for administration of the pharmaceutical compositions disclosed herein include mammals, and particularly humans. Other preferred animals include primates, sheep, goats, bovines, equines, porcines, lupines, canines, and felines, as well as any other mammalian species commonly considered pets, livestock, or commercially relevant animal species. The compositions and formulations may include partially or significantly purified polypeptide, polynucleotide, or antibody or antigen binding fragment compositions, either alone, or in combination with one or more additional active ingredients, anticancer agents, vaccines, adjuvants, or other therapeutics which may be obtained from natural or recombinant sources, or which may be obtainable naturally or either chemically synthesized, or alternatively produced in vitro from recombinant host cells expressing one or more nucleic acid segments that encode one or more such additional active ingredients, carriers, adjuvants, cofactors, or other therapeutic compound.

### 4.8 DIAGNOSTIC REAGENTS AND KITS

[0194] The invention further provides diagnostic reagents and kits comprising one or more such reagents for use in a variety of diagnostic assays, including for example, immunoassays such as ELISA and “sandwich”-type immunoassays. Such kits may preferably include at least a first peptide, or a first antibody or antigen binding fragment of the invention, a functional fragment thereof, or a cocktail thereof, and means for signal generation. The kit's components may be pre-attached to a solid support, or may be applied to the surface of a solid support when the kit is used. The signal generating means may come pre-associated with an antibody of the invention or may require combination with one or more components, e.g. buffers, antibody-enzyme conjugates, enzyme substrates, or the like, prior to use. Kits may also include additional reagents, e.g., blocking reagents for reducing nonspecific binding to the solid phase surface, washing reagents, enzyme substrates, and the like. The solid phase surface may be in the form of microtiter plates, microspheres, or other materials suitable for immobilizing proteins, peptides, or polypeptides. Preferably, an enzyme that catalyzes the formation of a chemiluminescent or chromogenic product or the reduction of a chemiluminescent or chromogenic substrate is a component of the signal generating means. Such enzymes are well known in the art.

[0195] Such kits are useful in the detection, monitoring and diagnosis of conditions characterized by over-expression or inappropriate expression of hematological malignancy-related peptides, polypeptides, antibodies, and/or polynucleotides, as well as hybridomas, host cells, and vectors comprising one or more such compositions as disclosed herein.

[0196] The therapeutic and diagnostic kits of the present invention may also be prepared that comprise at least one of the antibody, peptide, antigen binding fragment, hybridoma, vector, vaccine, polynucleotide, or cellular compositions disclosed herein and instructions for using the composition as a diagnostic reagent or therapeutic agent. Containers for use in such kits may typically comprise at least one vial, test tube, flask, bottle, syringe or other suitable container, into which one or more of the diagnostic and/or therapeutic composition(s) may be placed, and preferably suitably aliquoted. Where a second therapeutic agent is also provided, the kit may also contain a second distinct container into which this second diagnostic and/or therapeutic composition may be placed. Alternatively, a plurality of compounds may be prepared in a single pharmaceutical composition, and may be packaged in a single container means, such as a vial, flask, syringe, bottle, or other suitable single container. The kits of the present invention will also typically include a means for containing the vial(s) in close confinement for commercial sale, such as, e.g., injection or blow-molded plastic containers into which the desired vial(s) are retained. Where a radiolabel, chromogenic, fluorigenic, or other type of detectable label or detecting means is included within the kit, the labeling agent may be provided either in the same container as the diagnostic or therapeutic composition itself, or may alternatively be placed in a second distinct container means into which this second composition may be placed and suitably aliquoted. Alternatively, the detection reagent and the label may be prepared in a single container means, and in most cases, the kit will also typically include a means for containing the vial(s) in close confinement for commercial sale and/or convenient packaging and delivery.

### 4.9 POLYNUCLEOTIDE COMPOSITIONS

[0197] As used herein, the terms “DNA segment” and “polynucleotide” refer to a DNA molecule that has been isolated free of total genomic DNA of a particular species. Therefore, a DNA segment encoding a polypeptide refers to a DNA segment that contains one or more coding sequences yet is substantially isolated away from, or purified free from, total genomic DNA of the species from which the DNA segment is obtained. Included within the terms “DNA segment” and “polynucleotide” are DNA segments and smaller fragments of such segments, and also recombinant vectors, including, for example, plasmids, cosmids, phagemids, phage, viruses, and the like.

[0198] As will be understood by those skilled in the art, the DNA segments of this invention can include genomic sequences, extra-genomic and plasmid-encoded sequences and smaller engineered gene segments that express, or may be adapted to express, proteins, polypeptides, peptides and the like. Such segments may be naturally isolated, or modified synthetically by the hand of man.

[0199] “Isolated,” as used herein, means that a polynucleotide is substantially away from other coding sequences, and that the DNA segment does not contain large portions of unrelated coding DNA, such as large chromosomal fragments or other functional genes or polypeptide coding regions. Of course, this refers to the DNA segment as originally isolated, and does not exclude genes or coding regions later added to the segment by the hand of man.

[0200] As will be recognized by the skilled artisan, polynucleotides may be single-stranded (coding or antisense) or double-stranded, and may be DNA (genomic, cDNA or synthetic) or RNA molecules. RNA molecules include HnRNA molecules, which contain introns and correspond to a DNA molecule in a one-to-one manner, and mRNA molecules, which do not contain introns. Additional coding or non-coding sequences may, but need not, be present within a polynucleotide of the present invention, and a polynucleotide may, but need not, be linked to other molecules and/or support materials.

[0201] Polynucleotides may comprise a native sequence (i.e., an endogenous sequence that encodes a hematological malignancy-related tumor protein or a portion thereof) or may comprise a variant, or a biological or antigenic functional equivalent of such a sequence. Polynucleotide variants may contain one or more substitutions, additions, deletions and/or insertions, as further described below, preferably such that the immunogenicity of the encoded polypeptide is not diminished, relative to a native tumor protein. The effect on the immunogenicity of the encoded polypeptide may generally be assessed as described herein. The term “variants” also encompasses homologous genes of xenogenic origin.

[0202] When comparing polynucleotide or polypeptide sequences, two sequences are said to be “identical” if the sequence of nucleotides or amino acids in the two sequences is the same when aligned for maximum correspondence, as described below. Comparisons between two sequences are typically performed by comparing the sequences over a comparison window to identify and compare local regions of sequence similarity. A “comparison window” as used herein, refers to a segment of at least about 20 contiguous positions, usually 30 to about 75, 40 to about 50, in which a sequence may be compared to a reference sequence of the same number of contiguous positions after the two sequences are optimally aligned.

[0203] Optimal alignment of sequences for comparison may be conducted using the Megalign program in the Lasergene suite of bioinformatics software (DNASTAR, Inc., Madison, Wis.), using default parameters. This program embodies several alignment schemes described in the following references: Dayhoff, M. O. (1978) A model of evolutionary change in proteins—Matrices for detecting distant relationships. In Dayhoff, M. O. (ed.) Atlas of Protein Sequence and Structure, National Biomedical Research Foundation, Washington D.C. Vol. 5, Suppl. 3, pp. 345-358; Hein J. (1990) Unified Approach to Alignment and Phylogenes pp. 626-645 Methods in Enzymology vol. 183, Academic Press, Inc., San Diego, Calif.; Higgins, D. G. and Sharp, P. M. (1989) CABIOS 5:151-153; Myers, E. W. and Muller W. (1988) CABIOS 4:11-17; Robinson, E. D. (1971) Comb. Theor 11:105; Santou, N. Nes, M. (1987) Mol. Biol. Evol. 4:406-425; Sneath, P. H. A. and Sokal, R. R. (1973) Numerical Taxonomy—the Principles and Practice of Numerical Taxonomy, Freeman Press, San Francisco, Calif.; Wilbur, W. J. and Lipman, D. J. (1983) Proc. Natl. Acad., Sci. USA 80:726-730.

[0204] Alternatively, optimal alignment of sequences for comparison may be conducted by the local identity algorithm of Smith and Waterman (1981) Add. APL. Math 2:482, by the identity alignment algorithm of Needleman and Wunsch (1970) J. Mol. Biol. 48:443, by the search for similarity methods of Pearson and Lipman (1988) Proc. Natl. Acad. Sci. USA 85: 2444, by computerized implementations of these algorithms (GAP, BESTFIT, BLAST, FASTA, and TFASTA in the Wisconsin Genetics Software Package, Genetics Computer Group (GCG), 575 Science Dr., Madison, Wis.), or by inspection.

[0205] One preferred example of algorithms that are suitable for determining percent sequence identity and sequence similarity are the BLAST and BLAST 2.0 algorithms, which are described in Altschul et al. (1977) Nucl. Acids Res. 25:3389-3402 and Altschul et al. (1990) J. Mol. Biol. 215:403-410, respectively. BLAST and BLAST 2.0 can be used, for example with the parameters described herein, to determine percent sequence identity for the polynucleotides and polypeptides of the invention. Software for performing BLAST analyses is publicly available through the National Center for Biotechnology Information. In one illustrative example, cumulative scores can be calculated using, for nucleotide sequences, the parameters M (reward score for a pair of matching residues; always >0) and N (penalty score for mismatching residues; always <0). For amino acid sequences, a scoring matrix can be used to calculate the cumulative score. Extension of the word hits in each direction are halted when: the cumulative alignment score falls off by the quantity X from its maximum achieved value; the cumulative score goes to zero or below, due to the accumulation of one or more negative-scoring residue alignments; or the end of either sequence is reached. The BLAST algorithm parameters W, T and X determine the sensitivity and speed of the alignment. The BLASTN program (for nucleotide sequences) uses as defaults a wordlength (W) of 11, and expectation (E) of 10, and the BLOSUM62 scoring matrix (see Henikoff and Henikoff (1989) Proc. Natl. Acad. Sci. USA 89:10915) alignments, (B) of 50, expectation (E) of 10, M=5, N-4 and a comparison of both strands.

[0206] Preferably, the “percentage of sequence identity” is determined by comparing two optimally aligned sequences over a window of comparison of at least 20 positions, wherein the portion of the polynucleotide or polypeptide sequence in the comparison window may comprise additions or deletions (i.e., gaps) of 20 percent or less, usually 5 to 15 percent, or 10 to 12 percent, as compared to the reference sequences (which does not comprise additions or deletions) for optimal alignment of the two sequences. The percentage is calculated by determining the number of positions at which the identical nucleic acid bases or amino acid residue occurs in both sequences to yield the number of matched positions, dividing the number of matched positions by the total number of positions in the reference sequence (i.e., the window size) and multiplying the results by 100 to yield the percentage of sequence identity.

[0207] Therefore, the present invention encompasses polynucleotide and polypeptide sequences having substantial identity to the sequences disclosed herein, for example those comprising at least 50% sequence identity, preferably at least 55%, 60%, 65%, 70%, 75%, 80%, 85%, 90%, 95%, 96%, 97%, 98%, or 99% or higher, sequence identity compared to a polynucleotide or polypeptide sequence of this invention using the methods described herein, (e.g., BLAST analysis using standard parameters, as described below). One skilled in this art will recognize that these values can be appropriately adjusted to determine corresponding identity of proteins encoded by two nucleotide sequences by taking into account codon degeneracy, amino acid similarity, reading frame positioning and the like.

[0208] In additional embodiments, the present invention provides isolated polynucleotides and polypeptides comprising various lengths of contiguous stretches of sequence identical to or complementary to one or more of the sequences disclosed herein. For example, polynucleotides are provided by this invention that comprise at least about 15, 20, 30, 40, 50, 75, 100, 150, 200, 300, 400, 500 or 1000 or more contiguous nucleotides of one or more of the sequences disclosed herein as well as all intermediate lengths there between. It will be readily understood that “intermediate lengths”, in this context, means any length between the quoted values, such as 16, 17, 18, 19, etc.; 21, 22, 23, etc.; 30, 31, 32, etc.; 50, 51, 52, 53, etc.; 100, 101, 102, 103, etc.; 150, 151, 152, 153, etc.; including all integers through 200-500; 500-1,000, and the like.

[0209] The polynucleotides of the present invention, or fragments thereof, regardless of the length of the coding sequence itself, may be combined with other DNA sequences, such as promoters, polyadenylation signals, additional restriction enzyme sites, multiple cloning sites, other coding segments, and the like, such that their overall length may vary considerably. It is therefore contemplated that a nucleic acid fragment of almost any length may be employed, with the total length preferably being limited by the ease of preparation and use in the intended recombinant DNA protocol. For example, illustrative DNA segments with total lengths of about 10,000, about 5000, about 3000, about 2,000, about 1,000, about 500, about 200, about 100, about 50 base pairs in length, and the like, (including all intermediate lengths) are contemplated to be useful in many implementations of this invention.

[0210] In other embodiments, the present invention is directed to polynucleotides that are capable of hybridizing under moderately stringent conditions to a polynucleotide sequence provided herein, or a fragment thereof, or a complementary sequence thereof. Hybridization techniques are well known in the art of molecular biology. For purposes of illustration, suitable moderately stringent conditions for testing the hybridization of a polynucleotide of this invention with other polynucleotides include prewashing in a solution of 5×SSC, 0.5% SDS, 1.0 mM EDTA (pH 8.0); hybridizing at 50° C.-65° C., 5×SSC, overnight; followed by washing twice at 65° C. for 20 minutes with each of 2×, 0.5× and 0.2× SSC containing 0.1% SDS.

[0211] Moreover, it will be appreciated by those of ordinary skill in the art that, as a result of the degeneracy of the genetic code, there are many nucleotide sequences that encode a polypeptide as described herein. Some of these polynucleotides bear minimal homology to the nucleotide sequence of any native gene. Nonetheless, polynucleotides that vary due to differences in codon usage are specifically contemplated by the present invention. Further, alleles of the genes comprising the polynucleotide sequences provided herein are within the scope of the present invention. Alleles are endogenous genes that are altered as a result of one or more mutations, such as deletions, additions and/or substitutions of nucleotides. The resulting mRNA and protein may, but need not, have an altered structure or function. Alleles may be identified using standard techniques (such as hybridization, amplification and/or database sequence comparison).

### 4.10 PROBES AND PRIMERS

[0212] In other embodiments of the present invention, the polynucleotide sequences provided herein can be advantageously used as probes or primers for nucleic acid hybridization. As such, it is contemplated that nucleic acid segments that comprise a sequence region of at least about 15, 20, 25, 30, 35, 40, 45, 50, 55, 60, 65, 70, 75, 80, 85, 90, or 95 nucleotide long contiguous sequence that has the same sequence as, or is complementary to, at least a 15, 20, 25, 30, 35, 40, 45, 50, 55, 60, 65, 70, 75, 80, 85, 90, or 95 nucleotide long contiguous sequence as disclosed in any one of SEQ ID NO:1 to SEQ ID NO:13 will find particular utility in a variety of hybridization embodiments. Longer contiguous identical or complementary sequences, e.g., those of about 100, 110, 120, 130, 140, 150, 160, 170, 180, 190, 200, 210, 220, 230, 240, 250, 260, 270, 280, 290, 300, 310, 320, 330, 340, 350, 360, 370, 380, 390, 400, 410, 420, 430, 440, 450, 460, 470, 480, 490, 500, 525, 550, 575, 600, 650, 700, 750, 800, 850, 900, 950, or even 1000 or so nucleotides (including all intermediate lengths) and all full-length sequences as disclosed in SEQ ID NO:1 to SEQ ID NO:13 will also be of use in certain embodiments as probes, primers, or amplification targets and such like.

[0213] The ability of such nucleic acid probes to specifically hybridize to a sequence of interest will enable them to be of use in detecting the presence of complementary sequences in a given sample. However, other uses are also envisioned, such as the use of the sequence information for the preparation of mutant species primers, or primers, for use in preparing other genetic constructions, and for identifying and characterizing full-length polynucleotides and full, or substantially full-length cDNAs, mRNAs, and such like.

[0214] Polynucleotide molecules having sequence regions consisting of contiguous nucleotide stretches identical or complementary to one or more polynucleotide sequences as disclosed herein, are particularly contemplated as hybridization probes for use in, e.g., Southern hybridization analyses and Northern blotting. This would allow a gene product, or fragment thereof, to be analyzed, both in diverse cell types and also in various bacterial cells. The total size of fragment, as well as the size of the complementary stretch(es), will ultimately depend on the intended use or application of the particular nucleic acid segment. Smaller fragments will generally find use in hybridization embodiments, wherein the length of the contiguous complementary region may be varied, such as between about 15, 20, 25, 30, 35, 40, 45, 50, 55, 60 or so and up to and including larger contiguous complementary sequences, including those of about 70, 80, 90, 100, 120, 140, 160, 180, or 200 or so nucleotides in length may also be used, according to the given desired goal, and the particular length of the complementary sequences one wishes to detect by hybridization analysis.

[0215] The use of a hybridization probe of about between about 20 and about 500 nucleotides in length allows the formation of a duplex molecule that is both stable and selective. Molecules having contiguous complementary sequences over stretches greater than about 20 or so bases in length are generally preferred, though, in order to increase stability and selectivity of the hybrid, and thereby improve the quality and degree of specific hybrid molecules obtained. One will generally prefer to design nucleic acid molecules having gene-complementary stretches of between about 25 and 300 or so contiguous nucleotides, or even longer where desired.

[0216] Hybridization probes may be selected from any portion of any of the sequences disclosed herein. All that is required is to review the sequence set forth in any one of SEQ ID NO:1 through SEQ ID NO:13, or to any contiguous portion of such a sequence, from about 15 to 30 nucleotides in length up to and including the full length sequences disclosed in any one of SEQ ID NO:1 through SEQ ID NO:13, that one wishes to utilize as a probe or primer. The choice of probe and primer sequences may be governed by various factors. For example, one may wish to employ primers from towards the termini of the total sequence.

[0217] Small polynucleotide segments or fragments may be readily prepared by, for example, directly synthesizing the fragment by chemical means, as is commonly practiced using an automated oligonucleotide synthesizer. Also, fragments may be obtained by application of nucleic acid reproduction technology, such as the PCR™ technology of U.S. Pat. No. 4,683,202 (incorporated herein by reference), by introducing selected sequences into recombinant vectors for recombinant production, and by other recombinant DNA techniques generally known to those of skill in the art of molecular biology.

[0218] The nucleotide sequences of the invention may be used for their ability to selectively form duplex molecules with complementary stretches of the entire gene or gene fragments of interest. Depending on the application envisioned, one will typically desire to employ varying conditions of hybridization to achieve varying degrees of selectivity of probe towards target sequence. For applications requiring high selectivity, one will typically desire to employ relatively stringent conditions to form the hybrids, e.g., one will select relatively low salt and/or high temperature conditions, such as provided by a salt concentration of from about 0.02 M to about 0.15 M salt at temperatures of from about 50° C. to about 70° C. Such selective conditions tolerate little, if any, mismatch between the probe and the template or target strand, and would be particularly suitable for isolating related sequences.

[0219] Of course, for some applications, for example, where one desires to prepare mutants employing a mutant primer strand hybridized to an underlying template, less stringent (reduced stringency) hybridization conditions will typically be needed in order to allow formation of the heteroduplex. In these circumstances, one may desire to employ salt conditions such as those of from about 0.15 M to about 0.9 M salt, at temperatures ranging from about 20° C. to about 55° C. Cross-hybridizing species can thereby be readily identified as positively hybridizing signals with respect to control hybridizations. In any case, it is generally appreciated that conditions can be rendered more stringent by the addition of increasing amounts of formamide, which serves to destabilize the hybrid duplex in the same manner as increased temperature. Thus, hybridization conditions can be readily manipulated, and thus will generally be a method of choice depending on the desired results.

### 4.11 POLYNUCLEOTIDE IDENTIFICATION AND CHARACTERIZATION

[0220] Polynucleotides may be identified, prepared and/or manipulated using any of a variety of well established techniques. For example, a polynucleotide may be identified, as described in more detail below, by screening a microarray of cDNAs for tumor-associated expression (i.e., expression that is at least two fold greater in a tumor than in normal tissue, as determined using a representative assay provided herein). Such screens may be performed, for example, using a Synteni microarray (Palo Alto, Calif.) according to the manufacturer's instructions (and essentially as described by Schena et al., Proc. Natl. Acad. Sci. USA 93:10614-10619, 1996 and Heller et al., Proc. Natl. Acad. Sci. USA 94:2150-2155, 1997). Alternatively, polynucleotides may be amplified from cDNA prepared from cells expressing the proteins described herein, such as hematological malignancy-related tumor cells. Such polynucleotides may be amplified via polymerase chain reaction (PCR). For this approach, sequence-specific primers may be designed based on the sequences provided herein, and may be purchased or synthesized.

[0221] An amplified portion of a polynucleotide of the present invention may be used to isolate a full length gene from a suitable library (e.g., a hematological malignancy-related tumor cDNA library) using well known techniques. Within such techniques, a library (cDNA or genomic) is screened using one or more polynucleotide probes or primers suitable for amplification. Preferably, a library is size-selected to include larger molecules. Random primed libraries may also be preferred for identifying 5′ and upstream regions of genes. Genomic libraries are preferred for obtaining introns and extending 5′ sequences.

[0222] For hybridization techniques, a partial sequence may be labeled (e.g., by nick-translation or end-labeling with ³²P) using well known techniques. A bacterial or bacteriophage library is then generally screened by hybridizing filters containing denatured bacterial colonies (or lawns containing phage plaques) with the labeled probe (see Sambrook et al., Molecular Cloning: A Laboratory Manual, Cold Spring Harbor Laboratories, Cold Spring Harbor, N.Y., 1989). Hybridizing colonies or plaques are selected and expanded, and the DNA is isolated for further analysis. cDNA clones may be analyzed to determine the amount of additional sequence by, for example, PCR using a primer from the partial sequence and a primer from the vector. Restriction maps and partial sequences may be generated to identify one or more overlapping clones. The complete sequence may then be determined using standard techniques, which may involve generating a series of deletion clones. The resulting overlapping sequences can then assembled into a single contiguous sequence. A full length cDNA molecule can be generated by ligating suitable fragments, using well known techniques.

[0223] Alternatively, there are numerous amplification techniques for obtaining a full length coding sequence from a partial cDNA sequence. Within such techniques, amplification is generally performed via PCR. Any of a variety of commercially available kits may be used to perform the amplification step. Primers may be designed using, for example, software or algorithms or formulas well known in the art.

[0224] One such amplification technique is inverse PCR (see Triglia et al., Nuc. Acids Res. 16:8186, 1988), which uses restriction enzymes to generate a fragment in the known region of the gene. The fragment is then circularized by intramolecular ligation and used as a template for PCR with divergent primers derived from the known region. Within an alternative approach, sequences adjacent to a partial sequence may be retrieved by amplification with a primer to a linker sequence and a primer specific to a known region. The amplified sequences are typically subjected to a second round of amplification with the same linker primer and a second primer specific to the known region. A variation on this procedure, which employs two primers that initiate extension in opposite directions from the known sequence, is described in WO 96/38591. Another such technique is known as “rapid amplification of cDNA ends” or RACE. This technique involves the use of an internal primer and an external primer, which hybridizes to a polyA region or vector sequence, to identify sequences that are 5′ and 3′ of a known sequence. Additional techniques include capture PCR (Lagerstrom et al., PCR Methods Applic. 1:111-19, 1991) and walking PCR (Parker et al., Nucl. Acids. Res. 19:3055-60, 1991). Other methods employing amplification may also be employed to obtain a full length cDNA sequence.

[0225] In certain instances, it is possible to obtain a full length cDNA sequence by analysis of sequences provided in an expressed sequence tag (EST) database, such as that available from GenBank. Searches for overlapping ESTs may generally be performed using well known programs (e.g., NCBI BLAST searches), and such ESTs may be used to generate a contiguous full length sequence. Full length DNA sequences may also be obtained by analysis of genomic fragments.

### 4.12 POLYNUCLEOTIDE EXPRESSION IN HOST CELLS

[0226] In other embodiments of the invention, polynucleotide sequences or fragments thereof which encode polypeptides of the invention, or fusion proteins or functional equivalents thereof, may be used in recombinant DNA molecules to direct expression of a polypeptide in appropriate host cells. Due to the inherent degeneracy of the genetic code, other DNA sequences that encode substantially the same or a functionally equivalent amino acid sequence may be produced and these sequences may be used to clone and express a given polypeptide.

[0227] As will be understood by those of skill in the art, it may be advantageous in some instances to produce polypeptide-encoding nucleotide sequences possessing non-naturally occurring codons. For example, codons preferred by a particular prokaryotic or eukaryotic host can be selected to increase the rate of protein expression or to produce a recombinant RNA transcript having desirable properties, such as a half-life which is longer than that of a transcript generated from the naturally occurring sequence.

[0228] Moreover, the polynucleotide sequences of the present invention can be engineered using methods generally known in the art in order to alter polypeptide encoding sequences for a variety of reasons, including but not limited to, alterations which modify the cloning, processing, and/or expression of the gene product. For example, DNA shuffling by random fragmentation and PCR reassembly of gene fragments and synthetic oligonucleotides may be used to engineer the nucleotide sequences. In addition, site-directed mutagenesis may be used to insert new restriction sites, alter glycosylation patterns, change codon preference, produce splice variants, or introduce mutations, and so forth.

[0229] In another embodiment of the invention, natural, modified, or recombinant nucleic acid sequences may be ligated to a heterologous sequence to encode a fusion protein. For example, to screen peptide libraries for inhibitors of polypeptide activity, it may be useful to encode a chimeric protein that can be recognized by a commercially available antibody. A fusion protein may also be engineered to contain a cleavage site located between the polypeptide-encoding sequence and the heterologous protein sequence, so that the polypeptide may be cleaved and purified away from the heterologous moiety.

[0230] Sequences encoding a desired polypeptide may be synthesized, in whole or in part, using chemical methods well known in the art (see Caruthers, M. H. et al. (1980) Nucl. Acids Res. Symp. Ser. 215-223, Horn, T. et al. (1980) Nucl. Acids Res. Symp. Ser. 225-232). Alternatively, the protein itself may be produced using chemical methods to synthesize the amino acid sequence of a polypeptide, or a portion thereof. For example, peptide synthesis can be performed using various solid-phase techniques (Roberge, J. Y. et al. (1995) Science 269:202-204) and automated synthesis may be achieved, for example, using the ABI 431A Peptide Synthesizer (Perkin Elmer, Palo Alto, Calif.).

[0231] A newly synthesized peptide may be substantially purified by preparative high performance liquid chromatography (e.g., Creighton, T. (1983) Proteins, Structures and Molecular Principles, W H Freeman and Co., New York, N.Y.) or other comparable techniques available in the art. The composition of the synthetic peptides may be confirmed by amino acid analysis or sequencing (e.g., the Edman degradation procedure). Additionally, the amino acid sequence of a polypeptide, or any part thereof, may be altered during direct synthesis and/or combined using chemical methods with sequences from other proteins, or any part thereof, to produce a variant polypeptide.

[0232] In order to express a desired polypeptide, the nucleotide sequences encoding the polypeptide, or functional equivalents, may be inserted into appropriate expression vector, i.e., a vector which contains the necessary elements for the transcription and translation of the inserted coding sequence. Methods which are well known to those skilled in the art may be used to construct expression vectors containing sequences encoding a polypeptide of interest and appropriate transcriptional and translational control elements. These methods include in vitro recombinant DNA techniques, synthetic techniques, and in vivo genetic recombination. Such techniques are described in Sambrook, J. et al. (1989) Molecular Cloning, A Laboratory Manual, Cold Spring Harbor Press, Plainview, N.Y., and Ausubel, F. M. et al. (1989) Current Protocols in Molecular Biology, John Wiley & Sons, New York. N.Y.

[0233] A variety of expression vector/host systems may be utilized to contain and express polynucleotide sequences. These include, but are not limited to, microorganisms such as bacteria transformed with recombinant bacteriophage, plasmid, or cosmid DNA expression vectors; yeast transformed with yeast expression vectors; insect cell systems infected with virus expression vectors (e.g., baculovirus); plant cell systems transformed with virus expression vectors (e.g., cauliflower mosaic virus, CaMV; tobacco mosaic virus, TMV) or with bacterial expression vectors (e.g., Ti or pBR322 plasmids); or animal cell systems.

[0234] The “control elements” or “regulatory sequences” present in an expression vector are those non-translated regions of the vector—enhancers, promoters, 5′ and 3′ untranslated regions—which interact with host cellular proteins to carry out transcription and translation. Such elements may vary in their strength and specificity. Depending on the vector system and host utilized, any number of suitable transcription and translation elements, including constitutive and inducible promoters, may be used. For example, when cloning in bacterial systems, inducible promoters such as the hybrid lacZ promoter of the PBLUESCRIPT phagemid (Stratagene, La Jolla, Calif.) or PSPORT1 plasmid (Gibco BRL, Gaithersburg, Md.) and the like may be used. In mammalian cell systems, promoters from mammalian genes or from mammalian viruses are generally preferred. If it is necessary to generate a cell line that contains multiple copies of the sequence encoding a polypeptide, vectors based on SV40 or EBV may be advantageously used with an appropriate selectable marker.

[0235] In bacterial systems, a number of expression vectors may be selected depending upon the use intended for the expressed polypeptide. For example, when large quantities are needed, for example for the induction of antibodies, vectors which direct high level expression of fusion proteins that are readily purified may be used. Such vectors include, but are not limited to, the multifunctional E. coli cloning and expression vectors such as BLUESCRIPT (Stratagene), in which the sequence encoding the polypeptide of interest may be ligated into the vector in frame with sequences for the amino-terminal Met and the subsequent 7 residues of beta.-galactosidase so that a hybrid protein is produced; pIN vectors (Van Heeke, G. and S. M. Schuster (1989) J. Biol. Chem. 264:5503-5509); and the like. pGEX Vectors (Promega, Madison, Wis.) may also be used to express foreign polypeptides as fusion proteins with glutathione S-transferase (GST). In general, such fusion proteins are soluble and can easily be purified from lysed cells by adsorption to glutathione-agarose beads followed by elution in the presence of free glutathione. Proteins made in such systems may be designed to include heparin, thrombin, or factor XA protease cleavage sites so that the cloned polypeptide of interest can be released from the GST moiety at will.

[0236] In the yeast, Saccharomyces cerevisiae, a number of vectors containing constitutive or inducible promoters such as alpha factor, alcohol oxidase, and PGH may be used. For reviews, see Ausubel et al. (supra) and Grant et al. (1987) Methods Enzymol. 153:516-544.

[0237] In cases where plant expression vectors are used, the expression of sequences encoding polypeptides may be driven by any of a number of promoters. For example, viral promoters such as the 35S and 19S promoters of CaMV may be used alone or in combination with the omega leader sequence from TMV (Takamatsu, N. (1987) EMBO J. 6:307-311. Alternatively, plant promoters such as the small subunit of RUBISCO or heat shock promoters may be used (Coruzzi, G. et al. (1984) EMBO J. 3:1671-1680; Broglie, R. et al. (1984) Science 224:838-843; and Winter, J. et al. (1991) Results Probl. Cell Differ. 17:85-105). These constructs can be introduced into plant cells by direct DNA transformation or pathogen-mediated transfection. Such techniques are described in a number of generally available reviews (see, for example, Hobbs, S. or Murry, L. E. in McGraw Hill Yearbook of Science and Technology (1992) McGraw Hill, New York, N.Y.; pp. 191-196).

[0238] An insect system may also be used to express a polypeptide of interest. For example, in one such system, Autographa californica nuclear polyhedrosis virus (AcNPV) is used as a vector to express foreign genes in Spodoptera frugiperda cells or in Trichoplusia larvae. The sequences encoding the polypeptide may be cloned into a non-essential region of the virus, such as the polyhedrin gene, and placed under control of the polyhedrin promoter. Successful insertion of the polypeptide-encoding sequence will render the polyhedrin gene inactive and produce recombinant virus lacking coat protein. The recombinant viruses may then be used to infect, for example, S. frugiperda cells or Trichoplusia larvae in which the polypeptide of interest may be expressed (Engelhard, E. K. et al. (1994) Proc. Natl. Acad. Sci. 91 :3224-3227).

[0239] In mammalian host cells, a number of viral-based expression systems are generally available. For example, in cases where an adenovirus is used as an expression vector, sequences encoding a polypeptide of interest may be ligated into an adenovirus transcription/translation complex consisting of the late promoter and tripartite leader sequence. Insertion in a non-essential E1 or E3 region of the viral genome may be used to obtain a viable virus which is capable of expressing the polypeptide in infected host cells (Logan, J. and Shenk, T. (1984) Proc. Natl. Acad. Sci. 81:3655-3659). In addition, transcription enhancers, such as the Rous sarcoma virus (RSV) enhancer, may be used to increase expression in mammalian host cells.

[0240] Specific initiation signals may also be used to achieve more efficient translation of sequences encoding a polypeptide of interest. Such signals include the ATG initiation codon and adjacent sequences. In cases where sequences encoding the polypeptide, its initiation codon, and upstream sequences are inserted into the appropriate expression vector, no additional transcriptional or translational control signals may be needed. However, in cases where only coding sequence, or a portion thereof, is inserted, exogenous translational control signals including the ATG initiation codon should be provided. Furthermore, the initiation codon should be in the correct reading frame to ensure translation of the entire insert. Exogenous translational elements and initiation codons may be of various origins, both natural and synthetic. The efficiency of expression may be enhanced by the inclusion of enhancers which are appropriate for the particular cell system which is used, such as those described in the literature (Scharf, D. et al. (1994) Results Probl. Cell Differ. 20:125-162).

[0241] In addition, a host cell strain may be chosen for its ability to modulate the expression of the inserted sequences or to process the expressed protein in the desired fashion. Such modifications of the polypeptide include, but are not limited to, acetylation, carboxylation. glycosylation, phosphorylation, lipidation, and acylation. Post-translational processing which cleaves a “prepro” form of the protein may also be used to facilitate correct insertion, folding and/or function. Different host cells such as CHO, HeLa, MDCK, HEK293, and WI38, which have specific cellular machinery and characteristic mechanisms for such post-translational activities, may be chosen to ensure the correct modification and processing of the foreign protein.

[0242] For long-term, high-yield production of recombinant proteins, stable expression is generally preferred. For example, cell lines which stably express a polynucleotide of interest may be transformed using expression vectors which may contain viral origins of replication and/or endogenous expression elements and a selectable marker gene on the same or on a separate vector. Following the introduction of the vector, cells may be allowed to grow for 1-2 days in an enriched media before they are switched to selective media. The purpose of the selectable marker is to confer resistance to selection, and its presence allows growth and recovery of cells which successfully express the introduced sequences. Resistant clones of stably transformed cells may be proliferated using tissue culture techniques appropriate to the cell type.

[0243] Any number of selection systems may be used to recover transformed cell lines. These include, but are not limited to, the herpes simplex virus thymidine kinase (Wigler, M. et al. (1977) Cell 11:223-32) and adenine phosphoribosyltransferase (Lowy, I. et al. (1990) Cell 22:817-23) genes which can be employed in tk.sup.- or aprt.sup.- cells, respectively. Also, antimetabolite, antibiotic or herbicide resistance can be used as the basis for selection; for example, dhfr which confers resistance to methotrexate (Wigler, M. et al. (1980) Proc. Natl. Acad. Sci. 77:3567-70); npt, which confers resistance to the aminoglycosides, neomycin and G-418 (Colbere-Garapin, F. et al (1981) J. Mol. Biol. 150:1-14); and als or pat, which confer resistance to chlorsulfuron and phosphinotricin acetyltransferase, respectively (Murry, supra). Additional selectable genes have been described, for example, trpB, which allows cells to utilize indole in place of tryptophan, or hisD, which allows cells to utilize histinol in place of histidine (Hartman, S. C. and R. C. Mulligan (1988) Proc. Natl. Acad. Sci. 85:8047-51). Recently, the use of visible markers has gained popularity with such markers as anthocyanins, beta-glucuronidase and its substrate GUS, and luciferase and its substrate luciferin, being widely used not only to identify transformants, but also to quantify the amount of transient or stable protein expression attributable to a specific vector system (Rhodes, C. A. et al. (1995) Methods Mol. Biol. 55:121-131).

[0244] Although the presence/absence of marker gene expression suggests that the gene of interest is also present, its presence and expression may need to be confirmed. For example, if the sequence encoding a polypeptide is inserted within a marker gene sequence, recombinant cells containing sequences can be identified by the absence of marker gene function. Alternatively, a marker gene can be placed in tandem with a polypeptide-encoding sequence under the control of a single promoter. Expression of the marker gene in response to induction or selection usually indicates expression of the tandem gene as well.

[0245] Alternatively, host cells which contain and express a desired polynucleotide sequence may be identified by a variety of procedures known to those of skill in the art. These procedures include, but are not limited to, DNA-DNA or DNA-RNA hybridizations and protein bioassay or immunoassay techniques which include membrane, solution, or chip based technologies for the detection and/or quantification of nucleic acid or protein.

[0246] A variety of protocols for detecting and measuring the expression of polynucleotide-encoded products, using either polyclonal or monoclonal antibodies specific for the product are known in the art. Examples include enzyme-linked immunosorbent assay (ELISA), radioimmunoassay (RIA), and fluorescence activated cell sorting (FACS). A two-site, monoclonal-based immunoassay utilizing monoclonal antibodies reactive to two non-interfering epitopes on a given polypeptide may be preferred for some applications, but a competitive binding assay may also be employed. These and other assays are described, among other places, in Hampton, R. et al. (1990; Serological Methods, a Laboratory Manual, APS Press, St Paul. Minn.) and Maddox, D. E. et al. (1983; J. Exp. Med. 158:1211-1216).

[0247] A wide variety of labels and conjugation techniques are known by those skilled in the art and may be used in various nucleic acid and amino acid assays. Means for producing labeled hybridization or PCR probes for detecting sequences related to polynucleotides include oligolabeling, nick translation, end-labeling or PCR amplification using a labeled nucleotide. Alternatively, the sequences, or any portions thereof may be cloned into a vector for the production of an mRNA probe. Such vectors are known in the art, are commercially available, and may be used to synthesize RNA probes in vitro by addition of an appropriate RNA polymerase such as T7, T3, or SP6 and labeled nucleotides. These procedures may be conducted using a variety of commercially available kits. Suitable reporter molecules or labels, which may be used include radionuclides, enzymes, fluorescent, chemiluminescent, or chromogenic agents as well as substrates, cofactors, inhibitors, magnetic particles, and the like.

[0248] Host cells transformed with a polynucleotide sequence of interest may be cultured under conditions suitable for the expression and recovery of the protein from cell culture. The protein produced by a recombinant cell may be secreted or contained intracellularly depending on the sequence and/or the vector used. As will be understood by those of skill in the art, expression vectors containing polynucleotides of the invention may be designed to contain signal sequences which direct secretion of the encoded polypeptide through a prokaryotic or eukaryotic cell membrane. Other recombinant constructions may be used to join sequences encoding a polypeptide of interest to nucleotide sequence encoding a polypeptide domain which will facilitate purification of soluble proteins. Such purification facilitating domains include, but are not limited to, metal chelating peptides such as histidine-tryptophan modules that allow purification on immobilized metals, protein A domains that allow purification on immobilized immunoglobulin, and the domain utilized in the FLAGS extension/affinity purification system (Immunex Corp., Seattle, Wash.). The inclusion of cleavable linker sequences such as those specific for Factor XA or enterokinase (Invitrogen. San Diego, Calif.) between the purification domain and the encoded polypeptide may be used to facilitate purification. One such expression vector provides for expression of a fusion protein containing a polypeptide of interest and a nucleic acid encoding 6 histidine residues preceding a thioredoxin or an enterokinase cleavage site. The histidine residues facilitate purification on IMIAC (immobilized metal ion affinity chromatography) as described in Porath, J. et al. (1992, Prot. Exp. Purif. 3:263-281) while the enterokinase cleavage site provides a means for purifying the desired polypeptide from the fusion protein. A discussion of vectors which contain fusion proteins is provided in Kroll, D. J. et al. (1993; DNA Cell Biol. 12:441-453).

[0249] In addition to recombinant production methods, polypeptides of the invention, and fragments thereof, may be produced by direct peptide synthesis using solid-phase techniques (Merrifield J. (1963) J. Am. Chem. Soc. 85:2149-2154). Protein synthesis may be performed using manual techniques or by automation. Automated synthesis may be achieved, for example, using Applied Biosystems 431A Peptide Synthesizer (Perkin Elmer). Alternatively, various fragments may be chemically synthesized separately and combined using chemical methods to produce the full length molecule.

### 4.13 SITE-SPECIFIC MUTAGENESIS

[0250] Site-specific mutagenesis is a technique useful in the preparation of individual peptides, or biologically functional equivalent polypeptides, through specific mutagenesis of the underlying polynucleotides that encode them. The technique, well-known to those of skill in the art, further provides a ready ability to prepare and test sequence variants, for example, incorporating one or more of the foregoing considerations, by introducing one or more nucleotide sequence changes into the DNA. Site-specific mutagenesis allows the production of mutants through the use of specific oligonucleotide sequences which encode the DNA sequence of the desired mutation, as well as a sufficient number of adjacent nucleotides, to provide a primer sequence of sufficient size and sequence complexity to form a stable duplex on both sides of the deletion junction being traversed. Mutations may be employed in a selected polynucleotide sequence to improve, alter, decrease, modify, or otherwise change the properties of the polynucleotide itself, and/or alter the properties, activity, composition, stability, or primary sequence of the encoded polypeptide.

[0251] In certain embodiments of the present invention, the inventors contemplate the mutagenesis of the disclosed polynucleotide sequences to alter one or more properties of the encoded polypeptide, such as the antigenicity of a polypeptide vaccine. The techniques of site-specific mutagenesis are well-known in the art, and are widely used to create variants of both polypeptides and polynucleotides. For example, site-specific mutagenesis is often used to alter a specific portion of a DNA molecule. In such embodiments, a primer comprising typically about 14 to about 25 nucleotides or so in length is employed, with about 5 to about 10 residues on both sides of the junction of the sequence being altered.

[0252] As will be appreciated by those of skill in the art, site-specific mutagenesis techniques have often employed a phage vector that exists in both a single stranded and double stranded form. Typical vectors useful in site-directed mutagenesis include vectors such as the M13 phage. These phage are readily commercially-available and their use is generally well-known to those skilled in the art. Double-stranded plasmids are also routinely employed in site directed mutagenesis that eliminates the step of transferring the gene of interest from a plasmid to a phage.

[0253] In general, site-directed mutagenesis in accordance herewith is performed by first obtaining a single-stranded vector or melting apart of two strands of a double-stranded vector that includes within its sequence a DNA sequence that encodes the desired peptide. An oligonucleotide primer bearing the desired mutated sequence is prepared, generally synthetically. This primer is then annealed with the single-stranded vector, and subjected to DNA polymerizing enzymes such as E. coli polymerase I Klenow fragment, in order to complete the synthesis of the mutation-bearing strand. Thus, a heteroduplex is formed wherein one strand encodes the original non-mutated sequence and the second strand bears the desired mutation. This heteroduplex vector is then used to transform appropriate cells, such as E. coli cells, and clones are selected which include recombinant vectors bearing the mutated sequence arrangement.

[0254] The preparation of sequence variants of the selected peptide-encoding DNA segments using site-directed mutagenesis provides a means of producing potentially useful species and is not meant to be limiting as there are other ways in which sequence variants of peptides and the DNA sequences encoding them may be obtained. For example, recombinant vectors encoding the desired peptide sequence may be treated with mutagenic agents, such as hydroxylamine, to obtain sequence variants. Specific details regarding these methods and protocols are found in the teachings of Maloy et al., 1994; Segal, 1976; Prokop and Bajpai, 1991; Kuby, 1994; and Maniatis et al., 1982, each incorporated herein by reference, for that purpose.

[0255] As used herein, the term “oligonucleotide directed mutagenesis procedure” refers to template-dependent processes and vector-mediated propagation which result in an increase in the concentration of a specific nucleic acid molecule relative to its initial concentration, or in an increase in the concentration of a detectable signal, such as amplification. As used herein, the term “oligonucleotide directed mutagenesis procedure” is intended to refer to a process that involves the template-dependent extension of a primer molecule. The term template dependent process refers to nucleic acid synthesis of an RNA or a DNA molecule wherein the sequence of the newly synthesized strand of nucleic acid is dictated by the well-known rules of complementary base pairing (see, for example, Watson, 1987). Typically, vector mediated methodologies involve the introduction of the nucleic acid fragment into a DNA or RNA vector, the clonal amplification of the vector, and the recovery of the amplified nucleic acid fragment. Examples of such methodologies are provided by U.S. Pat. No. 4,237,224, specifically incorporated herein by reference in its entirety.

### 4.14 POLYNUCLEOTIDE AMPLIFICATION TECHNIQUES

[0256] A number of template dependent processes are available to amplify the target sequences of interest present in a sample. One of the best known amplification methods is the polymerase chain reaction (PCR™) which is described in detail in U.S. Pat. Nos. 4,683,195, 4,683,202 and 4,800,159, each of which is incorporated herein by reference in its entirety. Briefly, in PCR™, two primer sequences are prepared which are complementary to regions on opposite complementary strands of the target sequence. An excess of deoxynucleoside triphosphates is added to a reaction mixture along with a DNA polymerase (e.g., Taq polymerase). If the target sequence is present in a sample, the primers will bind to the target and the polymerase will cause the primers to be extended along the target sequence by adding on nucleotides. By raising and lowering the temperature of the reaction mixture, the extended primers will dissociate from the target to form reaction products, excess primers will bind to the target and to the reaction product and the process is repeated. Preferably reverse transcription and PCR™ amplification procedure may be performed in order to quantify the amount of mRNA amplified. Polymerase chain reaction methodologies are well known in the art.

[0257] Another method for amplification is the ligase chain reaction (referred to as LCR), disclosed in Eur. Pat. Appl. Publ. No. 320,308 (specifically incorporated herein by reference in its entirety). In LCR, two complementary probe pairs are prepared, and in the presence of the target sequence, each pair will bind to opposite complementary strands of the target such that they abut. In the presence of a ligase, the two probe pairs will link to form a single unit. By temperature cycling, as in PCR™, bound ligated units dissociate from the target and then serve as “target sequences” for ligation of excess probe pairs. U.S. Pat. No. 4,883,750, incorporated herein by reference in its entirety, describes an alternative method of amplification similar to LCR for binding probe pairs to a target sequence.

[0258] Qbeta Replicase, described in PCT Intl. Pat. Appl. Publ. No. PCT/US87/00880, incorporated herein by reference in its entirety, may also be used as still another amplification method in the present invention. In this method, a replicative sequence of RNA that has a region complementary to that of a target is added to a sample in the presence of an RNA polymerase. The polymerase will copy the replicative sequence that can then be detected.

[0259] An isothermal amplification method, in which restriction endonucleases and ligases are used to achieve the amplification of target molecules that contain nucleotide 5′-[α-thio]triphosphates in one strand of a restriction site (Walker et al., 1992, incorporated herein by reference in its entirety), may also be useful in the amplification of nucleic acids in the present invention.

[0260] Strand Displacement Amplification (SDA) is another method of carrying out isothermal amplification of nucleic acids which involves multiple rounds of strand displacement and synthesis, i.e. nick translation. A similar method, called Repair Chain Reaction (RCR) is another method of amplification which may be useful in the present invention and is involves annealing several probes throughout a region targeted for amplification, followed by a repair reaction in which only two of the four bases are present. The other two bases can be added as biotinylated derivatives for easy detection. A similar approach is used in SDA.

[0261] Sequences can also be detected using a cyclic probe reaction (CPR). In CPR, a probe having a 3′ and 5′ sequences of non-target DNA and an internal or “middle” sequence of the target protein specific RNA is hybridized to DNA which is present in a sample. Upon hybridization, the reaction is treated with RNaseH, and the products of the probe are identified as distinctive products by generating a signal that is released after digestion. The original template is annealed to another cycling probe and the reaction is repeated. Thus, CPR involves amplifying a signal generated by hybridization of a probe to a target gene specific expressed nucleic acid.

[0262] Still other amplification methods described in Great Britain Pat. Appl. No. 2 202 328, and in PCT Intl. Pat. Appl. Publ. No. PCT/US89/01025, each of which is incorporated herein by reference in its entirety, may be used in accordance with the present invention. In the former application, “modified” primers are used in a PCR-like, template and enzyme dependent synthesis. The primers may be modified by labeling with a capture moiety (e.g. biotin) and/or a detector moiety (e.g., enzyme). In the latter application, an excess of labeled probes is added to a sample. In the presence of the target sequence, the probe binds and is cleaved catalytically. After cleavage, the target sequence is released intact to be bound by excess probe. Cleavage of the labeled probe signals the presence of the target sequence.

[0263] Other nucleic acid amplification procedures include transcription-based amplification systems (TAS) (Kwoh et al., 1989; PCT Intl. Pat. Appl. Publ. No. WO 88/10315, incorporated herein by reference in its entirety), including nucleic acid sequence based amplification (NASBA) and 3SR. In NASBA, the nucleic acids can be prepared for amplification by standard phenol/chloroform extraction, heat denaturation of a sample, treatment with lysis buffer and minispin columns for isolation of DNA and RNA or guanidinium chloride extraction of RNA. These amplification techniques involve annealing a primer that has sequences specific to the target sequence. Following polymerization, DNA/RNA hybrids are digested with RNase H while double stranded DNA molecules are heat-denatured again. In either case the single stranded DNA is made fully double stranded by addition of second target-specific primer, followed by polymerization. The double stranded DNA molecules are then multiply transcribed by a polymerase such as T7 or SP6. In an isothermal cyclic reaction, the RNAs are reverse transcribed into DNA, and transcribed once again with a polymerase such as T7 or SP6. The resulting products, whether truncated or complete, indicate target-specific sequences.

[0264] Eur. Pat. Appl. Publ. No. 329,822, incorporated herein by reference in its entirety, disclose a nucleic acid amplification process involving cyclically synthesizing single-stranded RNA (“ssRNA”), ssDNA, and double-stranded DNA (dsDNA), which may be used in accordance with the present invention. The ssRNA is a first template for a first primer oligonucleotide, which is elongated by reverse transcriptase (RNA-dependent DNA polymerase). The RNA is then removed from resulting DNA:RNA duplex by the action of ribonuclease H (RNase H, an RNase specific for RNA in a duplex with either DNA or RNA). The resultant ssDNA is a second template for a second primer, which also includes the sequences of an RNA polymerase promoter (exemplified by T7 RNA polymerase) 5′ to its homology to its template. This primer is then extended by DNA polymerase (exemplified by the large “Klenow” fragment of E. coli DNA polymerase I), resulting as a double-stranded DNA (“dsDNA”) molecule, having a sequence identical to that of the original RNA between the primers and having additionally, at one end, a promoter sequence. This promoter sequence can be used by the appropriate RNA polymerase to make many RNA copies of the DNA. These copies can then re-enter the cycle leading to very swift amplification. With proper choice of enzymes, this amplification can be done isothermally without addition of enzymes at each cycle. Because of the cyclical nature of this process, the starting sequence can be chosen to be in the form of either DNA or RNA.

[0265] PCT Intl. Pat. Appl. Publ. No. WO 89/06700, incorporated herein by reference in its entirety, disclose a nucleic acid sequence amplification scheme based on the hybridization of a promoter/primer sequence to a target single-stranded DNA (“ssDNA”) followed by transcription of many RNA copies of the sequence. This scheme is not cyclic; i.e. new templates are not produced from the resultant RNA transcripts. Other amplification methods include “RACE” (Frohman, 1990), and “one-sided PCR” (Ohara, 1989) which are well-known to those of skill in the art.

[0266] Methods based on ligation of two (or more) oligonucleotides in the presence of nucleic acid having the sequence of the resulting “di-oligonucleotide”, thereby amplifying the di-oligonucleotide (Wu and Dean, 1996, incorporated herein by reference in its entirety), may also be used in the amplification of DNA sequences of the present invention.

### 4.15 IN VIVO POLYNUCLEOTIDE DELIVERY TECHNIQUES

[0267] In additional embodiments, genetic constructs comprising one or more of the polynucleotides of the invention are introduced into cells in vivo. This may be achieved using any of a variety or well known approaches, several of which are outlined below for the purpose of illustration.

### 4.15.1 ADENOVIRUS

[0268] One of the preferred methods for in vivo delivery of one or more nucleic acid sequences involves the use of an adenovirus expression vector. “Adenovirus expression vector” is meant to include those constructs containing adenovirus sequences sufficient to (a) support packaging of the construct and (b) to express a polynucleotide that has been cloned therein in a sense or antisense orientation. Of course, in the context of an antisense construct, expression does not require that the gene product be synthesized.

[0269] The expression vector comprises a genetically engineered form of an adenovirus. Knowledge of the genetic organization of adenovirus, a 36 kb, linear, double-stranded DNA virus, allows substitution of large pieces of adenoviral DNA with foreign sequences up to 7 kb (Grunhaus and Horwitz, 1992). In contrast to retrovirus, the adenoviral infection of host cells does not result in chromosomal integration because adenoviral DNA can replicate in an episomal manner without potential genotoxicity. Also, adenoviruses are structurally stable, and no genome rearrangement has been detected after extensive amplification. Adenovirus can infect virtually all epithelial cells regardless of their cell cycle stage. So far, adenoviral infection appears to be linked only to mild disease such as acute respiratory disease in humans.

[0270] Adenovirus is particularly suitable for use as a gene transfer vector because of its mid-sized genome, ease of manipulation, high titer, wide target-cell range and high infectivity. Both ends of the viral genome contain 100-200 base pair inverted repeats (ITRs), which are cis elements necessary for viral DNA replication and packaging. The early (E) and late (L) regions of the genome contain different transcription units that are divided by the onset of viral DNA replication. The El region (E1A and E1B) encodes proteins responsible for the regulation of transcription of the viral genome and a few cellular genes. The expression of the E2 region (E2A and E2B) results in the synthesis of the proteins for viral DNA replication. These proteins are involved in DNA replication, late gene expression and host cell shut-off (Renan, 1990). The products of the late genes, including the majority of the viral capsid proteins, are expressed only after significant processing of a single primary transcript issued by the major late promoter (MLP). The MLP, (located at 16.8 m.u.) is particularly efficient during the late phase of infection, and all the mRNA's issued from this promoter possess a 5′-tripartite leader (TPL) sequence which makes them preferred mRNA's for translation.

[0271] In a current system, recombinant adenovirus is generated from homologous recombination between shuttle vector and provirus vector. Due to the possible recombination between two proviral vectors, wild-type adenovirus may be generated from this process. Therefore, it is critical to isolate a single clone of virus from an individual plaque and examine its genomic structure.

[0272] Generation and propagation of the current adenovirus vectors, which are replication deficient, depend on a unique helper cell line, designated 293, which was transformed from human embryonic kidney cells by Ad5 DNA fragments and constitutively expresses E1 proteins (Graham et al., 1977). Since the E3 region is dispensable from the adenovirus genome (Jones and Shenk, 1978), the current adenovirus vectors, with the help of 293 cells, carry foreign DNA in either the E1, the D3 or both regions (Graham and Prevec, 1991). In nature, adenovirus can package approximately 105% of the wild-type genome (Ghosh-Choudhury et al., 1987), providing capacity for about 2 extra kB of DNA. Combined with the approximately 5.5 kB of DNA that is replaceable in the E1 and E3 regions, the maximum capacity of the current adenovirus vector is under 7.5 kB, or about 15% of the total length of the vector. More than 80% of the adenovirus viral genome remains in the vector backbone and is the source of vector-borne cytotoxicity. Also, the replication deficiency of the E1-deleted virus is incomplete. For example, leakage of viral gene expression has been observed with the currently available vectors at high multiplicities of infection (MOI) (Mulligan, 1993).

[0273] Helper cell lines may be derived from human cells such as human embryonic kidney cells, muscle cells, hematopoietic cells or other human embryonic mesenchymal or epithelial cells. Alternatively, the helper cells may be derived from the cells of other mammalian species that are permissive for human adenovirus. Such cells include, e.g., Vero cells or other monkey embryonic mesenchymal or epithelial cells. As stated above, the currently preferred helper cell line is 293.

[0274] Recently, Racher et al. (1995) disclosed improved methods for culturing 293 cells and propagating adenovirus. In one format, natural cell aggregates are grown by inoculating individual cells into 1 liter siliconized spinner flasks (Techne, Cambridge, UK) containing 100-200 ml of medium. Following stirring at 40 rpm, the cell viability is estimated with trypan blue. In another format, Fibra-Cel microcarriers (Bibby Sterlin, Stone, UK) (5 g/l) is employed as follows. A cell inoculum, resuspended in 5 ml of medium, is added to the carrier (50 ml) in a 250 ml Erlenmeyer flask and left stationary, with occasional agitation, for 1 to 4 h. The medium is then replaced with 50 ml of fresh medium and shaking initiated. For virus production, cells are allowed to grow to about 80% confluence, after which time the medium is replaced (to 25% of the final volume) and adenovirus added at an MOI of 0.05. Cultures are left stationary overnight, following which the volume is increased to 100% and shaking commenced for another 72 h.

[0275] Other than the requirement that the adenovirus vector be replication defective, or at least conditionally defective, the nature of the adenovirus vector is not believed to be crucial to the successful practice of the invention. The adenovirus may be of any of the 42 different known serotypes or subgroups A-F. Adenovirus type 5 of subgroup C is the preferred starting material in order to obtain a conditional replication-defective adenovirus vector for use in the present invention, since Adenovirus type 5 is a human adenovirus about which a great deal of biochemical and genetic information is known, and it has historically been used for most constructions employing adenovirus as a vector.

[0276] As stated above, the typical vector according to the present invention is replication defective and will not have an adenovirus E1 region. Thus, it will be most convenient to introduce the polynucleotide encoding the gene of interest at the position from which the E1-coding sequences have been removed. However, the position of insertion of the construct within the adenovirus sequences is not critical to the invention. The polynucleotide encoding the gene of interest may also be inserted in lieu of the deleted E3 region in E3 replacement vectors as described by Karlsson et al. (1986) or in the E4 region where a helper cell line or helper virus complements the E4 defect.

[0277] Adenovirus is easy to grow and manipulate and exhibits broad host range in vitro and in vivo. This group of viruses can be obtained in high titers, e.g. 10⁹-10¹¹ plaque-forming units per ml, and they are highly infective. The life cycle of adenovirus does not require integration into the host cell genome. The foreign genes delivered by adenovirus vectors are episomal and, therefore, have low genotoxicity to host cells. No side effects have been reported in studies of vaccination with wild-type adenovirus (Couch et al., 1963; Top et al., 1971), demonstrating their safety and therapeutic potential as in vivo gene transfer vectors.

[0278] Adenovirus vectors have been used in eukaryotic gene expression (Levrero et al., 1991; Gomez-Foix et al., 1992) and vaccine development (Grunhaus and Horwitz, 1992; Graham and Prevec, 1992). Recently, animal studies suggested that recombinant adenovirus could be used for gene therapy (Stratford-Perricaudet and Perricaudet, 1991; Stratford-Perricaudet et al., 1990; Rich et al., 1993). Studies in administering recombinant adenovirus to different tissues include trachea instillation (Rosenfeld et al., 1991; Rosenfeld et al., 1992), muscle injection (Ragot et al., 1993), peripheral intravenous injections (Herz and Gerard, 1993) and stereotactic inoculation into the brain (Le Gal La Salle et al., 1993).

### 4.15.2 RETROVIRUSES

[0279] The retroviruses are a group of single-stranded RNA viruses characterized by an ability to convert their RNA to double-stranded DNA in infected cells by a process of reverse-transcription (Coffin, 1990). The resulting DNA then stably integrates into cellular chromosomes as a provirus and directs synthesis of viral proteins. The integration results in the retention of the viral gene sequences in the recipient cell and its descendants. The retroviral genome contains three genes, gag, pol, and env that code for capsid proteins, polymerase enzyme, and envelope components, respectively. A sequence found upstream from the gag gene contains a signal for packaging of the genome into virions. Two long terminal repeat (LTR) sequences are present at the 5′ and 3′ ends of the viral genome. These contain strong promoter and enhancer sequences and are also required for integration in the host cell genome (Coffin, 1990).

[0280] In order to construct a retroviral vector, a nucleic acid encoding one or more oligonucleotide or polynucleotide sequences of interest is inserted into the viral genome in the place of certain viral sequences to produce a virus that is replication-defective. In order to produce virions, a packaging cell line containing the gag, pol, and env genes but without the LTR and packaging components is constructed (Mann et al., 1983). When a recombinant plasmid containing a cDNA, together with the retroviral LTR and packaging sequences is introduced into this cell line (by calcium phosphate precipitation for example), the packaging sequence allows the RNA transcript of the recombinant plasmid to be packaged into viral particles, which are then secreted into the culture media (Nicolas and Rubenstein, 1988; Temin, 1986; Mann et al., 1983). The media containing the recombinant retroviruses is then collected, optionally concentrated, and used for gene transfer. Retroviral vectors are able to infect a broad variety of cell types. However, integration and stable expression require the division of host cells (Paskind et al., 1975).

[0281] A novel approach designed to allow specific targeting of retrovirus vectors was recently developed based on the chemical modification of a retrovirus by the chemical addition of lactose residues to the viral envelope. This modification could permit the specific infection of hepatocytes via sialoglycoprotein receptors.

[0282] A different approach to targeting of recombinant retroviruses was designed in which biotinylated antibodies against a retroviral envelope protein and against a specific cell receptor were used. The antibodies were coupled via the biotin components by using streptavidin (Roux et al., 1989). Using antibodies against major histocompatibility complex class I and class II antigens, they demonstrated the infection of a variety of human cells that bore those surface antigens with an ecotropic virus in vitro (Roux et al., 1989).

### 4.15.3 ADENO-ASSOCIATED VIRUSES

[0283] AAV (Ridgeway, 1988; Hermonat and Muzycska, 1984) is a parovirus, discovered as a contamination of adenoviral stocks. It is a ubiquitous virus (antibodies are present in 85% of the US human population) that has not been linked to any disease. It is also classified as a dependovirus, because its replications is dependent on the presence of a helper virus, such as adenovirus. Five serotypes have been isolated, of which AAV-2 is the best characterized. AAV has a single-stranded linear DNA that is encapsidated into capsid proteins VP1, VP2 and VP3 to form an icosahedral virion of 20 to 24 nm in diameter (Muzyczka and McLaughlin, 1988).

[0284] The AAV DNA is approximately 4.7 kilobases long. It contains two open reading frames and is flanked by two ITRs. There are two major genes in the AAV genome: rep and cap. The rep gene codes for proteins responsible for viral replications, whereas cap codes for capsid protein VP1-3. Each ITR forms a T-shaped hairpin structure. These terminal repeats are the only essential cis components of the AAV for chromosomal integration. Therefore, the AAV can be used as a vector with all viral coding sequences removed and replaced by the cassette of genes for delivery. Three viral promoters have been identified and named p5, p19, and p40, according to their map position. Transcription from p5 and p19 results in production of rep proteins, and transcription from p40 produces the capsid proteins (Hermonat and Muzyczka, 1984).

[0285] There are several factors that prompted researchers to study the possibility of using rAAV as an expression vector. One is that the requirements for delivering a gene to integrate into the host chromosome are surprisingly few. It is necessary to have the 145-bp ITRs, which are only 6% of the AAV genome. This leaves room in the vector to assemble a 4.5-kb DNA insertion. While this carrying capacity may prevent the AAV from delivering large genes, it is amply suited for delivering the antisense constructs of the present invention.

[0286] AAV is also a good choice of delivery vehicles due to its safety. There is a relatively complicated rescue mechanism: not only wild type adenovirus but also AAV genes are required to mobilize rAAV. Likewise, AAV is not pathogenic and not associated with any disease. The removal of viral coding sequences minimizes immune reactions to viral gene expression, and therefore, rAAV does not evoke an inflammatory response.

### 4.15.4 OTHER VIRAL VECTORS AS EXPRESSION CONSTRUCTS

[0287] Other viral vectors may be employed as expression constructs in the present invention for the delivery of oligonucleotide or polynucleotide sequences to a host cell. Vectors derived from viruses such as vaccinia virus (Ridgeway, 1988; Coupar et al., 1988), lentiviruses, polio viruses and herpes viruses may be employed. They offer several attractive features for various mammalian cells (Friedmann, 1989; Ridgeway, 1988; Coupar et al., 1988; Horwich et al., 1990).

[0288] With the recent recognition of defective hepatitis B viruses, new insight was gained into the structure-function relationship of different viral sequences. In vitro studies showed that the virus could retain the ability for helper-dependent packaging and reverse transcription despite the deletion of up to 80% of its genome (Horwich et al., 1990). This suggested that large portions of the genome could be replaced with foreign genetic material. The hepatotropism and persistence (integration) were particularly attractive properties for liver-directed gene transfer. Chang et al. (1991) introduced the chloramphenicol acetyltransferase (CAT) gene into duck hepatitis B virus genome in the place of the polymerase, surface, and pre-surface coding sequences. It was cotransfected with wild-type virus into an avian hepatoma cell line. Culture media containing high titers of the recombinant virus were used to infect primary duckling hepatocytes. Stable CAT gene expression was detected for at least 24 days after transfection (Chang et al., 1991).

### 4.15.5 NON-VIRAL VECTORS

[0289] In order to effect expression of the oligonucleotide or polynucleotide sequences of the present invention, the expression construct must be delivered into a cell. This delivery may be accomplished in vitro, as in laboratory procedures for transforming cells lines, or in vivo or ex vivo, as in the treatment of certain disease states. As described above, one preferred mechanism for delivery is via viral infection where the expression construct is encapsulated in an infectious viral particle.

[0290] Once the expression construct has been delivered into the cell the nucleic acid encoding the desired oligonucleotide or polynucleotide sequences may be positioned and expressed at different sites. In certain embodiments, the nucleic acid encoding the construct may be stably integrated into the genome of the cell. This integration may be in the specific location and orientation via homologous recombination (gene replacement) or it may be integrated in a random, non-specific location (gene augmentation). In yet further embodiments, the nucleic acid may be stably maintained in the cell as a separate, episomal segment of DNA. Such nucleic acid segments or “episomes” encode sequences sufficient to permit maintenance and replication independent of or in synchronization with the host cell cycle. How the expression construct is delivered to a cell and where in the cell the nucleic acid remains is dependent on the type of expression construct employed.

[0291] In certain embodiments of the invention, the expression construct comprising one or more oligonucleotide or polynucleotide sequences may simply consist of naked recombinant DNA or plasmids. Transfer of the construct may be performed by any of the methods mentioned above which physically or chemically permeabilize the cell membrane. This is particularly applicable for transfer in vitro but it may be applied to in vivo use as well. Dubensky et al. (1984) successfully injected polyomavirus DNA in the form of calcium phosphate precipitates into liver and spleen of adult and newborn mice demonstrating active viral replication and acute infection. Benvenisty and Reshef (1986) also demonstrated that direct intraperitoneal injection of calcium phosphate-precipitated plasmids results in expression of the transfected genes. It is envisioned that DNA encoding a gene of interest may also be transferred in a similar manner in vivo and express the gene product.

[0292] Another embodiment of the invention for transferring a naked DNA expression construct into cells may involve particle bombardment. This method depends on the ability to accelerate DNA-coated microprojectiles to a high velocity allowing them to pierce cell membranes and enter cells without killing them (Klein et al., 1987). Several devices for accelerating small particles have been developed. One such device relies on a high voltage discharge to generate an electrical current, which in turn provides the motive force (Yang et al., 1990). The microprojectiles used have consisted of biologically inert substances such as tungsten or gold beads.

[0293] Selected organs including the liver, skin, and muscle tissue of rats and mice have been bombarded in vivo (Yang et al., 1990; Zelenin et al., 1991). This may require surgical exposure of the tissue or cells, to eliminate any intervening tissue between the gun and the target organ, i.e. ex vivo treatment. Again, DNA encoding a particular gene may be delivered via this method and still be incorporated by the present invention.

### 4.16 ANTISENSE OLIGONUCLEOTIDES

[0294] The end result of the flow of genetic information is the synthesis of protein. DNA is transcribed by polymerases into messenger RNA and translated on the ribosome to yield a folded, functional protein. Thus there are several steps along the route where protein synthesis can be inhibited. The native DNA segment coding for a polypeptide described herein, as all such mammalian DNA strands, has two strands: a sense strand and an antisense strand held together by hydrogen bonding. The messenger RNA coding for polypeptide has the same nucleotide sequence as the sense DNA strand except that the DNA thymidine is replaced by uridine. Thus, synthetic antisense nucleotide sequences will bind to a mRNA and inhibit expression of the protein encoded by that mRNA.

[0295] The targeting of antisense oligonucleotides to mRNA is thus one mechanism to shut down protein synthesis, and, consequently, represents a powerful and targeted therapeutic approach. For example, the synthesis of polygalactauronase and the muscarine type 2 acetylcholine receptor are inhibited by antisense oligonucleotides directed to their respective mRNA sequences (U.S. Pat. No. 5,739,119 and U.S. Pat. No. 5,759,829, each specifically incorporated herein by reference in its entirety). Further, examples of antisense inhibition have been demonstrated with the nuclear protein cyclin, the multiple drug resistance gene (MDG1), ICAM-1, E-selectin, STK-1, striatal GABA_{A} receptor and human EGF (Jaskulski et al., 1988; Vasanthakumar and Ahmed, 1989; Peris et al., 1998; U.S. Pat. No. 5,801,154; U.S. Pat. No. 5,789,573; U.S. Pat. No. 5,718,709 and U.S. Pat. No. 5,610,288, each specifically incorporated herein by reference in its entirety). Antisense constructs have also been described that inhibit and can be used to treat a variety of abnormal cellular proliferations, e.g. cancer (U.S. Pat. No. 5,747,470; U.S. Pat. No. 5,591,317 and U.S. Pat. No. 5,783,683, each specifically incorporated herein by reference in its entirety).

[0296] Therefore, in exemplary embodiments, the invention provides oligonucleotide sequences that comprise all, or a portion of, any sequence that is capable of specifically binding to polynucleotide sequence described herein, or a complement thereof. In one embodiment, the antisense oligonucleotides comprise DNA or derivatives thereof In another embodiment, the oligonucleotides comprise RNA or derivatives thereof. In a third embodiment, the oligonucleotides are modified DNAs comprising a phosphorothioated modified backbone. In a fourth embodiment, the oligonucleotide sequences comprise peptide nucleic acids or derivatives thereof. In each case, preferred compositions comprise a sequence region that is complementary, and more preferably substantially-complementary, and even more preferably, completely complementary to one or more portions of polynucleotides disclosed herein.

[0297] Selection of antisense compositions specific for a given gene sequence is based upon analysis of the chosen target sequence (i.e. in these illustrative examples the rat and human sequences) and determination of secondary structure, Tₘ, binding energy, relative stability, and antisense compositions were selected based upon their relative inability to form dimers, hairpins, or other secondary structures that would reduce or prohibit specific binding to the target mRNA in a host cell.

[0298] Highly preferred target regions of the mRNA, are those which are at or near the AUG translation initiation codon, and those sequences which were substantially complementary to 5′ regions of the mRNA. These secondary structure analyses and target site selection considerations were performed using v.4 of the OLIGO primer analysis software (Rychlik, 1997) and the BLASTN 2.0.5 algorithm software (Altschul et al., 1997).

[0299] The use of an antisense delivery method employing a short peptide vector, termed MPG (27 residues), is also contemplated. The MPG peptide contains a hydrophobic domain derived from the fusion sequence of HIV gp41 and a hydrophilic domain from the nuclear localization sequence of SV40 T-antigen (Morris et al., 1997). It has been demonstrated that several molecules of the MPG peptide coat the antisense oligonucleotides and can be delivered into cultured mammalian cells in less than 1 hour with relatively high efficiency (90%). Further, the interaction with MPG strongly increases both the stability of the oligonucleotide to nuclease and the ability to cross the plasma membrane (Morris et al., 1997).

### 4.17 RIBOZYMES

[0300] Although proteins traditionally have been used for catalysis of nucleic acids, another class of macromolecules has emerged as useful in this endeavor. Ribozymes are RNA-protein complexes that cleave nucleic acids in a site-specific fashion. Ribozymes have specific catalytic domains that possess endonuclease activity (Kim and Cech, 1987; Gerlach et al., 1987; Forster and Symons, 1987). For example, a large number of ribozymes accelerate phosphoester transfer reactions with a high degree of specificity, often cleaving only one of several phosphoesters in an oligonucleotide substrate (Cech et al., 1981; Michel and Westhof, 1990; Reinhold-Hurek and Shub, 1992). This specificity has been attributed to the requirement that the substrate bind via specific base-pairing interactions to the internal guide sequence (“IGS”) of the ribozyme prior to chemical reaction.

[0301] Ribozyme catalysis has primarily been observed as part of sequence-specific cleavage/ligation reactions involving nucleic acids (Joyce, 1989; Cech et al., 1981). For example, U.S. Pat. No. 5,354,855 (specifically incorporated herein by reference) reports that certain ribozymes can act as endonucleases with a sequence specificity greater than that of known ribonucleases and approaching that of the DNA restriction enzymes. Thus, sequence-specific ribozyme-mediated inhibition of gene expression may be particularly suited to therapeutic applications (Scanlon et al., 1991; Sarver et al., 1990). Recently, it was reported that ribozymes elicited genetic changes in some cells lines to which they were applied; the altered genes included the oncogenes H-ras, c-fos and genes of HIV. Most of this work involved the modification of a target mRNA, based on a specific mutant codon that is cleaved by a specific ribozyme.

[0302] Six basic varieties of naturally-occurring enzymatic RNAs are known presently. Each can catalyze the hydrolysis of RNA phosphodiester bonds in trans (and thus can cleave other RNA molecules) under physiological conditions. In general, enzymatic nucleic acids act by first binding to a target RNA. Such binding occurs through the target binding portion of a enzymatic nucleic acid which is held in close proximity to an enzymatic portion of the molecule that acts to cleave the target RNA. Thus, the enzymatic nucleic acid first recognizes and then binds a target RNA through complementary base-pairing, and once bound to the correct site, acts enzymatically to cut the target RNA. Strategic cleavage of such a target RNA will destroy its ability to direct synthesis of an encoded protein. After an enzymatic nucleic acid has bound and cleaved its RNA target, it is released from that RNA to search for another target and can repeatedly bind and cleave new targets.

[0303] The enzymatic nature of a ribozyme is advantageous over many technologies, such as antisense technology (where a nucleic acid molecule simply binds to a nucleic acid target to block its translation) since the concentration of ribozyme necessary to affect a therapeutic treatment is lower than that of an antisense oligonucleotide. This advantage reflects the ability of the ribozyme to act enzymatically. Thus, a single ribozyme molecule is able to cleave many molecules of target RNA. In addition, the ribozyme is a highly specific inhibitor, with the specificity of inhibition depending not only on the base pairing mechanism of binding to the target RNA, but also on the mechanism of target RNA cleavage. Single mismatches, or base-substitutions, near the site of cleavage can completely eliminate catalytic activity of a ribozyme. Similar mismatches in antisense molecules do not prevent their action (Woolf et al., 1992). Thus, the specificity of action of a ribozyme is greater than that of an antisense oligonucleotide binding the same RNA site.

[0304] The enzymatic nucleic acid molecule may be formed in a hammerhead, hairpin, a hepatitis δ virus, group I intron or RNaseP RNA (in association with an RNA guide sequence) or Neurospora VS RNA motif. Examples of hammerhead motifs are described by Rossi et al. (1992). Examples of hairpin motifs are described by Hampel et al. (Eur. Pat. Appl. Publ. No. EP 0360257), Hampel and Tritz (1989), Hampel et al. (1990) and U.S. Pat. No. 5,631,359 (specifically incorporated herein by reference). An example of the hepatitis δ virus motif is described by Perrotta and Been (1992); an example of the RNaseP motif is described by Guerrier-Takada et al. (1983); Neurospora VS RNA ribozyme motif is described by Collins (Saville and Collins, 1990; Saville and Collins, 1991; Collins and Olive, 1993); and an example of the Group I intron is described in (U.S. Pat. No. 4,987,071, specifically incorporated herein by reference). All that is important in an enzymatic nucleic acid molecule of this invention is that it has a specific substrate binding site which is complementary to one or more of the target gene RNA regions, and that it have nucleotide sequences within or surrounding that substrate binding site which impart an RNA cleaving activity to the molecule. Thus the ribozyme constructs need not be limited to specific motifs mentioned herein.

[0305] In certain embodiments, it may be important to produce enzymatic cleaving agents which exhibit a high degree of specificity for the RNA of a desired target, such as one of the sequences disclosed herein. The enzymatic nucleic acid molecule is preferably targeted to a highly conserved sequence region of a target mRNA. Such enzymatic nucleic acid molecules can be delivered exogenously to specific cells as required. Alternatively, the ribozymes can be expressed from DNA or RNA vectors that are delivered to specific cells.

[0306] Small enzymatic nucleic acid motifs (e.g., of the hammerhead or the hairpin structure) may also be used for exogenous delivery. The simple structure of these molecules increases the ability of the enzymatic nucleic acid to invade targeted regions of the mRNA structure. Alternatively, catalytic RNA molecules can be expressed within cells from eukaryotic promoters (e.g., Scanlon et al., 1991; Kashani-Sabet et al., 1992; Dropulic et al., 1992; Weerasinghe et al., 1991; Ojwang et al., 1992; Chen et al., 1992; Sarver et al., 1990). Those skilled in the art realize that any ribozyme can be expressed in eukaryotic cells from the appropriate DNA vector. The activity of such ribozymes can be augmented by their release from the primary transcript by a second ribozyme (Int. Pat. Appl. Publ. No. WO 93/23569, and Int. Pat. Appl. Publ. No. WO 94/02595, both hereby incorporated by reference; Ohkawa et al., 1992; Taira et al., 1991; and Ventura et al., 1993).

[0307] Ribozymes may be added directly, or can be complexed with cationic lipids, lipid complexes, packaged within liposomes, or otherwise delivered to target cells. The RNA or RNA complexes can be locally administered to relevant tissues ex vivo, or in vivo through injection, aerosol inhalation, infusion pump or stent, with or without their incorporation in biopolymers.

[0308] Ribozymes may be designed as described in Int. Pat. Appl. Publ. No. WO 93/23569 and Int. Pat. Appl. Publ. No. WO 94/02595, each specifically incorporated herein by reference) and synthesized to be tested in vitro and in vivo, as described. Such ribozymes can also be optimized for delivery. While specific examples are provided, those in the art will recognize that equivalent RNA targets in other species can be utilized when necessary.

[0309] Hammerhead or hairpin ribozymes may be individually analyzed by computer folding (Jaeger et al., 1989) to assess whether the ribozyme sequences fold into the appropriate secondary structure. Those ribozymes with unfavorable intramolecular interactions between the binding arms and the catalytic core are eliminated from consideration. Varying binding arm lengths can be chosen to optimize activity. Generally, at least 5 or so bases on each arm are able to bind to, or otherwise interact with, the target RNA.

[0310] Ribozymes of the hammerhead or hairpin motif may be designed to anneal to various sites in the mRNA message, and can be chemically synthesized. The method of synthesis used follows the procedure for normal RNA synthesis as described in Usman et al. (1987) and in Scaringe et al. (1990) and makes use of common nucleic acid protecting and coupling groups, such as dimethoxytrityl at the 5′-end, and phosphoramidites at the 3′-end. Average stepwise coupling yields are typically >98%. Hairpin ribozymes may be synthesized in two parts and annealed to reconstruct an active ribozyme (Chowrira and Burke, 1992). Ribozymes may be modified extensively to enhance stability by modification with nuclease resistant groups, for example, 2′-amino, 2′-C-allyl, 2′-flouro, 2′-o-methyl, 2′-H (for a review see e.g., Usman and Cedergren, 1992). Ribozymes may be purified by gel electrophoresis using general methods or by high pressure liquid chromatography and resuspended in water.

[0311] Ribozyme activity can be optimized by altering the length of the ribozyme binding arms, or chemically synthesizing ribozymes with modifications that prevent their degradation by serum ribonucleases (see e.g., Int. Pat. Appl. Publ. No. WO 92/07065; Perrault et al, 1990; Pieken et al., 1991; Usman and Cedergren, 1992; Int. Pat. Appl. Publ. No. WO 93/15187; Int. Pat. Appl. Publ. No. WO 91/03162; Eur. Pat. Appl. Publ. No.92110298.4; U.S. Pat. No. 5,334,711; and Int. Pat. Appl. Publ. No. WO 94/13688, which describe various chemical modifications that can be made to the sugar moieties of enzymatic RNA molecules), modifications which enhance their efficacy in cells, and removal of stem II bases to shorten RNA synthesis times and reduce chemical requirements.

[0312] Sullivan et al. (Int. Pat. Appl. Publ. No. WO 94/02595) describes the general methods for delivery of enzymatic RNA molecules. Ribozymes may be administered to cells by a variety of methods known to those familiar to the art, including, but not restricted to, encapsulation in liposomes, by iontophoresis, or by incorporation into other vehicles, such as hydrogels, cyclodextrins, biodegradable nanocapsules, and bioadhesive microspheres. For some indications, ribozymes may be directly delivered ex vivo to cells or tissues with or without the aforementioned vehicles. Alternatively, the RNA/vehicle combination may be locally delivered by direct inhalation, by direct injection or by use of a catheter, infusion pump or stent. Other routes of delivery include, but are not limited to, intravascular, intramuscular, subcutaneous or joint injection, aerosol inhalation, oral (tablet or pill form), topical, systemic, ocular, intraperitoneal and/or intrathecal delivery. More detailed descriptions of ribozyme delivery and administration are provided in Int. Pat. Appl. Publ. No. WO 94/02595 and Int. Pat. Appl. Publ. No. WO 93/23569, each specifically incorporated herein by reference.

[0313] Another means of accumulating high concentrations of a ribozyme(s) within cells is to incorporate the ribozyme-encoding sequences into a DNA expression vector. Transcription of the ribozyme sequences are driven from a promoter for eukaryotic RNA polymerase I (pol I), RNA polymerase II (pol II), or RNA polymerase III (pol III). Transcripts from pol II or pol III promoters will be expressed at high levels in all cells; the levels of a given pol II promoter in a given cell type will depend on the nature of the gene regulatory sequences (enhancers, silencers, etc.) present nearby. Prokaryotic RNA polymerase promoters may also be used, providing that the prokaryotic RNA polymerase enzyme is expressed in the appropriate cells (Elroy-Stein and Moss, 1990; Gao and Huang, 1993; Lieber et al., 1993; Zhou et al., 1990). Ribozymes expressed from such promoters can function in mammalian cells (e.g. Kashani-Saber et al., 1992; Ojwang et al., 1992; Chen et al., 1992; Yu et al., 1993; L'Huillier et al., 1992; Lisziewicz et al., 1993). Such transcription units can be incorporated into a variety of vectors for introduction into mammalian cells, including but not restricted to, plasmid DNA vectors, viral DNA vectors (such as adenovirus or adeno-associated vectors), or viral RNA vectors (such as retroviral, semliki forest virus, sindbis virus vectors).

[0314] Ribozymes may be used as diagnostic tools to examine genetic drift and mutations within diseased cells. They can also be used to assess levels of the target RNA molecule. The close relationship between ribozyme activity and the structure of the target RNA allows the detection of mutations in any region of the molecule which alters the base-pairing and three-dimensional structure of the target RNA. By using multiple ribozymes, one may map nucleotide changes which are important to RNA structure and function in vitro, as well as in cells and tissues. Cleavage of target RNAs with ribozymes may be used to inhibit gene expression and define the role (essentially) of specified gene products in the progression of disease. In this manner, other genetic targets may be defined as important mediators of the disease. These studies will lead to better treatment of the disease progression by affording the possibility of combinational therapies (e.g., multiple ribozymes targeted to different genes, ribozymes coupled with known small molecule inhibitors, or intermittent treatment with combinations of ribozymes and/or other chemical or biological molecules). Other in vitro uses of ribozymes are well known in the art, and include detection of the presence of mRNA associated with an IL-5 related condition. Such RNA is detected by determining the presence of a cleavage product after treatment with a ribozyme using standard methodology.

### 4.18 PEPTIDE NUCLEIC ACIDS

[0315] In certain embodiments, the inventors contemplate the use of peptide nucleic acids (PNAs) in the practice of the methods of the invention. PNA is a DNA mimic in which the nucleobases are attached to a pseudopeptide backbone (Good and Nielsen, 1997). PNA is able to be utilized in a number methods that traditionally have used RNA or DNA. Often PNA sequences perform better in techniques than the corresponding RNA or DNA sequences and have utilities that are not inherent to RNA or DNA. A review of PNA including methods of making, characteristics of, and methods of using, is provided by Corey (1997) and is incorporated herein by reference. As such, in certain embodiments, one may prepare PNA sequences that are complementary to one or more portions of the ACE mRNA sequence, and such PNA compositions may be used to regulate, alter, decrease, or reduce the translation of ACE-specific mRNA, and thereby alter the level of ACE activity in a host cell to which such PNA compositions have been administered.

[0316] PNAs have 2-aminoethyl-glycine linkages replacing the normal phosphodiester backbone of DNA (Nielsen et al., 1991; Hanvey et al., 1992; Hyrup and Nielsen, 1996; Neilsen, 1996). This chemistry has three important consequences: firstly, in contrast to DNA or phosphorothioate oligonucleotides, PNAs are neutral molecules; secondly, PNAs are achiral, which avoids the need to develop a stereoselective synthesis; and thirdly, PNA synthesis uses standard Boc (Dueholm et al., 1994) or Fmoc (Thomson et al., 1995) protocols for solid-phase peptide synthesis, although other methods, including a modified Merrifield method, have been used (Christensen et al., 1995).

[0317] PNA monomers or ready-made oligomers are commercially available from PerSeptive Biosystems (Framingham, Mass.). PNA syntheses by either Boc or Fmoc protocols are straightforward using manual or automated protocols (Norton et al., 1995). The manual protocol lends itself to the production of chemically modified PNAs or the simultaneous synthesis of families of closely related PNAs.

[0318] As with peptide synthesis, the success of a particular PNA synthesis will depend on the properties of the chosen sequence. For example, while in theory PNAs can incorporate any combination of nucleotide bases, the presence of adjacent purines can lead to deletions of one or more residues in the product. In expectation of this difficulty, it is suggested that, in producing PNAs with adjacent purines, one should repeat the coupling of residues likely to be added inefficiently. This should be followed by the purification of PNAs by reverse-phase high-pressure liquid chromatography (Norton et al, 1995) providing yields and purity of product similar to those observed during the synthesis of peptides.

[0319] Modifications of PNAs for a given application may be accomplished by coupling amino acids during solid-phase synthesis or by attaching compounds that contain a carboxylic acid group to the exposed N-terminal amine. Alternatively, PNAs can be modified after synthesis by coupling to an introduced lysine or cysteine. The ease with which PNAs can be modified facilitates optimization for better solubility or for specific functional requirements. Once synthesized, the identity of PNAs and their derivatives can be confirmed by mass spectrometry. Several studies have made and utilized modifications of PNAs (Norton et al., 1995; Haaima et al., 1996; Stetsenko et al., 1996; Petersen et al., 1995; Ulmann et al., 1996; Koch et al., 1995; Orum et al., 1995; Footer et al., 1996; Griffith et al., 1995; Kremsky et al., 1996; Pardridge et al., 1995; Boffa et al., 1995; Landsdorp et al., 1996; Gambacorti-Passerini et al., 1996; Armitage et al., 1997; Seeger et al., 1997; Ruskowski et al., 1997). U.S. Pat. No. 5,700,922 discusses PNA-DNA-PNA chimeric molecules and their uses in diagnostics, modulating protein in organisms, and treatment of conditions susceptible to therapeutics.

[0320] In contrast to DNA and RNA, which contain negatively charged linkages, the PNA backbone is neutral. In spite of this dramatic alteration, PNAs recognize complementary DNA and RNA by Watson-Crick pairing (Egholm et al., 1993), validating the initial modeling by Nielsen et al. (1991). PNAs lack 3′ to 5′ polarity and can bind in either parallel or anti-parallel fashion, with the anti-parallel mode being preferred (Egholm et al., 1993).

[0321] Hybridization of DNA oligonucleotides to DNA and RNA is destabilized by electrostatic repulsion between the negatively charged phosphate backbones of the complementary strands. By contrast, the absence of charge repulsion in PNA-DNA or PNA-RNA duplexes increases the melting temperature (Tₘ) and reduces the dependence of Tₘ on the concentration of mono- or divalent cations (Nielsen et al., 1991). The enhanced rate and affinity of hybridization are significant because they are responsible for the surprising ability of PNAs to perform strand invasion of complementary sequences within relaxed double-stranded DNA. In addition, the efficient hybridization at inverted repeats suggests that PNAs can recognize secondary structure effectively within double-stranded DNA. Enhanced recognition also occurs with PNAs immobilized on surfaces, and Wang et al. have shown that support-bound PNAs can be used to detect hybridization events (Wang et al., 1996).

[0322] One might expect that tight binding of PNAs to complementary sequences would also increase binding to similar (but not identical) sequences, reducing the sequence specificity of PNA recognition. As with DNA hybridization, however, selective recognition can be achieved by balancing oligomer length and incubation temperature. Moreover, selective hybridization of PNAs is encouraged by PNA-DNA hybridization being less tolerant of base mismatches than DNA-DNA hybridization. For example, a single mismatch within a 16 bp PNA-DNA duplex can reduce the Tₘ by up to 15° C. (Egholm et al., 1993). This high level of discrimination has allowed the development of several PNA-based strategies for the analysis of point mutations (Wang et al., 1996; Carlsson et al., 1996; Thiede et al., 1996; Webb and Hurskainen, 1996; Perry-O'Keefe et al., 1996).

[0323] High-affinity binding provides clear advantages for molecular recognition and the development of new applications for PNAs. For example, 11-13 nucleotide PNAs inhibit the activity of telomerase, a ribonucleo-protein that extends telomere ends using an essential RNA template, while the analogous DNA oligomers do not (Norton et al., 1996).

[0324] Neutral PNAs are more hydrophobic than analogous DNA oligomers, and this can lead to difficulty solubilizing them at neutral pH, especially if the PNAs have a high purine content or if they have the potential to form secondary structures. Their solubility can be enhanced by attaching one or more positive charges to the PNA termini (Nielsen et al., 1991).

[0325] Findings by Allfrey and colleagues suggest that strand invasion will occur spontaneously at sequences within chromosomal DNA (Boffa et al., 1995; Boffa et al., 1996). These studies targeted PNAs to triplet repeats of the nucleotides CAG and used this recognition to purify transcriptionally active DNA (Boffa et al., 1995) and to inhibit transcription (Boffa et al., 1996). This result suggests that if PNAs can be delivered within cells then they will have the potential to be general sequence-specific regulators of gene expression. Studies and reviews concerning the use of PNAs as antisense and anti-gene agents include Nielsen et al. (1993b), Hanvey et al. (1992), and Good and Nielsen (1997). Koppelhus et al. (1997) have used PNAs to inhibit HIV-1 inverse transcription, showing that PNAs may be used for antiviral therapies.

[0326] Methods of characterizing the antisense binding properties of PNAs are discussed in Rose (1993) and Jensen et al. (1997). Rose uses capillary gel electrophoresis to determine binding of PNAs to their complementary oligonucleotide, measuring the relative binding kinetics and stoichiometry. Similar types of measurements were made by Jensen et al. using BIAcore™ technology.

[0327] Other applications of PNAs include use in DNA strand invasion (Nielsen et al., 1991), antisense inhibition (Hanvey et al., 1992), mutational analysis (Orum et al., 1993), enhancers of transcription (Mollegaard et al., 1994), nucleic acid purification (Orum et al., 1995), isolation of transcriptionally active genes (Boffa et al., 1995), blocking of transcription factor binding (Vickers et al., 1995), genome cleavage (Veselkov et al., 1996), biosensors (Wang et al., 1996), in situ hybridization (Thisted et al., 1996), and in a alternative to Southern blotting (Perry-O'Keefe, 1996).

### 4.19 POLYPEPTIDE, PEPTIDES AND PEPTIDE VARIANTS

[0328] The present invention, in other aspects, provides polypeptide compositions. Generally, a polypeptide of the invention will be an isolated polypeptide (or an epitope, variant, or active fragment thereof) derived from a mammalian species. Preferably, the polypeptide is encoded by a polynucleotide sequence disclosed herein or a sequence which hybridizes under moderately stringent conditions to a polynucleotide sequence disclosed herein. Alternatively, the polypeptide may be defined as a polypeptide which comprises a contiguous amino acid sequence from an amino acid sequence disclosed herein, or which polypeptide comprises an entire amino acid sequence disclosed herein.

[0329] In the present invention, a polypeptide composition is also understood to comprise one or more polypeptides that are immunologically reactive with antibodies generated against a polypeptide of the invention, particularly a polypeptide having the amino acid sequence encoded by the polynucleotides disclosed in SEQ ID NO:1-13, or to active fragments, or to variants or biological functional equivalents thereof.

[0330] Likewise, a polypeptide composition of the present invention is understood to comprise one or more polypeptides that are capable of eliciting antibodies that are immunologically reactive with one or more polypeptides encoded by one or more contiguous nucleic acid sequences contained in SEQ ID NO:1-13, or to active fragments, or to variants thereof, or to one or more nucleic acid sequences which hybridize to one or more of these sequences under conditions of moderate to high stringency. Particularly illustrative polypeptides include the amino acid sequences encoded by polynucleotides disclosed in SEQ ID NO:1-13.

[0331] As used herein, an active fragment of a polypeptide includes a whole or a portion of a polypeptide which is modified by conventional techniques, e.g., mutagenesis, or by addition, deletion, or substitution, but which active fragment exhibits substantially the same structure function, antigenicity, etc., as a polypeptide as described herein.

[0332] In certain illustrative embodiments, the polypeptides of the invention will comprise at least an immunogenic portion of a hematological malignancy-related tumor protein or a variant thereof, as described herein. As noted above, a “hematological malignancy-related tumor protein” is a protein that is expressed by hematological malignancy-related tumor cells. Proteins that are hematological malignancy-related tumor proteins also react detectably within an immunoassay (such as an ELISA) with antisera from a patient with hematological malignancy. Polypeptides as described herein may be of any length. Additional sequences derived from the native protein and/or heterologous sequences may be present, and such sequences may (but need not) possess further immunogenic or antigenic properties.

[0333] An “immunogenic portion,” as used herein is a portion of a protein that is recognized (i.e., specifically bound) by a B-cell and/or T-cell surface antigen receptor. Such immunogenic portions generally comprise at least 5 amino acid residues, more preferably at least 10, and still more preferably at least 20 amino acid residues of a hematological malignancy-related tumor protein or a variant thereof. Certain preferred immunogenic portions include peptides in which an N-terminal leader sequence and/or transmembrane domain have been deleted. Other preferred immunogenic portions may contain a small N- and/or C-terminal deletion (e.g., 1-30 amino acids, preferably 5-15 amino acids), relative to the mature protein.

[0334] Immunogenic portions may generally be identified using well known techniques, such as those summarized in Paul, Fundamental Immunology, 3rd ed., 243-247 (Raven Press, 1993) and references cited therein. Such techniques include screening polypeptides for the ability to react with antigen-specific antibodies, antisera and/or T-cell lines or clones. As used herein, antisera and antibodies are “antigen-specific” if they specifically bind to an antigen (i.e., they react with the protein in an ELISA or other immunoassay, and do not react detectably with unrelated proteins). Such antisera and antibodies may be prepared as described herein, and using well known techniques. An immunogenic portion of a native hematological malignancy-related tumor protein is a portion that reacts with such antisera and/or T-cells at a level that is not substantially less than the reactivity of the full length polypeptide (e.g., in an ELISA and/or T-cell reactivity assay). Such immunogenic portions may react within such assays at a level that is similar to or greater than the reactivity of the full length polypeptide. Such screens may generally be performed using methods well known to those of ordinary skill in the art, such as those described in Harlow and Lane, Antibodies: A Laboratory Manual, Cold Spring Harbor Laboratory, 1988. For example, a polypeptide may be immobilized on a solid support and contacted with patient sera to allow binding of antibodies within the sera to the immobilized polypeptide. Unbound sera may then be removed and bound antibodies detected using, for example, ¹²⁵I-labeled Protein A.

[0335] As noted above, a composition may comprise a variant of a native hematological malignancy-related tumor protein. A polypeptide “variant,” as used herein, is a polypeptide that differs from a native hematological malignancy-related tumor protein in one or more substitutions, deletions, additions and/or insertions, such that the immunogenicity of the polypeptide is not substantially diminished. In other words, the ability of a variant to react with antigen-specific antisera may be enhanced or unchanged, relative to the native protein, or may be diminished by less than 50%, and preferably less than 20%, relative to the native protein. Such variants may generally be identified by modifying one of the above polypeptide sequences and evaluating the reactivity of the modified polypeptide with antigen-specific antibodies or antisera as described herein. Preferred variants include those in which one or more portions, such as an N-terminal leader sequence or transmembrane domain, have been removed. Other preferred variants include variants in which a small portion (e.g., 1-30 amino acids, preferably 5-15 amino acids) has been removed from the N- and/or C-terminal of the mature protein.

[0336] Polypeptide variants encompassed by the present invention include those exhibiting at least about 70%, 75%, 80%, 85%, 90%, 91%, 92%, 93%, 94%, 95%, 96%, 97%, 98%, or 99% or more identity (determined as described above) to the polypeptides disclosed herein.

[0337] Preferably, a variant contains conservative substitutions. A “conservative substitution” is one in which an amino acid is substituted for another amino acid that has similar properties, such that one skilled in the art of peptide chemistry would expect the secondary structure and hydropathic nature of the polypeptide to be substantially unchanged. Amino acid substitutions may generally be made on the basis of similarity in polarity, charge, solubility, hydrophobicity, hydrophilicity and/or the amphipathic nature of the residues. For example, negatively charged amino acids include aspartic acid and glutamic acid; positively charged amino acids include lysine and arginine; and amino acids with uncharged polar head groups having similar hydrophilicity values include leucine, isoleucine and valine; glycine and alanine; asparagine and glutamine; and serine, threonine, phenylalanine and tyrosine. Other groups of amino acids that may represent conservative changes include: (1) ala, pro, gly, glu, asp, gln, asn, ser, thr; (2) cys, ser, tyr, thr; (3) val, ile, leu, met, ala, phe; (4) lys, arg, his; and (5) phe, tyr, tip, his. A variant may also, or alternatively, contain nonconservative changes. In a preferred embodiment, variant polypeptides differ from a native sequence by substitution, deletion or addition of five amino acids or fewer. Variants may also (or alternatively) be modified by, for example, the deletion or addition of amino acids that have minimal influence on the immunogenicity, secondary structure and hydropathic nature of the polypeptide.

[0338] As noted above, polypeptides may comprise a signal (or leader) sequence at the N-terminal end of the protein, which co-translationally or post-translationally directs transfer of the protein. The polypeptide may also be conjugated to a linker or other sequence for ease of synthesis, purification or identification of the polypeptide (e.g., poly-His), or to enhance binding of the polypeptide to a solid support. For example, a polypeptide may be conjugated to an immunoglobulin Fc region.

[0339] Polypeptides may be prepared using any of a variety of well known techniques. Recombinant polypeptides encoded by DNA sequences as described above may be readily prepared from the DNA sequences using any of a variety of expression vectors known to those of ordinary skill in the art. Expression may be achieved in any appropriate host cell that has been transformed or transfected with an expression vector containing a DNA molecule that encodes a recombinant polypeptide. Suitable host cells include prokaryotes, yeast, and higher eukaryotic cells, such as mammalian cells and plant cells. Preferably, the host cells employed are E. coli, yeast or a mammalian cell line such as COS or CHO. Supernatants from suitable host/vector systems which secrete recombinant protein or polypeptide into culture media may be first concentrated using a commercially available filter. Following concentration, the concentrate may be applied to a suitable purification matrix such as an affinity matrix or an ion exchange resin. Finally, one or more reverse phase HPLC steps can be employed to further purify a recombinant polypeptide.

[0340] Portions and other variants having less than about 100 amino acids, and generally less than about 50 amino acids, may also be generated by synthetic means, using techniques well known to those of ordinary skill in the art. For example, such polypeptides may be synthesized using any of the commercially available solid-phase techniques, such as the Merrifield solid-phase synthesis method, where amino acids are sequentially added to a growing amino acid chain. See Merrifield, J. Am. Chem. Soc. 85:2149-2146, 1963. Equipment for automated synthesis of polypeptides is commercially available from suppliers such as Perkin Elmer/Applied BioSystems Division (Foster City, Calif.), and may be operated according to the manufacturer's instructions.

[0341] Within certain specific embodiments, a polypeptide may be a fusion protein that comprises multiple polypeptides as described herein, or that comprises at least one polypeptide as described herein and an unrelated sequence, such as a known tumor protein. A fusion partner may, for example, assist in providing T helper epitopes (an immunological fusion partner), preferably T helper epitopes recognized by humans, or may assist in expressing the protein (an expression enhancer) at higher yields than the native recombinant protein. Certain preferred fusion partners are both immunological and expression enhancing fusion partners. Other fusion partners may be selected so as to increase the solubility of the protein or to enable the protein to be targeted to desired intracellular compartments. Still further fusion partners include affinity tags, which facilitate purification of the protein.

[0342] Fusion proteins may generally be prepared using standard techniques, including chemical conjugation. Preferably, a fusion protein is expressed as a recombinant protein, allowing the production of increased levels, relative to a non-fused protein, in an expression system. Briefly, DNA sequences encoding the polypeptide components may be assembled separately, and ligated into an appropriate expression vector. The 3′ end of the DNA sequence encoding one polypeptide component is ligated, with or without a peptide linker, to the 5′ end of a DNA sequence encoding the second polypeptide component so that the reading frames of the sequences are in phase. This permits translation into a single fusion protein that retains the biological activity of both component polypeptides.

[0343] A peptide linker sequence may be employed to separate the first and second polypeptide components by a distance sufficient to ensure that each polypeptide folds into its secondary and tertiary structures. Such a peptide linker sequence is incorporated into the fusion protein using standard techniques well known in the art. Suitable peptide linker sequences may be chosen based on the following factors: (1) their ability to adopt a flexible extended conformation; (2) their inability to adopt a secondary structure that could interact with functional epitopes on the first and second polypeptides; and (3) the lack of hydrophobic or charged residues that might react with the polypeptide functional epitopes. Preferred peptide linker sequences contain Gly, Asn and Ser residues. Other near neutral amino acids, such as Thr and Ala may also be used in the linker sequence. Amino acid sequences which may be usefully employed as linkers include those disclosed in Maratea et al., Gene 40:39-46, 1985; Murphy et al., Proc. Natl. Acad. Sci. USA 83:8258-8262, 1986; U.S. Pat. No. 4,935,233 and U.S. Pat. No. 4,751,180. The linker sequence may generally be from 1 to about 50 amino acids in length. Linker sequences are not required when the first and second polypeptides have non-essential N-terminal amino acid regions that can be used to separate the functional domains and prevent steric interference.

[0344] The ligated DNA sequences are operably linked to suitable transcriptional or translational regulatory elements. The regulatory elements responsible for expression of DNA are located only 5′ to the DNA sequence encoding the first polypeptides. Similarly, stop codons required to end translation and transcription termination signals are only present 3′ to the DNA sequence encoding the second polypeptide.

[0345] Fusion proteins are also provided. Such proteins comprise a polypeptide as described herein together with an unrelated immunogenic protein. Preferably the immunogenic protein is capable of eliciting a recall response. Examples of such proteins include tetanus, tuberculosis and hepatitis proteins (see, for example, Stoute et al. New Engl. J. Med., 336:86-91, 1997).

[0346] Within preferred embodiments, an immunological fusion partner is derived from protein D, a surface protein of the gram-negative bacterium Haemophilus influenza B (WO 91/18926). Preferably, a protein D derivative comprises approximately the first third of the protein (e.g., the first N-terminal 100-110 amino acids), and a protein D derivative may be lipidated. Within certain preferred embodiments, the first 109 residues of a Lipoprotein D fusion partner is included on the N-terminus to provide the polypeptide with additional exogenous T-cell epitopes and to increase the expression level in E. coli (thus functioning as an expression enhancer). The lipid tail ensures optimal presentation of the antigen to antigen presenting cells. Other fusion partners include the non-structural protein from influenzae virus, NS1 (hemagglutinin). Typically, the N-terminal 81 amino acids are used, although different fragments that include T-helper epitopes may be used.

[0347] In another embodiment, the immunological fusion partner is the protein known as LYTA, or a portion thereof (preferably a C-terminal portion). LYTA is derived from Streptococcus pneumoniae, which synthesizes an N-acetyl-L-alanine amidase known as amidase LYTA (encoded by the LytA gene; Gene 43:265-292, 1986). LYTA is an autolysin that specifically degrades certain bonds in the peptidoglycan backbone. The C-terminal domain of the LYTA protein is responsible for the affinity to the choline or to some choline analogues such as DEAE. This property has been exploited for the development of E. coli C-LYTA expressing plasmids useful for expression of fusion proteins. Purification of hybrid proteins containing the C-LYTA fragment at the amino terminus has been described (see Biotechnology 10:795-798, 1992). Within a preferred embodiment, a repeat portion of LYTA may be incorporated into a fusion protein. A repeat portion is found in the C-terminal region starting at residue 178. A particularly preferred repeat portion incorporates residues 188-305.

[0348] In general, polypeptides (including fusion proteins) and polynucleotides as described herein are isolated. An “isolated” polypeptide or polynucleotide is one that is removed from its original environment. For example, a naturally-occurring protein is isolated if it is separated from some or all of the coexisting materials in the natural system. Preferably, such polypeptides are at least about 90% pure, more preferably at least about 95% pure and most preferably at least about 99% pure. A polynucleotide is considered to be isolated if, for example, it is cloned into a vector that is not a part of the natural environment.

### 4.20 BINDING AGENTS

[0349] The present invention further employs agents, such as antibodies and antigen-binding fragments thereof, that specifically bind to a hematological malignancy-related antigen. As used herein, an antibody, or antigen-binding fragment thereof, is said to “specifically bind” to a hematological malignancy-related antigen if it reacts at a detectable level (within, for example, an ELISA) with, and does not react detectably with unrelated proteins under similar conditions. As used herein, “binding” refers to a noncovalent association between two separate molecules such that a complex is formed. The ability to bind may be evaluated by, for example, determining a binding constant for the formation of the complex. The binding constant is the value obtained when the concentration of the complex is divided by the product of the component concentrations. In general, two compounds are said to “bind,” in the context of the present invention, when the binding constant for complex formation exceeds about 10³ L/mol. The binding constant maybe determined using methods well known in the art.

[0350] Binding agents may be further capable of differentiating between patients with and without a hematological malignancy. Such binding agents generate a signal indicating the presence of a hematological malignancy in at least about 20% of patients with the disease, and will generate a negative signal indicating the absence of the disease in at least about 90% of individuals without the disease. To determine whether a binding agent satisfies this requirement, biological samples (e.g., blood, sera, urine and/or tumor biopsies) from patients with and without a hematological malignancy (as determined using standard clinical tests) may be assayed as described herein for the presence of polypeptides that bind to the binding agent. It will be apparent that a statistically significant number of samples with and without the disease should be assayed. Each binding agent should satisfy the above criteria; however, those of ordinary skill in the art will recognize that binding agents may be used in combination to improve sensitivity.

[0351] Any agent that satisfies the above requirements may be a binding agent. For example, a binding agent may be a ribosome, with or without a peptide component, an RNA molecule or a polypeptide. In a preferred embodiment, a binding agent is an antibody or an antigen-binding fragment thereof Antibodies may be prepared by any of a variety of techniques known to those of ordinary skill in the art. See, e.g., Harlow and Lane, Antibodies: A Laboratory Manual, Cold Spring Harbor Laboratory, 1988. In general, antibodies can be produced by cell culture techniques, including the generation of monoclonal antibodies as described herein, or via transfection of antibody genes into suitable bacterial or mammalian cell hosts, in order to allow for the production of recombinant antibodies. In one technique, an immunogen comprising the polypeptide is initially injected into any of a wide variety of mammals (e.g., mice, rats, rabbits, sheep or goats). In this step, the polypeptides of this invention may serve as the immunogen without modification. Alternatively, particularly for relatively short polypeptides, a superior immune response may be elicited if the polypeptide is joined to a carrier protein, such as bovine serum albumin or keyhole limpet hemocyanin. The immunogen is injected into the animal host, preferably according to a predetermined schedule incorporating one or more booster immunizations, and the animals are bled periodically. Polyclonal antibodies specific for the polypeptide may then be purified from such antisera by, for example, affinity chromatography using the polypeptide coupled to a suitable solid support.

[0352] Monoclonal antibodies specific for an antigenic polypeptide of interest may be prepared, for example, using the technique of Kohler and Milstein, Eur. J. Immunol. 6:511-519, 1976, and improvements thereto. Briefly, these methods involve the preparation of immortal cell lines capable of producing antibodies having the desired specificity (i.e., reactivity with the polypeptide of interest). Such cell lines may be produced, for example, from spleen cells obtained from an animal immunized as described above. The spleen cells are then immortalized by, for example, fusion with a myeloma cell fusion partner, preferably one that is syngeneic with the immunized animal. A variety of fusion techniques may be employed. For example, the spleen cells and myeloma cells may be combined with a nonionic detergent for a few minutes and then plated at low density on a selective medium that supports the growth of hybrid cells, but not myeloma cells. A preferred selection technique uses HAT (hypoxanthine, aminopterin, thymidine) selection. After a sufficient time, usually about 1 to 2 weeks, colonies of hybrids are observed. Single colonies are selected and their culture supernatants tested for binding activity against the polypeptide. Hybridomas having high reactivity and specificity are preferred.

[0353] Monoclonal antibodies may be isolated from the supernatants of growing hybridoma colonies. In addition, various techniques may be employed to enhance the yield, such as injection of the hybridoma cell line into the peritoneal cavity of a suitable vertebrate host, such as a mouse. Monoclonal antibodies may then be harvested from the ascites fluid or the blood. Contaminants may be removed from the antibodies by conventional techniques, such as chromatography, gel filtration, precipitation, and extraction. The polypeptides of this invention may be used in the purification process in, for example, an affinity chromatography step.

[0354] Within certain embodiments, the use of antigen-binding fragments of antibodies may be preferred. Such fragments include Fab fragments, which may be prepared using standard techniques. Briefly, immunoglobulins may be purified from rabbit serum by affinity chromatography on Protein A bead columns (Harlow and Lane, Antibodies: A Laboratory Manual, Cold Spring Harbor Laboratory, 1988) and digested by papain to yield Fab and Fc fragments. The Fab and Fc fragments may be separated by affinity chromatography on protein A bead columns.

[0355] Monoclonal antibodies, and fragments thereof, of the present invention may be coupled to one or more therapeutic agents, such as radionuclides, differentiation inducers, drugs, toxins, and derivatives thereof. Preferred radionuclides include ⁹⁰Y, ¹²³I, ¹²⁵I, ¹³¹I, ¹⁸⁶Re, ¹⁸⁸Re, ²¹¹At, and ²¹²Bi. Preferred drugs include methotrexate, and pyrimidine and purine analogs. Preferred differentiation inducers include phorbol esters and butyric acid. Preferred toxins include ricin, abrin, diptheria toxin, cholera toxin, gelonin, Pseudomonas exotoxin, Shigella toxin, and pokeweed antiviral protein. For certain in vivo and ex vivo therapies, an antibody or fragment thereof is preferably coupled to a cytotoxic agent, such as a radioactive or chemotherapeutic moiety.

[0356] A therapeutic agent may be coupled (e.g., covalently bonded) to a suitable monoclonal antibody either directly or indirectly (e.g., via a linker group). A direct reaction between an agent and an antibody is possible when each possesses a substituent capable of reacting with the other. For example, a nucleophilic group, such as an amino or sulfhydryl group, on one may be capable of reacting with a carbonyl-containing group, such as an anhydride or an acid halide, or with an alkyl group containing a good leaving group (e.g. a halide) on the other.

[0357] Alternatively, it may be desirable to couple a therapeutic agent and an antibody via a linker group. A linker group can function as a spacer to distance an antibody from an agent in order to avoid interference with binding capabilities. A linker group can also serve to increase the chemical reactivity of a substituent on an agent or an antibody, and thus increase the coupling efficiency. An increase in chemical reactivity may also facilitate the use of agents, or functional groups on agents, which otherwise would not be possible.

[0358] It will be evident to those skilled in the art that a variety of bifunctional or polyfunctional reagents, both homo- and hetero-functional (such as those described in the catalog of the Pierce Chemical Co., Rockford, Ill.), may be employed as the linker group. Coupling may be effected, for example, through amino groups, carboxyl groups, sulfhydryl groups or oxidized carbohydrate residues. There are numerous references describing such methodology, e.g., U.S. Pat. No. 4,671,958.

[0359] Where a therapeutic agent is more potent when free from the antibody portion of the immunoconjugates of the present invention, it may be desirable to use a linker group which is cleavable during or upon internalization into a cell. A number of different cleavable linker groups have been described. The mechanisms for the intracellular release of an agent from these linker groups include cleavage by reduction of a disulfide bond (e.g., U.S. Pat. No. 4,489,710), by irradiation of a photolabile bond (e.g., U.S. Pat. No. 4,625,014), by hydrolysis of derivatized amino acid side chains (e.g., U.S. Pat. No. 4,638,045), by serum complement-mediated hydrolysis (e.g., U.S. Pat. No. 4,671,958), and acid-catalyzed hydrolysis (e.g., U.S. Pat. No. 4,569,789).

[0360] It may be desirable to couple more than one agent to an antibody. In one embodiment, multiple molecules of an agent are coupled to one antibody molecule. In another embodiment, more than one type of agent may be coupled to one antibody. Regardless of the particular embodiment, immunoconjugates with more than one agent may be prepared in a variety of ways. For example, more than one agent may be coupled directly to an antibody molecule, or linkers which provide multiple sites for attachment can be used. Alternatively, a carrier can be used.

[0361] A carrier may bear the agents in a variety of ways, including covalent bonding either directly or via a linker group. Suitable carriers include proteins such as albumins (e.g. U.S. Pat. No. 4,507,234), peptides and polysaccharides such as aminodextran (e.g., U.S. Pat. No. 4,699,784). A carrier may also bear an agent by noncovalent bonding or by encapsulation, such as within a liposome vesicle (e.g., U.S. Pat. Nos. 4,429,008 and 4,873,088). Carriers specific for radionuclide agents include radiohalogenated small molecules and chelating compounds. For example, U.S. Pat. No. 4,735,792 discloses representative radiohalogenated small molecules and their synthesis. A radionuclide chelate may be formed from chelating compounds that include those containing nitrogen and sulfur atoms as the donor atoms for binding the metal, or metal oxide, radionuclide. For example, U.S. Pat. No. 4,673,562 discloses representative chelating compounds and their synthesis.

[0362] A variety of routes of administration for the antibodies and immunoconjugates may be used. Typically, administration will be intravenous, intramuscular, subcutaneous or in the bed of a resected tumor. It will be evident that the precise dose of the antibody/immunoconjugate will vary depending upon the antibody used, the antigen density on the tumor, and the rate of clearance of the antibody.

### 4.21 VACCINES

[0363] In certain preferred embodiments of the present invention, vaccines are provided. The vaccines will generally comprise one or more pharmaceutical compositions, such as those discussed above, in combination with an immunostimulant. An immunostimulant may be any substance that enhances or potentiates an immune response (antibody and/or cell-mediated) to an exogenous antigen. Examples of immunostimulants include adjuvants, biodegradable microspheres (e.g., polylactic galactide) and liposomes (into which the compound is incorporated; see e.g., Fullerton, U.S. Pat. No. 4,235,877). Vaccine preparation is generally described in, for example, M. F. Powell and M. J. Newman, eds., “Vaccine Design (the subunit and adjuvant approach),” Plenum Press (NY, 1995). Pharmaceutical compositions and vaccines within the scope of the present invention may also contain other compounds, which may be biologically active or inactive. For example, one or more immunogenic portions of other tumor antigens may be present, either incorporated into a fusion polypeptide or as a separate compound, within the composition or vaccine.

[0364] Illustrative vaccines may contain DNA encoding one or more of the polypeptides as described above, such that the polypeptide is generated in situ. As noted above, the DNA may be present within any of a variety of delivery systems known to those of ordinary skill in the art, including nucleic acid expression systems, bacteria and viral expression systems. Numerous gene delivery techniques are well known in the art, such as those described by Rolland, Crit. Rev. Therap. Drug Carrier Systems 15:143-198, 1998, and references cited therein. Appropriate nucleic acid expression systems contain the necessary DNA sequences for expression in the patient (such as a suitable promoter and terminating signal). Bacterial delivery systems involve the administration of a bacterium (such as Bacillus-Calmette-Guerrin) that expresses an immunogenic portion of the polypeptide on its cell surface or secretes such an epitope. In a preferred embodiment, the DNA may be introduced using a viral expression system (e.g., vaccinia or other pox virus, retrovirus, or adenovirus), which may involve the use of a non-pathogenic (defective), replication competent virus. Suitable systems are disclosed, for example, in Fisher-Hoch et al., Proc. Natl. Acad. Sci. USA 86:317-321, 1989; Flexner et al., Ann. N.Y. Acad. Sci. 569:86-103, 1989; Flexner et al., Vaccine 8:17-21, 1990; U.S. Pat. Nos. 4,603,112, 4,769,330, and 5,017,487; WO 89/01973; U.S. Pat. No. 4,777,127; GB 2,200,651; EP 0,345,242; WO 91/02805; Berkner, Biotechniques 6:616-627, 1988; Rosenfeld et al., Science 252:431-434, 1991; Kolls et al., Proc. Natl. Acad. Sci. USA 91:215-219, 1994; Kass-Eisler et al., Proc. Natl. Acad. Sci. USA 90:11498-11502, 1993; Guzman et al., Circulation 88:2838-2848, 1993; and Guzman et al., Cir. Res. 73:1202-1207, 1993. Techniques for incorporating DNA into such expression systems are well known to those of ordinary skill in the art. The DNA may also be “naked,” as described, for example, in Ulmer et al., Science 259:1745-1749, 1993 and reviewed by Cohen, Science 259:1691-1692, 1993. The uptake of naked DNA may be increased by coating the DNA onto biodegradable beads, which are efficiently transported into the cells. It will be apparent that a vaccine may comprise both a polynucleotide and a polypeptide component. Such vaccines may provide for an enhanced immune response.

[0365] It will be apparent that a vaccine may contain pharmaceutically acceptable salts of the polynucleotides and polypeptides provided herein. Such salts may be prepared from pharmaceutically acceptable non-toxic bases, including organic bases (e.g., salts of primary, secondary and tertiary amines and basic amino acids) and inorganic bases (e.g., sodium, potassium, lithium, ammonium, calcium and magnesium salts).

[0366] While any suitable carrier known to those of ordinary skill in the art may be employed in the vaccine compositions of this invention, the type of carrier will vary depending on the mode of administration. Compositions of the present invention may be formulated for any appropriate manner of administration, including for example, topical, oral, nasal, intravenous, intracranial, intraperitoneal, subcutaneous or intramuscular administration. For parenteral administration, such as subcutaneous injection, the carrier preferably comprises water, saline, alcohol, a fat, a wax or a buffer. For oral administration, any of the above carriers or a solid carrier, such as mannitol, lactose, starch, magnesium stearate, sodium saccharine, talcum, cellulose, glucose, sucrose, and magnesium carbonate, may be employed. Biodegradable microspheres (e.g., polylactate polyglycolate) may also be employed as carriers for the pharmaceutical compositions of this invention. Suitable biodegradable microspheres are disclosed, for example, in U.S. Pat. Nos. 4,897,268; 5,075,109; 5,928,647; 5,811,128; 5,820,883; 5,853,763; 5,814,344 and 5,942,252. One may also employ a carrier comprising the particulate-protein complexes described in U.S. Pat. No. 5,928,647, which are capable of inducing a class I-restricted cytotoxic T lymphocyte responses in a host.

[0367] Such compositions may also comprise buffers (e.g., neutral buffered saline or phosphate buffered saline), carbohydrates (e.g., glucose, mannose, sucrose or dextrans), mannitol, proteins, polypeptides or amino acids such as glycine, antioxidants, bacteriostats, chelating agents such as EDTA or glutathione, adjuvants (e.g., aluminum hydroxide), solutes that render the formulation isotonic, hypotonic or weakly hypertonic with the blood of a recipient, suspending agents, thickening agents and/or preservatives. Alternatively, compositions of the present invention may be formulated as a lyophilizate. Compounds may also be encapsulated within liposomes using well known technology.

[0368] Any of a variety of immunostimulants may be employed in the vaccines of this invention. For example, an adjuvant may be included. Most adjuvants contain a substance designed to protect the antigen from rapid catabolism, such as aluminum hydroxide or mineral oil, and a stimulator of immune responses, such as lipid A, Bortadella pertussis or Mycobacterium tuberculosis derived proteins. Suitable adjuvants are commercially available as, for example, Freund's Incomplete Adjuvant and Complete Adjuvant (Difco Laboratories, Detroit, Mich.); Merck Adjuvant 65 (Merck and Company, Inc., Rahway, N.J.); AS-2 (SmithKline Beecham, Philadelphia, Pa.); aluminum salts such as aluminum hydroxide gel (alum) or aluminum phosphate; salts of calcium, iron or zinc; an insoluble suspension of acylated tyrosine; acylated sugars; cationically or anionically derivatized polysaccharides; polyphosphazenes; biodegradable microspheres; monophosphoryl lipid A and quil A. Cytokines, such as GM-CSF or interleukin-2, -7, or -12, may also be used as adjuvants.

[0369] Within the vaccines provided herein, the adjuvant composition is preferably designed to induce an immune response predominantly of the Th1 type. High levels of Th1-type cytokines (e.g., IFN-γ, TNFα, IL-2 and IL-12) tend to favor the induction of cell mediated immune responses to an administered antigen. In contrast, high levels of Th2-type cytokines (e.g., IL-4, IL-5, IL-6 and IL-10) tend to favor the induction of humoral immune responses. Following application of a vaccine as provided herein, a patient will support an immune response that includes Th1- and Th2-type responses. Within a preferred embodiment, in which a response is predominantly Th1-type, the level of Th1-type cytokines will increase to a greater extent than the level of Th2-type cytokines. The levels of these cytokines may be readily assessed using standard assays. For a review of the families of cytokines, see Mosmann and Coffman, Ann. Rev. Immunol. 7:145-173, 1989.

[0370] Preferred adjuvants for use in eliciting a predominantly Th1-type response include, for example, a combination of monophosphoryl lipid A, preferably 3-de-O-acylated monophosphoryl lipid A (3D-MPL), together with an aluminum salt. MPL adjuvants are available from Corixa Corporation (Seattle, Wash.; see U.S. Pat. Nos. 4,436,727; 4,877,611; 4,866,034 and 4,912,094). CpG-containing oligonucleotides (in which the CpG dinucleotide is unmethylated) also induce a predominantly Th1 response. Such oligonucleotides are well known and are described, for example, in WO 96/02555, WO 99/33488 and U.S. Pat. Nos. 6,008,200 and 5,856,462. Immunostimulatory DNA sequences are also described, for example, by Sato et al., Science 273:352, 1996. Another preferred adjuvant is a saponin, preferably QS21 (Aquila Biopharmaceuticals Inc., Framingham, Mass.), which may be used alone or in combination with other adjuvants. For example, an enhanced system involves the combination of a monophosphoryl lipid A and saponin derivative, such as the combination of QS21 and 3D-MPL as described in WO 94/00153, or a less reactogenic composition where the QS21 is quenched with cholesterol, as described in WO 96/33739. Other preferred formulations comprise an oil-in-water emulsion and tocopherol. A particularly potent adjuvant formulation involving QS21, 3D-MPL and tocopherol in an oil-in-water emulsion is described in WO 95/17210.

[0371] Other preferred adjuvants include Montanide ISA 720 (Seppic, France), SAF (Chiron, Calif., United States), ISCOMS (CSL), MF-59 (Chiron), the SBAS series of adjuvants (e.g., SBAS-2 or SBAS-4, available from SmithKline Beecham, Rixensart, Belgium), Detox (Corixa, Hamilton, Mont.), RC-529 (Corixa, Hamilton, Mont.) and other aminoalkyl glucosaminide 4-phosphates (AGPs), such as those described in pending U.S. patent application Ser. Nos. 08/853,826 and 09/074,720, the disclosures of which are incorporated herein by reference in their entireties.

[0372] Any vaccine provided herein may be prepared using well known methods that result in a combination of antigen, immune response enhancer and a suitable carrier or excipient. The compositions described herein may be administered as part of a sustained release formulation (i.e., a formulation such as a capsule, sponge or gel (composed of polysaccharides, for example) that effects a slow release of compound following administration). Such formulations may generally be prepared using well known technology (see, e.g., Coombes et al., Vaccine 14:1429-1438, 1996) and administered by, for example, oral, rectal or subcutaneous implantation, or by implantation at the desired target site. Sustained-release formulations may contain a polypeptide, polynucleotide or antibody dispersed in a carrier matrix and/or contained within a reservoir surrounded by a rate controlling membrane.

[0373] Carriers for use within such formulations are biocompatible, and may also be biodegradable; preferably the formulation provides a relatively constant level of active component release. Such carriers include microparticles of poly(lactide-co-glycolide), polyacrylate, latex, starch, cellulose, dextran and the like. Other delayed-release carriers include supramolecular biovectors, which comprise a non-liquid hydrophilic core (e.g., a cross-linked polysaccharide or oligosaccharide) and, optionally, an external layer comprising an amphiphilic compound, such as a phospholipid (see e.g., U.S. Patent No. 5,151,254 and PCT applications WO 94/20078, WO/94/23701 and WO 96/06638). The amount of active compound contained within a sustained release formulation depends upon the site of implantation, the rate and expected duration of release and the nature of the condition to be treated or prevented.

[0374] Any of a variety of delivery vehicles may be employed within pharmaceutical compositions and vaccines to facilitate production of an antigen-specific immune response that targets tumor cells. Delivery vehicles include antigen presenting cells (APCs), such as dendritic cells, macrophages, B cells, monocytes and other cells that may be engineered to be efficient APCs. Such cells may, but need not, be genetically modified to increase the capacity for presenting the antigen, to improve activation and/or maintenance of the T cell response, to have anti-tumor effects per se and/or to be immunologically compatible with the receiver (i.e., matched HLA haplotype). APCs may generally be isolated from any of a variety of biological fluids and organs, including tumor and peritumoral tissues, and may be autologous, allogeneic, syngeneic or xenogeneic cells.

[0375] Certain preferred embodiments of the present invention use dendritic cells or progenitors thereof as antigen-presenting cells. Dendritic cells are highly potent APCs (Banchereau and Steinman, Nature 392:245-251, 1998) and have been shown to be effective as a physiological adjuvant for eliciting prophylactic or therapeutic antitumor immunity (see Timmerman and Levy, Ann. Rev. Med. 50:507-529, 1999). In general, dendritic cells may be identified based on their typical shape (stellate in situ, with marked cytoplasmic processes (dendrites) visible in vitro), their ability to take up, process and present antigens with high efficiency and their ability to activate naive T cell responses. Dendritic cells may, of course, be engineered to express specific cell-surface receptors or ligands that are not commonly found on dendritic cells in vivo or ex vivo, and such modified dendritic cells are contemplated by the present invention. As an alternative to dendritic cells, secreted vesicles antigen-loaded dendritic cells (called exosomes) may be used within a vaccine (see Zitvogel et al., Nature Med. 4:594-600, 1998).

[0376] Dendritic cells and progenitors may be obtained from peripheral blood, bone marrow, tumor-infiltrating cells, peritumoral tissues-infiltrating cells, lymph nodes, spleen, skin, umbilical cord blood or any other suitable tissue or fluid. For example, dendritic cells may be differentiated ex vivo by adding a combination of cytokines such as GM-CSF, IL-4, IL-13 and/or TNFα to cultures of monocytes harvested from peripheral blood. Alternatively, CD34 positive cells harvested from peripheral blood, umbilical cord blood or bone marrow may be differentiated into dendritic cells by adding to the culture medium combinations of GM-CSF, IL-3, TNFα, CD40 ligand, LPS, flt3 ligand and/or other compound(s) that induce differentiation, maturation and proliferation of dendritic cells.

[0377] Dendritic cells are conveniently categorized as “immature” and “mature” cells, which allows a simple way to discriminate between two well characterized phenotypes. However, this nomenclature should not be construed to exclude all possible intermediate stages of differentiation. Immature dendritic cells are characterized as APC with a high capacity for antigen uptake and processing, which correlates with the high expression of Fcγ receptor and mannose receptor. The mature phenotype is typically characterized by a lower expression of these markers, but a high expression of cell surface molecules responsible for T cell activation such as class I and class II MHC, adhesion molecules (e.g., CD54 and CD11) and costimulatory molecules (e.g., CD40, CD80, CD86 and 4-1BB).

[0378] APCs may generally be transfected with a polynucleotide encoding a hematological malignancy-related tumor protein (or portion or other variant thereof) such that the hematological malignancy-related tumor polypeptide, or an immunogenic portion thereof, is expressed on the cell surface. Such transfection may take place ex vivo, and a composition or vaccine comprising such transfected cells may then be used for therapeutic purposes, as described herein. Alternatively, a gene delivery vehicle that targets a dendritic or other antigen presenting cell may be administered to a patient, resulting in transfection that occurs in vivo. In vivo and ex vivo transfection of dendritic cells, for example, may generally be performed using any methods known in the art, such as those described in WO 97/24447, or the gene gun approach described by Mahvi et al., Immunology and cell Biology 75:456-460, 1997. Antigen loading of dendritic cells may be achieved by incubating dendritic cells or progenitor cells with the hematological malignancy-related tumor polypeptide, DNA (naked or within a plasmid vector) or RNA; or with antigen-expressing recombinant bacterium or viruses (e.g., vaccinia, fowlpox, adenovirus or lentivirus vectors). Prior to loading, the polypeptide may be covalently conjugated to an immunological partner that provides T cell help (e.g., a carrier molecule). Alternatively, a dendritic cell may be pulsed with a non-conjugated immunological partner, separately or in the presence of the polypeptide.

[0379] Vaccines and pharmaceutical compositions may be presented in unit-dose or multi-dose containers, such as sealed ampoules or vials. Such containers are preferably hermetically sealed to preserve sterility of the formulation until use. In general, formulations may be stored as suspensions, solutions or emulsions in oily or aqueous vehicles. Alternatively, a vaccine or pharmaceutical composition may be stored in a freeze-dried condition requiring only the addition of a sterile liquid carrier immediately prior to use.

### 4.22 CANCER THERAPY

[0380] In further aspects of the present invention, the compositions described herein may be used for immunotherapy of cancer, such as hematological malignancy. Within such methods, pharmaceutical compositions and vaccines are typically administered to a patient. As used herein, a “patient” refers to any warm-blooded animal, preferably a human. A patient may or may not be afflicted with cancer. Accordingly, the above pharmaceutical compositions and vaccines may be used to prevent the development of a cancer or to treat a patient afflicted with a cancer. A cancer may be diagnosed using criteria generally accepted in the art, including the presence of a malignant tumor. Pharmaceutical compositions and vaccines may be administered either prior to or following surgical removal of primary tumors and/or treatment such as administration of radiotherapy or conventional chemotherapeutic drugs. Administration may be by any suitable method, including administration by intravenous, intraperitoneal, intramuscular, subcutaneous, intranasal, intradermal, anal, vaginal, topical and oral routes.

[0381] Within certain embodiments, immunotherapy may be active immunotherapy, in which treatment relies on the in vivo stimulation of the endogenous host immune system to react against tumors with the administration of immune response-modifying agents (such as polypeptides and polynucleotides as provided herein).

[0382] Within other embodiments, immunotherapy may be passive immunotherapy, in which treatment involves the delivery of agents with established tumor-immune reactivity (such as effector cells or antibodies) that can directly or indirectly mediate antitumor effects and does not necessarily depend on an intact host immune system. Examples of effector cells include T cells as discussed above, T lymphocytes (such as CD8⁺ cytotoxic T lymphocytes and CD4⁺ T-helper tumor-infiltrating lymphocytes), killer cells (such as Natural Killer cells and lymphokine-activated killer cells), B cells and antigen-presenting cells (such as dendritic cells and macrophages) expressing a polypeptide provided herein. T cell receptors and antibody receptors specific for the polypeptides recited herein may be cloned, expressed and transferred into other vectors or effector cells for adoptive immunotherapy. The polypeptides provided herein may also be used to generate antibodies or anti-idiotypic antibodies (as described above and in U.S. Pat. No. 4,918,164) for passive immunotherapy.

[0383] Effector cells may generally be obtained in sufficient quantities for adoptive immunotherapy by growth in vitro, as described herein. Culture conditions for expanding single antigen-specific effector cells to several billion in number with retention of antigen recognition in vivo are well known in the art. Such in vitro culture conditions typically use intermittent stimulation with antigen, often in the presence of cytokines (such as IL-2) and non-dividing feeder cells. As noted above, immunoreactive polypeptides as provided herein may be used to rapidly expand antigen-specific T cell cultures in order to generate a sufficient number of cells for immunotherapy. In particular, antigen-presenting cells, such as dendritic, macrophage, monocyte, fibroblast and/or B cells, may be pulsed with immunoreactive polypeptides or transfected with one or more polynucleotides using standard techniques well known in the art. For example, antigen-presenting cells can be transfected with a polynucleotide having a promoter appropriate for increasing expression in a recombinant virus or other expression system. Cultured effector cells for use in therapy must be able to grow and distribute widely, and to survive long term in vivo. Studies have shown that cultured effector cells can be induced to grow in vivo and to survive long term in substantial numbers by repeated stimulation with antigen supplemented with IL-2 (see, for example, Cheever et al., Immunological Reviews 157:177, 1997).

[0384] Alternatively, a vector expressing a polypeptide recited herein may be introduced into antigen presenting cells taken from a patient and clonally propagated ex vivo for transplant back into the same patient. Transfected cells may be reintroduced into the patient using any means known in the art, preferably in sterile form by intravenous, intracavitary, intraperitoneal or intratumor administration.

[0385] Routes and frequency of administration of the therapeutic compositions described herein, as well as dosage, will vary from individual to individual, and may be readily established using standard techniques. In general, the pharmaceutical compositions and vaccines may be administered by injection (e.g., intracutaneous, intramuscular, intravenous or subcutaneous), intranasally (e.g., by aspiration) or orally. Preferably, between 1 and 10 doses may be administered over a 52 week period. Preferably, 6 doses are administered, at intervals of 1 month, and booster vaccinations may be given periodically thereafter. Alternate protocols may be appropriate for individual patients. A suitable dose is an amount of a compound that, when administered as described above, is capable of promoting an anti-tumor immune response, and is at least 10-50% above the basal (i.e., untreated) level. Such response can be monitored by measuring the anti-tumor antibodies in a patient or by vaccine-dependent generation of cytolytic effector cells capable of killing the patient's tumor cells in vitro. Such vaccines should also be capable of causing an immune response that leads to an improved clinical outcome (e.g. more frequent remissions, complete or partial or longer disease-free survival) in vaccinated patients as compared to non-vaccinated patients. In general, for pharmaceutical compositions and vaccines comprising one or more polypeptides, the amount of each polypeptide present in a dose ranges from about 25 μg to 5 mg per kg of host. Suitable dose sizes will vary with the size of the patient, but will typically range from about 0.1 mL to about 5 mL.

[0386] In general, an appropriate dosage and treatment regimen provides the active compound(s) in an amount sufficient to provide therapeutic and/or prophylactic benefit. Such a response can be monitored by establishing an improved clinical outcome (e.g., more frequent remissions, complete or partial, or longer disease-free survival) in treated patients as compared to non-treated patients. Increases in preexisting immune responses to a hematological malignancy-related tumor protein generally correlate with an improved clinical outcome. Such immune responses may generally be evaluated using standard proliferation, cytotoxicity or cytokine assays, which may be performed using samples obtained from a patient before and after treatment.

### 4.23 CANCER DETECTION AND DIAGNOSIS

[0387] In general, a cancer may be detected in a patient based on the presence of one or more hematological malignancy-related tumor proteins and/or polynucleotides encoding such proteins in a biological sample (for example, blood, sera, sputum urine and/or tumor biopsies) obtained from the patient. In other words, such proteins may be used as markers to indicate the presence or absence of a cancer such as hematological malignancy. In addition, such proteins may be useful for the detection of other cancers. The binding agents provided herein generally permit detection of the level of antigen that binds to the agent in the biological sample. Polynucleotide primers and probes may be used to detect the level of mRNA encoding a tumor protein, which is also indicative of the presence or absence of a cancer. In general, a hematological malignancy-related tumor sequence should be present at a level that is at least three fold higher in tumor tissue than in normal tissue

[0388] There are a variety of assay formats known to those of ordinary skill in the art for using a binding agent to detect polypeptide markers in a sample. See, e.g., Harlow and Lane, Antibodies: A Laboratory Manual, Cold Spring Harbor Laboratory, 1988. In general, the presence or absence of a cancer in a patient may be determined by (a) contacting a biological sample obtained from a patient with a binding agent; (b) detecting in the sample a level of polypeptide that binds to the binding agent; and (c) comparing the level of polypeptide with a predetermined cut-off value.

[0389] In a preferred embodiment, the assay involves the use of binding agent immobilized on a solid support to bind to and remove the polypeptide from the remainder of the sample. The bound polypeptide may then be detected using a detection reagent that contains a reporter group and specifically binds to the binding agent/polypeptide complex. Such detection reagents may comprise, for example, a binding agent that specifically binds to the polypeptide or an antibody or other agent that specifically binds to the binding agent, such as an anti-immunoglobulin, protein G, protein A or a lectin. Alternatively, a competitive assay may be utilized, in which a polypeptide is labeled with a reporter group and allowed to bind to the immobilized binding agent after incubation of the binding agent with the sample. The extent to which components of the sample inhibit the binding of the labeled polypeptide to the binding agent is indicative of the reactivity of the sample with the immobilized binding agent. Suitable polypeptides for use within such assays include full length hematological malignancy-related tumor proteins and portions thereof to which the binding agent binds, as described above.

[0390] The solid support may be any material known to those of ordinary skill in the art to which the tumor protein may be attached. For example, the solid support may be a test well in a microtiter plate or a nitrocellulose or other suitable membrane. Alternatively, the support may be a bead or disc, such as glass, fiberglass, latex or a plastic material such as polystyrene or polyvinylchloride. The support may also be a magnetic particle or a fiber optic sensor, such as those disclosed, for example, in U.S. Pat. No. 5,359,681. The binding agent may be immobilized on the solid support using a variety of techniques known to those of skill in the art, which are amply described in the patent and scientific literature. In the context of the present invention, the term “immobilization” refers to both noncovalent association, such as adsorption, and covalent attachment (which may be a direct linkage between the agent and functional groups on the support or may be a linkage by way of a cross-linking agent). Immobilization by adsorption to a well in a microtiter plate or to a membrane is preferred. In such cases, adsorption may be achieved by contacting the binding agent, in a suitable buffer, with the solid support for a suitable amount of time. The contact time varies with temperature, but is typically between about 1 hour and about 1 day. In general, contacting a well of a plastic microtiter plate (such as polystyrene or polyvinylchloride) with an amount of binding agent ranging from about 10 ng to about 10 μg, and preferably about 100 ng to about 1 μg, is sufficient to immobilize an adequate amount of binding agent.

[0391] Covalent attachment of binding agent to a solid support may generally be achieved by first reacting the support with a bifunctional reagent that will react with both the support and a functional group, such as a hydroxyl or amino group, on the binding agent. For example, the binding agent may be covalently attached to supports having an appropriate polymer coating using benzoquinone or by condensation of an aldehyde group on the support with an amine and an active hydrogen on the binding partner (see, e.g., Pierce Immunotechnology Catalog and Handbook, 1991, at A12-A13).

[0392] In certain embodiments, the assay is a two-antibody sandwich assay. This assay may be performed by first contacting an antibody that has been immobilized on a solid support, commonly the well of a microtiter plate, with the sample, such that polypeptides within the sample are allowed to bind to the immobilized antibody. Unbound sample is then removed from the immobilized polypeptide-antibody complexes and a detection reagent (preferably a second antibody capable of binding to a different site on the polypeptide) containing a reporter group is added. The amount of detection reagent that remains bound to the solid support is then determined using a method appropriate for the specific reporter group.

[0393] More specifically, once the antibody is immobilized on the support as described above, the remaining protein binding sites on the support are typically blocked. Any suitable blocking agent known to those of ordinary skill in the art, such as bovine serum albumin or Tween 20™ (Sigma Chemical Co., St. Louis, Mo.). The immobilized antibody is then incubated with the sample, and polypeptide is allowed to bind to the antibody. The sample may be diluted with a suitable diluent, such as phosphate-buffered saline (PBS) prior to incubation. In general, an appropriate contact time (i.e., incubation time) is a period of time that is sufficient to detect the presence of polypeptide within a sample obtained from an individual with hematological malignancy. Preferably, the contact time is sufficient to achieve a level of binding that is at least about 95% of that achieved at equilibrium between bound and unbound polypeptide. Those of ordinary skill in the art will recognize that the time necessary to achieve equilibrium may be readily determined by assaying the level of binding that occurs over a period of time. At room temperature, an incubation time of about 30 minutes is generally sufficient.

[0394] Unbound sample may then be removed by washing the solid support with an appropriate buffer, such as PBS containing 0.1% Tween 20™. The second antibody, which contains a reporter group, may then be added to the solid support. Preferred reporter groups include those groups recited above.

[0395] The detection reagent is then incubated with the immobilized antibody-polypeptide complex for an amount of time sufficient to detect the bound polypeptide. An appropriate amount of time may generally be determined by assaying the level of binding that occurs over a period of time. Unbound detection reagent is then removed and bound detection reagent is detected using the reporter group. The method employed for detecting the reporter group depends upon the nature of the reporter group. For radioactive groups, scintillation counting or autoradiographic methods are generally appropriate. Spectroscopic methods may be used to detect dyes, luminescent groups and fluorescent groups. Biotin may be detected using avidin, coupled to a different reporter group (commonly a radioactive or fluorescent group or an enzyme). Enzyme reporter groups may generally be detected by the addition of substrate (generally for a specific period of time), followed by spectroscopic or other analysis of the reaction products.

[0396] To determine the presence or absence of a cancer, such as hematological malignancy, the signal detected from the reporter group that remains bound to the solid support is generally compared to a signal that corresponds to a predetermined cut-off value. In one preferred embodiment, the cut-off value for the detection of a cancer is the average mean signal obtained when the immobilized antibody is incubated with samples from patients without the cancer. In general, a sample generating a signal that is three standard deviations above the predetermined cut-off value is considered positive for the cancer. In an alternate preferred embodiment, the cut-off value is determined using a Receiver Operator Curve, according to the method of Sackett et al., Clinical Epidemiology: A Basic Science for Clinical Medicine, Little Brown and Co., 1985, p. 106-7. Briefly, in this embodiment, the cut-off value may be determined from a plot of pairs of true positive rates (i.e., sensitivity) and false positive rates (100%-specificity) that correspond to each possible cut-off value for the diagnostic test result. The cut-off value on the plot that is the closest to the upper left-hand corner (i.e., the value that encloses the largest area) is the most accurate cut-off value, and a sample generating a signal that is higher than the cut-off value determined by this method may be considered positive. Alternatively, the cut-off value may be shifted to the left along the plot, to minimize the false positive rate, or to the right, to minimize the false negative rate. In general, a sample generating a signal that is higher than the cut-off value determined by this method is considered positive for a cancer.

[0397] In a related embodiment, the assay is performed in a flow-through or strip test format, wherein the binding agent is immobilized on a membrane, such as nitrocellulose. In the flow-through test, polypeptides within the sample bind to the immobilized binding agent as the sample passes through the membrane. A second, labeled binding agent then binds to the binding agent-polypeptide complex as a solution containing the second binding agent flows through the membrane. The detection of bound second binding agent may then be performed as described above. In the strip test format, one end of the membrane to which binding agent is bound is immersed in a solution containing the sample. The sample migrates along the membrane through a region containing second binding agent and to the area of immobilized binding agent. Concentration of second binding agent at the area of immobilized antibody indicates the presence of a cancer. Typically, the concentration of second binding agent at that site generates a pattern, such as a line, that can be read visually. The absence of such a pattern indicates a negative result. In general, the amount of binding agent immobilized on the membrane is selected to generate a visually discernible pattern when the biological sample contains a level of polypeptide that would be sufficient to generate a positive signal in the two-antibody sandwich assay, in the format discussed above. Preferred binding agents for use in such assays are antibodies and antigen-binding fragments thereof. Preferably, the amount of antibody immobilized on the membrane ranges from about 25 ng to about 1 μg, and more preferably from about 50 ng to about 500 ng. Such tests can typically be performed with a very small amount of biological sample.

[0398] Of course, numerous other assay protocols exist that are suitable for use with the tumor proteins or binding agents of the present invention. The above descriptions are intended to be exemplary only. For example, it will be apparent to those of ordinary skill in the art that the above protocols may be readily modified to use hematological malignancy-related tumor polypeptides to detect antibodies that bind to such polypeptides in a biological sample. The detection of such hematological malignancy-related tumor protein specific antibodies may correlate with the presence of a cancer.

[0399] A cancer may also, or alternatively, be detected based on the presence of T cells that specifically react with a hematological malignancy-related tumor protein in a biological sample. Within certain methods, a biological sample comprising CD4⁺ and/or CD8⁺ T cells isolated from a patient is incubated with a hematological malignancy-related tumor polypeptide, a polynucleotide encoding such a polypeptide and/or an APC that expresses at least an immunogenic portion of such a polypeptide, and the presence or absence of specific activation of the T cells is detected. Suitable biological samples include, but are not limited to, isolated T cells. For example, T cells may be isolated from a patient by routine techniques (such as by Ficoll/Hypaque density gradient centrifugation of peripheral blood lymphocytes). T cells may be incubated in vitro for 2-9 days (typically 4 days) at 37° C. with polypeptide (e.g., 5-25 μg/ml). It may be desirable to incubate another aliquot of a T cell sample in the absence of hematological malignancy-related tumor polypeptide to serve as a control. For CD4⁺ T cells, activation is preferably detected by evaluating proliferation of the T cells. For CD8⁺ T cells, activation is preferably detected by evaluating cytolytic activity. A level of proliferation that is at least two fold greater and/or a level of cytolytic activity that is at least 20% greater than in disease-free patients indicates the presence of a cancer in the patient.

[0400] As noted above, a cancer may also, or alternatively, be detected based on the level of mRNA encoding a hematological malignancy-related tumor protein in a biological sample. For example, at least two oligonucleotide primers may be employed in a polymerase chain reaction (PCR) based assay to amplify a portion of a hematological malignancy-related tumor cDNA derived from a biological sample, wherein at least one of the oligonucleotide primers is specific for (i.e., hybridizes to) a polynucleotide encoding the hematological malignancy-related tumor protein. The amplified cDNA is then separated and detected using techniques well known in the art, such as gel electrophoresis. Similarly, oligonucleotide probes that specifically hybridize to a polynucleotide encoding a hematological malignancy-related tumor protein may be used in a hybridization assay to detect the presence of polynucleotide encoding the tumor protein in a biological sample.

[0401] To permit hybridization under assay conditions, oligonucleotide primers and probes should comprise an oligonucleotide sequence that has at least about 60%, preferably at least about 75% and more preferably at least about 90%, identity to a portion of a polynucleotide encoding a hematological malignancy-related tumor protein that is at least 10 nucleotides, and preferably at least 20 nucleotides, in length. Preferably, oligonucleotide primers and/or probes hybridize to a polynucleotide encoding a polypeptide described herein under moderately stringent conditions, as defined above. Oligonucleotide primers and/or probes which may be usefully employed in the diagnostic methods described herein preferably are at least 10-40 nucleotides in length. In a preferred embodiment, the oligonucleotide primers comprise at least 10 contiguous nucleotides, more preferably at least 15 contiguous nucleotides, of a DNA molecule having a sequence recited in SEQ ID NO:1-13. Techniques for both PCR based assays and hybridization assays are well known in the art (see, for example, Mullis et al., Cold Spring Harbor Symp. Quant. Biol., 51:263, 1987; Erlich ed., PCR Technology, Stockton Press, NY, 1989).

[0402] One preferred assay employs RT-PCR, in which PCR is applied in conjunction with reverse transcription. Typically, RNA is extracted from a biological sample, such as biopsy tissue, and is reverse transcribed to produce cDNA molecules. PCR amplification using at least one specific primer generates a cDNA molecule, which may be separated and visualized using, for example, gel electrophoresis. Amplification may be performed on biological samples taken from a test patient and from an individual who is not afflicted with a cancer. The amplification reaction may be performed on several dilutions of cDNA spanning two orders of magnitude. A two-fold or greater increase in expression in several dilutions of the test patient sample as compared to the same dilutions of the non-cancerous sample is typically considered positive.

[0403] In another embodiment, the compositions described herein may be used as markers for the progression of cancer. In this embodiment, assays as described above for the diagnosis of a cancer may be performed over time, and the change in the level of reactive polypeptide(s) or polynucleotide(s) evaluated. For example, the assays may be performed every 24-72 hours for a period of 6 months to 1 year, and thereafter performed as needed. In general, a cancer is progressing in those patients in whom the level of polypeptide or polynucleotide detected increases over time. In contrast, the cancer is not progressing when the level of reactive polypeptide or polynucleotide either remains constant or decreases with time.

[0404] Certain in vivo diagnostic assays may be performed directly on a tumor. One such assay involves contacting tumor cells with a binding agent. The bound binding agent may then be detected directly or indirectly via a reporter group. Such binding agents may also be used in histological applications. Alternatively, polynucleotide probes may be used within such applications.

[0405] As noted above, to improve sensitivity, multiple hematological malignancy-related tumor protein markers may be assayed within a given sample. It will be apparent that binding agents specific for different proteins provided herein may be combined within a single assay. Further, multiple primers or probes may be used concurrently. The selection of tumor protein markers may be based on routine experiments to determine combinations that results in optimal sensitivity. In addition, or alternatively, assays for tumor proteins provided herein may be combined with assays for other known tumor antigens.

### 4.24 PREPARATION OF DNA SEQUENCES

[0406] Certain nucleic acid sequences of cDNA molecules encoding portions of hematological malignancy-related antigens were isolated by PCR™-based subtraction. This technique serves to normalize differentially expressed cDNAs, facilitating the recovery of rare transcripts, and also has the advantage of permitting enrichment of cDNAs with small amounts of polyA RNA material and without multiple rounds of hybridization. To obtain antigens overexpressed in non-Hodgkin's lymphomas, two subtractions were performed with a tester library prepared from a pool of three T cell non-Hodgkin's lymphoma mRNAs. The two libraries were independently subtracted with different pools of driver cDNAs. Driver #1 contained cDNA prepared from specific normal tissues (lymph node, bone marrow, T cells, heart and brain), and this subtraction generated the library TCS-D1 (T cell non-Hodgkin's lymphoma subtracted library with driver #1). Driver #2 contained non-specific normal tissues (colon, large intestine, lung, pancreas, spinal cord, skeletal muscle, liver, kidney, skin and brain), and this subtraction generated the library TCS-D2 (T cell non-Hodgkin's lymphoma subtraction library with driver #2). Two other subtractions were performed with a tester library prepared from a pool of three B cell non-Hodgkin's lymphoma mRNAs. The two libraries were independently subtracted with different pools of driver cDNAs. Driver #1 contained cDNA prepared from specific normal tissues (lymph node, bone marrow, B cells, heart and brain), and this subtraction generated the library BCNHL/D1 (B cell non-Hodgkin's lymphoma subtracted library with driver #1). Driver #2 contained non-specific normal tissues (brain, lung, pancreas, spinal cord, skeletal muscle, colon, spleen, large intestine and PBMC), and this subtraction generated the library BCNHL/D2 (B cell non-Hodgkin's lymphoma subtraction library with driver #2). PCR™-amplified pools were generated from the subtracted libraries and clones were sequenced. Hematological malignancy-related antigen sequences may be further characterized using any of a variety of well known techniques. For example, PCR™ amplified clones may be arrayed onto glass slides for microarray analysis. To determine tissue distribution, the arrayed clones may be used as targets to be hybridized with different first strand cDNA probes, including lymphoma probes, leukemia probes and probes from different normal tissues. Leukemia and lymphoma probes may be generated from cryopreserved samples obtained at the time of diagnosis from NHL, Hodgkin's disease, AML, CML, CLL, ALL, MDS and myeloma patients with poor outcome (patients who failed to achieve complete remission following conventional chemotherapy or relapsed) or good outcome (patients who achieved long term remission). To analyze gene expression during hematopoetic differentiation, probes may be generated from >95% pure fractions of CD34+, CD2+, CD14+, CD15+and CD19+cells derived from healthy individuals.

[0407] Polynucleotide variants may generally be prepared by any method known in the art, including chemical synthesis by, for example, solid phase phosphoramidite chemical synthesis. Modifications in a polynucleotide sequence may also be introduced using standard mutagenesis techniques, such as oligonucleotide-directed site-specific mutagenesis (see Adelman et al., DNA 2:183, 1983). Alternatively, RNA molecules may be generated by in vitro or in vivo transcription of DNA sequences, provided that the DNA is incorporated into a vector with a suitable RNA polymerase promoter (such as T7 or SP6). Certain portions may be used to prepare an encoded polypeptide, as described herein. In addition, or alternatively, a portion may be administered to a patient such that the encoded polypeptide is generated in vivo (e.g., by transfecting antigen-presenting cells, such as dendritic cells, with a cDNA construct encoding a hematological malignancy-related antigen, and administering the transfected cells to the patient).

[0408] A portion of a sequence complementary to a coding sequence (i.e., an antisense polynucleotide) may also be used as a probe or to modulate hematological malignancy-related antigen expression. cDNA constructs that can be transcribed into antisense RNA may also be introduced into cells or tissues to facilitate the production of antisense RNA. An antisense polynucleotide may be used, as described herein, to inhibit expression of a hematological malignancy-related antigen. Antisense technology can be used to control gene expression through triple-helix formation, which compromises the ability of the double helix to open sufficiently for the binding of polymerases, transcription factors or regulatory molecules (see Gee et al., In Huber and Carr, Molecular and Immunologic Approaches, Futura Publishing Co. (Mt. Kisco, N.Y.; 1994)). Alternatively, an antisense molecule may be designed to hybridize with a control region of a gene (e.g., promoter, enhancer or transcription initiation site), and block transcription of the gene; or to block translation by inhibiting binding of a transcript to ribosomes.

[0409] A portion of a coding sequence or of a complementary sequence may also be designed as a probe or primer to detect gene expression. Probes may be labeled with a variety of reporter groups, such as radionuclides and enzymes, and are preferably at least 10 nucleotides in length, more preferably at least 20 nucleotides in length and still more preferably at least 30 nucleotides in length. Primers, as noted above, are preferably 22-30 nucleotides in length.

[0410] Any polynucleotide may be further modified to increase stability in vivo. Possible modifications include, but are not limited to, the addition of flanking sequences at the 5′ and/or 3′ ends; the use of phosphorothioate or 2′ O-methyl rather than phosphodiesterase linkages in the backbone; and/or the inclusion of nontraditional bases such as inosine, queosine and wybutosine, as well as acetyl- methyl-, thio- and other modified forms of adenine, cytidine, guanine, thymine and uridine.

[0411] Hematological malignancy-related antigen polynucleotides may be joined to a variety of other nucleotide sequences using established recombinant DNA techniques. For example, a polynucleotide may be cloned into any of a variety of cloning vectors, including plasmids, phagemids, lambda phage derivatives and cosmids. Vectors of particular interest include expression vectors, replication vectors, probe generation vectors and sequencing vectors. In general, a vector will contain an origin of replication functional in at least one organism, convenient restriction endonuclease sites and one or more selectable markers. Other elements will depend upon the desired use, and will be apparent to those of ordinary skill in the art.

[0412] Within certain embodiments, polynucleotides may be formulated so as to permit entry into a cell of a mammal, and expression therein. Such formulations are particularly useful for therapeutic purposes, as described below. Those of ordinary skill in the art will appreciate that there are many ways to achieve expression of a polynucleotide in a target cell, and any suitable method may be employed. For example, a polynucleotide may be incorporated into a viral vector such as, but not limited to, adenovirus, adeno-associated virus, retrovirus, or vaccinia or other pox virus (e.g., avian pox virus). Techniques for incorporating DNA into such vectors are well known to those of ordinary skill in the art. A retroviral vector may additionally transfer or incorporate a gene for a selectable marker (to aid in the identification or selection of transduced cells) and/or a targeting moiety, such as a gene that encodes a ligand for a receptor on a specific target cell, to render the vector target specific. Targeting may also be accomplished using an antibody, by methods known to those of ordinary skill in the art.

[0413] Other formulations for therapeutic purposes include colloidal dispersion systems, such as macromolecule complexes, nanocapsules, microspheres, beads, and lipid-based systems including oil-in-water emulsions, micelles, mixed micelles, and liposomes. A preferred colloidal system for use as a delivery vehicle in vitro and in vivo is a liposome (i.e., an artificial membrane vesicle). The preparation and use of such systems is well known in the art.

### 4.25 THERAPEUTIC METHODS

[0414] In further aspects of the present invention, the compositions described herein may be used for immunotherapy of hematological malignancies including adult and pediatric AML, CML, ALL, CLL, myelodysplastic syndromes (MDS), myeloproliferative syndromes (MPS), secondary leukemia, multiple myeloma, Hodgkin's lymphoma and Non-Hodgkin's lymphomas. In addition, compositions described herein may be used for therapy of diseases associated with an autoimmune response against hematopoetic precursor cells, such as severe aplastic anemia.

[0415] Immunotherapy may be performed using any of a variety of techniques, in which compounds or cells provided herein function to remove hematological malignancy-related antigen-expressing cells from a patient. Such removal may take place as a result of enhancing or inducing an immune response in a patient specific for hematological malignancy-related antigen or a cell expressing hematological malignancy-related antigen. Alternatively, hematological malignancy-related antigen-expressing cells may be removed ex vivo (e.g., by treatment of autologous bone marrow, peripheral blood or a fraction of bone marrow or peripheral blood). Fractions of bone marrow or peripheral blood may be obtained using any standard technique in the art.

[0416] Within such methods, pharmaceutical compositions and vaccines are typically administered to a patient. As used herein, a “patient” refers to any warm-blooded animal, preferably a human. A patient may or may not be afflicted with a hematological malignancy. Accordingly, the above pharmaceutical compositions and vaccines may be used to prevent the development of a malignancy or to treat a patient afflicted with a malignancy. A hematological malignancy may be diagnosed using criteria generally accepted in the art. Pharmaceutical compositions and vaccines may be administered either prior to or following surgical removal of primary tumors and/or treatment such as administration of radiotherapy or conventional chemotherapeutic drugs, or bone marrow transplantation (autologous, allogeneic or syngeneic).

[0417] Within certain embodiments, immunotherapy may be active immunotherapy, in which treatment relies on the in vivo stimulation of the endogenous host immune system to react against tumors with the administration of immune response-modifying agents (such as polypeptides and polynucleotides as provided herein).

[0418] Within other embodiments, immunotherapy may be passive immunotherapy, in which treatment involves the delivery of agents with established tumor-immune reactivity (such as effector cells or antibodies) that can directly or indirectly mediate antitumor effects and does not necessarily depend on an intact host immune system. Examples of effector cells include T cells as discussed above, T lymphocytes (such as CD8⁺ cytotoxic T lymphocytes and CD4⁺ T-helper tumor-infiltrating lymphocytes), killer cells (such as Natural Killer cells and lymphokine-activated killer cells), B cells and antigen-presenting cells (such as dendritic cells and macrophages) expressing a polypeptide provided herein. T cell receptors and antibody receptors specific for the polypeptides recited herein may be cloned, expressed and transferred into other vectors or effector cells for adoptive immunotherapy. The polypeptides provided herein may also be used to generate antibodies or anti-idiotypic antibodies (as described above and in U.S. Patent No. 4,918,164) for passive immunotherapy.

[0419] Effector cells may generally be obtained in sufficient quantities for adoptive immunotherapy by growth in vitro, as described herein. Culture conditions for expanding single antigen-specific effector cells to several billion in number with retention of antigen recognition in vivo are well known in the art. Such in vitro culture conditions typically use intermittent stimulation with antigen, often in the presence of cytokines (such as IL-2) and non-dividing feeder cells. As noted above, immunoreactive polypeptides as provided herein may be used to rapidly expand antigen-specific T cell cultures in order to generate a sufficient number of cells for immunotherapy. In particular, antigen-presenting cells, such as dendritic, macrophage or B cells, may be pulsed with immunoreactive polypeptides or transfected with one or more polynucleotides using standard techniques well known in the art. For example, antigen-presenting cells can be transfected with a polynucleotide having a promoter appropriate for increasing expression in a recombinant virus or other expression system. Cultured effector cells for use in therapy must be able to grow and distribute widely, and to survive long term in vivo. Studies have shown that cultured effector cells can be induced to grow in vivo and to survive long term in substantial numbers by repeated stimulation with antigen supplemented with IL-2 (see, for example, Cheever et al., Immunological Reviews 157:177, 1997).

[0420] Alternatively, a vector expressing a polypeptide recited herein may be introduced into antigen presenting cells taken from a patient and clonally propagated ex vivo for transplant back into the same patient. Transfected cells may be reintroduced into the patient using any means known in the art, preferably in sterile form by intravenous, intracavitary, intraperitoneal or intratumor administration.

[0421] The compositions provided herein may be used alone or in combination with conventional therapeutic regimens such as surgery, irradiation, chemotherapy and/or bone marrow transplantation (autologous, syngeneic, allogeneic or unrelated). As discussed in greater detail below, binding agents and T cells as provided herein may be used for purging of autologous stem cells. Such purging may be beneficial prior to, for example, bone marrow transplantation or transfusion of blood or components thereof. Binding agents, T cells, antigen presenting cells (APC) and compositions provided herein may further be used for expanding and stimulating (or priming) autologous, allogeneic, syngeneic or unrelated hematological malignancy-related antigen-specific T-cells in vitro and/or in vivo. Such hematological malignancy-related antigen-specific T cells may be used, for example, within donor lymphocyte infusions.

[0422] Routes and frequency of administration of the therapeutic compositions described herein, as well as dosage, will vary from individual to individual, and may be readily established using standard techniques. In general, the pharmaceutical compositions and vaccines may be administered by injection (e.g., intracutaneous, intramuscular, intravenous or subcutaneous), intranasally (e.g., by aspiration) or orally. Preferably, between 1 and 10 doses may be administered over a 52 week period. Preferably, 6 doses are administered, at intervals of 1 month, and booster vaccinations may be given periodically thereafter. Alternate protocols may be appropriate for individual patients. A suitable dose is an amount of a compound that, when administered as described above, is capable of promoting an anti-tumor immune response, and is at least 10-50% above the basal (i.e., untreated) level. Such response can be monitored by measuring the anti-tumor antibodies in a patient or by vaccine-dependent generation of cytolytic effector cells capable of killing the patient's tumor cells in vitro. Such vaccines should also be capable of causing an immune response that leads to an improved clinical outcome (e.g., more frequent remissions, complete or partial or longer disease-free survival) in vaccinated patients as compared to non-vaccinated patients. In general, for pharmaceutical compositions and vaccines comprising one or more polypeptides, the amount of each polypeptide present in a dose ranges from about 100 μg to 5 mg per kg of host. Suitable dose sizes will vary with the size of the patient, but will typically range from about 0.1 mL to about 5 mL.

[0423] In general, an appropriate dosage and treatment regimen provides the active compound(s) in an amount sufficient to provide therapeutic and/or prophylactic benefit. Such a response can be monitored by establishing an improved clinical outcome (e.g., more frequent remissions, complete or partial, or longer disease-free survival) in treated patients as compared to non-treated patients. Increases in preexisting immune responses to a hematological malignancy-related antigen generally correlate with an improved clinical outcome. Such immune responses may generally be evaluated using standard proliferation, cytotoxicity or cytokine assays, which may be performed using samples obtained from a patient before and after treatment.

[0424] Within further aspects, methods for inhibiting the development of a malignant disease associated with hematological malignancy-related antigen expression involve the administration of autologous T cells that have been activated in response to a hematological malignancy-related antigen polypeptide or hematological malignancy-related antigen-expressing APC, as described above. Such T cells may be CD4⁺ and/or CD8⁺, and may be proliferated as described above. The T cells may be administered to the individual in an amount effective to inhibit the development of a malignant disease. Typically, about 1×10to 1×10¹¹ T cells/M² are administered intravenously, intracavitary or in the bed of a resected tumor. It will be evident to those skilled in the art that the number of cells and the frequency of administration will be dependent upon the response of the patient.

[0425] Within certain embodiments, T cells may be stimulated prior to an autologous bone marrow transplantation. Such stimulation may take place in vivo or in vitro. For in vitro stimulation, bone marrow and/or peripheral blood (or a fraction of bone marrow or peripheral blood) obtained from a patient may be contacted with a hematological malignancy-related antigen polypeptide, a polynucleotide encoding a hematological malignancy-related antigen polypeptide and/or an APC that expresses a hematological malignancy-related antigen polypeptide under conditions and for a time sufficient to permit the stimulation of T cells as described above. Bone marrow, peripheral blood stem cells and/or hematological malignancy-related antigen-specific T cells may then be administered to a patient using standard techniques.

[0426] Within related embodiments, T cells of a related or unrelated donor may be stimulated prior to a syngeneic or allogeneic (related or unrelated) bone marrow transplantation. Such stimulation may take place in vivo or in vitro. For in vitro stimulation, bone marrow and/or peripheral blood (or a fraction of bone marrow or peripheral blood) obtained from a related or unrelated donor may be contacted with a hematological malignancy-related antigen polypeptide, hematological malignancy-related antigen polynucleotide and/or APC that expresses a hematological malignancy-related antigen polypeptide under conditions and for a time sufficient to permit the stimulation of T cells as described above. Bone marrow, peripheral blood stem cells and/or hematological malignancy-related antigen-specific T cells may then be administered to a patient using standard techniques.

[0427] Within other embodiments, hematological malignancy-related antigen-specific T cells, antibodies or antigen-binding fragments thereof as described herein may be used to remove cells expressing hematological malignancy-related antigen from a biological sample, such as autologous bone marrow, peripheral blood or a fraction of bone marrow or peripheral blood (e.g., CD34⁺ enriched peripheral blood (PB) prior to administration to a patient). Such methods may be performed by contacting the biological sample with such T cells, antibodies or antibody fragments under conditions and for a time sufficient to permit the reduction of hematological malignancy-related antigen expressing cells to less than 10%, preferably less than 5% and more preferably less than 1%, of the total number of myeloid or lymphatic cells in the bone marrow or peripheral blood. Such contact may be achieved, for example, using a column to which antibodies are attached using standard techniques. Antigen-expressing cells are retained on the column. The extent to which such cells have been removed may be readily determined by standard methods such as, for example, qualitative and quantitative PCR analysis, morphology, immunohistochemistry and FACS analysis. Bone marrow or PB (or a fraction thereof) may then be administered to a patient using standard techniques.

### 4.26 DIAGNOSTIC METHODS

[0428] In general, a hematological malignancy may be detected in a patient based on the presence of hematological malignancy-related antigen and/or polynucleotide in a biological sample (such as blood, sera, urine and/or tumor biopsies) obtained from the patient. In other words, hematological malignancy-related antigens may be used as a marker to indicate the presence or absence of such a malignancy. The binding agents provided herein generally permit detection of the level of antigen that binds to the agent in the biological sample. Polynucleotide primers and probes may be used to detect the level of mRNA encoding hematological malignancy-related antigen, which is also indicative of the presence or absence of a hematological malignancy. In general, hematological malignancy-related antigen should be present at a level that is at least three fold higher in a sample obtained from a patient afflicted with a hematological malignancy than in the sample obtained from an individual not so afflicted.

[0429] There are a variety of assay formats known to those of ordinary skill in the art for using a binding agent to detect polypeptide markers in a sample. See, e.g., Harlow and Lane, Antibodies: A Laboratory Manual, Cold Spring Harbor Laboratory, 1988. In general, the presence or absence of a hematological malignancy in a patient may be determined by (a) contacting a biological sample obtained from a patient with a binding agent; (b) detecting in the sample a level of polypeptide that binds to the binding agent; and (c) comparing the level of polypeptide with a predetermined cut-off value.

[0430] In a preferred embodiment, the assay involves the use of binding agent immobilized on a solid support to bind to and remove the polypeptide from the remainder of the sample. The bound polypeptide may then be detected using a detection reagent that contains a reporter group and specifically binds to the binding agent/polypeptide complex. Such detection reagents may comprise, for example, a binding agent that specifically binds to the polypeptide or an antibody or other agent that specifically binds to the binding agent, such as an anti-immunoglobulin, protein G, protein A or a lectin. Alternatively, a competitive assay may be utilized, in which a polypeptide is labeled with a reporter group and allowed to bind to the immobilized binding agent after incubation of the binding agent with the sample. The extent to which components of the sample inhibit the binding of the labeled polypeptide to the binding agent is indicative of the reactivity of the sample with the immobilized binding agent. Suitable polypeptides for use within such assays include full length hematological malignancy-related antigens and portions thereof to which the binding agent binds, as described above.

[0431] The solid support may be any material known to those of ordinary skill in the art to which the hematological malignancy-related antigen polypeptide may be attached. For example, the solid support may be a test well in a microtiter plate or a nitrocellulose or other suitable membrane. Alternatively, the support may be a bead or disc, such as glass, fiberglass, latex or a plastic material such as polystyrene or polyvinylchloride. The support may also be a magnetic particle or a fiber optic sensor, such as those disclosed, for example, in U.S. Pat. No. 5,359,681. The binding agent may be immobilized on the solid support using a variety of techniques known to those of skill in the art, which are amply described in the patent and scientific literature. In the context of the present invention, the term “immobilization” refers to both noncovalent association, such as adsorption, and covalent attachment (which may be a direct linkage between the agent and functional groups on the support or may be a linkage by way of a cross-linking agent). Immobilization by adsorption to a well in a microtiter plate or to a membrane is preferred. In such cases, adsorption may be achieved by contacting the binding agent, in a suitable buffer, with the solid support for a suitable amount of time. The contact time varies with temperature, but is typically between about 1 hour and about 1 day. In general, contacting a well of a plastic microtiter plate (such as polystyrene or polyvinylchloride) with an amount of binding agent ranging from about 10 ng to about 10 μg, and preferably about 100 ng to about 1 μg, is sufficient to immobilize an adequate amount of binding agent.

[0432] Covalent attachment of binding agent to a solid support may generally be achieved by first reacting the support with a bifunctional reagent that will react with both the support and a functional group, such as a hydroxyl or amino group, on the binding agent. For example, the binding agent may be covalently attached to supports having an appropriate polymer coating using benzoquinone or by condensation of an aldehyde group on the support with an amine and an active hydrogen on the binding partner (see, e.g., Pierce Immunotechnology Catalog and Handbook, 1991, at A12-A13).

[0433] In certain embodiments, the assay is a two-antibody sandwich assay. This assay may be performed by first contacting an antibody that has been immobilized on a solid support, commonly the well of a microtiter plate, with the sample, such that polypeptides within the sample are allowed to bind to the immobilized antibody. Unbound sample is then removed from the immobilized polypeptide-antibody complexes and a detection reagent (preferably a second antibody capable of binding to a different site on the polypeptide) containing a reporter group is added. The amount of detection reagent that remains bound to the solid support is then determined using a method appropriate for the specific reporter group.

[0434] More specifically, once the antibody is immobilized on the support as described above, the remaining protein binding sites on the support are typically blocked. Any suitable blocking agent known to those of ordinary skill in the art, such as bovine serum albumin or Tween 20™ (Sigma Chemical Co., St. Louis, Mo.). The immobilized antibody is then incubated with the sample, and polypeptide is allowed to bind to the antibody. The sample may be diluted with a suitable diluent, such as phosphate-buffered saline (PBS) prior to incubation. In general, an appropriate contact time (i.e., incubation time) is a period of time that is sufficient to detect the presence of polypeptide within a sample obtained from an individual with a hematological malignancy. Preferably, the contact time is sufficient to achieve a level of binding that is at least about 95% of that achieved at equilibrium between bound and unbound polypeptide. Those of ordinary skill in the art will recognize that the time necessary to achieve equilibrium may be readily determined by assaying the level of binding that occurs over a period of time. At room temperature, an incubation time of about 30 minutes is generally sufficient.

[0435] Unbound sample may then be removed by washing the solid support with an appropriate buffer, such as PBS containing 0.1% Tween 20™. The second antibody, which contains a reporter group, may then be added to the solid support. Preferred reporter groups include those groups recited above.

[0436] The detection reagent is then incubated with the immobilized antibody-polypeptide complex for an amount of time sufficient to detect the bound polypeptide. An appropriate amount of time may generally be determined by assaying the level of binding that occurs over a period of time. Unbound detection reagent is then removed and bound detection reagent is detected using the reporter group. The method employed for detecting the reporter group depends upon the nature of the reporter group. For radioactive groups, scintillation counting or autoradiographic methods are generally appropriate. Spectroscopic methods may be used to detect dyes, luminescent groups and fluorescent groups. Biotin may be detected using avidin, coupled to a different reporter group (commonly a radioactive or fluorescent group or an enzyme). Enzyme reporter groups may generally be detected by the addition of substrate (generally for a specific period of time), followed by spectroscopic or other analysis of the reaction products.

[0437] To determine the presence or absence of a hematological malignancy, the signal detected from the reporter group that remains bound to the solid support is generally compared to a signal that corresponds to a predetermined cut-off value. In one preferred embodiment, the cut-off value for the detection of a hematological malignancy is the average mean signal obtained when the immobilized antibody is incubated with samples from patients without the malignancy. In general, a sample generating a signal that is three standard deviations above the predetermined cut-off value is considered positive for the malignancy. In an alternate preferred embodiment, the cut-off value is determined using a Receiver Operator Curve, according to the method of Sackett et al., Clinical Epidemiology: A Basic Science for Clinical Medicine, Little Brown and Co., 1985, p. 106-7. Briefly, in this embodiment, the cut-off value may be determined from a plot of pairs of true positive rates (i.e., sensitivity) and false positive rates (100%-specificity) that correspond to each possible cut-off value for the diagnostic test result. The cut-off value on the plot that is the closest to the upper left-hand corner (i.e., the value that encloses the largest area) is the most accurate cut-off value, and a sample generating a signal that is higher than the cut-off value determined by this method may be considered positive. Alternatively, the cut-off value may be shifted to the left along the plot, to minimize the false positive rate, or to the right, to minimize the false negative rate. In general, a sample generating a signal that is higher than the cut-off value determined by this method is considered positive for a malignancy.

[0438] In a related embodiment, the assay is performed in a flow-through or strip test format, wherein the binding agent is immobilized on a membrane, such as nitrocellulose. In the flow-through test, polypeptides within the sample bind to the immobilized binding agent as the sample passes through the membrane. A second, labeled binding agent then binds to the binding agent-polypeptide complex as a solution containing the second binding agent flows through the membrane. The detection of bound second binding agent may then be performed as described above. In the strip test format, one end of the membrane to which binding agent is bound is immersed in a solution containing the sample. The sample migrates along the membrane through a region containing second binding agent and to the area of immobilized binding agent. Concentration of second binding agent at the area of immobilized antibody indicates the presence of a hematological malignancy. Typically, the concentration of second binding agent at that site generates a pattern, such as a line, that can be read visually. The absence of such a pattern indicates a negative result. In general, the amount of binding agent immobilized on the membrane is selected to generate a visually discernible pattern when the biological sample contains a level of polypeptide that would be sufficient to generate a positive signal in the two-antibody sandwich assay, in the format discussed above. Preferred binding agents for use in such assays are antibodies and antigen-binding fragments thereof. Preferably, the amount of antibody immobilized on the membrane ranges from about 25 ng to about 1 μg, and more preferably from about 50 ng to about 500 ng. Such tests can typically be performed with a very small amount of biological sample.

[0439] Of course, numerous other assay protocols exist that are suitable for use with the hematological malignancy-related antigen sequences or binding agents of the present invention. The above descriptions are intended to be exemplary only. For example, it will be apparent to those of ordinary skill in the art that the above protocols may be readily modified to use hematological malignancy-related antigen polypeptides to detect antibodies that bind to such polypeptides in a biological sample. The detection of hematological malignancy-related antigen-specific antibodies may correlate with the presence of a hematological.

[0440] A malignancy may also, or alternatively, be detected based on the presence of T cells that specifically react with hematological malignancy-related antigen in a biological sample. Within certain methods, a biological sample comprising CD4⁺ and/or CD8⁺ T cells isolated from a patient is incubated with a hematological malignancy-related antigen polypeptide, a polynucleotide encoding such a polypeptide and/or an APC that expresses such a polypeptide, and the presence or absence of specific activation of the T cells is detected. Suitable biological samples include, but are not limited to, isolated T cells. For example, T cells may be isolated from a patient by routine techniques (such as by Ficoll/Hypaque density gradient centrifugation of peripheral blood lymphocytes). T cells may be incubated in vitro for 2-9 days (typically 4 days) at 37° C. with Mtb-81 or Mtb-67.2 polypeptide (e.g., 5-25 μg/ml). It may be desirable to incubate another aliquot of a T cell sample in the absence of hematological malignancy-related antigen polypeptide to serve as a control. For CD4⁺ T cells, activation is preferably detected by evaluating proliferation of the T cells. For CD8⁺ T cells, activation is preferably detected by evaluating cytolytic activity. A level of proliferation that is at least two fold greater and/or a level of cytolytic activity that is at least 20% greater than in disease-free patients indicates the presence of a hematological malignancy in the patient.

[0441] As noted above, a hematological malignancy may also, or alternatively, be detected based on the level of mRNA encoding hematological malignancy-related antigen in a biological sample. For example, at least two oligonucleotide primers may be employed in a polymerase chain reaction (PCR) based assay to amplify a portion of hematological malignancy-related antigen cDNA derived from a biological sample, wherein at least one of the oligonucleotide primers is specific for (i.e., hybridizes to) a polynucleotide encoding the hematological malignancy-related antigen protein. The amplified cDNA is then separated and detected using techniques well known in the art, such as gel electrophoresis. Similarly, oligonucleotide probes that specifically hybridize to a polynucleotide encoding hematological malignancy-related antigen may be used in a hybridization assay to detect the presence of polynucleotide encoding hematological malignancy-related antigen in a biological sample.

[0442] To permit hybridization under assay conditions, oligonucleotide primers and probes should comprise an oligonucleotide sequence that has at least about 60%, preferably at least about 75% and more preferably at least about 90%, identity to a portion of a polynucleotide encoding hematological malignancy-related antigen that is at least 10 nucleotides, and preferably at least 20 nucleotides, in length. Preferably, oligonucleotide primers and/or probes hybridize to a polynucleotide encoding a polypeptide described herein under moderately stringent conditions, as defined above. Oligonucleotide primers and/or probes which may be usefully employed in the diagnostic methods described herein preferably are at least 10-40 nucleotides in length. Techniques for both PCR based assays and hybridization assays are well known in the art (see, for example, Mullis et al., Cold Spring Harbor Symp. Quant. Biol., 51:263, 1987; Erlich ed., PCR Technology, Stockton Press, NY, 1989).

[0443] One preferred assay employs RT-PCR, in which PCR is applied in conjunction with reverse transcription. Typically, RNA is extracted from a biological sample such as a biopsy tissue and is reverse transcribed to produce cDNA molecules. PCR amplification using at least one specific primer generates a cDNA molecule, which may be separated and visualized using, for example, gel electrophoresis. Amplification may be performed on biological samples taken from a test patient and from an individual who is not afflicted with a hematological malignancy. The amplification reaction may be performed on several dilutions of cDNA spanning two orders of magnitude. A two-fold or greater increase in expression in several dilutions of the test patient sample as compared to the same dilutions of the sample from a normal individual is typically considered positive.

[0444] In preferred embodiments, such assays may be performed using samples enriched for cells expressing the hematological malignancy-related antigen(s) of interest. Such enrichment may be achieved, for example, using a binding agent as provided herein to remove the cells from the remainder of the biological sample. The removed cells may then be assayed as described above for biological samples.

[0445] In further embodiments, hematological malignancy-related antigens may be used as markers for monitoring disease progression or the response to therapy of a hematological malignancy. In this embodiment, assays as described above for the diagnosis of a hematological malignancy may be performed over time, and the change in the level of reactive polypeptide(s) evaluated. For example, the assays may be performed every 24-72 hours for a period of 6 months to 1 year, and thereafter performed as needed. In general, a malignancy is progressing in those patients in whom the level of polypeptide detected by the binding agent increases over time. In contrast, the malignancy is not progressing when the level of reactive polypeptide either remains constant or decreases with time.

[0446] Certain in vivo diagnostic assays may be performed directly on a tumor. One such assay involves contacting tumor cells with a binding agent. The bound binding agent may then be detected directly or indirectly via a reporter group. Such binding agents may also be used in histological applications. Alternatively, polynucleotide probes may be used within such applications.

[0447] As noted above, to improve sensitivity, multiple markers may be assayed within a given sample. It will be apparent that binding agents specific for different proteins provided herein may be combined within a single assay. Further, multiple primers or probes may be used concurrently. The selection of markers may be based on routine experiments to determine combinations that results in optimal sensitivity.

[0448] Further diagnostic applications include the detection of extramedullary disease (e.g., cerebral infiltration of blasts in leukemias). Within such methods, a binding agent may be coupled to a tracer substance, and the diagnosis is performed in vivo using well known techniques. Coupled binding agent may be administered as described above, and extramedullary disease may be detected based on assaying the presence of tracer substance. Alternatively, a tracer substance may be associated with a T cell specific for hematological malignancy-related antigen, permitting detection of extramedullary disease based on assays to detect the location of the tracer substance.

### 4.27 EXEMPLARY DEFINITIONS

[0449] In accordance with the present invention, nucleic acid sequences include, but are not limited to, DNAs (including and not limited to genomic or extragenomic DNAs), genes, peptide nucleic acids (PNAs) RNAs (including, but not limited to, rRNAs, mRNAs and tRNAs), nucleosides, and suitable nucleic acid segments either obtained from native sources, chemically synthesized, modified, or otherwise prepared in whole or in part by the hand of man.

[0450] Unless defined otherwise, all technical and scientific terms used herein have the same meaning as commonly understood by one of ordinary skill in the art to which this invention belongs. Although any methods and compositions similar or equivalent to those described herein can be used in the practice or testing of the present invention, the preferred methods and compositions are described herein. For purposes of the present invention, the following terms are defined below:

[0451] A, an: In accordance with long standing patent law convention, the words “a” and “an” when used in this application, including the claims, denotes “one or more”.

[0452] Expression: The combination of intracellular processes, including transcription and translation undergone by a polynucleotide such as a structural gene to synthesize the encoded peptide or polypeptide.

[0453] Promoter: a term used to generally describe the region or regions of a nucleic acid sequence that regulates transcription.

[0454] Regulatory Element: a term used to generally describe the region or regions of a nucleic acid sequence that regulates transcription.

[0455] Structural gene: A gene or sequence region that is expressed to produce an encoded peptide or polypeptide.

[0456] Transformation: A process of introducing an exogenous polynucleotide sequence (e.g., a vector, a recombinant DNA or RNA molecule) into a host cell or protoplast in which that exogenous nucleic acid segment is incorporated into at least a first chromosome or is capable of autonomous replication within the transformed host cell. Transfection, electroporation, and naked nucleic acid uptake all represent examples of techniques used to transform a host cell with one or more polynucleotides.

[0457] Transformed cell: A host cell whose nucleic acid complement has been altered by the introduction of one or more exogenous polynucleotides into that cell.

[0458] Transgenic cell: Any cell derived or regenerated from a transformed cell or derived from a transgenic cell, or from the progeny or offspring of any generation of such a transformed host cell.

[0459] Transgenic animal: An animal or a progeny or an offspring of any generation thereof that is derived from a transformed animal cell, wherein the animal's DNA contains an introduced exogenous nucleic acid molecule not originally present in a native, wild type, non-transgenic animal of the same species. The terms “transgenic animal” and “transformed animal” have sometimes been used in the art as synonymous terms to define an animal, the genetic contents of which has been modified to contain one or more exogenous nucleic acid segments.

[0460] Vector: A nucleic acid molecule, typically comprised of DNA, capable of replication in a host cell and/or to which another nucleic acid segment can be operatively linked so as to bring about replication of the attached segment. A plasmid, cosmid, or a virus is an exemplary vector.

[0461] The terms “substantially corresponds to”, “substantially homologous”, or “substantial identity” as used herein denotes a characteristic of a nucleic acid or an amino acid sequence, wherein a selected nucleic acid or amino acid sequence has at least about 70 or about 75 percent sequence identity as compared to a selected reference nucleic acid or amino acid sequence. More typically, the selected sequence and the reference sequence will have at least about 76, 77, 78, 79, 80, 81, 82, 83, 84 or even 85 percent sequence identity, and more preferably at least about 86, 87, 88, 89, 90, 91, 92, 93, 94, or 95 percent sequence identity. More preferably still, highly homologous sequences often share greater than at least about 96, 97, 98, or 99 percent sequence identity between the selected sequence and the reference sequence to which it was compared. The percentage of sequence identity may be calculated over the entire length of the sequences to be compared, or may be calculated by excluding small deletions or additions which total less than about 25 percent or so of the chosen reference sequence. The reference sequence may be a subset of a larger sequence, such as a portion of a gene or flanking sequence, or a repetitive portion of a chromosome. However, in the case of sequence homology of two or more polynucleotide sequences, the reference sequence will typically comprise at least about 18-25 nucleotides, more typically at least about 26 to 35 nucleotides, and even more typically at least about 40, 50, 60, 70, 80, 90, or even 100 or so nucleotides. Desirably, which highly homologous fragments are desired, the extent of percent identity between the two sequences will be at least about 80%, preferably at least about 85%, and more preferably about 90% or 95% or higher, as readily determined by one or more of the sequence comparison algorithms well-known to those of skill in the art, such as e.g., the FASTA program analysis described by Pearson and Lipman (1988).

[0462] The term “naturally occurring” as used herein as applied to an object refers to the fact that an object can be found in nature. For example, a polypeptide or polynucleotide sequence that is present in an organism (including viruses) that can be isolated from a source in nature and which has not been intentionally modified by the hand of man in a laboratory is naturally-occurring. As used herein, laboratory strains of rodents that may have been selectively bred according to classical genetics are considered naturally occurring animals.

[0463] As used herein, a “heterologous” is defined in relation to a predetermined referenced gene sequence. For example, with respect to a structural gene sequence, a heterologous promoter is defined as a promoter which does not naturally occur adjacent to the referenced structural gene, but which is positioned by laboratory manipulation. Likewise, a heterologous gene or nucleic acid segment is defined as a gene or segment that does not naturally occur adjacent to the referenced promoter and/or enhancer elements.

[0464] “Transcriptional regulatory element” refers to a polynucleotide sequence that activates transcription alone or in combination with one or more other nucleic acid sequences. A transcriptional regulatory element can, for example, comprise one or more promoters, one or more response elements, one or more negative regulatory elements, and/or one or more enhancers.

[0465] As used herein, a “transcription factor recognition site” and a “transcription factor binding site” refer to a polynucleotide sequence(s) or sequence motif(s) which are identified as being sites for the sequence-specific interaction of one or more transcription factors, frequently taking the form of direct protein-DNA binding. Typically, transcription factor binding sites can be identified by DNA footprinting, gel mobility shift assays, and the like, and/or can be predicted on the basis of known consensus sequence motifs, or by other methods known to those of skill in the art.

[0466] As used herein, the term “operably linked” refers to a linkage of two or more polynucleotides or two or more nucleic acid sequences in a functional relationship. A nucleic acid is “operably linked” when it is placed into a functional relationship with another nucleic acid sequence. For instance, a promoter or enhancer is operably linked to a coding sequence if it affects the transcription of the coding sequence. Operably linked means that the DNA sequences being linked are typically contiguous and, where necessary to join two protein coding regions, contiguous and in reading frame. However, since enhancers generally function when separated from the promoter by several kilobases and intronic sequences may be of variable lengths, some polynucleotide elements may be operably linked but not contiguous.

[0467] “Transcriptional unit” refers to a polynucleotide sequence that comprises at least a first structural gene operably linked to at least a first cis-acting promoter sequence and optionally linked operably to one or more other cis-acting nucleic acid sequences necessary for efficient transcription of the structural gene sequences, and at least a first distal regulatory element as may be required for the appropriate tissue-specific and developmental transcription of the structural gene sequence operably positioned under the control of the promoter and/or enhancer elements, as well as any additional cis sequences that are necessary for efficient transcription and translation (e.g., polyadenylation site(s), mRNA stability controlling sequence(s), etc.

[0468] As noted above, the present invention is generally directed to compositions and methods for using the compositions, for example in the therapy and diagnosis of cancer, such as hematological malignancy. Certain illustrative compositions described herein include hematological malignancy-related tumor polypeptides, polynucleotides encoding such polypeptides, binding agents such as antibodies, antigen presenting cells (APCs) and/or immune system cells (e.g., T cells). A “hematological malignancy-related tumor protein,” as the term is used herein, refers generally to a protein that is expressed in hematological malignancy-related tumor cells at a level that is at least two fold, and preferably at least five fold, greater than the level of expression in a normal tissue, as determined using a representative assay provided herein. Certain hematological malignancy-related tumor proteins are tumor proteins that react detectably (within an immunoassay, such as an ELISA or Western blot) with antisera of a patient afflicted with hematological malignancy.

### 4.28 BIOLOGICAL FUNCTIONAL EQUIVALENTS

[0469] Modification and changes may be made in the structure of the polynucleotides and peptides of the present invention and still obtain a functional molecule that encodes a peptide with desirable characteristics, or still obtain a genetic construct with the desirable expression specificity and/or properties. As it is often desirable to introduce one or more mutations into a specific polynucleotide sequence, various means of introducing mutations into a polynucleotide or peptide sequence known to those of skill in the art may be employed for the preparation of heterologous sequences that may be introduced into the selected cell or animal species. In certain circumstances, the resulting encoded peptide sequence is altered by this mutation, or in other cases, the sequence of the peptide is unchanged by one or more mutations in the encoding polynucleotide. In other circumstances, one or more changes are introduced into the promoter and/or enhancer regions of the polynucleotide constructs to alter the activity, or specificity of the expression elements and thus alter the expression of the heterologous therapeutic nucleic acid segment operably positioned under the control of the elements.

[0470] When it is desirable to alter the amino acid sequence of one or more of the heterologous peptides encoded by the expression construct to create an equivalent, or even an improved, second-generation molecules, the amino acid changes may be achieved by changing one or more of the codons of the encoding DNA sequence, according to Table 1.

[0471] For example, certain amino acids may be substituted for other amino acids in a protein structure without appreciable loss of interactive binding capacity with structures such as, for example, antigen-binding regions of antibodies or binding sites on substrate molecules. Since it is the interactive capacity and nature of a protein that defines that protein's biological functional activity, certain amino acid sequence substitutions can be made in a protein sequence, and, of course, its underlying DNA coding sequence, and nevertheless obtain a protein with like properties. It is thus contemplated by the inventors that various changes may be made in the peptide sequences of the disclosed compositions, or corresponding DNA sequences which encode said peptides without appreciable loss of their biological utility or activity.

TABLE 1

| Amino Acids | | | Codons |
|---|---|---|---|
| Alanine | Ala | A | GCA GCC GCG GCU |
| Cysteine | Cys | C | UGC UGU |
| Aspartic acid | Asp | D | GAC GAU |
| Glutamic acid | Glu | E | GAA GAG |
| Phenylalanine | Phe | F | UUC UUU |
| Glycine | Gly | G | GGA GGC GGG GGU |
| Histidine | His | H | CAC CAU |
| Isoleucine | Ile | I | AUA AUC AUU |
| Lysine | Lys | K | AAA AAG |
| Leucine | Leu | L | UUA UUG CUA CUC CUG CUU |
| Methionine | Met | M | AUG |
| Asparagine | Asn | N | AAC AAU |
| Proline | Pro | P | CCA CCC CCG CCU |
| Glutamine | Gln | Q | CAA CAG |
| Arginine | Arg | R | AGA AGG CGA CGC CGG CGU |
| Serine | Ser | S | AGC AGU UCA UCC UCG UCU |
| Threonine | Thr | T | ACA ACC ACG ACU |
| Valine | Val | V | GUA GUC GUG GUU |
| Tryptophan | Trp | W | UGG |
| Tyrosine | Tyr | Y | UAC UAU |

[0472] In making such changes, the hydropathic index of amino acids may be considered. The importance of the hydropathic amino acid index in conferring interactive biologic function on a 5 protein is generally understood in the art (Kyte and Doolittle, 1982, incorporate herein by reference). It is accepted that the relative hydropathic character of the amino acid contributes to the secondary structure of the resultant protein, which in turn defines the interaction of the protein with other molecules, for example, enzymes, substrates, receptors, DNA, antibodies, antigens, and the like. Each amino acid has been assigned a hydropathic index on the basis of 10 their hydrophobicity and charge characteristics (Kyte and Doolittle, 1982), these are: isoleucine (+4.5); valine (+4.2); leucine (+3.8); phenylalanine (+2.8); cysteine/cystine (+2.5); methionine (+1.9); alanine (+1.8); glycine (−0.4); threonine (−0.7); serine (−0.8); tryptophan (−0.9); tyrosine (−1.3); proline (−1.6); histidine (−3.2); glutamate (−3.5); glutamine (−3.5); aspartate (−3.5); asparagine (−3.5); lysine (−3.9); and arginine (−4.5).

[0473] It is known in the art that certain amino acids may be substituted by other amino acids having a similar hydropathic index or score and still result in a protein with similar biological activity, i.e. still obtain a biological functionally equivalent protein. In making such changes, the substitution of amino acids whose hydropathic indices are within ±2 is preferred, those that are within ±1 are particularly preferred, and those within ±0.5 are even more particularly preferred. It is also understood in the art that the substitution of like amino acids can be made effectively on the basis of hydrophilicity. U.S. Pat. No. 4,554,101, incorporated herein by reference, states that the greatest local average hydrophilicity of a protein, as governed by the hydrophilicity of its adjacent amino acids, correlates with a biological property of the protein.

[0474] As detailed in U.S. Pat. No. 4,554,101, the following hydrophilicity values have been assigned to amino acid residues: arginine (+3.0); lysine (+3.0); aspartate (+3.0±1); glutamate (+3.0±1); serine (+0.3); asparagine (+0.2); glutamine (+0.2); glycine (0); threonine (−0.4); proline (−0.5±1); alanine (−0.5); histidine (−0.5); cysteine (−1.0); methionine (−1.3); valine (−1.5); leucine (−1.8); isoleucine (−1.8); tyrosine (−2.3); phenylalanine (−2.5); tryptophan (−3.4). It is understood that an amino acid can be substituted for another having a similar hydrophilicity value and still obtain a biologically equivalent, and in particular, an immunologically equivalent protein. In such changes, the substitution of amino acids whose hydrophilicity values are within ±2 is preferred, those that are within ±1 are particularly preferred, and those within ±0.5 are even more particularly preferred.

[0475] As outlined above, amino acid substitutions are generally therefore based on the relative similarity of the amino acid side-chain substituents, for example, their hydrophobicity, hydrophilicity, charge, size, and the like. Exemplary substitutions which take several of the foregoing characteristics into consideration are well known to those of skill in the art and include: arginine and lysine; glutamate and aspartate; serine and threonine; glutamine and asparagine; and valine, leucine and isoleucine.

### 5. EXAMPLES

[0476] The following examples are included to demonstrate preferred embodiments of the invention. However, those of skill in the art should, in light of the present disclosure, appreciate that many changes can be made in the specific embodiments which are disclosed and still obtain a like or similar result without departing from the spirit and scope of the invention described in the appended claims.

### 5.1 EXAMPLE 1—IDENTIFICATION OF HEMATOLOGICAL MALIGNANCY-RELATED ANTIGEN POLYNUCLEOTIDES

[0477] This Example illustrates the identification of hematological malignancy-related antigen polynucleotides from non-Hodgkin's lymphomas.

[0478] Hematological malignancy-related antigen polynucleotides were isolated by PCR-based subtraction. PolyA mRNA was prepared from T cell non-Hodgkin's lymphomas, B cell non-Hodgkin's lymphomas and normal tissues. Six cDNA libraries were constructed, PCR-subtracted and analyzed. Two libraries were constructed using pools of three T cell non-Hodgkin's lymphoma mRNAs (referred to herein as TCS libraries). Two others were constructed using pools of three B cell non-Hodgkin's lymphoma mRNAs (referred to herein as BCNHL libraries). Two other libraries were constructed using a pool of 2 Hodgkin's lymphoma mRNAs (referred to herein as HLS libraries. cDNA synthesis, hybridization and PCR amplification were performed according to Clontech's user manual (PCR-Select cDNA Subtraction), with the following changes: 1) cDNA was restricted with a mixture of enzymes, including MscI, PvuII, StuI and DraI, instead of the single enzyme RsaI; and 2) the ratio of driver to tester cDNA was increased in the hybridization steps (to 76:1) to give a more stringent subtraction.

[0479] The two TCS libraries were independently subtracted with different pools of driver cDNAs. Driver #1 contained cDNA prepared from specific normal tissues (lymph node, bone marrow, T cells, heart and brain), and this subtraction generated the library TCS-D1 (T cell non-Hodgkin's lymphoma subtracted library with driver #1). Driver #2 contained non-specific normal tissues (colon, large intestine, lung, pancreas, spinal cord, skeletal muscle, liver, kidney, skin and brain), and this subtraction generated the library TCS-D2 (T cell non-Hodgkin's lymphoma subtraction library with driver #2).

[0480] Similarly, the two BCNHL libraries were independently subtracted with different pools of driver cDNAs. Driver #1 contained cDNA prepared from specific normal tissues (lymph node, bone marrow, B cells, heart and brain), and this subtraction generated the library BCNHL/D1 (B cell non-Hodgkin's lymphoma subtracted library with driver #1). Driver #2 contained non-specific normal tissues (brain, lung, pancreas, spinal cord, skeletal muscle, colon, spleen, large intestine and PBMC), and this subtraction generated the library BCNHL/D2 (B cell non-Hodgkin's lymphoma subtraction library with driver #2).

[0481] The two HLS libraries were independently subtracted with different pools of driver cDNAs. Driver #1 contained cDNA prepared from specific normal tissues (lymph node, bone marrow, B cells and lung) and this subtraction generated HLS-D1 (Hodgkin's lymphoma subtraction library with driver #1). Driver #2 contained non-specific normal tissues (colon, large intestine, lung, pancreas, spinal cord, skeletal muscle, liver, kidney, skin and brain) and this generated the library HLS-D2 (Hodgkin's lymphoma subtraction library with driver #2).

[0482] To analyze the efficiency of the subtraction, actin (a housekeeping gene) was PCR amplified from dilutions of subtracted as well as unsubtracted PCR samples. Furthermore, the complexity and redundancy of each library was characterized by sequencing 96 clones from each of the PCR subtraction libraries (TCS-D1, TCS-D2, BCNHL/D1, BCNHL/D2, HLS-D1 and HLS-D2). These analyses indicated that the libraries are enriched for genes overexpressed in leukemia tissues and specifically T cell and B cell non-Hodgkin's lymphoma and M. Hodgkin's lymphoma samples.

[0483] Following PCR amplification, the cDNAs were cloned into the pCR2.1-TOPO plasmid vector (Invitrogen).

[0484] Sequences obtained from these analyses were searched against known sequences in the publicly available databases using the BLAST 2.0 release. The default BLAST parameters used were as follows: GAP PARAMETERS: Open Gap=0, Extended Gap=0; OUTPUT PARAMETERS: Expect=10.0, Threshold=0, Number of Alignments=250; For BLASTN, the search parameters were as follows: Mismatch=−3, Reward=1, Word size=0. The alignments were presented pair-wise, with a window percent identity=22. All available protein and nucleotide databases were searched, including, PIR, SwissPROT, GenBank, Mouse EST, Human EST, Other EST, Human repeat and high throughput sequences, and published patents and patent application database.

[0485] From these, a number of unique sequences were identified that represented novel polynucleotide sequences that had not previously been described in the GenBank and other sequence databases. A number of other sequences were identified that appeared to contain significant homology with one or more sequences previously identified in the databases, although they were described only as genomic or cDNA clones, and had no known function. The remaining sequences corresponded to known genes. The clones obtained from this analysis are summarized in Tables 2-6 in co-pending application U.S. Ser. No. 09/796,692.

### 5.2 EXAMPLE 2—ANALYSIS OF SUBTRACTED cDNA SEQUENCES BY MICROARRAY ANALYSIS

[0486] Subtracted cDNA sequences were analyzed by microarray analysis to evaluate their expression in hematological malignancies and normal tissues. Using this approach, cDNA sequences were PCR amplified and their mRNA expression profiles in hematological malignancies and normal tissues are examined using cDNA microarray technology essentially as described (Shena et al., 1995).

[0487] In brief, the clones identified from the subtracted cDNA libraries analyses were immobilized and arrayed onto glass slides as multiple replicas on microarray slides and the slides were hybridized with two different sets of probes, with each location on the microarray slide corresponding to a unique cDNA clone (as many as 5500 clones can be arrayed on a single slide, or chip). Each chip is hybridized with a pair of cDNA probes that are fluorescence-labeled with Cy3 and Cy5, respectively. The set of probes derived from the hematological malignancies was labeled with cy3 while the other set of probes derived from a pool of normal tissues was labeled with cy5. Typically, 1 μg of polyA⁺ RNA was used to generate each cDNA probe. After hybridization, the chips were scanned and the fluorescence intensity recorded for both Cy3 and Cy5 channels. The difference in intensities (i.e., cy3/cy5 ratios) following hybridization with both probe sets provided the information on the relative expression level of each cDNA sequences immobilized on the slide in tumor versus normal tissues. There are multiple built-in quality control steps. First, the probe quality is monitored using a panel of ubiquitously expressed genes. Secondly, the control plate also can include yeast DNA fragments of which complementary RNA may be spiked into the probe synthesis for measuring the quality of the probe and the sensitivity of the analysis. This methodology provides a sensitivity of 1 in 100,000 copies of mRNA, and the reproducibility of the technology may be ensured by including duplicated control cDNA elements at different locations.

[0488] Analysis of hematological malignancy subtracted clones by microarray analyses on a variety of microarray chips identified the sequences set forth in SEQ ID NO: 1 through SEQ ID NO:668 of co-pending application U.S. Ser. No. 09/796,692 as being at least two-fold overexpressed in hematological malignancies versus normal tissues.

### 5.3 EXAMPLE 3—POLYNUCLEOTIDE AND POLYPEPTIDE COMPOSITIONS: BRIEF DESCRIPTION OF THE cDNA CLONES AND OPEN READING FRAMES IDENTIFIED BY SUBTRACTIVE HYBRIDIZATION AND MICROARRAY ANALYSIS

[0489] Table 7 in co-pending application U.S. Ser. No. 09/796,692 lists the sequences of the polynucleotides obtained during the analyses of the present invention. Shown are the 668 polynucleotide sequences, along with their clone name identifiers, as well as the serial number and filing date of the priority provisional patent application in which the clone was first identified.

[0490] Table 8 in co-pending application U.S. Ser. No. 09/796,692 identifies the putative open reading frames obtained from analyses of the cDNA sequences obtained in SEQ ID NO: 1-SEQ ID NO:668 as described above. Shown are the sequence identifiers, the clone name and translation frame, and the start and stop nucleotides in the corresponding DNA sequence used to generate the polypeptide sequence of the open reading frame.

[0491] Table 9 in co-pending application U.S. Ser. No. 09/796,692 identifies an additional set of particular hematological malignancy-related cDNA sequences that were obtained using the subtractive library and microarray methods as described above. These sequences, designated SEQ ID NO:2533-SEQ ID NO:9597 in the co-pending application, are shown in the Table along with the original clone name, and the serial number and filing date of the priority provisional application in which the clone was first described.

### 5.4 EXAMPLE 4—IDENTIFICATION OF A SPECIFIC GENE, LY1448, ASSOCIATED WITH B CELL LEUKEMIAS, LYMPHOMAS AND MULTIPLE MYELOMAS

[0492] This example illustrates the identification of a specific gene, and its encoded protein that is associated with B cell leukemias, lymphomas and multiple myelomas.

[0493] SEQ ID NO:2, also termed “Ly1448,”a portion of which was disclosed earlier in co-pending application U.S. Ser. No. 09/796,692 as SEQ ID NO:636 was used to screen a series of MicroArray and RealTime chips and panels containing cDNAs made from RNAs isolated from normal cells and hematologically malignant cells. SEQ ID NO:2 appeared to be expressed in normal B cell lines, CD 19+cell lines, and highly expressed in a subset of Non-Hodgkins B-cell lymphoma cell lines, Hodgkins lymphoma cell lines, follicular lymphoma cell lines, and Chronic Lymphocytic Leukemia cell lines.

[0494] SEQ ID NO:2, which is a 523 base pair cDNA fragment, was used to screen the LIFESEQ® Gold database and two additional clones were identified, SEQ ID NO:1, also termed “LS 1384258.1”, which is a 622 base pair cDNA fragment, and SEQ ID NO:3, also termed “LS 368109.1”, which is a 1,908 base pair cDNA.

[0495] Both SEQ ID NOs:1 and 3 were used to screen the publicly available human genome database and homologous sequences were identified on human chromosome 1. Exons and introns were identified by comparing the publicly available genomic sequence data to SEQ ID NOs: 1-3 and are shown diagrammatically in FIG. 6. This comparison determined that SEQ ID NO:3 contained 16 exons. Open reading frames were identified by a LIFESEQ™ Gold BLAST analysis. These results are also shown diagrammatically in FIG. 6. SEQ ID NO:3 is a full length clone comprising 8 untranslated exons (exons 1-8) and 8 exons containing open reading frames (exons 9-16). SEQ ID NOs:1 and 2 are fragments of alternatively spliced variants of SEQ ID NO:3.

[0496] The BLAST analysis determined that the open reading frame (ORF) of SEQ ID NO:3 begins at nucleotide 777, ends at nucleotide 1562 and encodes a 261 amino acid protein as identified in SEQ ID NO:14, termed LY1448 protein. Further analysis of SEQ ID NO:3 using both TMpred and PSORTII indicated that SEQ ID NO:14 is a type-1b membrane protein, containing a predicted transmembrane domain beginning at amino acid 156 and ending at amino acid 177. The extracellular portion of SEQ ID NO:14 has homology with immunoglobulins and contains a predicted Ig-like domain. The intracellular portion of SEQ ID NO:14 contains Src Homology-2 (SH2) binding domains and an Immune Receptor Tyrosine-Based Inhibition Motif (ITIM). As such, LY1448 protein may play a specific role in hematopoetic cell signaling.

[0497] A BLAST search of GenBank determined that LY1448 protein shared homology with a recently identified protein, SH2 domain-containing phosphatase anchor protein 1a (SPAP1a), Xu et al., Biochem. Biophys. Res. Commun. 280: 768-775 (2001). The nucleic acid sequence encoding SPAP1a is 1329 nucleotides long (SEQ ID. NO:4) and encodes a protein 255 amino acids long (SEQ ID NO:15). TMpred and PSORTII analysis of the nucleotide sequence encoding SPAP1a indicates that SPAP1a contains two predicted transmembrane domains. The first predicted transmembrane domain begins at amino acid 32 and extends to amino acid 53. The second predicted transmembrane domain begins at amino acid 150 and extends to amino acid 171.

[0498] A comparison of the nucleotide sequence, SEQ ID NO:3, encoding LY1448 protein and the nucleotide sequence, SEQ ID NO:4, encoding SPAP1a shows that the first 919 nucleotides and the first 447 nucleotides respectively are unique to each sequence. The remaining nucleotides of each sequence are highly homologous. Similarly, a comparison of the amino acid sequence of LY1448 protein (SEQ ID NO:14) and the amino acid sequence of SPAP1 (SEQ ID NO:15) shows that the first 48 amino acids of LY1448 and the first 42 amino acids of SPAP1a are unique to each protein. The remaining 213 amino acids of each protein, comprising a portion of the extracellular domain, the transmembrane domain, and the intracellular domain are identical. These data suggest that LY1448 and SPAP1a may be novel splice variants of each other. Due to the differences in amino acid sequence between the two proteins, SPAP1a does not contain the unique Ig-like domain observed in LY1448.

[0499] A BLASTX search of both the GenBank and GenSeq databases indicated that LY1448 and SPAP1a also share homology with the Immunoglobulin Receptor Translocation Associated Protein 4 (“IRTA4”) whose nucleotide sequence is represented in SEQ ID NO:12, and whose amino acid sequence is represented in SEQ ID NO:867. Nucleotides 1-630 of SEQ ID NO:3 encoding a portion of the 5′ untranslated region of the LY1448 cDNA are unique to LY1448. The remaining nucleotides are highly homologous to the IRTA4 nucleotide sequence. Nucleotides 1-642 of SEQ ID NO:12 are unique to the IRTA4 nucleotide sequence. The amino terminal 247 amino acids of the IRTA4 protein represented in SEQ ID NO:867 are unique to IRTA4. The remaining amino acids of the IRTA4 protein are highly homologous to the LY1448 protein. These data suggest that LY1448 and IRTA4 may be novel splice variants of each other.

[0500] LY1448 protein immunogenic peptides comprising 5 non-overlapping 31mer or 32mer amino acid fragments (SEQ ID NOs:16-20) of the extracellular domain LY1448 protein (amino acids 1-156 of SEQ ID NO:14) were generated and are being used to generate antibodies specific for the LY1448 protein. These antibodies will be useful in recognizing LY1448 protein for diagnostic and therapeutic use in both normal and diseased cells. Each peptide fragment used to generate antibodies also contains a GCG peptide linker sequence at the carboxy-terminus of the fragment. These antibodies may also recognize the IRTA4 protein. Antibodies immunoreactive to epitopes present on peptides defined by SEQ ID NOs:17-20 may also recognize epitopes present in SPAP1a.

[0501] Seventeen overlapping immunogenic peptides derived from LY1448 protein sequence were also generated. 16-30mer amino acid peptides were generated, each peptide contains sequential amino acid sequences and overlaps peptides containing adjacent sequences by 15 amino acids (SEQ ID NOs:841-856). One peptide encoding the carboxy-terminus of LY1448 protein is 21 amino acids long and also overlaps the adjacent peptide by 15 amino acids (SEQ ID NO:857). These seventeen peptides will also be used to generate antibodies immunoreactive to epitopes present on the peptides. Antibodies which recognize epitopes present on peptides identified by SEQ ID NOs:841 and 842 will recognize LY1448 protein whereas antibodies which recognize epitopes present on peptides identified by SEQ ID NOs:843-857 may recognize both LY1448 and SPAP1a proteins. Antibodies generated against all of these peptides may also recognize IRTA4. Antibodies generated against these 17 overlapping peptides will be useful for both diagnostic and therapeutic purposes.

### 5.5 EXAMPLE 5—IDENTIFICATION OF LY1448 IMMUNGENIC PEPTIDES

[0502] This example illustrates the identification of peptides useful for generating cytotoxic T cell or helper T cell responses.

[0503] LY1448 protein peptides useful for generating a cellular immune response were identified. Preferred epitope binding motifs for many of the HLA class I and class II molecules are known. The LY1448 amino acid sequence was searched for peptides that would bind to the specific HLA molecules identified in Table 10. 9mer peptides predicted to bind to each of the specific HLA molecules were identified and SEQ ID NOs corresponding to the peptides which bind to each HLA molecule are indicated.

TABLE 10
LY1448 CTL Peptides Identified

| HLA molecule selected | LY1448 peptides identified |
|---|---|
| HLA A_0201 | SEQ ID NOs: 21-40 |
| HLA A_0205 | SEQ ID NOs: 41-60 |
| HLA A24 | SEQ ID NOs: 61-80 |
| HLA A3 | SEQ ID NOs: 81-100 |
| HLA A68.1 | SEQ ID NOs: 101-120 |
| HLA A_1101 | SEQ ID NOs: 121-140 |
| HLA A_3101 | SEQ ID NOs: 141-160 |
| HLA A_3302 | SEQ ID NOs: 161-180 |
| HLA B14 | SEQ ID NOs: 181-200 |
| HLA B40 | SEQ ID NOs: 201-220 |
| HLA B60 | SEQ ID NOs: 221-240 |
| HLA B61 | SEQ ID NOs: 241-260 |
| HLA B62 | SEQ ID NOs: 261-280 |
| HLA B7 | SEQ ID NOs: 281-300 |
| HLA B8 | SEQ ID NOs: 301-320 |
| HLA B_2702 | SEQ ID NOs: 321-340 |
| HLA B_2705 | SEQ ID NOs: 341-360 |
| HLA B_3501 | SEQ ID NOs: 361-380 |
| HLA B_3701 | SEQ ID NOs: 381-400 |
| HLA B_3801 | SEQ ID NOs: 401-420 |
| HLA B_3901 | SEQ ID NOs: 421-440 |
| HLA B_3902 | SEQ ID NOs: 441-460 |
| HLA B_4403 | SEQ ID NOs: 461-480 |
| HLA B_5101 | SEQ ID NOs: 481-500 |
| HLA B_5102 | SEQ ID NOs: 501-520 |
| HLA B_5103 | SEQ ID NOs: 521-540 |
| HLA B_5201 | SEQ ID NOs: 541-560 |
| HLA B_5801 | SEQ ID NOs: 561-580 |
| HLA Cw_0301 | SEQ ID NOs: 581-600 |
| HLA Cw_0401 | SEQ ID NOs: 601-620 |
| HLA Cw_0602 | SEQ ID NOs: 621-640 |
| HLA Cw_0702 | SEQ ID NOs: 641-660 |
| HLA Db | SEQ ID NOs: 661-680 |
| HLA Db_revised | SEQ ID NOs: 681-700 |
| HLA Dd | SEQ ID NOs: 701-720 |
| HLA Kb | SEQ ID NOs: 721-740 |
| HLA Kd | SEQ ID NOs: 741-760 |
| HLA Kk | SEQ ID NOs: 761-780 |
| HLA Kk | SEQ ID NOs: 781-800 |
| HLA Ld | SEQ ID NOs: 801-820 |
| HLA Cattle_A20 | SEQ ID NOs: 821-840 |

[0504] The location of additional immunogenic peptides was determined by analyzing the complete LY1448 protein amino acid sequence of SEQ ID NO:14 using the program TSITES. The results are shown in FIG. 7. TSITES identified the location of predicted amphipathic helices (A), the location of amino acid residues matching the Rothbard/Taylor motif (R), the location of residues matching the IAd motif (D) and the location of residues matching the IEd motif (d). Based on this analysis, four additional peptides were identified that are predicted to contain epitopes that will bind to CD4⁺ T cells. Peptide 1 spans amino acids 40-78 of the LY1448 protein and is represented by SEQ ID NO:858. Peptide 2 spans amino acids 127-150 of the LY 1448 protein and is represented by SEQ ID NO:859. Peptide 3 spans amino acids 210-233 of the LY 1448 protein and is represented by SEQ ID NO:860. Peptide 4 spans amino acids 141-178 of the LY 1448 protein and is represented by SEQ ID NO:861.

### 5.6 EXAMPLE 6—LY1448 PROTEIN IS A CELL SURFACE PROTEIN

[0505] This example illustrates that the LY1448 protein encoded by SEQ ID NO:3 is a cell surface protein.

[0506] The nucleotide sequence encoding LY1448 was sub-cloned in to the mammalian expression vector pCEP4 (Invitrogen) as follows. The portion of SEQ ID NO:3 encoding the LY1448 protein was PCR amplified using a sense amplimer comprising nucleotides 777-800 of SEQ ID NO:3 and additional nucleotides on the 5′ end which contained a HindIII restriction enzyme site and an anti-sense primer comprising nucleotides 1544-1570 of SEQ ID NO:3 and additional nucleotides on the 3′ end which contained a NotI restriction enzyme site. The PCR product was cloned into the pCR-Blunt vector (Invitrogen), and sequenced. DNA from a pCR-Blunt clone with the correct sequence was digested with HindIII and NotI to release the LY1448 cDNA insert and subcloned into the mammalian expression vector pCEP4 (Invitrogen) which had been previously modified to contain a c-terminal FLAG epitope tag (Sigma; amino acid sequence DYKDDDDK). The resulting recombinant vector LY1448-FLAG/pCEP encoded a LY1448-FLAG fusion protein.

[0507] To determine if the recombinant expression vector LY1448-FLAG/pCEP would express protein, the recombinant vector was transiently transfected into HEK293 cells using Lipofectamine 2000 according to manufacturers instructions (GibcoBRL). Separately, HEK293 cells were also transfected with a control vector containing a recombinant FLAG construct and non-recombinant pCEP4 vector. Transfected cells were cultured for 48 hours and then whole cell lysates were prepared. Lysates were run on a polyacrylamide gel, and the gel was electroblotted onto nitrocellulose membrane using standard techniques (Ausubel et al.,). The electroblot was probed with a mouse anti-FLAG monoclonal antibody and binding of the mouse mAb was detected with a biotinylated rabbit anti-mouse IgG and developed with avidin-HRP and ECL reagent and the results are shown in FIG. 8. Lanes 2 and 3 are control lanes and lane 4 contains the whole cell extract of cells transfected with LY1448-FLAG/pCEP4. Anti-FLAG antibodies recognized a LY1448-FLAG fusion protein of the expected molecular weight.

[0508] To determine if recombinant LY1448 protein was present on the cell surface, whole cells transiently transfected with LY1448-FLAG/pCEP4 were biotinylated with Biotin-7-NHS, cells were washed and whole cell lysates were generated in TRITON X-100 lysis buffer. Lysates were immunoprecipitated with anti-FLAG Sepharose and the resulting immunoprecipitated material was run on a polyacrylamide gel. The gel was electroblotted onto nitrocellulose membrane and the blot was developed with avidin-HRP and ECL reagent. The results are shown in FIG. 9. Lane 1 contains lysate derived from cells transfected with non-recombinant vector and lane 2 contains lysate from cells transfected with vector expressing LY1448-FLAG fusion protein. The data show that a protein precipitable with anti-FLAG sepharose of the expected molecular weight for a LY1448-FLAG fusion protein was biotinylated in a whole cell assay indicating that LY1448 is found on the cell surface.

### 5.7 EXAMPLE 7—IDENTIFICATION OF Two SPECIFIC GENES, LY1447 AND LY1481 ARE ASSOCIATED WITH B CELL LEUKEMIAS, LYMPHOMAS AND MULTIPLE MYELOMAS

[0509] This example illustrates the identification of two specific genes that are associated with B cell leukemias, lymphomas and multiple myelomas.

[0510] LY1447 and LY1481, portions of which were disclosed earlier in co-pending application U.S. Ser. No. 09/796,692, are cDNAs also associated with B cell leukemias, lymphomas and multiple myelomas. The nucleotide sequence of LY1447 is disclosed herein as SEQ ID NO:5. The nucleotide sequence of LY1481 is disclosed herein as SEQ ID NO:6. The amino acid sequence encoded by SEQ ID NO:6 is disclosed herein as SEQ ID NO:869.

[0511] SEQ ID NOs:5 and 6 were used in BLASTX searches of both GenBank and GenSeq databases. Homologous sequences were only found in the GenSeq database. This analysis showed that SEQ ID NO:5 was homologous to the 3′ untranslated region of the IRTA2c gene on chromosome 1. SEQ ID NO:6 was homologous to a portion of the coding region of IRTA3 also on chromosome 1.

[0512] The IRTA superfamily of genes comprises IRTA 1, 2a, 2b, 2c, 3, 4, and 5, whose nucleic acid sequences are disclosed herein as SEQ ID NOs:7-13 respectively and whose corresponding amino acid sequences are disclosed herein as SEQ ID NOs:862-868 respectively. These IRTA genes are located on chromosome 1 (q21) and are associated with chromosomal translocations. These translocations combine a portion of chromosome 1 with a portion of chromosome 14 (q32). This portion of chromosome 14 is the location of the genes encoding the immunoglobulin proteins. These chromosomal translocations are associated with various B cell leukemias, lymphomas and multiple myelomas.

### 5.8 EXAMPLE 8 GENERATION OF POLYCLONAL ANTISERA WHICH RECOGNIZES LY1448 RECOMBINANT PROTEIN AND Two PEPTIDES

[0513] This example illustrates the production of recombinant LY1448 protein in E. coli. This example further illustrates the production of anti-sera against that recombinant protein and two synthetic peptides which comprise portions of the LY1448 extracellular domain.

[0514] The nucleotide sequence encoding LY1448 (nucleotides 780-1573 of SEQ ID NO:3) were cloned into the E. coli expression vector pET 28 which had been modified to include nucleotides encoding an initiation methionine residue, a glutamine residue and a six amino acid histidine tag adjacent to transcription initiation sequences of the vector. PCR primers comprising nucleotide sequences 780-801 (sense) and 1559-1573 (antisense) of SEQ ID NO:3 were used to amplify a nucleotide sequence encoding amino acids 2-261 of SEQ ID NO:14 using standard techniques (Sambrook et al., supra and Ausubel et al., supra). The antisense primer also contained a XhoI restriction enzyme site to facilitate cloning. The resulting PCR product was digested with XhoI and ligated into the modified pET 28 which had been digested with Eco 721 and XhoI. The recombinant clone was used to transform BLR (DE3) pLys S and HMS 174 pLys S bacteria. LY1448 protein was purified from recombinant bacterial cultures. LY1448 protein was purified from cell lysates by Ni column chromatography (Qiagen), followed by anion exchange chromatography and anti-his affinity chromatography steps.

[0515] The resulting purified recombinant LY1448 protein and KLH (keyhole limpet hemocyanin) conjugated, 31-mer peptides corresponding to the LY1448 amino acids 1 to 31 (SEQ ID NO:16) (MGKKTQRSLSAELEIPAVKESDAGKYYCRAD-GCG-KLH) (peptide 1) and 63 to 93 (SEQ ID NO:18) (QAAVGDLLELHCEALRGSPPILYQFYHEDVT-GCG-KLH) (peptide 3) were injected into rabbits using the following scheme: day 0: 0.15 mg/rabbit, in CFA, (complete Freund's adjuvant) s.c., day 21:0.15 mg/rabbit, in IFA, (incomplete Freund's adjuvant) s.c., day 35:0.15 mg/rabbit, in IFA, s.c., day 42:production bleed (˜-20 mL). Rabbits 1448-1a and 1b received recombinant LY1448, rabbits 1448-2a and 2b received peptide 1, and rabbits 1448-3a and 3b received peptide 3.

[0516] For ELISA analysis of antigen specificity, rabbit sera were titered against antigen-coated (0.1 mg/well) 96-well microtiter plates. Samples were diluted initially at 1:100, and then serially diluted 3 fold and added to the plates in duplicate. Antigen specific binding of rabbit IgG to the plate was revealed by goat anti-rabbit IgG (H+L)-HRP conjugate, and the plates were developed with TMB substrate and read at OD450 nm on a microplate reader. For FACS analysis, HEK293 and Ly1448/HEK293 cells (supra) were collected and washed with ice cold staining buffer (PBS+1% BSA+Sodiun Azide). Next, the cells were resuspended in 50 ul staining buffer and incubated for 30 minutes on ice with 75 ul of rabbit anti-Ly1448P recombinant or peptide sera diluted 1:500. Pre-bleed sera was used at the same concentration as a negative control. The cells were washed 3 times with staining buffer and then incubated with a 1:100 dilution of a goat anti-rabbit Ig(H+L)-FITC reagent (Southern Biotechnology) for 30 minutes on ice. Following 3 washes, the cells were resuspended in staining buffer containing Propidium Iodide (PI), a vital stain that allows for identification of permeable cells, and analyzed by FACS.

[0517] The results of the FACS analysis show that the polyclonal antisera raised against the full length recombinant protein (anti-LY1448 antisera) and both synthetic peptides (anti-peptide anti-sera) were able to recognize and bind to full length, native LY1448 expressed in HEK293 transfectants. Pre-immunization (pre-bleed) antisera obtained from the each rabbit did not bind to the LY1448/HEK293 expressing cells. Similarly, anti-LY1448 and anti-peptide antisera did not bind to control HEK293 cells.

[0518] The results of the ELISA assys show that anti-LY1448 antisera raised were able to bind strongly to immobilized recombinant LY1448 and peptide 1 (SEQ ID NO: 16) and bind weakly to the peptide 3 (SEQ ID NO: 18). Polyclonal antisera (anti-peptide 1) raised against the synthetic peptide 1 (SEQ ID NO:16) bound strongly to peptide 1 (SEQ ID NO:16) and recombinant LY1448 protein, and did not bind at all to peptide 3 (SEQ ID NO:18). Polyclonal antisera (anti-peptide 3) raised against the synthetic peptide 3 (SEQ ID NO: 18) bound strongly to peptide 3 (SEQ ID NO:18) and the recombinant LY1448 protein. Anti-peptide 3 bound weakly to peptide 1. These results indicate that the anti-LY1448 antisera and the anti-peptide antisera recognize epitopes present on LY1448 and would be useful for both therapeutic and diagnostic purposes.

### 6. REFERENCES

[0519] The following references, to the extent that they provide exemplary procedural or other details supplementary to those set forth herein, are specifically incorporated herein by reference.

[0520] U.S. Pat. No. 3,817,827.

[0521] U.S. Pat. No. 3,850,752.

[0522] U.S. Pat. No. 3,901,654.

[0523] U.S. Pat. No. 3,935,074.

[0524] U.S. Pat. No. 3,984,533.

[0525] U.S. Pat. No. 3,996,345.

[0526] U.S. Pat. No. 4,034,074.

[0527] U.S. Pat. No. 4,098,876.

[0528] U.S. Pat. No. 4,235,877.

[0529] U.S. Pat. No. 4,376,110.

[0530] U.S. Pat. No. 4,429,008.

[0531] U.S. Pat. No. 4,436,727.

[0532] U.S. Pat. No. 4,452,901.

[0533] U.S. Pat. No. 4,489,710.

[0534] U.S. Pat. No. 4,507,234.

[0535] U.S. Pat. No. 4,554,101.

[0536] U.S. Pat. No. 4,569,789.

[0537] U.S. Pat. No. 4,603,112.

[0538] U.S. Pat. No. 4,625,014.

[0539] U.S. Pat. No. 4,638,045.

[0540] U.S. Pat. No. 4,671,958.

[0541] U.S. Pat. No. 4,673,562.

[0542] U.S. Pat. No. 4,683,195.

[0543] U.S. Pat. No. 4,699,784.

[0544] U.S. Pat. No. 4,735,792.

[0545] U.S. Pat. No. 4,751,180.

[0546] U.S. Pat. No. 4,769,330.

[0547] U.S. Pat. No. 4,777,127.

[0548] U.S. Pat. No. 4,866,034.

[0549] U.S. Pat. No. 4,873,088.

[0550] U.S. Pat. No. 4,877,611.

[0551] U.S. Pat. No. 4,897,268.

[0552] U.S. Pat. No. 4,912,094.

[0553] U.S. Pat. No. 4,935,233.

[0554] U.S. Pat. No. 5,017,487.

[0555] U.S. Pat. No. 5,075,109.

[0556] U.S. Pat. No. 5,145,684.

[0557] U.S. Pat. No. 5,151,254.

[0558] U.S. Pat. No. 5,215,926.

[0559] U.S. Pat. No. 5,240,856.

[0560] U.S. Pat. No. 5,350,840.

[0561] U.S. Pat. No. 5,359,681.

[0562] U.S. Pat. No. 5,399,346.

[0563] U.S. Pat. No. 5,399,363.

[0564] U.S. Pat. No. 5,466,468.

[0565] U.S. Pat. No. 5,472,869.

[0566] U.S. Pat. No. 5,543,158.

[0567] U.S. Pat. No. 5,552,157.

[0568] U.S. Pat. No. 5,565,213.

[0569] U.S. Pat. No. 5,567,434.

[0570] U.S. Pat. No. 5,633,234.

[0571] U.S. Pat. No. 5,641,515.

[0572] U.S. Pat. No. 5,738,868.

[0573] U.S. Pat. No. 5,741,516.

[0574] U.S. Pat. No. 5,795,587.

[0575] U.S. Pat. No. 5,811,128.

[0576] U.S. Pat. No. 5,814,344.

[0577] U.S. Pat. No. 5,820,883.

[0578] U.S. Pat. No. 5,853,763.

[0579] U.S. Pat. No. 5,874,265.

[0580] U.S. Pat. No. 5,928,647.

[0581] U.S. Pat. No. 5,942,252.

[0582] U.S. Pat. No. 6,110,702.

[0583] European Patent No. EP 0,345,242.

[0584] Great Britain Patent No. GB 2,200,651.

[0585] Intl. Pat. Appl. Publ. No. WO 89/01973.

[0586] Intl. Pat. Appl. Publ. No. WO 89/06280.

[0587] Intl. Pat. Appl. Publ. No. WO 91/02805.

[0588] Intl. Pat. Appl. Publ. No. WO 91/16116.

[0589] Intl. Pat. Appl. Publ. No. WO 92/07243.

[0590] Intl. Pat. Appl. Publ. No. WO 94/00153.

[0591] Intl. Pat. Appl. Publ. No. WO 94/20078.

[0592] Intl. Pat. Appl. Publ. No. WO/94/23701.

[0593] Intl. Pat. Appl. Publ. No. WO 95/17210.

[0594] Intl. Pat. Appl. Publ. No. WO 96/02555.

[0595] Intl. Pat. Appl. Publ. No. WO 96/06638.

[0596] Intl. Pat. Appl. Publ. No. WO 96/30516.

[0597] Intl. Pat. Appl. Publ. No. WO 96/33739.

[0598] Intl. Pat. Appl. Publ. No. WO 97/24447.

[0599] Intl. Pat. Appl. Publ. No. WO 99/33488.

[0600] Aaroston and Todaro, J. Cell. Physiol., 72:141-48, 1968.

[0601] Adelman et al., DNA, 2:183, 1983.

[0602] Amin et al., Am. J. Pathol., 146:344-56, 1995.

[0603] Akaza et al., “Expression of antitumor response. Role of attachment and viability of bacillus Calmette-Guerin to bladder cancer cells,” Cancer, 72:558-63, 1993.

[0604] American Type Culture Collection, Catalogue of Cell Lines and Hybridomas, 7th ed., 1992.

[0605] Avrameas, “Natural autoantibodies: Self-recognition and physiological autoimmunity,”In: Natural autoantibodies: Their Physiological Role and Regulatory Significance, Shoenfeld and Isenberg (eds.), CRC Press, Boca Raton, Fla., pp. 1-14, 1993.

[0606] Azuma et al., “Correlation Between Augmented Resistance to Influenza Virus Infection and Histological Changes in Lung of Mice Treated with Trehalose-6,6′-dimycolate,” Journal of Biological Response Modifiers, 7:473-82, 1988.

[0607] Bajorin et al., Proc. Annu. Meet. Am. Soc. Clin. Oncol., 7:A967, 1988.

[0608] Baker et al., “Ability of Monophosphoryl Lipid A To Augment the Antibody Response of Young Mice,” Infection and Immunity, 56:3064-66, 1988a.

[0609] Baker et al., “Enrichment of Suppressor T Cells by Means of Binding to Monophosphoryl Lipid A,”Infection and Immunity, 58:726-31, 1990.

[0610] Baker et al., “Inactivation of Suppressor T-Cell Activity by Nontoxic Monophosphoryl Lipid A,” Infection and Immunity, 56:1076-83, 1988b.

[0611] Baker et al., “Molecular structures that influence the immunomodulatory properties of the lipid A and inner core region oligosaccharides of bacterial lipopolysaccharides,” Infection Immunity, 62:2257-69, 1994.

[0612] Baker et al., “Structural Features That Influence the Ability of Lipid A and Its Analogs To Abolish Expression of Suppressor T Cell Activity,” Infection and Immunity, 60:2694-701, 1992.

[0613] Bakker et al., “Melanocyte lineage-specific antigen gp100 is recognized by melanoma-derived tumor-infiltrating lymphocytes,” J. Exp. Med., 179:1005, 1994.

[0614] Banchereau and Steinman, Nature, 392:245-51, 1998.

[0615] Banerji et al., “Membrane lipid composition modulates the binding specificity of a monoclonal antibody against liposomes,” Biochim. Biophys. Acta., 689:319-26, 1982.

[0616] Barnd et al., “Specific tumor histocompatibility complex-unrestricted recognition of tumor-associated mucins by human cytotoxic T cells,” Proc. Natl. Acad. Sci. USA, 86:7159, 1989.

[0617] Barnoud et al., Am. J. Surg. Pathol., 24:830-36, 2000).

[0618] Bartlett and Zbar, J. Natl. Cancer Inst., 48:1709, 1972.

[0619] Bast et al., “BCG and Cancer,” N. Engl. J. Med., 290:1413-20, 1974.

[0620] Bennett et al., “Endogenous Production of Cytotoxic Factors in Serum of BCG-Primed Mice by Monophosphoryl Lipid A, a Detoxified Form of Endotoxin,” Journal of Biological Response Modifiers, 7:65-76, 1988

[0621] Berkner, Biotechniques, 6:616-27, 1988.

[0622] Berra et al., Int. J. Cancer, 36:363-66, 1985.

[0623] Berra et al., J. Neurochem., 40:777-82, 1983.

[0624] Bogoch, “Demonstration of serum precipitin to brain gangliosides,” Nature, 183:392-93, 1960.

[0625] Bouchon et al., Biochem. Internatl., 10:531-38, 1985.

[0626] Bowen-Pope et al., Proc. Natl'. Acad. Sci. USA, 81:2396-400, 1984.

[0627] Bowness et al., “Clostridium perfringens enterotoxin is a superantigen reactive with human T cell receptors V beta 6.9 and V beta 22,” J. Exp. Med., 176:893-96, 1992.

[0628] Brade et al., “An Artificial Glycoconjugate Containing the Bisphosphorylated Glucosamine Disaccharide Backbone of Lipid A Binds Lipid A Monoclonal Antibodies,” Infection and Immunity, 61:4514-17, 1993.

[0629] Brichard et al., “The tyrosinase gene codes for an antigen recognized by autologous cytolytic T lymphocytes on HLA-A2 melanomas,” J. Exp. Med., 178:489, 1993.

[0630] Brodin et al., “Mouse monoclonal antibodies with specificity for the melanoma-associated ganglioside disialyllactosyl ceramide (GD3) also react with the structural analogue disialylparagloboside,” Biochim. Biophys. Acta., 837:349-53, 1985.

[0631] Brooks et al., Clin. Exp. Immunol., 39: 477, 1980.

[0632] Brown et al., J. Biol. Chem., 255:4980-83, 1980.

[0633] Burchell et al., J. Immunol., 131:508-13, 1983.

[0634] Bystryn et al., Cancer, 61:1065, 1988.

[0635] Cahan et al., “Identification of a human neuroectodermal tumor antigen (OFA-I-2) as ganglioside GD2,” Proc. Natl. Acad. Sci. USA, 79:7629-33, 1982.

[0636] Campbell et al., “Intercellular adhesion molecule-1 expression by bladder cancer cells: functional effects,” J. Urol., 151:1385-90, 1994.

[0637] Campbell, in Monoclonal Antibody Technology, Laboratory Techniques in Biochemistry and Molecular Biology, Vol. 13, Burden and Von Knippenberg (eds.), Amsterdam, Elseview, pp. 75-83, 1984.

[0638] Campbell et al., Int. J. Cancer, 78:182-88, 1998.

[0639] Carr and Morrison, “A two-step mechanism for the interaction of Re lipopolysaccharide with erythrocyte membranes,” Rev. Infect. Dis. 6:497-508, 1984.

[0640] Carubia et al., Biochem. Biophys. Res. Commun., 120:500-04, 1984.

[0641] Chang et al., Crit. Rev. Oncol. Hematol., 22:213, 1996.

[0642] Chase et al., “Effect of Monophosphoryl Lipid A on Host Resistance to Bacterial Infection,” Infection and Immunity, 53(3):711-12, 1986.

[0643] Chen et al., “Activation of Macrophages From Aging Mice by Detoxified Lipid A,” Journal of Leukocyte Biology, 49:416-22, 1991.

[0644] Chen et al., Cancer Res., 54:1065-70, 1994.

[0645] Cheng et al., “Bacillus Calmette-Gerin interacts with the carboxyl-terminal heparin bindings domain of fibronectin: implications for BCG-mediated antitumor activity,” J. Urol., 152:1275-80, 1994.

[0646] Cheresh and Klier, “Disialoganglioside GD3 distributes preferentially into substrate associated microprocesses on human melanoma cells during their attachment to fibronectin,” J. Cell. Biol., 102:1887-97, 1986.

[0647] Cheresh et al., “A monoclonal antibody recognizes an O-acetyl sialic acid in a human melanoma-associated ganglioside,” J. Biol. Chem., 259:7453-59, 1984.

[0648] Cheresh et al., “Disialoganglioside GD3 on human melanoma serves as a relevant target antigen for monoclonal antibody-mediated tumor cytolysis,” Proc. Natl. Acad. Sci. USA, 82:5155-59, 1985.

[0649] Cheresh et al., “Disialogangliosides GD2 and GD3 are involved in the attachment of human melanoma and neuroblastoma cells to extracellular matrix proteins,” J. Cell. Biol., 102:688-96,1986.

[0650] Cheresh et al., “Localization of gangliosides GD2 and GD3 in adhesion plaques and on the surface of human melanoma cells,” Proc. Natl. Acad. Sci. USA, 81:5767-71, 1984.

[0651] Cheung et al., “Detection of neuroblastoma cells in bone marrow using GD2 specific monoclonal antibodies,” J. Clin. Oncol., 4:363-69, 1986.

[0652] Chu and Sharom, “Gangliosides inhibit T-lymphocyte proliferation by preventing the interaction of interleukin-2 with its cell surface receptors,” Immunology, 79:10-16, 1993.

[0653] Cohen, Science, 259:1691-92, 1993.

[0654] Colcher et al., Proc. Natl. Acad. Sci. USA, 78:3199, 1987.

[0655] Coligan et al., in Current Protocols in Immunology, Vol. 1, Wiley Interscience. Greene (ed.), 1998.

[0656] Coombes et al., Vaccine, 14:1429-38, 1996.

[0657] Coulie et al., “A new gene coding for a differentiation antigen recognized by autologous cytologic T lymphocytes on HLA-A2 melanomas,” J. Exp. Med., 180:35, 1994.

[0658] Deavin et al., Mol. Immunol., 33:145-55, 1996.

[0659] DeBruijn et al., Eur. J. Immunol., 21:2963-70, 1991.

[0660] Dippold et al., “Immunohistochemical localization of ganglioside GD3 in human malignant melanoma, epithelial tumors and normal tissues,” Cancer Res., 45:3699-705, 1985.

[0661] Dippold et al., “Inflammatory response at the tumor site after systemic application of monoclonal anti-GD3-ganglioside antibody to patients with malignant melanoma,” Am. Assoc. Cancer Res., 978:247, 1984.

[0662] Dippold et al., Proc. Natl. Acad. Sci. USA, 77:6115, 1980.

[0663] Dresser and Phillips, in Immunopotentiation, CIBA Foundation Symposium 18, Elsevier, Amsterdam, p.3, 1973.

[0664] Dwivedi et al., “Plasma lipid-bound sialic acid alterations in neoplastic diseases,” Experientia, 46:91-94, 1990.

[0665] Elder, “Skin Cancer,” Cancer, 75:245-56, 1995.

[0666] Elliott et al., “The D-Galactosamine Loaded Mouse and Its Enhanced Sensitivity to Lipopolysaccharide and Monophosphoryl Lipid A: A Role for Superoxide,” J. Immunol., 10:69-74,1991.

[0667] Euhus et al., Cancer Immunol Immunother., 29:247-54, 1989.

[0668] Fawwaz et al., Statutory Invention Registration Patent No. H819, application no. 6-6-5,439 1990.

[0669] Fischer, Handb. Lipid Res., 6:123-234, 1990.

[0670] Fisher-Hoch et al., Proc. Nat'l Acad. Sci. USA, 86:317-21, 1989.

[0671] Fitzgerald, “Syphilis vaccine: up-regulation of immunogenicity by cyclophosphamide, Ribi adjuvant, and indomethacin confers significant protection against challenge infection in rabbits,” Vaccine, 9:265-72, 1991.

[0672] Fleischmann, Park and Hassan, “Fibronectin expression on surgical specimens correlated with the response to intravesical bacillus Calmette-Guerin therapy,” J. Urol., 149:268-71, 1993.

[0673] Flexner et al., Ann. N.Y. Acad. Sci., 569:86-103, 1989.

[0674] Flexner et al., Vaccine, 8:17-21, 1990.

[0675] Foster et al., Cancer Res., 57:3325-30, 1997.

[0676] Fraizer et al., Blood, 86:4704-06, 1995.

[0677] Fredman et al., Neurol. Res., 8:123-26, 1986.

[0678] Freimer et al., “Gangliosides elicit a T-cell independent antibody response,” J. Autoimmun., 6:281-89, 1993.

[0679] Freudenberg et al., “ELISA for antibodies to Lipid A, Lipopolyasscharides and other hydrophobic antigens,” Infection, 17:322-24, 1989.

[0680] Gaiger et al., Blood, 96:1334, 2000

[0681] Garg and Subbarao, “Immune Responses of Systemic and Mucosal Lymphoid Organs to Pnu-Immune Vaccine as a Function of Age and the Efficacy of Monophosphoryl Lipid A as an Adjuvant,” Infection and Immunity, 60:2329-36, 1992.

[0682] Gaugler et al., “Human gene MAGE-3 codes for an antigen recognized on a human melanoma by autologous cytolytic T lymphocytes,” J. Exp. Med., 179:921, 1994.

[0683] Gefter et al., Somatic Cell Genet., 3:231-36, 1977.

[0684] Gennaro et al., Am. J. Ind. Med., 37:275-82, 2000.

[0685] Gillard et al., “Antibodies against ganglioside GT₃ in the sera of patients with type I Diabetes mellitus,” J. Immunol., 142:3826-32, 1989.

[0686] Gillis, Nature, 268:154-56, 1977.

[0687] Glynn, McCoy and Fefer, Cancer Res., 28:434-39, 1968.

[0688] Goding, in Monoclonal Antibodies: Principles and Practice, 2d ed., Orlando, Fla., Academic Press, pp. 60-61, 65-66, 71-74, 1986.

[0689] Goff et al., Eur. J. Biochem., 130:553-57, 1983.

[0690] Grabarek et al., “Endotoxic Lipid A Interaction with Human Platelets,” The Journal of Biological Chemistry, 265:8117-21, 1990.

[0691] Graus et al., “Distribution of the ganglioside GD3 in the human nervous system detected by R24 mouse monoclonal antibody,” Brain Res., 324:190-94, 1984.

[0692] Guzman et al, Circulation, 88:2838-48, 1993a.

[0693] Guzman et al., Cir. Res., 73:1202-07, 1993b.

[0694] Hachida et al., Transplant Proc., 22:1663-70, 1990.

[0695] Hachida et al., Transplantation, 56:479-82, 1993.

[0696] Harada et al., Mol. Urol., 3:357-364, 1999.

[0697] Hardings et al., “Effects of pH and polysaccharides on peptide binding to class II major histocompatibility complex molecules,” Proc. Natl. Acad. Sci. USA, 88:2740-44, 1991.

[0698] Harel et al., Cancer Res., 50:6311, 1990.

[0699] Harlow and Lane, Antibodies: A Laboratory Manual, Cold Spring Harbor Laboratory, 1988.

[0700] Helling et al., “Construction of Immunogenic GD₃-conjugate vaccines,” Ann. N.Y. Acad. Sci., 690:396-97, 1993.

[0701] Hellstrom et al, “Strong anti-tumor activities of IgG 3 antibodies to a human melanoma-associated ganglioside,” Proc. Natl. Acad. Sci. USA, 82:1499-1502, 1985.

[0702] Hirabayashi et al., “Syngeneic monoclonal antibody against melanoma antigen with interspecies cross-reactivity recognize GM₃, a prominent ganglioside of B16 melanoma,” Biol. Chem., 260:13328-33, 1985.

[0703] Hirabayashi et al., “Reactivity of mouse monoclonal antibody M2590 against B 16 melanoma cells with chemically synthesized GM3 ganglioside,” Biochim. Biophys. Acta, 875:126-28, 1986.

[0704] Hirabayashi et al., Jpn. J. Cancer Res., 78:614-20, 1987.

[0705] Hoon et al., “Gangliosides from melanoma immunomodulate response of T-cells to interleukin-2,” Cell Immunol., 4:1111-19, 1988.

[0706] Horibata and Harris, Exp. Cell. Res., 60:61, 1970.

[0707] Horgan, “Total and lipid-bound sialic acid levels in sera from patients with Cancer,” Clin. Chim. Acta., 118:327-31, 1982.

[0708] Houghten et al., “Mouse monoclonal IgG3 antibody detecting GD3 ganglioside: A phase I trial in patients with malignant melanoma,” Proc. Natl. Acad. Sci. USA, 82:1242-46, 1985.

[0709] Houghton, “Cancer Antigens: Immune Recognition of Self and Altered Self,” J. Exp. Med., 180:1-4, 1994.

[0710] Hraba et al., “The Influence of Monophosphoryl Lipid A (MPL™) on Erythrocyte Autoantibody Formation,” Immunobiol., 189:448-56, 1993.

[0711] Hunter et al., Vaccine, 9:250: 1991.

[0712] Inoue et al., Blood, 88:2267-78, 1996.

[0713] Irie and Morton, “Regression of cutaneous metastatic melanoma by intralesional injection with human monoclonal antibody to ganglioside GD2,” Proc. Natl. Acad. Sci. USA, 83:8694-98, 1986.

[0714] Irie and Ravindranath, “Gangliosides as targets for monoclonal antibody therapy of cancer,” in Therapeutic monoclonal antibodies, Borrebaeck and Larrick (eds.), Stockton Press, New York, p. 75-94, 1990.

[0715] Irie et al., “Human antibody to OFA-I, a tumor antigen, produced in vitro by Epstein-Barr virus transformed human B-lymphoid cell lines,” Proc. Natl. Acad. Sci. USA, 79:5666-70, 1982.

[0716] Irie et al., “Melanoma gangliosides and human monoclonal antibody,” in Human Tumor Antigens and Specific Tumor Therapy, Metzgar and Mitchell (eds.), Alan R. Liss, Inc., New York, pp. 115-126, 1989.

[0717] Ishioka et al., “MHC interaction and T cell recognition of carbohydrates and glycopeptides,” J. Immunol., 148:2446-51, 1992.

[0718] Jackson et al., “Induction of ICAM 1 expression on bladder tumours by BCG immunotherapy,” J. Clin. Pathol., 47:309-12, 1994.

[0719] Johnson and Tomai, “A Study of the Cellular and Molecular Mediators of the Adjuvant Action of a Nontoxic Monophosphoryl Lipid A,” Adv. Exp. Med. Biol., 133:567-79, 1988.

[0720] Johnson et al., “Characterization of a nontoxic monophosphoryl lipid A,” Rev. Infect. Dis., 9:512-16, 1987.

[0721] Johnson et al., “Structural Characterization of Monophosphoryl Lipid A Homologs Obtained from Salmonella minnesota Re595 Lipopolysaccharide,” J. Biol. Chem., 265:8108-16, 1990.

[0722] Johnston and Bystryn, “Effect of Cell Wall Skeleton and Monophosphoryl Lipid A Adjuvant on the Immunogenicity of a Murine B16 Melanoma Vaccine,” Journal of the National Cancer Institute, 83:1240-45, 1991.

[0723] Jones et al., J. Natl Cancer Inst, 66:249-54, 1981.

[0724] Kabat et al., “Sequences of Proteins of Immunological Interest,” 5th ed., Public Health Service, National Institutes of Health, Bethesda, Md., pp 647-669, 1991.

[0725] Kass-Eisler et al., Proc. Nat'Acad. Sci. USA, 90:11498-502, 1993.

[0726] Katopodis et al., “Lipid-associated sialic acid test for the detection of human cancer,” Cancer Res., 42:5270-75, 1982.

[0727] Kawaguchi et al., “Characteristic mode of action of gangliosides in selective modulation of CD4 on human T lymphocytes,” Biochem. Biophys. Res. Commun., 158:1050-55, 1989.

[0728] Kawakami et al., “Cloning of the gene coding for a shared human melanoma antigen recognized by autologous T cells infiltrating into tumor,” Proc. Natl. Acad. Sci. USA, 91:3515, 1994.

[0729] Kawakami, Eliyahu, Sakaguchi, Robbins, Rivoltini, Yannelli, Appella and Rosenberg, “Identification of the immunodominant peptides of the Mart-i human melanoma antigen recognized by the majority of HLA-A2 restricted tumor infiltrating lymphocytes,” J. Exp. Med., 180:347-52, 1994.

[0730] Kensil et al., J. Am. Vet. Med. Assoc., 199:1423, 1991.

[0731] Kloppel et al., “Glycolipid-bound sialic acid in serum: Increased levels in mice and humans bearing mammary carcinomas,” Proc. Natl. Acad. Sci. USA, 74:3011-13, 1977.

[0732] Kohler and Milstein, Nature, 256:495-97, 1975.

[0733] Kohler and Milstein, Eur. J. Immunol., 6:511-19, 1976.

[0734] Kolls et al., Proc. Nat'l Acad. Sci. USA, 91:215-19, 1994.

[0735] Koscielak et al., “Glycolipid antigen and its antibody,” Immunochemistry, 5:441-55, 1968.

[0736] Kovach et al., “Lipid IV_{A} Inhibits Synthesis and Release of Tumor Necrosis Factor Induced by Lipopolysaccharide in Human Whole Blood Ex Vivo,” J. Exp. Med., 172:77-84, 1990.

[0737] Kwok and Higuchi, Nature, 339:237-38, 1989.

[0738] Kyogashima et al., Jpn. J. Cancer Res., 78:1229-32, 1987.

[0739] Ladisch et al., “Shedding of GD2 ganglioside by human neuroblastoma,” Int. J. Cancer, 39:73-76, 1987.

[0740] Lamm et al., “A randomized trial of intravesical doxorubicin and immunotherapy with bacille Calmette-Guérin for transitional-cell carcinoma of the bladder,” N. Engl. J. Med., 325:1205, 1991.

[0741] Lengle et al., “Inhibition of the lectin-induced mitogenic response of thymocytes by glycolipids,” Cancer Res., 39:817-922, 1979.

[0742] Liepkalns et al., J. Neurochem., 36:1959-65, 1981.

[0743] Livingston et al., “The Serologic Response to Meth A Sarcoma Vaccines After Cyclophosphamide Treatment is Additionally Increased by Various Adjuvants,” The Journal of Immunology, 135(2):1505-09, 1985.

[0744] Livingston et al., “Approaches to augmenting immunogenicity of the ganglioside GM₂ in mice: purified GM₂ is superior to whole cells,” J. Immunol., 138:1524-29, 1987a.

[0745] Livingston et al., “Vaccines containing purified GM₂ gangliosides elicit GM₂ antibodies in melanoma patients,” Proc. Natl. Acad. Sci. USA, 84:2911-15, 1987b.

[0746] Ljunggren et al., Nature, 346:476-80, 1990.

[0747] Lozzio and Lozzio, Blood, 45:321-34, 1975.

[0748] Madonna and Vogel, “Induction of Early-Phase Endotoxin Tolerance in Athymic (Nude) Mice, B-Cell-Deficient (xid) Mice, and Splenectomized Mice,” Infection and Immunity, 53:707-10, 1986.

[0749] Mahvi et al., Immunology and cell Biology, 75:456-60, 1997.

[0750] Maratea et al., Gene, 40:39-46, 1985.

[0751] Masihi et al., “Effects of Nontoxic Lipid A and Endotoxin on Resistance of Mice to Toxoplasma gondii,” Journal of Biological Response Modifiers, 7:535-39, 1988

[0752] Melling et al., J. Immunol., 117:1267-74, 1976.

[0753] Menssen et al., J. Cancer Res. Clin. Oncol., 126:226-32, 2000.

[0754] Merrifield, J. Am. Chem. Soc., 85:2149-46, 1963.

[0755] Miller and Esselman, “Modulation of immune response by antigen reactive lymphocytes after cultivation with gangliosides,” J. Immunol., 115:839-43, 1975.

[0756] Minden, “Shared Antigens Between Animal and Human Tumors and Microorganisms,” in BCG in Cancer Immunotherapy, Lamoureux, Turcotte and Portelance (eds.); pp. 73-81, 1976.

[0757] Miotti et al., Cancer Res., 65:826, 1985.

[0758] Mitchell et al., “Active specific Immunotherapy of melanoma with allogeneic cell lysates:

[0759] Rationale, results and possible mechanisms of action,” Ann. N. Y. Acad. Sci., 690:153-66, 1993.

[0760] Mitchell et al., “Active specific immunotherapy of melanoma: Phase I trial of allogeneic lysates and a novel adjuvant,” Cancer Res., 48:5883-93, 1988.

[0761] Mitchell et al., “Active-Specific Immunotherapy for Melanoma,” Journal of Clinical Oncology, 8:856-59, 1990.

[0762] Miyake et al., Cancer Res., 48:6154-60, 1988.

[0763] Mooney et al., “Bacterial superantigen signaling via HLA class II on human B lymphocytes,” Mol. Immunol., 31:675-81, 1994.

[0764] Morrison et al., “Specific ganglioside binding to receptor sites on T lymphocytes that couple to ganglioside-induced decrease of CD4 expression,” Life Sci., 45:1219-24, 1989.

[0765] Morton and Ravindranath, in Cancer Medicine, 3rd ed., Holland et al. (eds.), Lea and Febiger, Philadelphia, p.967, 1993.

[0766] Morton et al., “Polyvalent Melanoma Vaccine Improves Survival of Patients with Metastatic Melanoma,” John Wayne Cancer Institute at Saint John's Hospital and Health Center, Santa Monica, Calif., reprinted from Specific Immunotherapy of Cancer with Vaccines, Volume 690 of the Annals of the New York Academy of Sciences, 1993.

[0767] Morton et al., Ann. Surg, 216:463, 1992.

[0768] Morton et al., in Biological Function of Gangliosides, Progress in Brain Research, Vol. 101, pp 251-275, 1994.

[0769] Mosmann and Coffman, Ann. Rev. Immunol., 7:145-73, 1989.

[0770] Munjal et al., “Combined measurement and significance of lipid-bound sialic acid and carcinoembryonic antigen in detection of human cancer,” Diagn. Immunol., 2:36-43, 1984.

[0771] Murphy et al., Proc. Natl. Acad. Sci. USA, 83:8258-62, 1986.

[0772] Myers et al., “Monophosphoryl Lipid A Behaves as a T-Cell-Independent Type 1 Carrier for Hapten-Specific Antibody Responses in Mice,” Infection and Immunity, 63:168-74, 1995.

[0773] Naiki et al., “Properties of antisera to ganglioside GM₁ and Asialo GM₁”, J. Immunol., 113:84-93, 1974.

[0774] Nair et al., Nature Biotechnol., 16:364-69, 1998.

[0775] Natoli et al., “A murine monoclonal antibody detecting the ganglioside GM2:

[0776] Characterization of cell surface reactivity,” Cancer Res., 46:4116-20, 1986.

[0777] Nonomura et al., Hinyokika Kiyo, 45:593-97, 1999.

[0778] Nudelman et al., “Characterization of a human melanoma-associated ganglioside antigen defined by a monoclonal antibody 4.2,” J. Biol. Chem., 257:12752-56, 1982.

[0779] Odean et al., “Involvement of Gamma Interferon in Antibody Enhancement by Adjuvants,” Infection and Immunity, 58:427-32, 1990.

[0780] Oji et al., Jpn. J. Cancer Res., 90:194-204, 1999.

[0781] Old et al., Ann. N.Y. Acad. Sci., 101:80-106, 1962.

[0782] Pan et al, Leukemia, 14:1634, 2000.

[0783] Parker et al., J. Immunol., 152:163, 1994.

[0784] Pascal et al., “Immunochemical studies on normal and Tay-Sachs' brain gangliosides,” Proc. Soc. Exp. Biol. Med., 121:739-43, 1966.

[0785] Patek, Collins and Cohn, “Transformed cell lines susceptible or resistant to in vivo surveillance against tumorigenesis,” Nature, 276:510-11, 1978.

[0786] Patmasiriwat et al., Leukemia, 13:891-900, 1999.

[0787] Paul, Fundamental Immunology, 3rd ed., Raven Press, pp. 243-47, 1993.

[0788] Portoukalian et al., “Humoral immune response in disease-free advanced melanoma patients after vaccination with melanoma-associated gangliosides,” Int. J. Cancer, 49:893-99, 1991.

[0789] Portoukalian, “Alteration of gangliosides in plasma and red cells of human bearing melanoma tumors,” Biochem. Biophys. Res. Commun., 85:916-20, 1978.

[0790] Portoukalian, “Immunoregulatory activity of gangliosides shed by melanoma tumors,” in Gangliosides and Cancer, Oettgen (ed.), New York, VCH Publishers, pp. 207-16, 1989.

[0791] Powell and Newman (eds.), “Vaccine Design (the subunit and adjuvant approach),” Plenum Press, NY, 1995.

[0792] Prokazova et al., “Sialylated lactosylceramides. Possible inducers of non-specific immunosuppression and atherosclerotic lesions,” Eur. J. Biochem., 171:1-10, 1988.

[0793] Pukel et al., “GD3, a prominent ganglioside of human melanoma: Detection and characterization of mouse monoclonal antibody,” J. Exp. Med., 155:1133-47, 1982.

[0794] Qureshi et al., “Purification and structural determination of nontoxic lipid A obtained from the Lipopolysaccharide of Salmonella typhimurium,” J. Biol. Chem., 257:11808-15, 1985.

[0795] Rabinovich et al., “Vaccine Technologies: View to the Future,” Science, 265:1401-02, 1994.

[0796] Raines and Ross, J. Biol. Chem., 257:5154-60, 1982.

[0797] Rapport and Graf, “Immunochemical Reactions of Lipids,” Prog. Allergy, 13:273-331, 1969.

[0798] Ravindranath and Irie, in Malignant Melanoma: Biology, Diagnosis, and Therapy, Nathanson (ed.), Kluwer Acad., Boston, p. 17, 1988.

[0799] Ravindranath and Morton, “Role of gangliosides in active immunotherapy with melanoma vaccine,” Int. Rev. Immunol., 7:303, 1991.

[0800] Ravindranath et al., “Human melanoma antigen O-acetylated Ganglioside GD₃ is recognized by Cancer antennarius lectin,” J. Biol. Chem., 263:2079-86, 1988.

[0801] Ravindranath et al., “An epitope common to gangliosides O-acetyl GD3 and GD3 recognized by antibodies in melanoma patients after active specific immunotherapy,” Cancer Res., 49:3891-97, 1989.

[0802] Ravindranath et al., “Ganglioside GM₃:GD₃ Ratio as an Index for the Management of Melanoma,” Cancer, 67:3029-35, 1991.

[0803] Ravindranath et al., “Efficacy of tumor cell vaccine after incorporating monophosphoryl lipid A (MPL) in tumor cell membranes containing tumor-associated ganglioside,” Experientia, 50:648-653, 1994a.

[0804] Ravindranath et al., “Attachment of Monophosphoryl Lipid A (MPL) to Cells and Liposomes Augments Antibody Response to membrane-bound Gangliosides,” Journal of Autoimmunity, 7:803-16, 1994b.

[0805] Ravindranath et al., “Factors affecting the fine specificity and sensitivity of serum antiganglioside antibodies in ELISA,” J. Immunol. Methods, 169:257-72, 1994c.

[0806] Real et al., “Class I (unique) tumor antigens of human melanoma. Identification of a 90,000 dalton cell surface glycoprotein by autologous antibody,” J. Exp. Med., 160:1219, 1984.

[0807] Reeves et al., Cancer Res., 56:5672-77, 1996.

[0808] Reisfeld et al., Melanoma Antigens and Antibodies, p. 317, 1982.

[0809] Ribi, “Beneficial modification of the endotoxin molecule,” J. Biol. Resp. Mod., 3:1-9, 1984.

[0810] Ribi et al., “Lipid A and immunotherapy,” Rev. Infect. Dis., 6:567-72, 1984.

[0811] Ribi et al., “Modulation of humoral and cell mediated immune responses by a structurally established nontoxic lipid A,” in Immunobiology and Immunopharmacology of Bacterial Endotoxins, Szentivanji and Friedman (eds.), Plenum Press, New York, pp. 407-420, 1986.

[0812] Rickman et al., Lancet 337:998, 1991.

[0813] Rolland, Crit. Rev. Therap. Drug Carrier Systems, 15:143-98, 1998.

[0814] Rosenberg et al., Ann. Surg., 210:474, 1989.

[0815] Rosenberg et al., N. Engl. J. Med., 319:1676, 1988.

[0816] Rosenfeld et al., Science, 252:431-34, 1991.

[0817] Rothbard and Taylor, EMBO J, 7:93-100, 1988.

[0818] Rott et al., “Protection from experimental allergic encephalomyelitis by application of a bacterial superantigen,” Int. Immunol., 4:347-53, 1992.

[0819] Sato et al., “Cytoplasmic membrane-associated protein (CAP) isolated from Streptococcus pyrogenes: as a new bacterial superantigen,” Microbiol. Immunol., 38:139-47, 1994.

[0820] Sato et al., Science, 273:352, 1996.

[0821] Satoh et al., Pathol. Int., 50:458-71, 2000.

[0822] Schuster et al., “Production of antibodies against phosphocholine, phosphatidylcholine, sphingomyelin, and lipid A by injection of liposomes containing lipid A,” J. Immunol., 122:900-05, 1979.

[0823] Schwab et al., “Superantigen can reactivate bacterial cell wall-induced arthritis,” J. Immunol., 150:4151-59, 1993.

[0824] Shafer and Spitznagel, “Sensitivity of Salmonella typhimurium to polymorphonuclear granulocyte extracts: Role of lipid A,” Rev. Infect. Dis., 6:577-81, 1984.

[0825] Shepard et al., J. Clin. Immunol., 11:117-27, 1991.

[0826] Sherwin et al., “The production of antisera to gangliosides from human nervous tissue,” Canad. J. Biochem., 42:1640-48, 1964.

[0827] Shimizu et al., Int. J. Gynecol. Pathol., 19:158-63, 2000.

[0828] Shy et al., “Antibodies to GM₁ and GD_{1b} in patients with motor neuron disease with plasma cell dyscrasia,” Ann. Neurol., 25:511-18, 1989.

[0829] Siddiqui et al., Cancer Res., 44:5262-65, 1984.

[0830] Sidell et al., Cancer Immunol Immunother, 7:151-55, 1979.

[0831] Sigma Cell Culture, Volume 9, Number 2, 1993.

[0832] Skeiky et al., Infection and Immun., 67:3998-4007, 1999.

[0833] Slavin and Strober, Nature, 272:624-26, 1977.

[0834] Spinsanti et al., Leuk. Lymphoma, 38:611-19, 2000.

[0835] Stiess and Krüger, “Mammalian Cell Culture Media—Overview and Applications,” The Source (Sigma Cell Culture Technical and Product News), 9:1-8, 1993.

[0836] Stoute et al. New Engl. J. Med., 336:86-91, 1997.

[0837] Svennerholm et al., “Tumor gangliosides as targets for active specific immunotherapy of melanoma in man,” in Biological Function of Gangliosides, Progress in Brain Research, Vol. 101, 1994.

[0838] Tai et al., “Ganglioside GM2 as a human tumor antigen (OFA-I-1),” Proc. Natl. Acad. Sci., 80:5392-96, 1983.

[0839] Takada et al., “Molecular and Structural Requirements of a Lipoteichoic Acid from Enterococcus hirae ATCC 9790 for Cytokine-Inducing, Antitumor, and Antigenic Activities,” Infection and Immunity, 63:57-65, 1995.

[0840] Takahashi et al., J. Immunol., 140:3244, 1988.

[0841] Tamaki et al., Leukemia, 13:393-99, 1999.

[0842] Tamauchi et al., Immunology, 50:605, 1983.

[0843] Tanamoto, “Dissociation of Endotoxic Activities in a Chemically Synthesized Lipid A Precursor after Acetylation,” Infection and Immunity, 63:690-92, 1995.

[0844] Tanamoto, “Free Hydroxyl Groups Are Not Required for Endotoxic Activity of Lipid A,” Infection and Immunity, 62:1705-09, 1994a.

[0845] Tanamoto, FEBS Lett., 351:325-29, 1994b.

[0846] Tautu et al., “Improved procedure for determination of serum lipid-associated sialic acid:

[0847] Application for early diagnosis of colorectal cancer,” J. Natl. Cancer Inst., 80:1333-37, 1988.

[0848] Thor et al., Cancer Res., 46:3118, 1986.

[0849] Thurin et al., “Proton NMR and fast-atom bombardment mass spectrometry analysis of the melanoma-associated ganglioside 9-O-acetyl GD3,” J. Biol. Chem., 260:14556-563, 1985.

[0850] Timmerman and Levy, Ann. Rev. Med., 50:507-29, 1999.

[0851] Tomai and Johnson, “T Cell and Interferon-γ Involvement in the Adjuvant Action of a Detoxified Endotoxin,” Journal of Biological Response Modifiers, 8:625-43, 1989.

[0852] Tomai et al., “The Adjuvant Properties of a Nontoxic Monophosphoryl Lipid A in Hyporesponsive and Aging Mice,” Journal of Biological Response Modifiers, 6:99-107, 1987.

[0853] Tsuchida et al., J. Dermatol., 11:129-38, 1984.

[0854] Tsuchida et al., “Gangliosides of Human Melanoma: Altered Expression in Vivo and in Vitro,” Cancer Research, 47:1278-81, 1987.

[0855] Tsuchida et al., “Gangliosides as tumor markers of human melanoma: bio-chemical and immunologic assays,” in New Horizons of Tumor Immunotherapy, Torisu and Yoshida (eds.), pp. 315-325, 1989.

[0856] Tuting et al., J. Immunol., 160:1139-47, 1998.

[0857] Ulmer et al., Science, 259:1745-49, 1993.

[0858] Vadhan-Raj et al., J. Clin. Oncol., 6:1636, 1988.

[0859] van der Bruggen et al., “A gene encoding an antigen recognized by cytolytic T lymphocytes on a human melanoma,” Science, 264:716, 1991.

[0860] Verma et al., “Adjuvant Effects of Liposomes Containing Lipid A: Enhancement of Liposomal Antigen Presentation and Recruitment of Macrophages,” Infection and Immunity, 60:2438-44, 1992.

[0861] Vijayasaradhi et al., “The melanoma antigen gp75 is the human homologue of the mouse b (brown) locus gene product,” J. Exp. Med., 171:1375, 1990.

[0862] Von Bultzingslowen, Pneumologie, 53:266-75, 1999.

[0863] Vosika et al., Cancer Immunol. Immunother., 18:107, 1984.

[0864] Watson, Ralph, Sarkar and Cohn, “Leukemia viruses associated with mouse myeloma cells,” Proc. Natl. Acad. Sci. USA, 66:344, 1970.

[0865] Westrick et al., Biochim. Biophys. Acta, 750:141-48, 1983a

[0866] Westrick et al., Cancer Res., 43:5890-94, 1983b

[0867] Whisler and Yates, “Regulation of lymphocyte responses by human gangliosides. I.

[0868] Characteristics of inhibitory effects and the induction of impaired activation,” J. Immuunol., 125:2106-12, 1980.

[0869] Wide et al., in Radioimmunoassay Methods, Kirkham and Hunter (eds.), E. and S. Livingstone, Edinburgh, 1970.

[0870] Wilschut, “Preparation and properties of phospholipid vesicles,” in Methodologie des liposomes appliquee a la pharmacologie et a la biologies cellulaire, Leserman and Barbet (eds.), INSERM, Paris, pp. 1-10, 1982.

[0871] Yamaguchi et al., “Cell-surface antigens of melanoma recognized by human monoclonal antibodies,” Proc. Natl. Acad. Sci. USA, 84:2416-20, 1987.

[0872] Yamamoto et al., “In vitro Augmentation of Natural Killer Cell Activity and Production of Interferon-α/β and -γ with Deoxyribonucleic Acid Fraction from Mycobacterium bovis BCG,” Jpn. J. Cancer Res., 79:866-73, 1988.

[0873] Yeh et al., “A cell-surface antigen which is present in the ganglioside fraction and shared by human melanomas,” Int. J. Cancer, 29:269-75, 1982.

[0874] Yin et al., “Effect of Various Adjuvants on the Antibody Response of Mice to Pneumococcal Polysaccharides,” J. Biol. Resp. Modifiers, 8:190-205, 1989.

[0875] Yokoyama et al., “Immunochemical studies with gangliosides,” J. Immunol., 90:372-80, 1963.

[0876] Zapata et al., Protein Eng., 8:1057-62, 1995.

[0877] Zitvogel et al., Nat. Med., 4:594-600, 1998.

[0878] All of the compositions and methods disclosed and claimed herein can be made and executed without undue experimentation in light of the present disclosure. While the compositions and methods of this invention have been described in terms of preferred embodiments, it will be apparent to those of skill in the art that variations may be applied to the composition, methods and in the steps or in the sequence of steps of the method described herein without departing from the concept, spirit and scope of the invention. More specifically, it will be apparent that certain agents which are both chemically and physiologically related may be substituted for the agents described herein while the same or similar results would be achieved. All such similar substitutes and modifications apparent to those skilled in the art are deemed to be within the spirit, scope and concept of the invention as defined by the appended claims. All publications, patents, and patent applications cited herein are hereby incorporated by reference in their entirety for all purposes. Accordingly, the exclusive rights sought to be patented are as described in the claims below:

What is claimed is:

1. An isolated polynucleotide encoding a protein less than about 300 amino acids comprising a sequence selected from the group consisting of:
(a) sequence provided in SEQ ID NO:3;
(b) complements of the sequence provided in SEQ ID NO:3;
(c) sequences having at least 90% identity to a sequence of SEQ ID NO: 3; and
(d) degenerate variants of a sequence provided in SEQ ID NO:3.

2. An isolated polypeptide comprising an amino acid sequence selected from the group consisting of:
(a) sequences encoded by a polynucleotide of claim 1; and
(b) sequences having at least 90% identity to a sequence encoded by a polynucleotide of claim 1; and
(c) sequences provided in SEQ ID NOs:16-20; and
(d) sequences provided in SEQ ID NOs:21-840; and
(e) sequences provided in SEQ ID NOs:841-861.

3. An expression vector comprising a polynucleotide of claim 1 operably linked to an expression control sequence.

4. A host cell transformed or transfected with an expression vector according to claim 3.

5. An isolated antibody, or antigen-binding fragment thereof, that specifically binds to a polypeptide of claim 2.

6. A method for detecting the presence of a cancer in a patient, comprising the steps of:
(a) obtaining a biological sample from the patient;
(b) contacting the biological sample with a binding agent that binds to a polypeptide of claim 2;
(c) detecting in the sample an amount of polypeptide that binds to the binding agent; and
(d) comparing the amount of polypeptide to a predetermined cut-off value and therefrom determining the presence of a cancer in the patient.

7. A fusion protein comprising at least one polypeptide according to claim 2.

8. An oligonucleotide that hybridizes to nucleotides 1-630 of the sequence recited in SEQ ID NO:3 under moderately stringent conditions.

9. A method for stimulating and/or expanding T cells specific for a tumor protein, comprising contacting T cells with at least one component selected from the group consisting of:
(a) polypeptides according to claim 2;
(b) polynucleotides according to claim 1; and
(c) antigen-presenting cells that express a polypeptide according to claim 1,
under conditions and for a time sufficient to permit the stimulation and/or expansion of T cells.

10. An isolated T cell population, comprising T cells prepared according to the method of claim 9.

11. A composition comprising a first component selected from the group consisting of physiologically acceptable carriers and immunostimulants, and a second component selected from the group consisting of:
(a) polypeptides according to claim 2;
(b) polynucleotides according to claim 1;
(c) antibodies according to claim 5;
(d) fusion proteins according to claim 7;
(e) T cell populations according to claim 10; and antigen presenting cells that express a polypeptide according to claim 2.

12. A method for stimulating an immune response in a patient, comprising administering to the patient a composition of claim 11.

13. A method for the treatment of a cancer in a patient, comprising administering to the patient a composition of claim 11.

14. A method for determining the presence of a cancer in a patient, comprising the steps of:
(a) obtaining a biological sample from the patient;
(b) contacting the biological sample with an oligonucleotide according to claim 8;
(c) detecting in the sample an amount of a polynucleotide that hybridizes to the oligonucleotide; and
(d) comparing the amount of polynucleotide that hybridizes to the oligonucleotide to a predetermined cut-off value, and therefrom determining the presence of the cancer in the patient.

15. A diagnostic kit comprising at least one oligonucleotide according to claim 8.

16. A diagnostic kit comprising at least one antibody according to claim 5 and a detection reagent, wherein the detection reagent comprises a reporter group.

17. A method for inhibiting the development of a cancer in a patient, comprising the steps of:
(a) incubating CD4+ and/or CD8+ T cells isolated from a patient with at least one component selected from the group consisting of: (i) polypeptides according to claim 2; (ii) polynucleotides according to claim 1; and (iii) antigen presenting cells that express a polypeptide of claim 2, such that T cell proliferate;
(b) administering to the patient an effective amount of the proliferated T cells,
and thereby inhibiting the development of a cancer in the patient.

18. An isolated polynucleotide encoding a protein of less than 300 amino acids comprising a sequence selected from the group consisting of:
(a) sequence provided in SEQ ID NO:6;
(b) complements of the sequences provided in SEQ ID NO:6;
(c) sequences having at least 90% identity to a sequence of SEQ ID NO: 6; and
(d) degenerate variants of a sequence provided in SEQ ID NO:6.

19. An isolated polypeptide comprising an amino acid sequence selected from the group consisting of:
(a) sequences encoded by a polynucleotide of claim 18; and
(b) sequences having at least 90% identity to a sequence encoded by a polynucleotide of claim 18; and
(c) the sequence provided in SEQ ID NO:869.

20. An expression vector comprising a polynucleotide of claim 18 operably linked to an expression control sequence.

21. A host cell transformed or transfected with an expression vector according to claim 20.

22. An isolated antibody, or antigen-binding fragment thereof, that specifically binds to a polypeptide of claim 19.

23. A method for detecting the presence of a cancer in a patient, comprising the steps of:
(a) obtaining a biological sample from the patient;
(b) contacting the biological sample with a binding agent that binds to a polypeptide of claim 19;
(c) detecting in the sample an amount of polypeptide that binds to the binding agent; and
(d) comparing the amount of polypeptide to a predetermined cut-off value and therefrom determining the presence of a cancer in the patient.

24. A fusion protein comprising at least one polypeptide according to claim 19.

25. A method for stimulating and/or expanding T cells specific for a tumor protein, comprising contacting T cells with at least one component selected from the group consisting of:
(a) polypeptides according to claim 19;
(b) polynucleotides according to claim 18; and
(c) antigen-presenting cells that express a polypeptide encoded by a polynucleotide according to claim 18,
under conditions and for a time sufficient to permit the stimulation and/or expansion of T cells.

26. An isolated T cell population, comprising T cells prepared according to the method of claim 26.

27. A composition comprising a first component selected from the group consisting of physiologically acceptable carriers and immunostimulants, and a second component selected from the group consisting of:
(a) polypeptides according to claim 19;
(b) polynucleotides according to claim 18;
(c) antibodies according to claim 22;
(d) fusion proteins according to claim 24;
(e) T cell populations according to claim 27; and
antigen presenting cells that express a polypeptide according to claim 19.

28. A method for stimulating an immune response in a patient, comprising administering to the patient a composition of claim 28.

29. A method for the treatment of a cancer in a patient, comprising administering to the patient a composition of claim 28.

30. A diagnostic kit comprising at least one oligonucleotide according to claim 25.

31. A diagnostic kit comprising at least one antibody according to claim 22 and a detection reagent, wherein the detection reagent comprises a reporter group.

32. A method for inhibiting the development of a cancer in a patient, comprising the steps of:
(a) incubating CD4+ and/or CD8+ T cells isolated from a patient with at least one component selected from the group consisting of: (i) polypeptides according to claim 19; (ii) polynucleotides according to claim 18; and (iii) antigen presenting cells that express a polypeptide of claim 19, such that T cell proliferate;
(b) administering to the patient an effective amount of the proliferated T cells,
and thereby inhibiting the development of a cancer in the patient.

The application's sequence listing, which the Patent Office published only in electronic form, follows.

SEQUENCE LISTING (10467 sequences)

SEQ ID NO: 1 - DNA, 406 bp, Homo sapiens
ggaaaacaccctgacccctctgcctggcatagaccttcagacacagagcccctgaacaagggcaccccaacacctcatcatatactgaggtcaggggctccccaggtggacaccaggactctgaccccctgcccctcatccaccccgcaggtcagcccaaggctgccccctcggtcactctgttcccgccctcctctgaggagcttcaagccaacaaggccacactggtgtgtctcataagtgacttctacccgggagccgtgacagtggcctggaaggcagatagcagccccgtcaaggcgggagtggagaccaccacaccctccaaacaaagcaacaacaagtacgcggccagcagctacctgagcctgacgcctgagcagtggaagtcccacaaaagctacag

SEQ ID NO: 2 - DNA, 330 bp, Homo sapiens
ccacacagcccctgtgctagacatcgcctggtgcccgcacaatgacaacgtcattgccagtggctccgaggactgcacagtcatggtgtgggagatcccggatgggggcctgatgctgcccctgcgggagcccgtcgtcaccctggagggccacaccaagcgtgtgggcattgtggcctggcacaccacagcccagaacgtgctgctcagtgcaggttgtgacaacgtgatcatggtgtgggacgtgggcactggggcggccatgctgacactgggcccagaggtgcacccagacacgatctacagtgtggactggagccgagatggagg

SEQ ID NO: 3 - DNA, 113 bp, Homo sapiens
  misc_feature (1)...(113): n = A,T,C or G
ggncgaggtctgtggctgctgtgggacttccactgctcaggcgtcaggctcanatagctgctggccgnntacttgttgttgctttgtttggagggtgtggtggtctccactcc

SEQ ID NO: 4 - DNA, 269 bp, Homo sapiens
ccacaggcttctaccccgaccacgtggagctgagctggtgggtgaatgggaaggaggtgcacagtggggtcagcacagacccgcagcccctcaaggagcagcccgccctcaatgactccagatactgcctgagcagccgcctgagggtctcggccaccttctggcagaacccccgcaaccacttccgctgtcaagtccagttctacgggctctcggagaatgacgagtggacccaggatagggccaaacctgtcacccagatcgtcagc

SEQ ID NO: 5 - DNA, 372 bp, Homo sapiens
  misc_feature (1)...(372): n = A,T,C or G
ccacgntgnccatcaacagggncgaagccggcgatgaggccgactattactgtcaagtgtgggatcgtaataatgaccatgtcgtcttcggcggagggaccaaactggccgtcctaggtcagcccaaggctgccccctcggtcactctgttcccgccctcctctgaggagcttcaagccaacaaggccacactggtgtgtctcataagtgacttctacccgggagccgtgacagtggcctggaaggcanatagcagccccgtcaaggcgggagtggagaccaccacaccctccaaacaaagcaacaacaagtacgcggccagcagctatctgagcctgacgcctgagcagtggaagtcccacanaactacag

SEQ ID NO: 6 - DNA, 373 bp, Homo sapiens
ctgtagcttctgtgggacttccactgctcaggcgtcaggctcagatagctgctggccgcgtacttgttgttgctttgtttggagggtgtggtggtctccactcccgccttgacggggctgctatctgccttccaggccactgtcacggctcccgggtagaagtcacttatgagacacaccagtgtggccttgttggcttgaagctcctcagaggagggcgggaacagagtgaccgagggggcagccttgggctgacctaggacggccagtttggtccctccgccgaagacgacatggtcattattacgatcccacacttgacagtaatagtcggcctcatcgccggcttcgaccctgttgatggtcagggtgg

SEQ ID NO: 7 - DNA, 484 bp, Homo sapiens
  misc_feature (1)...(484): n = A,T,C or G
ccttgcctcagatccaaggtcactcggaagaggccatgtctaccctcaatgacactcatggaggaaatgctgagagaagcattcagatgcatgacacaagagccaatgaaaggccctattgctatgcaatctggtccaaaaccactcttcaggaggatgtcttcactggtgggccccacgcaaagcttcttcatgagggaatctaagactttgggggctgtccagattatgaatgggctcttccacattgccctggggggtcttctgatgatcccagcagggatctatgcacccatctgtgtgactggggtggtaccctctctggggaggcattatgtatattatttccggatcactcctggcagcaaccggaaaaaaaactccaggaagtgtttggtcaaaggaaaaaatgataatgaattcattggnccctctttgcttgccttttctggaaagaattcttttcaaatcatgggaccatact

SEQ ID NO: 8 - DNA, 457 bp, Homo sapiens
  misc_feature (1)...(457): n = A,T,C or G
cctgggggtcagcacggaggggactggagctggagagtgactgtagagcctcaggactcaggtacttctgccctccctttggtctccctgttcttctatgtggtgacagatggcaaggaagtcctactaccagaggttggggccaaggggcagttgaagtttatcagtgggcacaccagtgaacttggtaacttccgctttacacttttgccaccaaccagtccaggggatacagcccccaagtatggcagctacaatgtcttctggacctccaacccaggactgcccctgctgacagagatggtaaagagtcgcctaaatagctggtttcagcatcggcccccaggggcctcccctgaacgctacctcggcttgccaggatccctgaagtgggaggacagangtccaagtgggcaagggcanggggcagttcttgatacagcaggtgacccttgaa

SEQ ID NO: 9 - DNA, 364 bp, Homo sapiens
  misc_feature (1)...(364): n = A,T,C or G
ggcatcatactcctatngtnatgagaagccctctgccatccagcagcgagccattctaccttgtatcaagggttatgatgtgattgctcaagcccaatctgggactgggaaaacggccacatttgccatatcgattctgcancagattgaattagatctaaaagccacccaggccttggtcctagcacccactcgagaattggctcagcagatacagaaggtggtcatggcactaggagactacatgggcgcctcctgtcacgcctgtatccggggcaccaacgtgcngtgctgacgtgcataaactgcanatggaactccccacatcatcgtgggtacccctggccgngtgtnttgaaatgcn

SEQ ID NO: 10 - DNA, 382 bp, Homo sapiens
  misc_feature (1)...(382): n = A,T,C or G
tcaggacacagcatggacatgagggtccccgctcagctcctggggctcctgctgctctggctcccaggtgccaaatgtgacatccagatgacccaatctccttccaccctgtctgcatctgtcggagatacaagttacaataagttgtcgggcctctcagaatatagatcggtggttggcctggcatcaacagaaaccaggcaaagcccctaatgtcctaatttatgcgacttccagtttagaagaaggggtctcattaagatttactggcagtggatctgggacacaattcaatttaaccatcaccagtctgcagcctgacgattcagcaacttattattgncaacattattctgcatctcttcgcagtttttggacctcg

SEQ ID NO: 11 - DNA, 292 bp, Homo sapiens
  misc_feature (1)...(292): n = A,T,C or G
ctgtggctgctgtgggacttccactgctcaggcgtcaggctcagatagctgctggccgcgtacttgttgttgctttgtttggagggtgtggtggnctccactcccgccttgacggggcttgctatctgccttccaggccactgtcacngctcccgggtagaagtcacttatgagacacaccagngtggccttgttggcttgaagctcctcanaggagggcgggaaacagaatgaccgagggggcagncttgggctgacctangacggccagtttgggtccctcccccaagac

SEQ ID NO: 12 - DNA, 465 bp, Homo sapiens
  misc_feature (1)...(465): n = A,T,C or G
ccaccctgaccatcaacagggtcgaagccggcgatgaggccgactattactgtcaagtgtgggatcgtaataatgaccatgtcgtcttcggcggagggaccaaactggccgtcctaggtcagcccaaggctgccccctcggtcactctgttcccgccctcctctgaggagcttcaagccaacaaggccacactggtgtgtctcataagtgacttctacccgggagccgtgacagtggcctggaaggcagatagcagccccgtcaaggcgggagtggagaccaccacaccctccaaacaaagcaacaacaagtacgcggccagcagctatctgagcctgacgcctgagcagtggaagtcccacagaagctacagacctgcccgggcggccaagggcgaattccagcacacttggcgccgttactatggatccnactcggtaccaacttggcgtaatcatggncata

SEQ ID NO: 13 - DNA, 206 bp, Homo sapiens
ccatggatatggctaggttaggtattcatatccaaatatctgaactctaacctaatgtggatatgattctgtagcattatattaaaagctatgatgatgcaatgcaggaaataacctttcattctcccccctagaggatcacgacaggtgcttcaatgcctgccttatctatgggacagtagtgtgattctcagtgagagtgaagg

SEQ ID NO: 14 - DNA, 378 bp, Homo sapiens
  misc_feature (1)...(378): n = A,T,C or G
ccaccctgaccatcaacagggtcgaagccggcgatgaggccgactattactgtcaagtgtgggatcgtaataatgaccatgtcgtcttcggcggagggaccaaactggccgtcctaggtcagcccaaggctgccccctcggtcactctgttcccgccctcctctgaggagcttcaagccaacaaggccacactggtgtgtctcataagtgacttctacccgggagccgtgacagtggcctggaaggcagatagcagccccgtcaaggcgggagtggagaccaccacaccctccaaacaaagcaacaacaagtacgcggcncagcagctatctgaagccttgacccctgagcaggtggaaagtcccacagaagctacag

SEQ ID NO: 15 - DNA, 170 bp, Homo sapiens
ccgccgcgggtccgtgcgcccagcgtcccagggcccaggccgagcagacaaagatcattccactcagcctgggacgatggggaggaaaaaaatccagatctcccgcatcctggaccaaaggaatcggcaggtgacgttcaccaagcggaagttcgggctgatgaagaagg

SEQ ID NO: 16 - DNA, 462 bp, Homo sapiens
  misc_feature (1)...(462): n = A,T,C or G
ccagtacacccatgaatttgatggagatgagcagttctacgtggacctggggaggaaggagactgtctggtgtttgcctgttctcagacaatttagatttgacccgcaatttgcactgacaaatatcgctgcctaaaacataacttgaacagtctgattaaacgctccaactctaccgctgctaccaatgaggntcctgaggtcacagtgttttccaagtctcccgtgacactgggtcagcccaacatcctcatctgtcttgtggacaacatctttcctcctgtggncaacatcacatggctgagcaatgggcactcagtcacagaangtgtttctgagaccagcttcctctccaagagtgatcattccttcttcaagatcagtacctcaccctcctcccttctggntgaggagagttatgactgcaaggnggancactggggactgggacaagcctcttct

SEQ ID NO: 17 - DNA, 207 bp, Homo sapiens
  misc_feature (1)...(207): n = A,T,C or G
ggcaagtcctgggctggcttacctgggcaccgtgggcatgggggaggtgtgtcacaagatttgggctctgcagagagaagattgggagttacggggatctgggatggaggtggatgcgtcagcaccctgctggggcctgtccctggactcgggccactctagggctcttgtcccgccttgagctggagggcgaggacctcngccgcn

SEQ ID NO: 18 - DNA, 294 bp, Homo sapiens
ccatgtccccagaattgaagccagagaatcgctcagatatccctgagggccggtcgttatcaaaagagatgattaggacaggggcctggcctggcttctggtaataccagtgtacattgttactcccaatattgtttcccccacaggtaatcttggccgtctttcctggggccactgacactgagggtgtctgagtcaacacataggaggtcacagagtctgtgcagtgagagaggaggccgaggaggagaacggtccaggccatggctgaggcaccaccagtgctgcttcctt

SEQ ID NO: 19 - DNA, 197 bp, Homo sapiens
  misc_feature (1)...(197): n = A,T,C or G
caagccngcgatgaggccgactattactgtcaagngtgggatcgtaataatgaccatgtcgtcttcggcggagggaccaaactggccntcctangtcancccaacgctgccccctcagncactctgttcccgccctcctctgaggagcttcaagccaacaangccacactngtgtgtctcataantgacttctaccc

SEQ ID NO: 20 - DNA, 387 bp, Homo sapiens
aaatttctcaaataactaagtcttcactaaggcagcagttcaaaactgttccaggaattaaaatatattcccatttgaggagtcttccttcacaccttcacctcctcagccttaagtatatacacacacacccaacaccctcaatacttgactagcaacaggctttaccatctttacctgacaatgaccccagggcggagatcgaaattcttcttcacaatctctaatagctctctctcactcttctgagaggtaccataatggaaaatggagatagataatggatgagaaactccaatagcataagagacctgaacaagaaccctccggcacagacctcctttaacaagggattttgccacccaacgagcagcataagcagacctg

SEQ ID NO: 21 - DNA, 290 bp, Homo sapiens
  misc_feature (1)...(290): n = A,T,C or G
aagcagcactggtggtgcctcagccatggcctggaccgttctcctcctcggcctcctctctcactgcacagactctgtgacctcctatgtgttgactcagacaccctcagtgtcagtggccccangaaagacggccaagattacctgtgggggaaacaatattgggagttacagtgtacactggtattaccaaaagccaggccaggcccctgtcctaatcatctcttttgatgacnaccggccctcanggatatctgagcgattctctgggcttcaattctgggggacat

SEQ ID NO: 22 - DNA, 148 bp, Homo sapiens
  misc_feature (1)...(148): n = A,T,C or G
ctgtagcttctgtgggacttccactgctcaggcgtcaggctcaganagctgctggccgcgtacttgttgttgctttgtttggagggtgtggtggtctccactcccgccttgacggggctgctatctgccttncangccactgtcacgg

SEQ ID NO: 23 - DNA, 265 bp, Homo sapiens
  misc_feature (1)...(265): n = A,T,C or G
ctgtagcttctgtgggacttccactgctcaggcgtcaggctcagatagctgctggccgcgtacttgttgttgctttgtttggagggtgtggnggtctccactcccgccttgacggggctgctatctgccttccaggccactgtcacggctcccgggtagaagtcacttatgagacacaccagtgtggccttgttggcttgaagctcctcacaggagggcgggaacagagtgaccgagggggcagccttgggctgacctaggacgg

SEQ ID NO: 24 - DNA, 377 bp, Homo sapiens
aggtccaccctgaccatcaacagggtcgaagccggcgatgaggccgactattactgtcaagtgtgggatcgtaataatgaccatgtcgtcttcggcggagggaccaaactggccgtcctaagtcagcccaaggctgccccctcggtcactctgttcccgccctcctctgaggagcttcaagccaacaaggccacactggtgtgtctcataagtgacttctacccgggagccgtgacagtggcctggaaggcagatagcagccccgtcaaggcgggagtggagaccaccacaccctccaaacaaagcaacaacaagtacgcggccagcagctatctgagcctgacccctgagcattggaagtcccacaaaagctacag

SEQ ID NO: 25 - DNA, 323 bp, Homo sapiens
cctgggaggaacctgctcagtctgggcctaaggaagcagcactggtggtgcctcagccatggcctggaccgttctcctcctcggcctcctctctcactgcacagactctgtgacctcctatgtgttgactcagacaccctcagtgtcagtggccccaggaaagacggccaagattacctgtgggggaaacaatattgggagtaacaatgtacactggtattaccagaagccaggccaggcccctgtcctaatcatctcttttgataacgaccggccctcagggatatctgagcgattctctggcttcaattctggggacatgg

SEQ ID NO: 26 - DNA, 433 bp, Homo sapiens
  misc_feature (1)...(433): n = A,T,C or G
ccaccctgaccatcaacagggtcgaagccggcgatgaggccgactattactgtcaagtgtgggatcgtaataatgaccatgtcgtcttcggcggagggaccaaactggccgtcctaggtcagcccaaggctgccccctcggtcactctgttcccgccctcctctgaggagcttcaagccaacaaggccacactggtgtgtctcataagtgacttctacccgggagccgtgacagtggcctggaaggcagatagcagccccgtcaaggcgggagtggagaccaccacaccctccaaacaaagcaacaacaagtacgcggccagcagctatctgannctgacgcctgagcagtggaagtcccacagaagctacagcctgggcttggcttaccttgggcacccgtggggcaatgggggaangtgtgtcacaaaaat

SEQ ID NO: 27 - DNA, 419 bp, Homo sapiens
  misc_feature (1)...(419): n = A,T,C or G
ngcggccnaggtccagaacacacatttggctggaacagcctgagggaccaaaaggccccagtatcccacagagctgaggagccaggccagaaaagtaaccccagagttcgctgtgcaggggagacacagagctctctttatctgtcaggatggcaggaggggacagggtcagggcgctgagggtcanatgtcggtgttgggggccaaggccccgagagatctcaggacaggtggtcaggtgtctaaggtaaaacagctccccgtgcagatcagggcatagtggaaaacaccctgacccctctgcctggcatagaccttcagacacagagcccctgaacaanggcaccccaacacctcatcatatactgagggcaggggctccccaggtggacaccaggactctgacccccttgcccctc

SEQ ID NO: 28 - DNA, 201 bp, Homo sapiens
  misc_feature (1)...(201): n = A,T,C or G
gctgccccctcggtcactctgttcccgccctcctctgaggagcttcaagccaacaaggccacactggtgtgtctcataagtgacttctacccgggagccgtgacagtggcctggaangcagatagcacccccntcaaggcgggagtggagaccaccacaccctncaaacaaagcaacaacaagtacccggccagcagctat

SEQ ID NO: 29 - DNA, 292 bp, Homo sapiens
ccatgtccccagaattgaagccagagaatcgctcagatatccctgagggccggtcgttatcaaaagagatgattaggacaggggcctggcctggcttctggtaataccagtgtacattgttactcccaatattgtttcccccacaggtaatcttggccgtctttcctggggccactgacactgagggtgtctgagtcaacacataggaggtcacagagtctgtgcagtgagagaggaggccgaggaggagaacggtccaggccatggctgaggcaccaccagtgctgcttcc

SEQ ID NO: 30 - DNA, 417 bp, Homo sapiens
  misc_feature (1)...(417): n = A,T,C or G
ngtccttgnctnagatccaaggtcactcggaagaggccatgtctaccctcaatgacactcatggaggaaatgctgagagaagcattcagatgcatgacacaaggtaagactgccaaaaaatcttgttcttgctctcctcattttgttatttgttttatttttangagttttgagagcaaaatgacaacacccagaaattcagtaaatgggactttcccggcagagccaatgaaaggncctattgctatgcaatctggtccaaaaccactcttcaggaggatgtcttcactggtgggccccacgcaaagcttcttcatgagggaatctaagactttgggggctgtccagattatgaatgggctcttccacattgccctggggggncttctgatgatcccancagggatntatgccccc

SEQ ID NO: 31 - DNA, 454 bp, Homo sapiens
  misc_feature (1)...(454): n = A,T,C or G
ctgtagcttttgtgggacttccactgctcaggcgtcaggctcaggtagctgctggccgcgtacttgttgttgctttgtttggagggtgtggtggtctccactcccgccttgacggggctgctatctgccttccaggccactgtcacggctcccgggtagaagtcacttatgagacacaccagtgtggccttgttggcttgaagctcctcanaggagggcgggaacagagtgaccgagggggcagccttgggctgacctgcggggtggatgaggggcagggggtcaaagtcctggtgtccacctggggagcccctgacctcagtatatgatgaggtgttggggtgcccttgttcaggggctctgtgtctgaaggtctatgccaggcagaggggtnanggtgttttcactatgccctgatttgcccgggagctgcttaccttagaccctgacancn

SEQ ID NO: 32 - DNA, 482 bp, Homo sapiens
aaatcacagcttttacctatttgttaggctatagtgttttgtaaacttctgtttctattcacatcttctccacttgagagagacaccaaaatccagtcagtatctaatctggcttttgttaacttccctcaggagcagacattcatataggtgatactgtatttcagtcctttcttttgaccccagaagccctagactgagaagataaaatggtcaggttgttggggaaaaaaaagtgccaggctctctagagaaaaatgtgaagagatgctccaggccaatgagaagaattagacaagaaatacacagatgtgccagacttctgagaagcacctgccagcaacagcttccttctttgagcttaggtgagcaggattctggggtttgggatttctagtgatgggctatggaaagggtgactgtgcctggggacaaagcgaggtcccaaggggacagcctgaactccctgctcatagtagtgg

SEQ ID NO: 33 - DNA, 383 bp, Homo sapiens
  misc_feature (1)...(383): n = A,T,C or G
ngtccaccctgaccatcaacagggncgaagccggcgatgaggccgactattactgtcaagtgtgggatcgtaataatgaccatgtcgtcttcggcggagggaccaaactggccgtcctaggtcagccccaaggctgccccctcggtcactctgttcccgccctcctctgaggagcttcaagccaacaaggccacactggtgtgtctcataagtgacttctacccgggagccgtgacagtggcctggaaggcagatagcagccccgtcaaggcgggagtggagaccaccacaccctccaaacaaancaacaacaagtacncggccagcagctatctgagcctgacgcctgagcagtggaagtnccacataagctacanacctcn

SEQ ID NO: 34 - DNA, 246 bp, Homo sapiens
aaatctttagagataccataaatcaacatttaatctttgtaacacatctgaaggaatattcttgaaatagcgtgatgatggtctttaaggattctagaaagggagtgatgagtcagaatttgccagaatgtcccagcatagtcaggagaaagagaacctctctggtcgatgtacatgttctaatcccatggagattagggcaccagactatgagatttggtaacatttgctatcaagatgaaccag

SEQ ID NO: 35 - DNA, 309 bp, Homo sapiens
  misc_feature (1)...(309): n = A,T,C or G
gcgcggtcgangtggctctccgatccccccaggcccttgccccatacacgggctccagaacacacatttggctggaacagcctgagggaccaaaaggccccagtatcccacagagctgaggagccaggccagaaaagtaaccccagagttcgctgtgcaggagagacacagagctctctttatctgtcaggatggcaggaggggacagggtcagggcactgagggtcanatgtcggtgtggggggccaaggccccgagagatctcaggacangtggncatgtgtctaangtaaaanagcttccccgtgc

SEQ ID NO: 36 - DNA, 363 bp, Homo sapiens
  misc_feature (1)...(363): n = A,T,C or G
atggacatgagggtccccgctcagctcctggggctcctgctgctctggctcccaggtgccaaatgtgacatccagatgacccaatctccttccaccctgtctgcatctgtcggagatacagttacaataagttgtcgggcctctcagaatatagatcggtggttggcctggcatcaacagaaaccaggcaaagcccctaatgtcctaatttatgcgacttccagtttagaagaaggggtctcattaagatttactggcagtggatctgggacacaattcaatttaaccatnaccaggtctgcagcctgacgattcancaacttattattgtnaacattattctgcatctnttnncagttttgg

SEQ ID NO: 37 - DNA, 416 bp, Homo sapiens
  misc_feature (1)...(416): n = A,T,C or G
ccagtacacccatgaatttgatggagatgagcagttctacgtggacctggggaggaaggagactgcctggtgtttgcctgttctcagacaatttagatttgacccgcaatttgcactgacaaacatcgctgtcctaaaacataacttgaacagtctgattaaacgctccaactctaccgctgctaccaatgaggttcctgaggtcacagtgttttccaagtctcccgtgacactgggtcagcccaacatcctcatctgtcttgtggacaacatctttcctcctgtggncaacatcacatggctgagcaatgggcactcagtcacanaangtgtttctgagaccagcttcctctccaagagtgatcattncttcttcaanatcagntaccccaccctcctcccttcttctgaggaga

SEQ ID NO: 38 - DNA, 253 bp, Homo sapiens
  misc_feature (1)...(253): n = A,T,C or G
gtctgtagcttctgtgggacttccactgctcaggcgtcaggctcagatagctgctggccgcgtacttgttgttgctttgtttggagggtgtggtggnctccactcccgccttgacggggntgctatctgncttccaggccactgtcacggctcccgggtagaagtcacttatgagacacaccagtgtggccttgttggcttgaanctcctcatangagggcgggaacagagtgaccganggggcagccttggg

SEQ ID NO: 39 - DNA, 178 bp, Homo sapiens
  misc_feature (1)...(178): n = A,T,C or G
gcccnggnaggtccaaatgtctgagacaccttcaaatgggcccagtgccagccaactgggctcctcactggcaccacgtcccagatgcccttctctgcccacaccctgcaggctgaggccagaggaggncacccctccggagatggggnatgtgngtgtgtgtgngtatgttctgcgn

SEQ ID NO: 40 - DNA, 156 bp, Homo sapiens
  misc_feature (1)...(156): n = A,T,C or G
ccaaaagaagtaagacagcttgctgaagatttcctgaaagactatattcatataaacattggtgcacttgaactgantgcaaaccacaacattcttcanantgtggatgtgtgtcatgacntanaaaaggatgaaaaacttattcgtctaatggaa

SEQ ID NO: 41 - DNA, 287 bp, Homo sapiens
  misc_feature (1)...(287): n = A,T,C or G
ccatgtccccagaattgaagccagagaatcgctcagatatccctgagggccggtcgttatcaaaagagatgattaggacaggggcctggcctggcttctggtaataccagngtacattgttactcccaatattgtttcccccacaggtaatcttggccgcctttcctggggccactgacactgagggtgtctgagtcaacacataggaggncacagagtntgtgcagtgagagaggaggccgaagaggagaacggcccangccatggctgangcnccaccagtgctg

SEQ ID NO: 42 - DNA, 272 bp, Homo sapiens
gtgctcacagtcatcaattatagaccccacaacatgcgccctgaagacagaatgttccatatcagagctgtgatcttgagagccctctccttggctttcctgctgagtctccgaggagctggggccatcaaggcggaccatgtgtcaacttatgccgcgtttgtacagacgcatagaccaacaggggagtttatgtttgaatttgatgaagatgagatgttctatgtggatctggacaagaaggagaccgtctggcatctggaggagtttgg

SEQ ID NO: 43 - DNA, 533 bp, Homo sapiens
  misc_feature (1)...(533): n = A,T,C or G
cttgcctgctgctctggcccctggtcctgtcctgttctccagcatggtgtgtctgaggctccctggaggctcctgcatggcagttctgacagtgacactgatggtgctgagctccccactggctttggctggggacaccagaccacgtttcttggagtactctacgtctgagtgtcatttcttcaatgggacggagcgggtgcggttcctggacagatacttctataaccaagaggagtacgtgcgcttcgacagcgacgtgggggagttccgggcggtgacggagctggggcggcctgatgaggagtactggaacagccagaaggacttcctggaagacaggcgggccgcggtggacacctactgcagacacaactacggggttggtgagagcttcacagtgcagcggcgagtccatcctaaggtgactgtgtatccttcaaagacccacccctgcagcaccacaacctcctggtctgttctgngagtggtttctatccaggcagcattgaatcangtggttccggaatggn

SEQ ID NO: 44 - DNA, 332 bp, Homo sapiens
tcgccctgaacgaggacctgcgctcttggaccgcggcggacatggcggctcagatcaccaagcgcaagtgggaggcggcccatgaggcggagcagttgagagcctacctggatggcacgtgcgtggagtggctccgcagatacctggagaacgggaaggagacgctgcagcgcacggacccccccaagacacatatgacccaccaccccatctctgaccatgaggccaccctgaggtgctgggccctgggcttctaccctgcggagatcacactgacctggcagcgggatggggaggaccagacccaggacacggagctcgtggagaccagg

SEQ ID NO: 45 - DNA, 391 bp, Homo sapiens
  misc_feature (1)...(391): n = A,T,C or G
ctgtngctnctgtgggacttccactgctcaggcgtcaggctcanatagctgctggccgcgtacttgttgttgctttgtttggagggtgtggtggtctccactcccgccttgacggggctgctatctgccttccaggccactgtcacggctcccgggtagaagtcacttatgagacacaccagtgtggccttgttggcttgaagctcctcagaggagggcgggaacagagtgaccgagggggcagncttgggctgacttaggacggccagtatggtccctccgccgaagacgacatggttattattacnatcccncacttgacagtaatagtcngccttcatcgccggcttctgacccttttgatggtncagggngggacctttggcccgcn

SEQ ID NO: 46 - DNA, 478 bp, Homo sapiens
  misc_feature (1)...(478): n = A,T,C or G
ccaccctgaccatcaacagggtcgaagccggcgatgaggccgactattactgtcaagtgtgggatcttaataatgaccatgtcgtcttcggcggaggaaccaaactggccgtcctaggtcagcccaaggctgccccctcggtcactctgttcccgccctcctctgaggagcttcaagccaacaaggccacactggtgtgtctcataagtgacttctacccgggagccgtgacagtggcctggaaggcagatagcagccccgtcaaggngggagtggagaccaccacaccctncaaacaaagcaacaacaagtacgcggccagcagctatctnagcctgacgcctgagcagtggaagtcccacagaanctacagacctgcccgggcggncaanggcgaattccagcacactggggggcgttactagtggatncgagctcggtaccaagcttggcgnaatcatggncatagctggtttcc

SEQ ID NO: 47 - DNA, 244 bp, Homo sapiens
  misc_feature (1)...(244): n = A,T,C or G
ccacggtnnccntcaacaggggcgaagccggcgatgaggccgactattactgtcaagtgtgggatcttaataatgaccatgtcgtcttcggcggagggaccaaactggncgtcctaggtcagcccaaggctgccccctcggtcactctgttcccgccctcctctgaggagcttcaagccaacaaggccacactggtgtgtctcataagtgacttntacccgngagccgtgacagtggcctggaa

SEQ ID NO: 48 - DNA, 343 bp, Homo sapiens
  misc_feature (1)...(343): n = A,T,C or G
cccggcaggnaaatgccactgctgnggacaaaaaactgaatgaantctattagaagcttctgaaaaatgttaaatgttaaatcctgctatggtctgatnagaanaactcaagacttagaattagatattttcttccttcgaattatgtattagattatctccctacatattttctcccagccataagtaactgagttatgctggaaaaaaaaacacanaaatcttaagatctctttttctactggtgaaattgggggtttgataataatttttagagaaaaatctanaattctctgtgtatagctggtcaacncataaaccangtaaattttgattttcttgg

SEQ ID NO: 49 - DNA, 373 bp, Homo sapiens
  misc_feature (1)...(373): n = A,T,C or G
ccaccctgaccatcaacagggtcgaagccggcgatgaggccgactattactgtcaagtgtgggatcgtaataatgaccatgtcgtcttcggcggagggaccaaactggccgtcctaggtcagcccaaggctgccccctcggtcactctgttcccgccctcctctgaggagcttcaagccaacaaggccacactggtgtgtctcataagtgacttntacccgggagccgtgacagtggcctggaaggcagatagcagccccgtcaaggcgggagtggagaccaccacaccctccaaacaaagcaacaacaagtacgcggccagcagctatctgagcctgacgcctgagcagtggaagtcccacagaagctacag

SEQ ID NO: 50 - DNA, 375 bp, Homo sapiens
ccaaaactgcgaagagatgcagaataatgttgacaataataagttgctgaatcgtcaggctgcagactggtgatggttaaattgaattgtgtcccagatccactgccagtaaatcttaatgagaccccttcttctaaactggaagtcgcataaattaggacattaggggctttgcctggtttctgttgatgccaggccaaccaccgatctatattctgagaggcccgacaacttattgtaactgtatctccgacagatgcagacagggtggaaggagattgggtcatctggatgtcacatttggcacctgggagccagagcagcaggagccccaggagctgagcggggaccctcatgtccatgctgtgtcctgac

SEQ ID NO: 51 - DNA, 347 bp, Homo sapiens
  misc_feature (1)...(347): n = A,T,C or G
ccaccctgaccatcaatagggtcgaagccggcgatgaggccgactattactgtcaagtgtgggatcgtaataatgaccatgtcgtcttcggcggagggaccaaactggccgtcctaggtcagcccaaggctgccccctcggtcactctgttcccgccctcctctgaggagcttcaagccaacaaggccacactggtgtgtctcataagtgacttctacccgggagccgtgacagtggcctggaaggnagatagcagccccgtcaaggcgggagtggagaccaccacaccctccaaacaaagcaacaacaagtaccgcgggcagcagctatctgagcctgacgcctga

SEQ ID NO: 52 - DNA, 449 bp, Homo sapiens
  misc_feature (1)...(449): n = A,T,C or G
aaaattgatcacaacnagggaaaacaaaataaaattagggggcaaagggtaggagtatggggggaggggagagcaaacctatcgaatatatcttagaattttgctcagaaatcactgctgcctctcaagtgttgcattgtccctgcctaaaccaagaaggctaaacaaagcccctcctgtttgaattcttaaggtaagaaatttctaagctaagaaaacactattgcctaaaaccaatgatagtggagctcatttacaaataggcatgcctcacacacacagtccaaaggcaagacactggctttgaaattaggctcatgatgtgattcctattatatgtacctgatttttttaggccccaggtatgtggaccagagttaatgtcatgactcttcaaagatatgatgaaaagttgccctagaaatctagagatgcatgtttatttaatt

SEQ ID NO: 53 - DNA, 199 bp, Homo sapiens
  misc_feature (1)...(199): n = A,T,C or G
ccaccctgaccatcaacagggtcgaagccggcgatggggccgactattattgtcaagtgtgggatcgtaataatgaccatgtcgtcttcggcggagggaccaaactggccgtcctaagtcagcccaaggctgccccctcggncactctgttcccgccctnctctgangagcttnaagccaacaaggncacactggtgtg

SEQ ID NO: 54 - DNA, 79 bp, Homo sapiens
  misc_feature (1)...(79): n = A,T,C or G
ctgtagcttctgtncgacttccactgctcaggcgtcaggctcanatagctgctggccgcgtacttgttgttgctttgtt

SEQ ID NO: 55 - DNA, 93 bp, Homo sapiens
  misc_feature (1)...(93): n = A,T,C or G
ctgtagcttttgtnggncttccactgctcaggcgtcaggctcaggtagctgctggccgnntacttgttgntnctttgnttggagggtgtggtg

SEQ ID NO: 56 - DNA, 426 bp, Homo sapiens
  misc_feature (1)...(426): n = A,T,C or G
gtgaaccanctaatccctctgagaaaaactccccatctacccaatactgttacagcatacaatctctgttcttgggcattttgtcagtgatgctgatctttgccttcttccaggaacttgtaatagctggcatcgttgagaatgaatggaaaagnncgtgctccanacccaaatctaacatagttctcctgtcagnagaagaaaaaaaagaacagactattgaaataaaagaagaagtggttgggctaactgaaacatcttcccaaccaaagaatgaagaagacattgaaattattccaatccaagaagaggaagaagaagaaacagagacgaactttncagaacctccccaagatcaggaatcctcaccaatagaaaatgacagctctcctnaagtgatttcttctgntttctgnntcctttttt

SEQ ID NO: 57 - DNA, 232 bp, Homo sapiens
gctaaaccaaaagaagcctccagacagccctgagatcacctaaaaagctgctaccaagacagccacgaagatcctaccaaaatgaagcgcttcctcttcctcctactcaccatcagcctcctggttatggtacagatacaaactggactctcaggacaaaacgacaccagccaaaccagcagcccctcagcatccagcagcatgagcggaggcattttccttttcttcgtgg

SEQ ID NO: 58 - DNA, 191 bp, Homo sapiens
  misc_feature (1)...(191): n = A,T,C or G
ccttgcctcagatccaanntcactcgnaagaggccatgtctaccctnaatgacactcatggaggaaatgctgagagaagcattcanatgcatgacacaaggtaagactgccaaaaatcttgttcttgctctcctcattttgttatttgttttatttttaggagttttgagagcaaaatgacaacacccaga

SEQ ID NO: 59 - DNA, 259 bp, Homo sapiens
  misc_feature (1)...(259): n = A,T,C or G
ctgtagcttctgtgggacttccactgctcaggcgtcaggctcagatagctgctggccgcgtacttgttgttgctttgtttggagggtgtggtggtctccactcccgccttgacggggctgctatctgccttncaggccactgtcacggntnccgggtagaagtcacttatgagacacaccagtgtggncttgttggcttgaagctcntnanaggagggcgggaacanagtgaccgagggggcagccttgggctgaccta

SEQ ID NO: 60 - DNA, 410 bp, Homo sapiens
cctggtcaaatgtcacctccactgggaagccctccttgatctcccaggctgttaggggcctgccccaggttcctgcagactccctgcttctctccatcacaaacctgagcagtgtggggctgtcattatcatgtgtgaggttttagtaccaggaagtggggtactaccatagcaaatacccaaaaatggggaaatggcttggggaatggaaagaattggacaatgagcacttgatagaaaaagcctagattgccctgaagaggtggtcagtagaaatatggatgttaaaggtgcccctgctgaggtcctaggaggaaatgagggacatgacattggacgtgaagatggaggtggggactgcagtgatgcatccacagatctgggagaccaggatgctgcagccatcacag

SEQ ID NO: 61 - DNA, 361 bp, Homo sapiens
  misc_feature (1)...(361): n = A,T,C or G
cttctgtgnnacttccactgctcacgcgtnaggctcagatagctgctggccgcgtacttgttgttgctttgnttggagggtgtggtggtctccacccccgccttgacggggctgctatctgccttccaggccactgtcacggctcccgggtagaagtcacttatgagacacaccagtgtggccttgttggcttgaagctcctcanaggagggcgggaacagagtgaccgagggggcagccttgggctgacctaggacggccagtttggtccctccgccgaanacgacatggtcattattacgatcccacacttgacagtaatagtcggcctcatcgccggcttcgaccctgttgatggtca

SEQ ID NO: 62 - DNA, 368 bp, Homo sapiens
  misc_feature (1)...(368): n = A,T,C or G
ctgtagcttctgtgggacttccactgctcaggcgtcaggctcagatagctgctggccgcgtacttgttgttgctttgtttggagggtgtggtggtctccactcccgccttgacggggctgctatctgccttccaggccactgtcacggctcccgggtagaagtcacttatgagacacaccagtgtggccttgttggcttgaagctcctcanaggagggcgggaacagagtgaccgagggggcanccttgggctgacctaggacggccagtttggtccctccgccgaagacgacatggtcattattacgatcccacacttnacagttnatagtcngcctcatngccggnttcgaccctgttgatggtca

SEQ ID NO: 63 - DNA, 383 bp, Homo sapiens
  misc_feature (1)...(383): n = A,T,C or G
ctgtagcttctgtgggacttccactgctcaggcgtcaggctcagatagctgctggccgcgtacttgttgttgctttgtttggagggtgtggtggtctccactcccgccttgacggggctgctatctgccttccaggccactgtcacggctcccgggtagaagtcacttatgagacacaccagtgtggccttgttggcttgaagctcctcagaggagggcgggaacagagtgaccgagggggcagccttgggctgacctangacggccagtttggtccctccgccgaagacgacatggtcattattacgatcccacacttgacagtaatagtcggcctcatcgccggcttcgaccctgttgatggtcagggtggacctcggccg

SEQ ID NO: 64 - DNA, 373 bp, Homo sapiens; identical to SEQ ID NO: 6

SEQ ID NO: 65 - DNA, 334 bp, Homo sapiens
  misc_feature (1)...(334): n = A,T,C or G
ctgtagcttctgtgggacttccactgctcgggcgtcaggctcaggtagctgctggccgcgtacttgttgttgctctgtttggagggtttggtggtctccactcccgccttgacggggctgccatctgccttccaggccactgtcacagctcccgggtagaagtcacttatgagacacaccagngtggccttnntggcttgaanctcctcanaggagggcgggaacanngtgaccnagggggcanncttgggctgacctaggacggccagtttggtccctccgccgaagacgacatggtcattattacgatccnacacttgacagtaatagtcgg

SEQ ID NO: 66 - DNA, 377 bp, Homo sapiens
  misc_feature (1)...(377): n = A,T,C or G
ctgtagcttctgtgggacttccactgctcaggcgtcaggctcagatagctgctggccgcgtacttgttgttgctttgtttggagggtgtggtggtctccactcccgccttgacggggctgctatctgccttccaggccactgtcacggctcccgggtagaagtcacttatgagacacaccagtgtggccttgttggcttgaagctcctcagaggagggcgggaacagagtgaccgagggggcagccttgggctgacctaggacggccagtttggtccctccgccgaagacgacatggtcattattacgatcccacacttgacagtaatagtcggnctcatcgtcggcttcgaccctgttgatggtcagggtggacct

SEQ ID NO: 67 - DNA, 392 bp, Homo sapiens
  misc_feature (1)...(392): n = A,T,C or G
ngtcttgcctgctgctctggcccctggtcctgtcctgttctccagcatggtgtgtctgaggctccctggaggctcctgcatggcagttctgacagtgacactgatggtgctgagctccccacttgctttgggctggggacaccagaccacgtttcttggagtactctacgtctgagtgtcatttcttcaatgggacggagcgggtgcggttcctggacagatacttctataaccaagaggagtacgtgcgcttcgacagcgacgtgggggagttccgggcggtgacngagctggggcgggctgatgaggagtactggaacagccannaaggacttcctggaanacaggcgggncgcggtggacacctactgcanacacaactacggggttgg

SEQ ID NO: 68 - DNA, 446 bp, Homo sapiens
  misc_feature (1)...(446): n = A,T,C or G
naaaaatggagagtctgaattttattagagctcacacaccatatattaacatatacaactgtgaaccacctaatccctctgagaaaaactccccatctacccaatactgntacagcatacaatctctgttcttgggcattttgtcagtgatgctgatctttgccttcttccaggaacttgtaatanctggcatcgttgacaatgaatggaaaagaacgtgctccagacccaaatctaacatagttctcctgtcagcagaagaaaaaaaagaacanactattgaaataaaagaagaagtggttgggctaactgaaacatcttcccaaccaaagaatgaagaanacattgaaattattccaatncaagaagaggaagaagaaagaaacnggagacgaactttccagaacctnccaagatcaggaatcctcaccaatagaaaatgacag

SEQ ID NO: 69 - DNA, 180 bp, Homo sapiens
  misc_feature (1)...(180): n = A,T,C or G
ctgctgccacagccagtattgccggggctccaacccagtacccacctggccgtgggggtcctcccccacctatgggccgaagaacaccccctccaggcatgatgggcccacctcccnggtttganacctcctatgggtgcccccaatgggggatcccccntggaagangactccaatggg

SEQ ID NO: 70 - DNA, 113 bp, Homo sapiens
  misc_feature (1)...(113): n = A,T,C or G
nccatgtccccagaattgaagccagagaatcgctcanatatccctgagggccggtcgttatcaaaagagatgattaggacaggggcctggcctggcttctggtaataccaacg

SEQ ID NO: 71 - DNA, 117 bp, Homo sapiens
  misc_feature (1)...(117): n = A,T,C or G
ngtaaattcctgtaataaaagggaaattgagggcagagcaatcaggctggagttgcaaggacccaggggatcacctaatgccagaagccagccatccaaaactctgtttgtcaaagg

SEQ ID NO: 72 - DNA, 247 bp, Homo sapiens
ccactgcaacagtgagtcaaactctcctcgcatgaccacaaagtatagggacaggtgtgaccccctccctgacccatccccattcaggtatgctctagcacagagccggtagccacagcgggttggtgtagaaggactggctgaagatggacactgtgtgcccatccaccgcctctctcttcttcatcttgtaatctgtcaccttccaaatgagccttccattatagcaagtaccctccagcagttt

SEQ ID NO: 73 - DNA, 373 bp, Homo sapiens; identical to SEQ ID NO: 6

SEQ ID NO: 74 - DNA, 371 bp, Homo sapiens
ggacacagcatggacatgagggtccccgctcagctcctggggctcctgctgctctggctcccaggtgccaaatgtgacatccagatgacccaatctccttccaccctgtctgcatctgccggaaatacagttacaataagttgtcgggcctctcagaatatagatcggtggttggcctggcatcaacagaaaccaggcaaagcccctaatgtcctaatttatgcgacttccagtttagaagaaggggtctcattaagatttactggcagtggatctgggacacaattcaatttaaccatcaccagtctgcagcctgacgattcagcaacttattattgtcaacattattctgcatctcttcgcagttttgg

SEQ ID NO: 75 - DNA, 293 bp, Homo sapiens
ggaagcagcactggtggtgcctcagccatggcctggaccgttctcctcctcggcctcctctctcactgcacagactctgtgacctcctatgtgttgactcagacaccctcagtgtcagtggccccaggaaaagacggccaagattacctgtgggggaaacaatattgggagtaacaatgtacactggtattaccagaagccaggccaggcccctgtcctaatcatctcttttgataacgaccggccctcagggatatctgagcgattctctggcttcaattctggggacatgg

SEQ ID NO: 76 - DNA, 209 bp, Homo sapiens
aagcagcactggtggtgcctcagccatggcctggaccgttctcctcctcggcctcctctctcactgcacaggtgatccccccagggtctcaccaacctgcccagcccaaggcttctgggtccagcgtgtccttaattctgagctcaggagggcccttcctgtggtgggcaggatgctcatgaccctggtgcaaggtgggaaggttgggg

SEQ ID NO: 77 - DNA, 396 bp, Homo sapiens
  misc_feature (1)...(396): n = A,T,C or G
ctgtagcttctgtgggacttccactgctcaggcgtcaggctcagatagctgctggccgcgtacttgttgttgctttgtttggagggtgtggtggtctccactcccgccttgacggggctgctatctgccttccaggccactgtcacggctcccgggtagaagtcacttatgagacacaccagcgtggccttgttggcttgaaactcctcanangaaggcgggaaacagaangaccgaggggcanccttgggctgactaggacggcagtttggtcctccgccaaacacatggcattattacgatccacacttgacagtaatagtcngctcatcgncggcttcaccctgtgatggtcagggtggactcggccccgacacctaagggcgaatccancac

SEQ ID NO: 78 - DNA, 202 bp, Homo sapiens
  misc_feature (1)...(202): n = A,T,C or G
cctcggatgatgaagacagtgcccaccacaatgcccacgaggcccacagacaaccccagggcgcagaccacagtctctgtgagctctgacataggggctggaatctcaggctcccagtgtttcagaagaggcttgtccagtccccagtgctccaccttgcagtcatanctctcctcanctgaagggaggagggtgaggnaac

SEQ ID NO: 79 - DNA, 356 bp, Homo sapiens
  misc_feature (1)...(356): n = A,T,C or G
ccaaaactgcgaagagatgcagaataatgttgacaataataagttgctgaatcgtcaggctgcagactggtgatggttaaattgaattgtgtcccagatccactgccagtaaatcttaatgagaccccttcttctaaactggaagtcgcataaattaggacattaggggctttgcctggtttctgttgatgccaggccaaccaccgatctatattctgagaggccccgacaacttattgtaactggtatctccgacagatgcagacagggtggaaggagattgggtcatctggatgtcacatttggcacctgggagccagagcagcaggagccccangagctgagcggggaccctc

SEQ ID NO: 80 - DNA, 149 bp, Homo sapiens
  misc_feature (1)...(149): n = A,T,C or G
ccagnacncccatgaanttgatgganatgagcacttntacgtggacctggggaggaaggagactgtctggtgtttgcctgttctcatacaatttagatttgacccgcaatttgncctgacaaacactggctgttctaaaacataacttg

SEQ ID NO: 81 - DNA, 292 bp, Homo sapiens
  misc_feature (1)...(292): n = A,T,C or G
ggaagcagcactggtggtgcctcagccatggcctggaccgttctcctcctcggcctcctctctcactgcacagattctgtgacttcctatgtgttgactcagacaccctcagtgtcagtggccccaggaaagacggccaagattacctgtgggggaaacaatattgggagtcacaatgtacactggtattaccagaagccaggccaggcccctgtcctaatcatctcttttgataacgaccggncctcanggatatctgagcgattctctggcttcaattctggggacatgg

SEQ ID NO: 82 - DNA, 284 bp, Homo sapiens
  misc_feature (1)...(284): n = A,T,C or G
aatgaaaaggccctattgctatgcaatctggtccaaaaccactcttcaggaaggatgtcttcactggtgggccccacgcaaagcttcttcatgagggaatctaagactttgggggctgtccagattatgaatgggctcttccacattgccctggggggtcttctgatgatcccagcagggatctatgcacccatctgtgtgactgtgtggtaccctctctggggaggcattatgtatattatttccggatcactcctgcancaacggaaaaaactccaggaagt

SEQ ID NO: 83 - DNA, 374 bp, Homo sapiens
cctaggcatgacaatcggaggactcgagggggatggaggactagtgatcggctggctgcttccagtcgattagagaggtgaaaaagctgaacgtgtgccagtaatcttcaaaaggcagaacatatcacctctgccccgtaaactgttctctccgagggaaaaaatggaagttatcctcacagttcactgccgtggtatttcttcttgtcccatcttttgcatgacttgccatggtacagccttgtttcaaactgttcactgtgatctgtgggtctttgagtttcagtgagtttgctgaaatgtcgaagaagtagttccaaacttcaatgttcaatgaaatttttgttcaagtttgaaatggagagagcagcttt

SEQ ID NO: 84 - DNA, 357 bp, Homo sapiens
catgagggtccccgctcagctcctggggctcctgctgctctggctcccaggtgccaaatgtgacatccagatgacccaatctccttccaccctgtctgcatctgtcggagatacagttacaataagttgtcgggcctctcagaatatagatcggtggttggcctggcatcaacagaaaccaggcaaagcccctaatgtcctaatttatgcgacttccagtttagaagaaggggtctcattaagatttactggcagtggatctgggacacaattcaatttaaccatcaccagtctgcagcctgacgattcagcaacttattattgtcaacattattctgcatctcttcgcagttttgg

SEQ ID NO: 85 - DNA, 372 bp, Homo sapiens
ccaccctgaccatcaacaggatcgaagccggcgatgaggccgactattactgtcaagtgtgggatcttaataatgaccatgtcgtcttcggcggaggaaccaaactggccgtcctaggtcagcccaaggctgccccctcggtcactctgttcccgccctcctctgaggagcttcaagccaacaaggccacactggtgtgtctcataagtgacttctacccgggagccgtgacagtggcctggaaggcagatagcagccccgtcaaggcgggagtggagaccaccacaccctccaaacaaagcaacaacaagtacgcggcagcagctatctgagcctgacgcctgagcagtggaagtcccacagaagctacag

SEQ ID NO: 86 - DNA, 111 bp, Homo sapiens
  misc_feature (1)...(111): n = A,T,C or G
cgaagtcctgggaggaacctgctcantctgggcctaangaancagcactggtggtgcctnanccatngactggaccgttctnactcctcngncttctctttcactncacan

SEQ ID NO: 87 - DNA, 357 bp, Homo sapiens
  misc_feature (1)...(357): n = A,T,C or G
ccaccctgaccatcaacagggtcgaagccggcgatgaggccgactattactgtcaagtgtgggatcttaataatgaccatgtcgtcttcggcggaggaaccaaactggccgtcctaggtcagcccaaggctgccccctcggtcactctgttcccgccctcctctgaggagcttcaagccaacaaggccacactggtgtgtctcataagtgacttctacccgggagccgtnacagtggcctggaaggcagatagcagccccgtcaaggcgggagtggagaccaccacaccctncaaacaaagcaacaacaagtacgcggccagcagctatctgagcctgacgcctgagcagtggaagt

SEQ ID NO: 88 - DNA, 308 bp, Homo sapiens
ctcagtctgggcctaaggaagcagcactggtggtgcctcagccatggcctggaccgttctcctcctcggcctcctctctcactgcacagactctgtgacctcctatgtgttgactcagacaccctcagtgtcagtggccccaggaaagacggccaagattacctgtgggggaaacaatattgggagtaacaatgtacactggtattaccagaagccaggccaggcccctgtcctaatcatctcttttgataacgaccggccctcagggatatctgagcgattctctggcttcaattctggggacatgg

SEQ ID NO: 89 - DNA, 206 bp, Homo sapiens
  misc_feature (1)...(206): n = A,T,C or G
ccaccctgaccatcaacagggtcgaagccggcgatgaggccgactattactgtcaagtgtgggatcgtaataatgaccatgtcgtcttcggcggagggaccaaactggccgtcctaggtcagcccaaggctgccccctcggnnactctgttcccgccctcctctgaggagcttcaagccaacaaggccacactggtgtgtctcata

SEQ ID NO: 90 - DNA, 373 bp, Homo sapiens
ctgtagcttctgtgggacttccactgctcaggcgtcaggctcagatagctgctggccgcgtacttgttgttgctttgtttggagggtgtggtggtctccactcccgccttgacggggctgctatctgccttccaggccactgtcacggctcccgggtagaagtcacttatgagacacaccagtgtggccttgttggcttgaagctcctcagaggagggcgggaacagagtgaccgagggggcagccttgggctgacctaggacggccagtttggtccctccgccgaagacgacatggtcattattatgatcccacacttgacagtaatagtcggcctcatccccggcttcgaccctgttgatggtcagggtgg

SEQ ID NO: 91 - DNA, 347 bp, Homo sapiens
cccgctcagctcctggggctcctgctgctctggctcccaggtgccaaatgtgacatccagatgacccaatctccttccaccctgtctgcatctgtcggagatacagttacaataagttgtcgggcctctcagaatatagatcggtggttggcctggcatcaacagaaacctggcaaagcccctaatgtcctaatttatgcgacttccagtttagaagaaggggtctcattaagatttactggcagtggatctgggacacaattcaatttaaccatcaccagtctgcagcctgacgattcagcaacttattattgtcaacattattctgcatctcttcgcagttttgg

SEQ ID NO: 92 - DNA, 421 bp, Homo sapiens
ctgtagcttctgtgggacttccactgctcaggcgtcaggctcagatagctgctggccgcgtacttgttgttgctttgtttggagggtgtggtggtctccactcccgccttgacggggctgctatctgccttccaggccactgtcacggctcccgggtagaagtcacttatgagacacaccagtgtggccttgttggcttgaagctcctcagaggagggcgggaacagagtgaccgagggggcagccttgggctgacctaggacggccagtttggtccctccgccgaagacgacatggtcattattacgatcccacacttgacagtaatagtcggcctcatcgccggcttcgaccctgttgatggtcagggtggccatgtccccagaattgaagccaggccaggcccctgtcctaatcatct

SEQ ID NO: 93 - DNA, 324 bp, Homo sapiens
  misc_feature (1)...(324): n = A,T,C or G
ctgtagcttctgtggnacttccactgctcaggcgtcaggctcagatagctgctggccgcgtacttgttgttgctttgtttggagggtgtggtggtctccactcccgccttgacggggctgctatctgccttccaggccactgtcacggctcccgggtagaagtcacttatgagacacaccanngnggccttgntggcttgaagctcctnagaggagggcgggaacagagtgaccgagggggcagccttgggctgacctaggacggccagtttggtccctncgccnaanacgacntggtcattattacngatcccacacttgaca

SEQ ID NO: 94 - DNA, 150 bp, Homo sapiens
  misc_feature (1)...(150): n = A,T,C or G
ctgtagcttctgtggnncttccactgctcangcgtcaggctcagatagctgctggccgcgtacttgttgttgctttgtttgnagggtgtgnnggtctccactcccgnnttgacggggctgctatctgccttccaggccactgtcacggct

SEQ ID NO: 95 - DNA, 167 bp, Homo sapiens
  misc_feature (1)...(167): n = A,T,C or G
ctgtagcttctgcnggacttccactgctcaggcgtcaggctcagatagctgctggccgcgtacttgttgntgctttgtttggagggtgtggtggnctccactcccgncttgacggggctgnnatctgccttccaggccactgtcacggntcccggntagaagtcact

SEQ ID NO: 96 - DNA, 307 bp, Homo sapiens
  misc_feature (1)...(307): n = A,T,C or G
ctgtagcttctgtgggncttccactgctcaggcgtcaggctcagatagctgctggccgcgtacttgttgttgctttgtttggagggtgtggtggtctccactcccgccttgacggggctgctatctgccttccangccactgtcacggctcccgggtagaagtcacttatgagacacaccagtgtggccttgttggcttgaagctcctcanagganggcggnaacagagtgaccganggggcanccttgggctgacctangacggccagttnggtccctccgccgaanacgacatggtcattattac

SEQ ID NO: 97 - DNA, 571 bp, Homo sapiens
  misc_feature (1)...(571): n = A,T,C or G
ctgtagcttctgtgggacttccactgctcaggcgtcaggctcagatagctgctggccgcgtacttgttgttgctttgtttggagggtgtggtggtctccactcccgccttgacggggctgctatctgccttccaggccactgtcacggctcccgggtagaagtcacttatgagacacaccagtgtggccttgttggcttgaagctcctcagaggagggcgggaacagagtgaccgagggggcagccttgggctgacctcaatctgggtctggatcctggctctgggtcccagctctgtgattcccgagcatcagccccgagggcactgggtccttctaaagtctcccangaggtgcctccctcagaccccttgttcccaattccccaggagatggaacccacgtaacccaagggtaaacctgttccgacaagaacccagactgagggggccagaacagaacaaggcttanagacccagtctgcgcctgtcagacacacaaagagacaaacagagagagagagacagacagacagacngacagacgaggctcagtaggtcattctatctagt

SEQ ID NO: 98 - DNA, 337 bp, Homo sapiens
  misc_feature (1)...(337): n = A,T,C or G
ctgtagcttctgtgggncttccactgctcaggcgtcaggctcagatagctgctggccgcgtacttgttgttgctttgtttggagggtgtggtggtctccactcccgccttgacggggctgctatctgccttccaggccactgtcacggctcccgggtagaagtcacttatgagacacaccagtgtggccttgttggcttgaagctcctcagaggagggcgggaacagagtgaccgagggggcagccttgggctgacctaggacggccagtttggtccctccgccgaagacgacatggtcattattacnatcccacacttnacagtaatagtcggcct

SEQ ID NO: 99 - DNA, 342 bp, Homo sapiens
  misc_feature (1)...(342): n = A,T,C or G
ccaccctgaccatcaacagggtcgaagccggcgatgaggccgactattactgtcaagtgtgggatcgtaataatgaccatgtcgtcttcggcggannaaccaaactggccgnnctaggtcagcccaannctgccccctnggtnactcatgntcnngccctcctctgaggagcttcaagccaacaaggccacactggtgtgtctcataantgacttctacccgggagccgtgacagtggcctggaaggcanatagcanccccgtcaaggcggnagtgganaccacnacancctccaaacaaagcaacaacaagtacgcggncagnagctatctgagtcctgac

SEQ ID NO: 100 - DNA, 366 bp, Homo sapiens
  misc_feature (1)...(366): n = A,T,C or G
ctgtagcttctgtgggacttccactgctcaggcgtcaggctcagatagctgctggccgcgtacttgttgttgctttgtttggagggtgtggtggtctccactcccgccttgacggggctgctatctgccttccaggccactgtcacggctcccgggtagaagtcacttatgagacacaccagtgtggccttgttggcttgaagctcctcagaggagggcgggaacagagtgaccgagggggcagccttgggctgacctaggacggccagttttggtccctccgtcgaagacnacatggtcattattacgatcccacacttgacagtaatagncggnctcatcgccggcttcnaccctgttgatggt

SEQ ID NO: 101 - DNA, 131 bp, Homo sapiens
  misc_feature (1)...(131): n = A,T,C or G
ctgtagcttctgtgggncttccactgctcangcgtcaggctcagatagctgctggccgcgtacttgttgttgctttgtttggagggtgtggnggtctccactcccgccttgacggggctgctatctgcctt

SEQ ID NO: 102 - DNA, 330 bp, Homo sapiens
  misc_feature (1)...(330): n = A,T,C or G
ctgtagcttctgtggnacttccactgctcaggcgtnaggctcagatagctgctggccgcgtacttgttgttgctttgtttggagggtgtggtggtctccactcccgccttgacggggctgctatctgccttccaggccactgtcacggctcccgggtagaagtcacttatgagacacaccagtgtggccttgttggcttgaagctcctcagaggagggcgggaacanagtgaccgagggggcanncttgngctgacctangacggccagtttggtccctccgccgaagacgacatggtcattattacgatcccacacttgacagtaatag

SEQ ID NO: 103 - DNA, 369 bp, Homo sapiens
  misc_feature (1)...(369): n = A,T,C or G
cttctgtgggacttccactgctcaggcgtnaggctcanatagctgctggccgcgtacttgttgttgctttnnttggagggtgtggtggtcnncactcccgccttgacggggctgctatctgccttccaggccactgtcacggctcccgggtagaagtcacttatgagacacaccantgtggccttgttggcttgaagctcctcanaggagggcgggaacagagtgaccgagggggcagccttgggctgacctaggacggccagtttggtccctccgccgaagacgacatggtcattattacgatcccacacttgacagtaatagtcggcctcatcgccggcttcgaccctgttgatggtcagggtggcc

SEQ ID NO: 104 - DNA, 254 bp, Homo sapiens
  misc_feature (1)...(254): n = A,T,C or G
ccaccctgaccatcaacagggtcgaagccggcgatgaggccgactattactgtcaagtgtgggatcgtaataatgaccatgtcntcttcngnggagggaccaaactggccgtcctaggtcagcccaaggctgccccctcggtcactctgttcccgccctcctctgaggagcttcaagccaacaaggccacactggtgtgtctcataagtgacttctacccgggagccgtgacagtggcctggaaggcagatagc

SEQ ID NO: 105 - DNA, 366 bp, Homo sapiens
  misc_feature (1)...(366): n = A,T,C or G
caggacacagcatggacatgagggtccccgctcagctcctggggctcctgctgctctggctcccaggtgccaaatgtgacatccagatgacccaatctccttccaccctgtctgcatctgtcggagatacagttacaataagttgncgggcctctcanaatatagatcggtggttggcctggcatcaacagaaaccaggcaaagcccctaatgtcctaatttatgcgacttccagtttagaagaaggggtctcattaagatttactggcagtggatctgggacacaattcaatttaaccatcaccagtctgcagcctgacgattcagcaacttattattgtcaacattattntgcatctcttngca

SEQ ID NO: 106 - DNA, 485 bp, Homo sapiens
  misc_feature (1)...(485): n = A,T,C or G
aaaaatggagagtctgaattttattagagctcacacaccatatattaacatatacaactgtgaaccagctaatccctctgagaaaaactccccatctacccaatactgttacagcatacaatctctgttcttgggcattttgtcagtgatgctgatctttgccttcttccaggaacttgtaatagctggcatcgttgagaatgaatggaaaagaacgtgctccagacccaaatctaacatagttctcctgtcggcagaagaaaaaaaagaacagactattgaaataaaagaagaagtggttgggctaactgaaacatcttcccaaccaaagaatgaagaagacattgaaattattccaatccaagaagaggaagaagaagaaacagagacgaactttccagaacctccccaagatcaggaatcctcaccaatagaaaatgacagctctccttaagtgatttcttctgttttctgnttcctttttt

SEQ ID NO: 107 - DNA, 373 bp, Homo sapiens
ccaccctgaccatcaacagggtcgaagccggcgatgaggccgactattactgtcaagtgtgggatcgtaattatgaccatgtcgtcttcggcggagggaccaaactggccgtcctaggtcagcccaaggctgccccctcggtcactctgttcccgccctcctctgaggagcttcaagccaacaaggccacactggtgtgtctcataagtgacttctacccgggagccgtgacagtggcctggaaggcagatagcagccccgtcaaggcgggagtggagaccaccacaccctccaaacaaagcaacaacaagtacgcggccagcagctatctgagcctgacgcctgagcagtggaagtcccacagaagctacag

SEQ ID NO: 108 - DNA, 75 bp, Homo sapiens
  misc_feature (1)...(75): n = A,T,C or G
ctgtagcttctgtgggacttccactgctcaggcgtcaggctcanatanctgctggccgcgtacttgttgttgctt

SEQ ID NO: 109 - DNA, 485 bp, Homo sapiens
  misc_feature (1)...(485): n = A,T,C or G
aaaaatggagagtctgaattttattagagctcacacaccatatattaacatatacaactgtgaaccagctaatccctctgagaaaaactccccatctacccaatactgttacagcatacaatctctgttcttgggcattttgtcagtgatgctgatctttgccttcttccaggaacttgtaatagctggcatcgttgagaatgaatggaaaagaacgtgctccagacccaaatctaacatagttctcctgtcagcagaagaaaaaaaagaacagactattgaaataaaagaagaagtggttgggctaactgaaacatcttcccaaccaaagaatgaagaagacattgaaattattccaatccaagaagaggaagaagaagaaacagagacgaactttccagaacctccccaagatcaggaatcctcaccaatagaaaatgacagctctccttaagtgatttcttctgttttctgnttcctttttt

SEQ ID NO: 110 - DNA, 561 bp, Homo sapiens
  misc_feature (1)...(561): n = A,T,C or G
aaggaagcagcactggtggtgcctcagccatggcctggaccgttctcctcctcggcctcctctctcactgcacaggtgatccccccagggtctcaccaacctgcccagcccaaggcttctgggtccagcgtgtccttaattctgagctcaggagggcccttcctgtggtgggcaggatgctcatgaccctggtgcagggtgggaggctggtggggctgaattccccccaaactgtgctcaaggacttgtgagaacctgagggactgcacctgccaagagaaagtagtgagttttcagttcgaagtctccatacaacaggacatttgtgggccactggggctacggctgattgcaggggataccctgagggtttacagactctctggattttgtctgggacagcaggacaagggatttcaaaaggaatacctttcacttggaaggcaacctctctgncatttattcttttgnttatttatttatttttttatttattcttatctttgcagactctgtgacctcctatgtgttgactcagacaccctcagtgtcagtggcccc

SEQ ID NO: 111 - DNA, 255 bp, Homo sapiens
  misc_feature (1)...(255): n = A,T,C or G
ccaccctgaccatcaacagggtcgaagccggcgatgaggccgactattactgtcaagtgtgggatcgtaataatgaccatgtcgtcttcggcggagggaccaaactggccgtcctaggtcagcccaaggctgccccctcggtcactctgttcccgccctcctctgaggagcttcaagccaacaaggccacactggtgtgtctcataagtgacttctacccggnagccgtgacagtggcctggaaggcanatagca

SEQ ID NO: 112 - DNA, 365 bp, Homo sapiens
  misc_feature (1)...(365): n = A,T,C or G
ctgtagcttctgtgggacttccactgctcangcgtcangctcagatagctgctggccgcgtacttgttgttgctttgtttggagggtgtggtggtctccactcccgccttgacggggctgctatctgccttccaggccactgtcacggctcccgggtagaagtcacttatgagacacaccagtgtggccttgttggcttgaagctcctcataggagggcggnaacagantgaccganggggcagccttgngctgacctaggacggccagtttggtccctccgccgaagacgacatggtcattattacgatcccacacttgacagtaatagtcggcctcatngccggcttcgaccctgttgatggt

SEQ ID NO: 113 - DNA, 66 bp, Homo sapiens
  misc_feature (1)...(66): n = A,T,C or G
ctgtagcttccnccggacttccactgctcangcgtcaggctcagatagctgctggccgcgtacttg

SEQ ID NO: 114 - DNA, 94 bp, Homo sapiens
  misc_feature (1)...(94): n = A,T,C or G
ctgtagcttctgtnggacttccactgctcaggcgtcaggctcagatagctgctggccgcgtacttgttattgctttgnttggagggngtggtgg

SEQ ID NO: 115 - DNA, 386 bp, Homo sapiens
  misc_feature (1)...(386): n = A,T,C or G
ctgtagcttctgtgggacttccactgctcaggcgtcaggctcagatagctgctggccgcgtacttgttgttgctttgtttggagggtgtggtggtctccactcccgccttgacggggctgctatctgccttccaggccactgtcacggctcccgggtagaagtcacttatgagacacaccagtgtggccttgttggcttgaagctcctcagaggagggcgggaacagagtgaccgagggggcagccttgggctgacctannacggccagtttggtccctccgccnaagacgacatggttcattattacgatcccacacttgacagtaatagtcggcctcatcgccggcttcnaccctgttgatggtcagggtggctgttcatgctt

SEQ ID NO: 116 - DNA, 188 bp, Homo sapiens
  misc_feature (1)...(188): n = A,T,C or G
ccaccctgaccatcaacagggtcgaagccggcgatgaggccgactattactgtcaagtgtgggatcgtaataatgaccatgtcgtcttcngcggagggaccaaactggccgtcctaggtcancccaaggctgccccctcggtcactctgttcccgccctcctctgangagcttcaanccaacaaggcc

SEQ ID NO: 117 - DNA, 308 bp, Homo sapiens
  misc_feature (1)...(308): n = A,T,C or G
ctgtagcttctgtgggncttccactgctcanncgtcaggctcagatagctgctggccgcgtacttgttgttgctttgtttggagggtgtggtggtctccactcccgccttgacggggctgctatctgccttccaggccactgtcacggctcccgggtagaagtcacttatgagacacaccantgtggccttgttggcttgaagctcctcagaggagggcgggaacanantgaccganggggcagccttgggctgacctangacggccagtttggttcctccgccnaanacgacatggtcaattattaa

SEQ ID NO: 118 - DNA, 203 bp, Homo sapiens
  misc_feature (1)...(203): n = A,T,C or G
ctgtagcttctgtgnnncttccactgctcaggcgtcaggctcagatagctgctggccgcgtacttgttgttgctttgtttggagggtgtggtggtctccactcccgccttgacggggctgctatctgccttccaggccactgtcacggctcccgggtagaagtcacttatgagacacaccagtgtggccttgntggcttgaag

SEQ ID NO: 119 - DNA, 293 bp, Homo sapiens
  misc_feature (1)...(293): n = A,T,C or G
ccaccctgaccatcaacagggtcgaagccggcgatgaggccgactattactgtcaagtgtgggatcgtaataatgaccatgtcgtcttcggcggagggaccaaactggccgtcctaggtcagcccaaggctgccccctcggtcactctgttcccgccctcctctgaggagcttcaagccaacaaggccacactggtgtgtctcataagtgactttctacccgggagccgtgacantggcctgnaaggcanatagcangnnccgtcaaggcggnagtggagaccaccacaccct

SEQ ID NO: 120 - DNA, 266 bp, Homo sapiens
  misc_feature (1)...(266): n = A,T,C or G
ctaaggaagcagcactggtggtgcctcagccatggcctggaccgttctcctcctcggcctcctctctcactgcacagactctgtgacctcctatgtgttgactcagacaccctcagtgtcagtggccccangaaagacggccaagattacctgtgggggaaacaatattgggagtaacaatgtacactggtattaccagaagccnggccangcccctgttcctaatcatctcttttgataacgaccggnnctcagggatatctgag

SEQ ID NO: 121 - DNA, 210 bp, Homo sapiens
  misc_feature (1)...(210): n = A,T,C or G
ctgtagcttctgtnggacttccactgctcaggcgtcaggctcagatagctgctggccgcgtacttgttgttactttgtttggagggtgtggtggtctccactcccgccttgacggggctgctatctgccttccaggccactgtcacggctcccgggtagaagtcacttatgagacacaccantgtggccttgttggcttgaagctcctca

SEQ ID NO: 122 - DNA, 292 bp, Homo sapiens
ccatgtccccagaattgaagccagagaatcgctcagatatccctgagggccggtcgttatcaaaagagatgattaggacaggggcctggcctggcttctggtaataccagtgtacattgttactcccaatattgtttcccccacaggtaatcttggccgtctttcctggggccactgacactgagggtgtctgagtcaacacataggaggtcacagagtctgtgcagtgagagaggaggccgaggaggagaacggtccaggccatggccgaggcaccaccagtgctgcttcc

SEQ ID NO: 123 - DNA, 474 bp, Homo sapiens
  misc_feature (1)...(474): n = A,T,C or G
ggaagcagcactggtggtgcctcagccatggcctggaccgttctcctccccggcctcctctctcactgcacagactctgtgacctcctatgtgttgactcagacaccctcagtgtcagtggccccaggaaagacggccaagattacctgtgggggaaacaatattgggagttacagtgtacactggtattaccaaaagccaggccaggcccctgtcctaatcatctcttttgataacgaccggccgcccgggcaggtccaatgaagatactccacagttgtatgtggcctgtggtaggggaccccgatcatctctgagagtcctaagacatggacttgaggtgtcagaaatggctgtttctgagctacctggtnaccccaaacgctgtctggacagtgcgtcgacacattgaagatgagtttgatgcctacatcattgtgtctttcgtgaatgccaccctagtgttgtccattg

SEQ ID NO: 124 - DNA, 200 bp, Homo sapiens
  misc_feature (1)...(200): n = A,T,C or G
ccaccctgaccatcaacagggtcgaagccggcgatgaggccgactattactgtcaagtgtgggatcgtaataatgaccatgtcgtcttcggcgganngaccaaactggccgtcctaggtcagcccaaggctgccccctcggtcactctgttcccgccctcctctgaggagcttcaagccaacaaggccacactggtgtgt

SEQ ID NO: 125 - DNA, 155 bp, Homo sapiens
  misc_feature (1)...(155): n = A,T,C or G
ctgtagcttcngccggacttccactgctcaggcgtcaggctcagatagctgctggccgcgtacttgttgttgctttgtttggagggtgtggtggtctccactcccgccttgacggggctgctatctgccttccaggccactgtcacggctcccgg

SEQ ID NO: 126 - DNA, 160 bp, Homo sapiens
  misc_feature (1)...(160): n = A,T,C or G
ccaccctgaccatcaacagggtcgaagccggcgatgaggccgactattactgtcaagtgtgggatcttaatgatgaccatgtcgtcttcggcggangaaccaaactggccgtcctaggtcagcccaaggctgccccctcggtcactctgtnnccgccctc

SEQ ID NO: 127 - DNA, 201 bp, Homo sapiens
  misc_feature (1)...(201): n = A,T,C or G
ccaccctgaccatcaacagggtcgaagccggcgatgaggccgactattactgtcaagtgtgggatcgtaataatgaccatgtcgtcttcggcgganngaccaaactggccgtcctaggtcagnccaaggctgncccctcggtcactctgttcccgccctcctntgangagcttcaagccaacaaggccacactggtgtgtc

SEQ ID NO: 128 - DNA, 198 bp, Homo sapiens
  misc_feature (1)...(198): n = A,T,C or G
ctgtagcttctgnnggncttccactgctcaggcgtcaggctcanatagctgctggccgcgtacttgttgttgctttgtttggagggtgtggtggtctccactcccgccttgacggggctgctatctgccttccaggccactgtcacggctcccgggtagaagtcactttatganacacaccantgtggccttgttggc

SEQ ID NO: 129 - DNA, 485 bp, Homo sapiens
  misc_feature (1)...(485): n = A,T,C or G
aaaaaaggaaacanaaaacagaagaaatcacttaaggagagctgtcattttctattggtgaggattcctgatcttggggaggttctggaaagttcgtctctgtttcttcttcttcctcttcttggattggaataatttcaatgtcttcttcattctttggttgggaagatgtttcagttagcccaaccacttcttcttttatttcaatagtctgttcttttttttcttctgctgacaggagaactatgttagatttgggtctggagcacgttcttttccattcattctcaacgatgccagctattacaagttcctggaagaaggcaaagatcagcatcactgacaaaatgcccaagaacagagattgtatgctgtaacagtattgggtagatggggagtttttctcagagggattagctggttcacagttgtatatgttaatatatggtgtgtgagctctaataaaattcagactctccattttt

SEQ ID NO: 130 - DNA, 77 bp, Homo sapiens
  misc_feature (1)...(77): n = A,T,C or G
ctgtagcttctgtnggacttccactgctcaggcgtcaggctcagatagctgctggccgcgtacttgttgttgctttg

SEQ ID NO: 131 - DNA, 161 bp, Homo sapiens
  misc_feature (1)...(161): n = A,T,C or G
ctgtagcttctgtnggacttccactgctcaggcgtcaggctcagatagctgctggccgcgtacttgttgttgctttgtttggagggtgtggtggtctccactcccgccttgacggggctgctatctgccttccaggccactgtcacggctcccgggtagaa

SEQ ID NO: 132 - DNA, 294 bp, Homo sapiens
  misc_feature (1)...(294): n = A,T,C or G
ccaccctgaccatcaacagggtcgaagccggcgatgaggccgactattactgtcaagtgtgggatcataataatgaccatgtcgtcttcggcggagggaccaaactggccgtcctaggtcagcccaaggctgccccctcggtcactctgttcccgccctcctctgaggagcttcaagccaacaaggccacactggtgtgtctcataagtgacttctacccgggagccgtgacantnncctggaaggcanatancagccccgtcaangcgggagtgganaccaccacaccctcca

SEQ ID NO: 133 - DNA, 298 bp, Homo sapiens
  misc_feature (1)...(298): n = A,T,C or G
ccaccctgaccatcaacagggtcnaagccggcgatgaggccgactattactgtcaagtgtgggatcgtaataatgaccatgtcgtcttcggcggagggaccaaactggccgtcctaggtcagcccaaggctgccccctcggtcactctgntcccgncctcctntgangagcttcaagccaacaaggccacactggtgtgtctcataagtgacttctacccgggagccgtgacagtggcctggaaggcantatagcagccccgtcaaggcgggagtggagaccaccacaccctccaaac

SEQ ID NO: 134 - DNA, 373 bp, Homo sapiens
  misc_feature (1)...(373): n = A,T,C or G
ctgtagcttctgtgggacttccactgttcaggcgtcaggctcagatagctgctggccgcgtacttgttgttgctttgtttggagggtgtggtggtctccactcccgccttgacggggctgctatctgccttccaggccactgtcacggctcccgggtagaagtcacttatgagacacaccagtgtggccttgttggcttgaagctcctcagaggagggcgggaacagagtgaccgagggggcagccttgggctgacctangacggccagtttggtccctccaccgaagacgacatggtcattattacgatcccacacttgacagtaatagtcggcctcatcgccggcttcgaccctgttgatggtcagggtgg

SEQ ID NO: 135 - DNA, 487 bp, Homo sapiens
  misc_feature (1)...(487): n = A,T,C or G
aaaaatggagagtctgaattttattagagctcacacaccatatattaacatatacaactgtgaaccagctaatccctctgagaaaaactccccatctacccaatactgttacagcatacaatctctgttcttgggcattttgtcagtgatgctgatctttgccttcttccaggaacttgtaatagctggcatcgttgagaatgaatggaaaagaacgtgctccagacccaaatctaacatagttctcctgtcagcagaagaaaaaaaagaacagactattgaaataaaagaagaagtggttgggctaactgaaacatcttcccaaccaaagaatgaagaagacattgaaattattccaatccaagaagaggaagaagaagaaacagagacgaactttccagaacctccccaagatcaggaatcctcacnaatagaaaatgacagctctccttaagtgatttcttctgttttctgtttttcctttttt

SEQ ID NO: 136 - DNA, 368 bp, Homo sapiens
acagcatggacatgagggtccccgctcagctcctggggctcctgctgctctggctcccaggtgccaaatgtgacatccagatgacccaatctccttccaccctgtctgcatctgtcggagatacagttacaataagttgtcgggcctctcagaatatagatcggtggttggcctggcatcaacagaaaccaggcaaagcccctaatgtcctaatttatgcgacttccagtttagaagaaggggtctcattaagatttactggcagtggatctgggacacaattcaatttaaccatcaccagtctgcagcctgacgattcagcaacttattattgtgcaacattattctgcatctcttcgcagttttgg

SEQ ID NO: 137 - DNA, 59 bp, Homo sapiens
  misc_feature (1)...(59): n = A,T,C or G
ctgtagcttctgtgggncttccactgctcgggcgtcaggctcaggtagctgctggccgc

SEQ ID NO: 138 - DNA, 357 bp, Homo sapiens
  misc_feature (1)...(357): n = A,T,C or G
ccaccctgaccatcaacagggtcgaagccggcgatgaggccgactattactgtcaagtgtgggatcgtaataatgaccatgtcgtcttcggcggagggaccaaactggccgtcctaggtcagcccaaggctgccccctcggtcactctgttcccgccctcctctgannagcttnaagccaacaaggccacactggtgtgtctcataagtgacttctacccgggagccgtgacagtggcctggaaggcagatagcagccccgtcaaggcgggagtggagaccaccacaccctccaaacaaagcaacaacaagtacncggccagcanctatctgagcctgacgcctgagcagtggaagt

SEQ ID NO: 139 - DNA, 79 bp, Homo sapiens
ctgtagcttctgtgggacttccactgctcaggcgtcaggctcagatagctgctggccgcgtacttgttgttgctttgtt

SEQ ID NO: 140 - DNA, 239 bp, Homo sapiens
  misc_feature (1)...(239): n = A,T,C or G
ctgtagcttctgtgggacttccactgctcaggcgtcaggctcagatagctgctggccgcgtacttgttgttgctttgttnngagggtgtggnngtctccactcccgccttganngggctgctatcnnccttccagagccacnntcacggctcccgggtagaagtcacttatgagacacaccantgtggccttgttngcttnaagctcctcagaggagggcgggaacagagtgaccgagg

SEQ ID NO: 141 - DNA, 373 bp, Homo sapiens
ccaccctgaccatcaacagggtcgaagccggcgatgaggccaactattactgtcaagtgtgggatcgtaataatgaccatgtcgtcttcggcggagggaccaaactggccgtcctaggtcagcccaaggctgccccctcggtcactctgttcccgccctcctctgaggagcttcaagccaacaaggccacactggtgtgcctcataagtgacttctacccgggagccgtgacagtggcctggaaggcagatagcagccccgtcaaggcgggagtggagaccaccacaccctccaaacaaagcaacaacaagtacgcggccagcagctatctgagcctgacgcctgagcagtggaagtcccacagaagctacag

SEQ ID NO: 142 - DNA, 373 bp, Homo sapiens
ccaccctgaccatcaacagggtcgaagccggcgatgaggccgactattactgtcaagtgtgggatcgtaataatgaccatgtcgtcttcggcggagggaccaaactggccgtcctaggtcagcccaaggctgccccctcggtcactctgttcccgccctcctctgaggagcttcaagccaacaaggccacactggtgtgtctcataagtgacttctacccgggagccgtgacagtggcctggaaggcagatagcagccccgtcaaggcgggagtggagaccaccacaccctccaaacaaagcaacaacaagtacgcggccagcagctatctgagcctgacgcctgagcagtggaagtcccacagaagctacag

SEQ ID NO: 143 - DNA, 267 bp, Homo sapiens
cacagtcatcaattatagaccccacaacatgcgccctgaagacagaatgttccatatcagagctgtgatcttgagagccctctccttggctttcctgctgagtctccgaggagctggggccatcaaggcggaccatgtgtcaacttatgccgcgtttgtacagacgcatagaccaacaggggagtttatgtttgaatttgatgaagatgagatgttctatgtggatctggacaagaaggagaccgtctggcatctggaggagtttgg

SEQ ID NO: 144 - DNA, 367 bp, Homo sapiens
cttctgtgggacttccactgctcaggcgtcaggctcagatagctgctggccgcgtacttgttgttgctttgtttggagggtgtggtggtctccactcccgccttgacggggctgctatctgccttccaggccactgtcacggctcccgggtagaagtcacttatgagacacaccagtgtggccttgttggcttgaagctcctcagaggagggcgggaacagagtgaccgagggggcagccttgggctgacctaggacggccagtttggttcctccgccgaagacgacatggtcattattaagatcccacacttgacagtaatagtcggccttatcgccggcttcgaccctgttgatggtcagggtgg

SEQ ID NO: 145 - DNA, 90 bp, Homo sapiens
  misc_feature (1)...(90): n = A,T,C or G
ccaccctnaccatcaacagggtcgaagccggggatgaggccgactattactgnnaagtgtgggatcataataatgaccatgtcgnnttcg

SEQ ID NO: 146 - DNA, 291 bp, Homo sapiens
ccatgtccccagaattgaagccagagaatcgctcagatatccctgagggccggtcgttatcaaaagagatgattaggacaggggcctggcctggcttctggtaataccagtgtacattgttactcccaatattgtttcccccacaggtaatcttggccgtctttcctggggccactgacactgagggtgtctgagtcaacacataggaggtcacagagtctgtgcagtgagagaggaggccgaggaggagaacggtccaggccatggctgaggcaccaccagtgctgcttc

SEQ ID NO: 147 - DNA, 244 bp, Homo sapiens
ccatgtccccagaattgaagccagagaatcgctcagatatccctgagggccagtcgttatcaaaagagatgattaggacaggggcccggcctggcttctggtaataccagtgtacattgttactcccaatattgtttcccccacaggtaatcttggccgtctttcctggggccactgacactgagggtgtctgagtcaacacataggaggtcacagagtctgtgcagtgagagaggaggccgag

SEQ ID NO: 148 - DNA, 513 bp, Homo sapiens
ccaagccttttcctttgaggctcagggcgggctggctaacattgctatattgaacaacaacttgaataccttgatccagcgttccaaccacactcaggccaccaacgatccccctgaggtgaccgtgtttcccaaggagcctgtggagctgggccagcccaacaccctcatctgccacattgacaagttcttcccaccagtgctcaacgtcacgtggctgtgcaacggggagctggtcactgagggtgtcgctgagagcctcttcctgcccagaacagattacagcttccacaagttccattacctgacctttgtgccctcagcagaggacttctatgactgcagggtggaacactggggcttggaccagccgctcctcaagcactgggaggcccaagagccaatccagatgcctgagacaacggagactgtgctctgtgccctgggcctggtgctgggcctagtcggcatcatcgtgggcaccgtcctcatcataaagtctctgcgttctgg

SEQ ID NO: 149 - DNA, 181 bp, Homo sapiens
cttctgtgggacttccactgctcaggcgtcaggctcagatagctgctggccgcgtacttgttgttgctttgtttggagggtgtggtggtctccactcccgccttgacggggctgctatctgccttccaggccactgtcacggctcccgggtagaagtcacttatgagacacaccagtgtgg

SEQ ID NO: 150 - DNA, 373 bp, Homo sapiens; identical to SEQ ID NO: 6

SEQ ID NO: 151 - DNA, 252 bp, Homo sapiens
cttctgtgggacttccactgctcaggcgtcaggctcagatagctgctggccgcgtacttgttgttgctttgtttggagggtgtggtggtctccactcccgccttgacggggctgctatctgccttccaggccactgtcacggctcccgggtagaagtcacttatgagacacaccagtgtggccttgttggcttgaagctcctcagaggagggcgggaacagagtgaccgagggggcagccttgggctgacct

SEQ ID NO: 152 - DNA, 499 bp, Homo sapiens
  misc_feature (1)...(499): n = A,T,C or G
cctcggatgatgaagacagtgcccaccacaatgcccacgaggcccacagacaaccccagggcgcagaccacagtctctgtgagctctgacataggggctggaatctcaggctcccagtgtttcagaagaggcttgtccagtccccagtgctccaccttgcagtcataactctcctcagcagaagggaggagggtgaggtaactgatcttgaagaaggaatgatcactcttggagaggaagctggtctcanaaacaccttctgtgactgagtgcccattgctcanccatgtgatgttgaccacaggaggaaagatgttgtccacaagacagatgaggatgttgggctgacccagtgtcacgggagacttggaaaacactgtgacctcaggaacctcattggtagcagcggtagagttggagcgtttaatcagactgttcaagttatgttttangacagcgatgtttgtcagtgcaaattgcgggtcaaatctaaattgtc

SEQ ID NO: 153 - DNA, 373 bp, Homo sapiens; identical to SEQ ID NO: 90

SEQ ID NO: 154 - DNA, 243 bp, Homo sapiens
  misc_feature (1)...(243): n = A,T,C or G
ctgtagcttctgngggacttccactgctcaggcgtcaggctcagatagctgctggccgcgtacttgttgttgctttgtttggagggtgtggnggtctccactcccgccttgacggggctgctatctgccttccaggccactgtcacngctcccgggtanaagtcacttnngagacacaccantgtggccttgntggcttgaanctcctcataggagggcgggaacagantgaccgagggggca

SEQ ID NO: 155 - DNA, 307 bp, Homo sapiens
  misc_feature (1)...(307): n = A,T,C or G
ccaccctgaccatcaacagggtcgaagccggcgatgaggccgactattactgtcaagtgtgggatcgtaataatgaccatgtcgtcttcggcggagggaccaaactggccgtcctaggtcagcccaaggctgccccctcggtcactctgttcccgccctcctctgaggagcttcaagccaacaaggccacactggtgtgtctcataagtgacttctacccgggagccgtgacagtggcctggaaggcagatagcanccccgtcaaggcgggagtggagaccaccacaccctccaaacaaagnaacaa

SEQ ID NO: 156 - DNA, 502 bp, Homo sapiens
ccatgtccccagaattgaagccagagaatcgctcagatatccctgagggccggtcgttatcaaaagagatgattaggacaggggcctggcctggcttctggtaataccagtgtacattgttactcccaatattgtttcccccacaggtaatcttggccgtctttcctggggccactgacactgagggtgtctgagtcaacacataggaggtcacagagttactttctcttggcaggtgcagtccctcaggttctcacaagtccttgagcacagtttggggggaattcagccccaccagcctcccaccctgcaccagggtcatgagcatcctgcccaccacaggaagggccctcctgagctcagaattaaggacacgctggacccagaagccttgggctgggcaggttggtgagaccctggggggatcacctgtgcagtgagagaggaggccgaggaggagaacggtccaggccatggctgaggcaccaccagtgctgcttcc

SEQ ID NO: 157 - DNA, 538 bp, Homo sapiens
  misc_feature (1)...(538): n = A,T,C or G
ctgtcccaaacgggccagccctggggctttggggctgggcctccgtgaggagaggtcagtcggtcagcggcccggggtggctgccctgagccccagggctggtcctggggtctgtcagtccttccccaggctttccaggtccagaaggctttgtggggtctggggctgtgtcagggtaaggaaagctgccttggtggaggaagagaagtcagagaggtcacacatgtggccttagaacctgctaagtccaacgtcagcatgtgacaggaggggaagtgaggcaagacggcagaacccaggggaaaaggtggcagggagtctgagagtgaggttgggaggaccagcatcttttaggccctgagcaagaaggaggtgaccggagtcttccaggtatccctccctcctagcttctggaagtgggagtcggggagggggctccagtcagtcangtgtaagctccatgccatggggactctgcaggacaggcaggcttgaggagccactgtgcctggacaggttctgcaggctcccccacttg

SEQ ID NO: 158 - DNA, 373 bp, Homo sapiens; identical to SEQ ID NO: 6

SEQ ID NO: 159 - DNA, 290 bp, Homo sapiens
  misc_feature (1)...(290): n = A,T,C or G
ctgtagcttctgtgggacttccactgctcaggcgtcaggctcagatagctgctggccgcgtacttgttgttgctttgtttggagggtgtggtggtctccactcccgccttgacggggctgctatctgccttccaggccactgtcacggctcccgggtagaagtcacttatgagacacaccagtgtggccttgttggcttgaagctcctcagaggagggcgggaacagagtgaccgagggggcagccttgggctgacctangacggccagtttgnnccctccgccgaagac

SEQ ID NO: 160 - DNA, 274 bp, Homo sapiens
  misc_feature (1)...(274): n = A,T,C or G
ctgtagcttctgtgggacttccactgctcaggcgtcaggctcagatagctgctggccgcgtacttgttgttgctttgtttggagggtgtggtggtctccactcccgccttgacggggctgctatctgccttccaggccactgtcacggctcccgggtagaagtcacttatgagacacaccantgtggccttgttggcttgaagctcctcanaggagggcgggaacagagtgaccgagggggcagccttgggctgacctaggacggccagtttgg

SEQ ID NO: 161 - DNA, 375 bp, Homo sapiens
gtcaggacacagcatggacatgagggtccccgctcagctcctggggctcctgctgctctggctcccaggtgccaaatgtgacatccagatgacccaatctccttccaccctgtctgcatctgtcggagatacagttacaataagctgtcgggcctctcagaatatagatcggtggttggcctggcatcaacagaaaccaggcaaagcccctaatgtcctaatttatgcgacttccagtttagaagaaggggtctcattaagatttactggcagtggatctgggacacaattcaatttaaccatcaccagtctgcagcctgacgattcagcaacttattattgtcaacattattctgcatctcttcgcagttttgg

SEQ ID NO: 162 - DNA, 288 bp, Homo sapiens
  misc_feature (1)...(288): n = A,T,C or G
ccaccctgaccatcaacagggtcgaagccggcgatgaggccgactattactgtcaagtgtgggatcgtaataatgaccatgtcgtcttcggcggagggaccaaactggccgtcctaggtcagcccaaggctgccccctcggtcactctgttcccgccctcctctgaggagcttcaagccaacaaggccacactggtgtgtctcataagtgacttctacccgggagccgtgacagtggcctggaaggcanatagcanccccgncaaggcgggagtggagaccaccacac

SEQ ID NO: 163 - DNA, 297 bp, Homo sapiens
ccaccctgaccatcaacagggtcgaagccggcgatgaggccgactattactgtcaagtgtgggatcgtaataatgaccatgtcgtcttcggcggagggaccaaactggccgtcctaggtcagcccaaggctgccccctcggtcactctgttcccgccctcctctgaggagcttcaagccaacaaggccacactggcgtgtctcataagtgacttctacccgggagccgtgacagtggcctggaaggcagatagcagccccgtcaaggcgggagtggagaccaccacaccctccaaac

SEQ ID NO: 164 - DNA, 395 bp, Homo sapiens
ccatgtccccagaattgaagccagagaatcgctcagatatccctgagggccggtcgttatcaaaagagatgattaggacaggggcctggcctggcttttggtaataccagtgtacactgtaactcccaatattgtttcccccacaggtaatcttggccgtctttcctggggccactgacactgagggtgtctgagtcaacacataggaggtcacagactctgtgcagtgagagaggaggccgaggaggagaacggtccaggccatggctgaggcaccaccagtgctgcttccttaggcaaagttatccctgtctgaaatggtatcttttgtgaggaggtctgacttgctgaggatttggactatgaaagagagaaccttgagtttcctgggaaag

SEQ ID NO: 165 - DNA, 292 bp, Homo sapiens; identical to SEQ ID NO: 29

SEQ ID NO: 166 - DNA, 193 bp, Homo sapiens
  misc_feature (1)...(193): n = A,T,C or G
gaaccgnacccgctccgtcccattgaagaaatgacactcagacgtagagtactccaagaaacgtggnctggtgtccccagccaaagccagtggggagctcancaccatcantgtcactgncagaactgncatgcaggaacctccagggagcctnagacacaccatgctgganaacaggacaggaccaggggcc

SEQ ID NO: 167 - DNA, 373 bp, Homo sapiens
  misc_feature (1)...(373): n = A,T,C or G
ctgtagcttctgtgggacttccactgctcaggcgtcaggctcagatagctgctggccgcgtacttgttgttgctttgtttggagggtgtggtggtctccactcccgccttgacggggctgctatctgccttccaggccactgtcacggctcccgggtagaagtcacttatgagacacaccagtgtggccttgttggcttgaagctcctcagaggagggcgggaacagagtgaccgagggggcagccttgggctgacctaggacggccagtttggtccctccgccgaagacgacatggtcattattacgatcccacacttgacagtaatagtcggcctcatngccggcttcgaccctgttgatggtcagggtgg

SEQ ID NO: 168 - DNA, 83 bp, Homo sapiens
  misc_feature (1)...(83): n = A,T,C or G
ccaccctgaccatcaacagggtcgaagccggngatgaggccgactattactgncaagtgtgggatcgtaataatgaccatgtc

SEQ ID NO: 169 - DNA, 466 bp, Homo sapiens
  misc_feature (1)...(466): n = A,T,C or G
ccttgcctcagatccaaggtcactcggaagaggccatgtctaccctcaatgacactcatggaggaaatgctgagagaagcattcagatgcatgacacaaggtaagactgccaaaaatcttgttcttgctctcctcattttgttatttgtttcatttttaggagttttgagagcaaaatgacaacacccagaaattcagtaaatgggactttcccggcagagccaatgaaaggccctattgctatgcaatctggtccaaaaccactcttcaggaggatgtcttcactggtgggccccacgcaaagcttcttcatgagggaatctaagactttgggggctgtccagattatgaatgggctcttccacattgccctggggggtcttctgatgatcccagcagggatctatgcacccatctgtgtgactgtgtggtaccctctctggggangaancggaagcataaagtg

SEQ ID NO: 170 - DNA, 429 bp, Homo sapiens
ccttgcctcagatccaaggtcactcggaagaggccatgtctaccctcaatgacactcatggaggaaatgctgagagaagcattcagatgcatgacacaaggtaagactgccaaaaatcttgttcttgctctcctcattttgttatttgttttatttttaggagttttgagagcaaaatgacaacacccagaaattcagtaaatgggactttcccggcagagccaatgaaaggccctattgctatgcaatctggtccaaaaccactcttcaggaggatgtcttcactggtgggccccacgcaaagcttcttcatgagggaatctaagactttgggggctgtccagattatgaatgggctcttccacattgccctggggggtcttctgatgatcccagcaggaatctatgcacccatctgtgtgactgtgt

SEQ ID NO: 171 - DNA, 553 bp, Homo sapiens
  misc_feature (1)...(553): n = A,T,C or G
ccttgcctcagatccaaggtcactcggaagaggccatgtctaccctcaatgacactcatggaggaaatgctgagagaagcattcagatgcatgacacaaggtaagactgccaaaaatcttgttcttgctctcctcattttgttatttgttttatttttaggagttttgagagcaaaatgacaacacccagaaattcagtaaatgggactttcccggcagagccaatgaaaggccctattgctatgcaatctggtccaaaaccactcttcaggaggatgtcttcactggtgggccccacgcaaggcttcttcatgagggaatctaagactttgggggctgtccagattatgaatgggctcttccacattgccctggggggtcttctgatgatcccagcagggatctatgcacccatctgtgtgactgtgtggtaccctctctggggaggcattatgtatattatttccggatcactcctggcagcaacggagaaaaactccaggaagtgtttggtcaaaggaaaaatgataatgaattcattnngcctctttgc

SEQ ID NO: 172 - DNA, 421 bp, Homo sapiens
  misc_feature (1)...(421): n = A,T,C or G
ccaatcatagagatatctgcaccagcctgcaaagcttccatgaacgctttggtcccagacttggcgatagtaccaaggttattgatcaagtcagccttggtcattccaattccagtatccacaatagtgagagttcgatcttgtttgttcggtataaggttaatatgcagctctttctcagagtctaatttactgggatctgtcaagctttcataccggattttgtccaatgcatctgatgaatttgaaatgagctctctcagaaagatctctttgttcgagtagaaagtattgatgatcaatgacatcaactgggcaatttctgcctgaaaggcgaacgtntnaacctcctnctcctccatcggttggtcttgggtctgggtttcctcangcatntggaacgacaccgcgccggtntacc

SEQ ID NO: 173 - DNA, 481 bp, Homo sapiens
  misc_feature (1)...(481): n = A,T,C or G
ccttgcctcanatccanggtcactcggaagaggccatgtctaccctcaatgacactcatggaggaaatgctganagaagcattcanatgcatgacacaaggtaagactgccaaaaatcttgntcttgctctcctcattttgttattngttttanttttaggagttntgagagcaaaatnacancacccagaaattcagtaaatgggactttcccggcaganccaatgaaaggccctattgctatgcaatctggtccaaaaccactcttcaggaggatgtnttcactggtgggccccacgcaaagcttcttcatgagggaatctaagactttgggggctgtccagattatgaatgggctcttccacattgccctggggggtcttctgatgatcccancagggatctatgcncccatctgtgtgactgtgtggtaccctctctggggaggcattatgtatattatttccggatcactcctggc

SEQ ID NO: 174 - DNA, 110 bp, Homo sapiens
  misc_feature (1)...(110): n = A,T,C or G
cccgggctggcttacctgggcaccgtgggcatgggggaggtgtgtcacaagatttgggctctgcagagagaanattgggagttacggggatctgggatngaggtggntgc

SEQ ID NO: 175 - DNA, 372 bp, Homo sapiens
aggacacagcatggacatgagggtccccgctcagctcctggggctcctgctgctctggctcccaggtgccaaatgtgacatccagatgacccaatctccttccaccctgtctgcatctgtcggagatacagttacaataagttgtcgggcctctcagaatatagatcggtggttggcctggcatcaacagaaaccaggcaaagcccctaatgtcctaatttatgcgacttccagtttagaagaaggggtctcattaagatttactggcagtggatctgggacacaattcaatttaaccatcaccagtctgcagcctgacgattcagcaacttattattgtcaacattattctgcatctcttcgcagttttgg

SEQ ID NO: 176 - DNA, 373 bp, Homo sapiens
  misc_feature (1)...(373): n = A,T,C or G
ctgtagcttctgtgggacttccactgctcaggcgtcaggctcagatagctgctggccgcgtacttgttgttgctttgtttggagggtgtggtggnctccactcccgccttgacggggctgctatctgccttccaggccactgtcacggctcccgggtagaagtcacttatgagacacaccagtgtggccttgttggcttgaagctcctcagaggagggcgggaacagagtgaccgagggggcagccttgggctgacctaggacggccagtttggtccctccgccgaagacgacatggtcattattacgatcccacacttgacagtaatagtcggcctcatcgccggcttcgaccctgttgatggtcagggtgg

SEQ ID NO: 177 - DNA, 373 bp, Homo sapiens
ctgtagcttctgtgggacttccactgctcaggcgtcaggctcagatagctgctggccgcgtactagttgttgctttgtttggagggtgtggtggtctccactcccgccttgacggggctgctatctgccttccaggccactgtcacggctcccgggtagaagtcacttatgagacacaccagtgtggccttgttggcttgaagctcctcagaggagggcgggaacagagtgaccgagggggcagccttgggctgacttaggacggccagtttggtccctccgccgaagacgacatggtcattattacgatcccacacttgacaataatagtcggcctcatcgccggcttcgaccctgttgatggtcagggtgg

SEQ ID NO: 178 - DNA, 136 bp, Homo sapiens
  misc_feature (1)...(136): n = A,T,C or G
cttctgtgggacttccactgctcaggcgtcaggctcagatagctgctggccgcgtacttgttgttgctttgtttggagggtgtggtggtctccactcccnccttgacggggctgctatctgccttccaggccactg

SEQ ID NO: 179 - DNA, 327 bp, Homo sapiens
  misc_feature (1)...(327): n = A,T,C or G
ctgtagcttctgtgggacttccactgctcaggcgtcaggctcagatagctgctggccgcgtacttgttgttgctttgtttggagggtgtggtggtctccactcccgccttgacggggctgctatctgccttccaggccactgtcacggctcccgggtagaagtcacttatgagacacaccagtgtggccttgttggcttgaagctcctcagaggagggcgggaacagagtgaccgagggggcagccttgggctgacctaggacggccagtttggtccctccgccgaagacgacatggtcataattacgatcccacacttgncagtaa

SEQ ID NO: 180 - DNA, 192 bp, Homo sapiens
  misc_feature (1)...(192): n = A,T,C or G
ctgtagcttctgtgggacttccactgctcangcgtcaggctcagatagctgctggccgcgtacttgttgttgctttgtttggagggtgtggtggtctccactcccnccttgacggggcnngctatctgccttccangccactgncacggctcccnggtagaagtcacttatgagacacaccantgtggcctt

SEQ ID NO: 181 - DNA, 171 bp, Homo sapiens
  misc_feature (1)...(171): n = A,T,C or G
ccaccctgaccatcaacagggtcgaagccggcgatgaggccgactattactgtcaagtgtgggatcgtaataatgaccatgtcgtnttcggcggagggaccaaactggccgtcctaggtnancccaaggctgccccctcggtcactctgttccnnccctnctctgangagc

SEQ ID NO: 182 - DNA, 373 bp, Homo sapiens
ctgtagcttctgtgggacttccactgctcaggcgtcaggctcagatagctgctggccgcgtacttgttgttgctttgtttggagggtgtggtggtctccactcccgccttgacggggctgctatctgccttccaggccactgtcacggctcccgggtagaagtcacttatgagacacaccagtgtggccttgttggcttgaagctcctcagaggagggcgggaacagagtgaccgagggggcagccttgggctgacctaggacggccagtttggtccctccgccgaagacgacatggtcattattaagatcccacacttgacagtaatagtcagcctcatcgccggcttcgaccctgttgatggtcagggtgg

SEQ ID NO: 183 - DNA, 585 bp, Homo sapiens
ccagtacacccatgaatttgatggagatgagcagttctacgtggacctggggaggaaggagactgtctggtgtttgcctgttctcagacaatttagatttgacccgcaatttgcactgacaaacatcgctgtcctaaaacataacttgaacagtctgattaaacgctccaactctaccgctgctaccaatgaggttcctgaggtcacagtgttttccaagtctcccgtgacactgggtcagcccaacatcctcatctgtcttgtggacaacatctttcctcctgtggtcaacatcacatggctgagcaatgggcactcagtcacagaaggtgtttctgagaccagcttcctctccaagagtgatcattccttcttcaagatcagttacctcaccctcctcccttctgctgaggagagttatgactgcaaggtggagcactggggactggacaagcctcttctgaaacactgggagcctgagattccagcccctatgtcagagctcacagagactgtggtctgcgccctggggttgtctgtgggcctcgtgggcattgtggtgggcactgtcttcatcatccgagg

SEQ ID NO: 184 - DNA, 155 bp, Homo sapiens
  misc_feature (1)...(155): n = A,T,C or G
aagcagcactggtggtgcctcagccatggcctggaccgttctcctnctcggnctcctctctcaccgnacagactctgtgacctcctatgtgttgactcagacaccctnagtgtnagnggccccaggananacggccaagattacctgtgggggaa

SEQ ID NO: 185 - DNA, 119 bp, Homo sapiens
  misc_feature (1)...(119): n = A,T,C or G
ggacacagcntggacatgagggtccccgctcagctcctggggctcctgctgctctggctnccaggtgccaaatgtganatccagatgacccaatctccttccaccctgtctgcatctgt

SEQ ID NO: 186 - DNA, 101 bp, Homo sapiens
  misc_feature (1)...(101): n = A,T,C or G
ccaccctgaccatnaacagggtngaagccggcgatnaggccgactatnactgtcaagtgtgggatcgtaatnatgaccatgtcntcttnngcggagggacc

SEQ ID NO: 187 - DNA, 239 bp, Homo sapiens
cccactgtcactctgttcccgccctcctctgaggagctccaagccaacaaggccacactagtgtgtctgatcagtgacttctacccgggagctgtgacagtggcctggaaggcagatggcagccccgtcaaggcgggagtggagaccaccaaaccctccaaacagagcaacaacaagtacgcggccagcagctacctgagcctgacgcccgagcagtggaagtcccacagaagctacag

SEQ ID NO: 188 - DNA, 84 bp, Homo sapiens
  misc_feature (1)...(84): n = A,T,C or G
ccaccctgaccatcaacagggtcgaagccggngatgaggccgactattactgncaagngtgggatcgtaataangaccatgtcg

SEQ ID NO: 189 - DNA, 139 bp, Homo sapiens
  misc_feature (1)...(139): n = A,T,C or G
ccaccctgaccatcaacagggtcnaantccggcgatgaggccgactattactgtcaagtgtgggatcgtaataatgaccatgtcgtcttcggcggagggaccaaactggccgncctaggtcagcccaaggctgccccct

SEQ ID NO: 190 - DNA, 283 bp, Homo sapiens
  misc_feature (1)...(283): n = A,T,C or G
ctgtagcttctgtgggacttccactgctcaggcgtcaggctcagatagctgctggccgcgtacttgttgttgctttgtttggagggtgtggtggtctccactcccgccttgacggggctgctatctgccttccaggccactgtcacggctcccgggtagaagtcacttatgagacacaccagtgtggccttgttggcttgaagctcctcanaggagggcgggaacagagtgaccgagggggcagccttgggctgacctaggacggccngtttggtccctncgc

SEQ ID NO: 191 - DNA, 179 bp, Homo sapiens
  misc_feature (1)...(179): n = A,T,C or G
aatgtttcattgnactcaacatgtgaagaaaactattggtnntgncccatgactgtttgcacttntctgntaacctgacaaattcctactccttccccatgagcattgtaaanccttgtgcacaatntgaaaacttatgagtgacctgagatnttatctatcccctanctttttaccta

SEQ ID NO: 192 - DNA, 90 bp, Homo sapiens
  misc_feature (1)...(90): n = A,T,C or G
ctgtagcttctgtgggacttccactgctcaggcgtcaggctcagatagctgctggccgcgtacttgttgttgctttgnttggagggtgtg

SEQ ID NO: 193 - DNA, 585 bp, Homo sapiens; identical to SEQ ID NO: 183

SEQ ID NO: 194 - DNA, 283 bp, Homo sapiens
actggtggtgcctcagccatggcctggaccgttctcctcctcggcctcctctctcactgcacagactctgtgacctcctatgtgttgactcagacaccctcagtgtcagtggccccaggaaagacggccaagattacctgtgggggaaacaatattgggagtaacaatgtacactggtattaccagaagccaggccaggcccctgtcctaatcatctcttttgataacgaccggccctcagggatatctgagcgattctctggcttcaattctggggacatgg

SEQ ID NO: 195 - DNA, 54 bp, Homo sapiens
  misc_feature (1)...(54): n = A,T,C or G
ctgtagcttctgtgggacttncactgctcaggcgtcaggctcanatagctgctg

SEQ ID NO: 196 - DNA, 375 bp, Homo sapiens; identical to SEQ ID NO: 50

SEQ ID NO: 197 - DNA, 130 bp, Homo sapiens
  misc_feature (1)...(130): n = A,T,C or G
atggacatgagggtccccgctcagctcctggggctcctgcnngctctggctcccaggtgccaaatgtgacatncagatgacccaatctcctnccacccngtctgcatctgncggagatacanntncaata

SEQ ID NO: 198 - DNA, 191 bp, Homo sapiens
  misc_feature (1)...(191): n = A,T,C or G
taataatgaccatgtcgtcttcggcggagggaccaaactggccgtcctaggtcagcccaaggctgccccctcggtcactctgttcccgccctnctntgagnagcttcaagccaacaaggccacactggtgtgtctcataagtgacttctacccgggagccgtgacagtggcctggaaggcanatagcagcc

SEQ ID NO: 199 - DNA, 282 bp, Homo sapiens
ctggtggtgcctcagccatggcctggaccgttctcctcctcggcctcctctctcaccgcacagattctgtgacttcctatgtgttgactcaaacaccctcagtgtcagtggccccaggaaagacggccaagattacctgtgggggaaacaatattgggagtcacaatgtacactagtattaccagaagccaggccaggcccctgtcctaatcatctcttttgataacgaccggccctcagggatatctgagcgattctctggcttcaattctggggacatgg

SEQ ID NO: 200 - DNA, 464 bp, Homo sapiens
  misc_feature (1)...(464): n = A,T,C or G
caggcagaggctctgggtcagtgcaggaagcagagtcacagccagcgccttggggtggggatgaaaggagatgacctggtggctgcgtgacagccactgtaggactctgatctcagggggacaggctgacacaggcagttgggaattctgggcagggacaagcaggcgttacagaaaagtgataaccaatcccagttaaaatagtctcaggagtcagtgcaggagccctttctgactcctgtgatggataataaggcccancccgaggaagatgagccccagcacgaagcctccaatgccactcagcatcttgctctgggcagattcagactgagcccgccactccacggtgatggggttctggaggctggggtgctccacgtggcaggtgtagacgtctccatgctggggagtcatttccagcatcaccaggatctggaaggnccagtcaccgnttcctaata

SEQ ID NO: 201 - DNA, 373 bp, Homo sapiens; identical to SEQ ID NO: 6

SEQ ID NO: 202 - DNA, 373 bp, Homo sapiens
  misc_feature (1)...(373): n = A,T,C or G
ccaccctgaccatcaacagggtcgaagccggcgatgaggccgactattactgtcaagtgtgggatcgtaataatgaccatgtcgtcttcggcggagggaccaaactggncgtnctaggtnagnccaaggctgccccctcggtcactctgttcccgccctcctctgaggagcttcaagccaacaaggccacactggtgtgtctcataagtgacttctacccgggagccgcgacagtggcctggaaggcagatagcagccccgtcaaggcgggagtggagaccaccacaccctccaaacaaagcaacaacaagtacgcggccagcagctatctgagcctgacgcctgagcagtggaagtcccacagaagctacag

SEQ ID NO: 203 - DNA, 373 bp, Homo sapiens; identical to SEQ ID NO: 6

SEQ ID NO: 204 - DNA, 565 bp, Homo sapiens
cagagctcaagtctgaactctacctccagacagaatgaagttcatctcgacatctctgcttcttatgctgctggtcagcagcctctctccagtccaaggtgttctggaggtctattacacaagcttgaggtgtagatgtgtccaagagagctcagtctttatccctagacgcttcattgatcgaattcaaatcttgccccgtgggaatggttgtccaagaaaagaaatcatagtctggaagaagaacaagtcaattgtgtgtgtggaccctcaagctgaatggatacaaagaatgatggaagtattgagaaaaagaagttcttcaactctaccagttccagtgtttaagagaaagattccctgatgctgatatttccactaagaacacctgcattcttcccttatccctgctctggattttagttttgtgcttagttaaatcttttccaggaaaaagaacttccccatacaaataagcatgagactatgtaaaaataaccttgcagaagctgatggggcaaactcaagcttcttcactcacagcaccctatatacacttggagtt

SEQ ID NO: 205 - DNA, 474 bp, Homo sapiens
  misc_feature (1)...(474): n = A,T,C or G
gtgcgaaggtccagctcagtggcacaagtgaaagcaatgatcgagactaagacgggtataatccctgagacccagattgtgacttgcaatggaaagagactggaagatgggaagatgatggcagattacggcatcagaaagggcaacttactcttcctggcatgttattgtattggagggtgaccaccctgggcatggggtgttggcagggatcaaaaagcttatttcttttaatctcttactcaacgaacacatcttctgatgatttcccaaaattaatgagaatgagatgagtagagtaagatttgggtgggatgggtaggatgaagtatattgcccaactctatgtttctttgattctaacacaattaattaagtgacatgatttttactaatgtattactgagactagtaaataaatttttaaggcaaaatagagcattccnaaaaaaaaaaaaaaaanaaaaaaaaagg

SEQ ID NO: 206 - DNA, 237 bp, Homo sapiens
ccagtattcctggaggatataacactgacatcagcagggttttcaatggcaacaattgcacgagctgccagcagaagcttctcccaggtcctcttgagatttatgatatagatgccatcacttttccttttatagatgtactgttccatctggaagtcaagattggtgccacctaagtgggttcctgctgcaaggaacttaaggacatcctcctccttcatttgcaggacatcaagg

SEQ ID NO: 207 - DNA, 585 bp, Homo sapiens
ctcagagctcaagtctgaactctatctccagacagaatgaagttcatctcgacatctctgcttctcatgctgctggtcagcagcctctctccagtccaaggtgttctggaggtctattacacaagcttgaggtgtagatgtgtccaagagagctcagtctttatccctagacgcttcattgatcgaattcaaatcttgccccgtgggaatggttgtccaagaaaagaaatcatagtctggaagaagaacaagtcaattgtgtgtgtggaccctcaagctgaatggatacaaagaatgatggaagtattgagaaaaagaagttcttcaactctaccagttccagtgtttaagagaaagattccctgatgctgatatttccactaagaacacctgcattcttcccttatccctgctctggattttagttttgtgcttagttaaatcttttccaggaaaaagaacttccccatacaaataagcatgaggctatgtaaaaataaccttgcagaagctgatggggcaaactcaagcttcttcactcacagcaccctatatacacttggagtttgcattcttattcatcag

SEQ ID NO: 208 - DNA, 436 bp, Homo sapiens
ctgagcagagggacctgcacacagagactccctcctgggctcctggcaccatggccccactgaagatgctggccctggttaccctcctcctgggggcttctctgcagcacatccacgcagctcgagggaccaatgtgggccgggagtgctgcctggagtacttcaagggagccattccccttagaaagctgaagacgtggtaccagacatctgaggactgctccagggatgccatcgtttttgtaactgtgcagggcagggccatctgttcggaccccaacaacaagagagtgaagaatgcagttaaatacctgcaaagccttgagaggtcttgaagcctcctcaccccagactcctgactgtctcccgggactacctgggacctccaccgtcggtgttcaccgcccccaccctgagcgcctgggtccaggggagg

SEQ ID NO: 209 - DNA, 524 bp, Homo sapiens
gctctggcccctggtcctgtcctgttctccagcatggtgtgtctgaggctccctggaggctcctgcatggcagttctgacagtgacactgatggtgctgagctccccactggctttggctggggacaccagaccacgtttcttggagtactctacgtctgagtgtcatttcttcaatgggacggagcgggtgcggttcctggacagatacttctataaccaagaggagtacgtgcgcttcgacagcgacgtgggggagttccgggcggtgacggagctggggcggcctgatgaggagtactggaacagccagaaggacttcctggaagacaggcgggccgcggtggacacctactgcagacacaactacggggttgtggagagcttcacagtgcagcggcgagtccatcctaaggtgactgtgtatccttcaaagacccagcccctgcagcaccacaacctcctggtctgttctgtgagtggtttctatccaggcagcattgaagtcaggtggttccggaatgg

SEQ ID NO: 210 - DNA, 579 bp, Homo sapiens
  misc_feature (1)...(579): n = A,T,C or G
aaagaatatgtagaatctaggtaagtggataaaaggtctgggggcaggggaaaggagagcatttcattgtgaatcaaggaatttctccacctgttttaactcttccatatgacatcaaagagatgtcacttgcagctagcatttcagtgatgttttcttgctaataatatcgtgataaaagaaacattgactataagaaataggaatgggtctcataaaaggaaacagcaaaacccccaaactaaaaaacagcgcaggctatttctctcttctctccttttgcttggcactcatgagatgctaggtgtggaagtcagccaactgaaaaagagaggtggctgaagaaggtggggaggctgaagccagttaaataggatggtccaattcacagacggcgaggctacagtgcaaataggactctttcaacttgagcaggaccccattacttcactggagttagaaagaaaggagagcgtagactttttgaactttctataagagtgtacctccncagtatacagaagacgacgtgaaatttgatctgcaagaaaactgagtccatattcacatatgtatcaa

SEQ ID NO: 211 - DNA, 556 bp, Homo sapiens
cagagctcaagtctgaactctacctccagacagaatgaagttcatctcgacatctctgcttctcatgctgctggtcagcagcctctctccagtccaaggtgttctggaggtctattacacaagcttgaggtgtagatgtgtccaagagagctcagtctttatccctagacgcttcattgatcgaattcaaatcttgccccgtgggaatggttgtccaagaaaagaaatcatagtctggaagaagaacaagtcaattgtgtgtgtggaccctcaagctgaatggatacaaagaatgatggaagtattgagaaaaagaagttcttcaactctaccagttccagtgtttaagagaaagattccctgatgctgatatttccactaagaacacctgcattcttcccttatccctgctctggattttagttttgtgcttagttaaatcttttccaggaaaaagaacttccccatacaaataagcatgagactatgtaaaaataaccttgcagaagctgatggggcaaactcaagcttcttcactcacaacaccctatataca

SEQ ID NO: 212 - DNA, 353 bp, Homo sapiens
cgcagccatggctcgtggtcccaagaagcatctgaagcgggtggcagctccaaagcattggatgctggataaattgaccggtgtgtttgctcctcgtccatccaccggtccccacaagttgagagagtgtctccccctcatcattttcctgaggaacagacttaagtatgccctgacaggagatgaagtaaagaagatttgcatgcagcggttcattaaaatcgatggcaaggtccgaactgatataacctaccctgctggattcatggatgtcatcagcattgacaagacgggagagaatttccgtctgatctatgacaccaagggtcgctttgctgtacatcgtattacac

SEQ ID NO: 213 - DNA, 513 bp, Homo sapiens
ctgctactcatttgcttctatgggtatgctagaagcgagaatccgtatactaaccaacaattctcagaccccaatcctaagccctcaggaggttgtgtcttgtagccagtatgctcaaggctgtgatggcggcttcccataccttattgcaggaaagtacgcccaagattttgggctggtggaagaagcttgcttcccctacacaggcactgattctccatgcaaaatgaaggaagactgctttcgttattactcctctgagtaccactatgtaggaggtttctatggaggctgcaatgaagccctgatgaagcttgagttggtccatcatgggcccatggcagttgcttttgaagtatatgatgacttcctccactacaaaaaggggatctaccaccacactggtctaagagaccctttcaacccctttgagctgactaatcatgctgttctgcttgtgggctatggcactgactcagcctctgggatggattactggattgttaaaaacag

SEQ ID NO: 214 - DNA, 538 bp, Homo sapiens
aaacattaaacaacaagtatataatcaaaataatcctgtattacttataactgaataactattttcaaagaaactttcctccctgatgaataagaatgcaaactccaagtgtatatagggtgctgtgagtgaagaagcttgagtttgccccatcagcttctacaaggttatttttacatagtctcatgcttatttgtatggggaagttctttttcctggaaaagatttaactaagcacaaaactaaaatccagagcagggataagggaagaatgcaggtgttcttagtggaaatatcagcatcagggaatctttctcttaaacactggaactggtagagttgaagaacttctttttctcaatacttccatcattctttgtatccattcagcttgagggcccacacacacaattgacttgttcttcttccagactatgatttcttttcttggacaaccactcccacggggcaagatttgaattcgatcaatgaagcgtctagggataaagactgagctctcttggacacatctacacct

SEQ ID NO: 215 - DNA, 588 bp, Homo sapiens
aaacattagtgttcatagcttccaagagacatgctgactttcatttcttgaggtactctgcacatacgcaccacatctctatctggcctttgcatggagtgaccatagctccttctctcttacattgaatgtagagaatgtagccattgtagcagcttgtgttgtcacgcttcttcttttgagcaactttcttacactgaagaaaggcagaatgagtgcttcagaatgtgatttcctactaacctgttccttggataggctttttagtatagtattttttttgtcattttctccatcaacaaccagggagactgcacctgatggaaaagatatatgactgcttcatgacattcctaaactatcttttttttattccacatctacgtttttggtggagtcccttttgcatcattgttttaaggatgataaaaaaaaataacaactagggacaatacagaacccattccatttatctttctacagggctgacattgtggcacattcttagagttaccacaccccatgagggaagctctaaatagccaacacccatctgttttttgtaaaaacagcatagcttatacatgg

SEQ ID NO: 216 - DNA, 580 bp, Homo sapiens
cagagctcaagtctgaactctacctccagacagaatgaagttcatctcgacatctctgcttctcatgctgctggtcagcagcctctctccagtccaaggtgttctggaggtctattacacaagcttgaggtgtagatgtgtccaagagagctcagtctttatccctagacgcttcattgatcgaattcaaatcttgccccgtgggaatggttgtccaagaaaagaaatcatagtctggaagaagaacaagtcaattgtgtgtgtggaccctcaagctgaatggatacaaagaatgatggaagtattgagaaaaagaagttcttcaactctaccagttccagtgtttaagagaaagattccctgatgctgatatttccactaagaacacctgcattcttcccttatccctgctctggattttagttttgtgcttagttaaatcttttccaggaaaaagaacttccccatacaaataagcatgagactatgtaaaaataacctcgcagaagctgatggggcaaactcaagcttcttcactcacagcaccctatatacacttggagtttgcattcttattcat

SEQ ID NO: 217 - DNA, 396 bp, Homo sapiens
  misc_feature (1)...(396): n = A,T,C or G
ctgttgactcagattcggcattttaattacattgtttccaagtatgatattctgagagtgtctatagcacttagtgtctgcttcatataaactaccagttattatatatttatgatgcaagtagttttccaaatgtggtgaaagtctgagtctttttatccccatgggtaaaatctgaatctggctctctgtgtctctcagtgcttgtttattgctggtcagagagtaaattcttgataaaagctgtntganttggctctcacagtttatgcagacattggagagacaatttggttatttcaaacatcacaggatttgagtaagaagacctggttatgaaacaaggctctcataattactagttatgactgttgacaaggttaccttttcttgttt

SEQ ID NO: 218 - DNA, 426 bp, Homo sapiens
  misc_feature (1)...(426): n = A,T,C or G
tggacagncctggaaggtgtcgaagtgcagacagactacgtgcccctgctgaactcgctggcggcctatggctggcagctcacctgtgtgctaccaactcccgtcgtcaagactaccagcgaggggagtgtatccaccaagcagattgtctttcttcagagaccttgtctacctcagaaaatcaagaagaaggaatcgaagtttcagtggcgattctccagagaagaaatgcacaacaggcagatgaggaaatcaaaaggtaaactcagtgccagagacaaacaacaagcagaagaaaatgagaagaacttagaagaccagtcttccaaagctggagacatgggaaactgtgtttcaggacagcagcaggagggtggagtctccgaggagatgaagggccctgtccaagaggacaagggagaacag

SEQ ID NO: 219 - DNA, 431 bp, Homo sapiens
  misc_feature (1)...(431): n = A,T,C or G
tcaagtctgaactctacctccagacagaatgaagttcatctcgacatctctgcttctcatgctgctggtcagcagcctctctccagtccaaggtgttctggaggtctattacacaagcttgaggtgtagatgtgtccaanagagctcagtctttatccctanacgcttcattgatcgaattcaaatcttgccccgtgggaatggttgtccaagaaaagaaatcatagtctggaagaagaacaagtcaattgtgtgtgtggaccctcaagctgaatggatacaaagaatgatggaagtattgagaaaaagaagttcttcaactctaccagttccagtgtttaagagaaagattccctgatgctgatatttccactaagaacacctgcattcttcccttatccctgctctggattttagttttgngcttagtt

SEQ ID NO: 220 - DNA, 286 bp, Homo sapiens
  misc_feature (1)...(286): n = A,T,C or G
ctgtctcacactttacaagctgtgagagacacatcagagccctgggcactgtcactgcttgcagcctgagtgtaactccctccttttctatctgagctcttcctcctccacatcacggcagcgaccacagctccagtgatcacagctccaaggagaaccaggccagcaatgatgcccacgatggggatggtgggctgggaagacagctcccatctcanggtgaggggcttgggcagaccctcatgctgcacatggcaggtgtatctctgctcctctccagaaggca

SEQ ID NO: 221 - DNA, 536 bp, Homo sapiens
  misc_feature (1)...(536): n = A,T,C or G
ctcaagtctgaactctacctccagacagaatgaagttcatctcgacatctctgcttctcatgctgctggtcagcagcctctctccagtccaaggtgttctggaggtctattacacaagcttgaggtgtagatgtgtccaagagagctcagtctttatccctagacgcttcattgatcgaattcaaatcttgccccgtgggaatggttgtccaagaaaagaaatcatagtctggaagaagaacaagtcaattgtgtgtgtggaccctcaagctgaatggatacaaagaatgatggaagtattgagaaaaagaagttcttcaactctaccagttccagtgtttaagagaaagattccctgatgctgatatttccactaagaacacctgcattcttcccttatccctgctctggattttagttttgngcttagttaaatcttttccaggaaaaagaacttccccatacaaataagcatgagactatgtaaaaataaccttgcagaagctgatggggcaaactcaagcttnttcactcac

SEQ ID NO: 222 - DNA, 565 bp, Homo sapiens
  misc_feature (1)...(565): n = A,T,C or G
ctcagagctcaagtctgaactctacctccagacagaatgaagttcatctcgacatctctgcttctcatgctgctggtcagcagcctctctccagtccaaggtgttctggaggtctattacacaagcttgaggtgtagatgtgtccaagagagctcagtctttatccctagacgcttcattgatcgaattcaaatcttgccccgtgggaatggttgtccaagaaaagaaatcatagtctggaagaagaacaagtcaattgtgtgtgtggaccctcaagctgaatggatacaaagaatgatggaagtattgagaaaaagaagttcttcaactctaccagttccagtgtttaagagaaagattccctgatgctgatatttccactaagaacacctgcattcttcccttatccctgctctggattttagttttgtgcttagttaaatcttttccaggaaaaagaacttccccatacaaataagcatgagactatgtaaaaataaccttgcngaagctgatggngcaaactcaagcttcttcactcacagcaccctatatacacttggag

SEQ ID NO: 223 - DNA, 529 bp, Homo sapiens
cgcggtgcgacgaaggagtaggtggtgggatctcaccgtgggtccgattagccttttctctgccttgcttgcttgagcttcagcggaattcgaaatggctggcggtaaggctggaaaggactccggaaaggccaagacaaaggcggtttcccgctcgcagagagccggcttgcagttcccagtgggccgtattcatcgacacctaaaatctaggacgaccagtcatggacgtgtgggcgcgactgccgctgtgtacagcgcagccatcctggagtacctcaccgcagaggtacttgaactggcaggaaatgcatcaaaagacttaaaggtaaagcgtattacccctcgtcacttgcaacttgctattcgtggagatgaagaattggattctctcatcaaggctacaattgctggtggtggtgtcattccacacatccacaaatctctgattgggaagaaaggacaacagaagactgtctaaaggatgcctggattccttgttatctcaggactctaaatactctaacag

SEQ ID NO: 224 - DNA, 297 bp, Homo sapiens
  misc_feature (1)...(297): n = A,T,C or G
cctcccctggacccaggcgctcagggtgggggcggtgaacaccaacggtggaggtcccaggtagtcccgggagacagtcaggagtctggggtgaggaggcttcaagacctctcaaggctttgcaggtatttaactgcattcttcactctcttgttgttggggtccgaacagatggccctgccctgcacagttacaaaaacgatggcntccctggagcagncctnagatgnctggnaccacgtcttcagctttctaangggaatggctcccttgaagtactccaggcangcactcccg

SEQ ID NO: 225 - DNA, 253 bp, Homo sapiens
cctcccctggacccaggcgctcagggtgggggcggtgaacaccaacggtggaggtcccaggtagtcccgggagacagtcaggagtctggggtgaggaggcttcaagacctctcaaggctttgcaggtatttaactgcattcttcactctcttgttgttggggtccgaacagatggccctgccctgcacagttacaaaaacgatggcatccctggagcagtcctcagatgtctggtaccacgtcttcagctttc

SEQ ID NO: 226 - DNA, 598 bp, Homo sapiens
ccatctgatctataaatgcggtggcatcgacaaaagaaccattgaaaaatttgggaaggaggctgctgagatgggaaagggctccttcaagtatgcctgggtcttggataaactgaaagctgagcgtgaacgtggtatcaccattgatatctccttgtggaaatttgagaccagcaagtactatgtgactatcattgatgccccaggacacagagactttatcaaaaacatgattacagggacatctcaggctgactgtgctgtcctgattgttgctgctggtgttggtgaatttgaagctggtatctccaagaatgggcagacccgagagcatgcccttctggcttacacactgggtgtgaaacaactaattgtcggtgttaacaaaatggattccactgagccaccctacagccagaagagatatgaggaaattgttaaggaagtcagcacttacattaagaaaattggctacaaccccgacacagtagcatttgtgccaatttctggttggaatggtgacaacatgctggagccaagtgctaacatgccttggttcaagggatggaaagtcacccgtaaggatggcaatgccagt

SEQ ID NO: 227 - DNA, 612 bp, Homo sapiens
  misc_feature (1)...(612): n = A,T,C or G
ctgttgactcagattcggcattttaattacattgtttccaagtatgatattctgagagtgtctatagcacttagtgtctgcttcatataaactaccagttattatatatttatgatgcaagtagttttccaaatgtggtgaaagtctgagtctttttatccccatgggtaaaatctgaatctggctctctgtgtctctcagtgcttgtttattgctggtcagagagtaaattcttgataaaagctgttgacttggctctcacagtttatgcagacattggagagacaatttggttatttcaaacatcacaggatttgagtaagaagacctggttatgaaacaaggctctcataattactagttatgactgttgacaagttaccttttcttgtttacaagttatttggcctctttgaattacttgtaaaatagagatagggattctttcttgatcatggaacatcaaatgaagttatttgatgaaatactttgtcatctggaaattataaatataactaaatgttaattattatttggaaatttngggcacctcatggnggcattttctatggtcattttttttcttttctcgcataatggctaaaagtaggt

SEQ ID NO: 228 - DNA, 288 bp, Homo sapiens
  misc_feature (1)...(288): n = A,T,C or G
agccattgnntgtagctttagctcagcgcaaagaagagcgccaggctcacctcactaaccagtatatgcagagaatggcaagtgtacgagctgttcccaaccctgtaatcaacccctaccagccagcacctccttcaggttacttcatggcagctatcccacagactcagaaccgngctgcatactatcctcctagccaaattgctcaactaagaccaagtcctcgctggactgctcagggtgccagacctcatccattccaaaatatgcccggtgctatccgcccag

SEQ ID NO: 229 - DNA, 594 bp, Homo sapiens
ctcagagctcaagtctgaactctacctccagacagaatgaagttcatctcgacatctctgcttctcatgctgctggtcagcagcctctctccagtccaaggtgttctggaggtctattacacaagcttggggtgtagatgtgtccaagagagctcagtctttatccctagacgcttcattgatcgaattcaaatcttgccccgtgggaatggttgtccaagaaaagaaatcatagtctggaagaagaacaagtcaattgtgtgtgtggaccctcaagctgaatggatacaaagaatgatggaagtattgagaaaaagaagtttttcaactctaccagttccagtgtttaagagaaagattccctgatgctgatatttccactaagaacacctgcattcttcccttatccctgctctggattttagttttgtgcttagttaaatcttttccaggaaaaagaacttccccatacaaataagcatgagactatgtaaaaataaccttgcagaagctgatggggcaaactcaagcttcttcactcacagcaccctatatacacttggagtttgcattcttattcatcagggaggaaag

SEQ ID NO: 230 - DNA, 571 bp, Homo sapiens
ctccttctctcttacattgaatgtagagaatgtagccattgtagcagcttgtgttgtcacgcttcttcttttgagcaactttcttacactgaagaaaggcagaatgagtgcttcagaatgtgatttcctactaacctgttccttggataggctttttagtatagtatttttttttgtcattttctccatcaacaaccagggagactgcacctgatggaaaagatatatgactgcttcatgacattcctaaactatcttttttttattccacatctacgtttttggtggagtcccttttgcatcattgttttaaggatgataaaaaaaataacaactagggacaatacagaacccattccatttatctttctacagggctgacattgtggcacattcttagagttaccacaccccatgagggaagctctaaatagccaacacccatctgttttttgtaaaaacagcatagcttatacatggacatgtctctgccttaacttttcctaactcccactctaggctattgtttgcatgtctacctacttttagccattatgcgagaaaagaaaaa

SEQ ID NO: 231 - DNA, 584 bp, Homo sapiens
  misc_feature (1)...(584): n = A,T,C or G
aaacattagtgttcatagcttccaagagacatgctgactttcatttcttgaggtactctgcacatacgcaccacatctctatctggcctttgcatggagtgaccatagctccttctctcttacattgaatgtagagaatgtagccattgtagcagcttgtgttgtcacgcttcttcttttgagcaactttcttacactgaagaaaggcagaatgagtgcttcagaatgtgatttcctactaacctgttccttggataggctttttagtatagtatttttttttgtcattttctccatcaacaaccagggagactgcacctgatggaaaagatatatgactgcttcatgacattcctaaactacctttttttattccacatctacgtttttggtggagtcccttttgcatcattgttttaaggatgataaaaaaaaataacaactagggacaatacagaacccattccatttatctttctacagggctgacattgtggcacattcttagagttaccacaccccatgagggaagctctaaatagccaacacccatctgttttttgtaaaaacagcatancttatac

SEQ ID NO: 232 - DNA, 457 bp, Homo sapiens
ccacggctgcttccagctcctccctggagaagagctacgagctgcctgacggccaggtcatcaccattggcaatgagcggttccgctgccctgaggcactcttccagccttccttcctgggcatggagtcctgtggcatccacgaaactaccttcaactccatcatgaagtgtgacgtggacatccgcaaagacctgtacgccaacacagtgctgtctggcggcaccaccatgtaccctggcattgccgacaggatgcaaaaggagatcactgccctggcacccagcacaatgaagatcaagatcattgctcctcctgagcgcaagtactccgtgtggatcggcggctccatcctggcctcgctgtccaccttccagcagatgtggatcagcaagcaggagtatgacgagtccggcccctccatcgtccaccgcaaatgcttctaggcggactatga

SEQ ID NO: 233 - DNA, 256 bp, Homo sapiens
  misc_feature (1)...(256): n = A,T,C or G
cctcccctggacccaggcgctcagggtgggggcggtgaacaccaacggtggaggtcccaggtagtcccgggagacagtcaggagtctggggtgaggaggcttcaagacctctcaaggctttgcaggtatttaactgcattcttcactctcttgttgntggggtccgaacagatggccctgccctgcncagttacaaaaacgatggcatccctggagcagtcctcagatgtctggtaccacgtcttcagctttctaa

SEQ ID NO: 234 - DNA, 571 bp, Homo sapiens
  misc_feature (1)...(571): n = A,T,C or G
cagagctcaagtctgaactctacctccagacagaatgaagttcatctcgacatctctgcttctcatgctgctggtcagcagcctctctccagtccaaggtgttctggaggtctattacacaagcttgaggtgtagatgtgtccaagagagctcagtctttatccctagacgcttcattgatcgaattcaaatcttgccccgtgggaatggttgtccaagaaaagaaatcatagtctggaagaagaacaagtcaattgtgtgtgtggaccctcaagctgaatggatacaaagaatgatggaagtattgagaaaaagaagttcttcaactctaccagttccagtgtttaagagaaagattccctgatgctgatatttccactaagaacacctgcattcttcccttatccctgctctggattttagttttgtgcttagttaaatcttttccaggaaaaagaacttccccatacaaataagcatganactatgtaaaaataacccttgcagaagctgatggggcaaactcaagcttcttcactcacagcaccctatatacacttggagtttgcat

SEQ ID NO: 235 - DNA, 489 bp, Homo sapiens
  misc_feature (1)...(489): n = A,T,C or G
ctgttgactcagattcggcattttaattacattgtttccaagtatgatattctgagagtgtctatagcacttagtgtctgcttcatataaactaccagttattatatatttatgatgcaagtagttttccaaatgtggtgaaagtctgagtctttttatccccatgggtaaaatctgaatctggctctctgtgtctntcagtgcttgtttattgctggtcagagagtaaattcttgataaaagctgttgacttggctctcacagtttatgcanacattggagagacaatttggttatttcaaacatcacaggatnngagtaagaanacctggttatgaaacaaggctctcataattactagttatgactgttgacaagttaccttntcttgnttacaagttatttggcctctttgaattacttgnaaaatagagatagggattctttcttgatcatggaacatcnaatgaagttattngatgaaatact

SEQ ID NO: 236 - DNA, 306 bp, Homo sapiens
ctgctgcacccagagctcctttgggtctgcacatagctctgcctgagagcgcttgcggggcaagaacaggatagctgggatggagcagcccaagcttggttcctgcttccggtagctgcggacaaccttggcgggaatcttcctttggctgtacttgaggcaacagtcctgagcccctccatcactgccttgggtcctggggatgccaaaggccagaaccaggataaggaggctcagagccagtgactgagccatgtctgtggtagagggtgagtaagaggccagagctgagggtgaggtgggcag

SEQ ID NO: 237 - DNA, 560 bp, Homo sapiens
  misc_feature (1)...(560): n = A,T,C or G
ctcagagctcaagtctgaactctacctccagacagaatgaagttcatctcgacatctctgcttctcatgctgctggtcagcagcctctctccagtccaaggtgttctggaggtctattacacaagcttgaggtgtagatgtgtccaagagagctcagtctttatccctagacgcttcattgatcgaattcaaatcttgccccgtgggaatggttgtccaagaaaagaaatcatagtctggaagaagaacaagtcaattgtgtgtgtggaccctcaagctgaatggatacaaagaatgatggaagtattgagaaaaagaagttcttcaactctaccagttccagtgtttaagagaaagattccctgatgctgatatttccactaagaacacctgcattcttcccttatccctgctctggattttagttttgtgcttagttaaatcttttccaggaaaaagancttccccatacaaataagcatgagactatgtaaaaataaccttgcagaagctgatggggcaaactcaagcttcttcactcacagcaccctatatacact

SEQ ID NO: 238 - DNA, 484 bp, Homo sapiens
  misc_feature (1)...(484): n = A,T,C or G
aaaaaaggaaacagaaaacagaagaaatcacttaaggagagctgtcattttctattggtgaggattcctgatcttggggaggttctggaaagttcgtctctgtttcttcttcttcctcttcttggattggaataatttcaatgtcttcttcattctttggttgggaagatgtttcagttagcccaaccacttcttcttttatttcaatagtctgttctttttttcttctgctgacaggagaactatgttagatttgggtctggagcacgttcttttccattcattctcaacgatgccagctattacaagttcctggaagaaggcaaagatcagcatcactgacaaaatgcccaagaacagagattgtatgctgtaacagtattgggtagatggggagtttttctcanagggattagctggttcatagttgnatatgttaatatatggtgtgtgagctctaataaaattcanactctccattttt

SEQ ID NO: 239 - DNA, 493 bp, Homo sapiens
ctgaacatgttgggagagaagcttcttggtcctaacgccagccccgatggtctcattccgtggacgaggttttgtaaggaaaatataaatgataaaaattttcccttctggctttggattgaaagcatcctagaactcattaaaaaacacctgctccctctctggaatgatgggtgcatcatgggcttcatcagcaaggagcgagagcgtgccctgttgaaggaccagcagccggggaccttcctgctgcggttcagtgagagctcccgggaaggggccatcacattcacatgggtggagcggtcccagaacggaggcgaacctgacttccatgcggttgaaccctacacgaagaaagaactttctgctgttactttccctgacatcattcgcaattacaaagtcatggctgctgagaatattcctgagaatcccctgaagtatctgtatccaaatattgacaaagaccatgcctttggaaagtattactcca

SEQ ID NO: 240 - DNA, 439 bp, Homo sapiens
  misc_feature (1)...(439): n = A,T,C or G
cagagctcaagtctgaactctacctccagacagaatgaagttcatctcgacatctctgcttctcatgctgctggtcagcagcctctctccagtccaaggtgttctggaggtctattacacaagcttgaggtgtagatgtgtccaagagagctcagtctttatccctagacgcttcattgatcgaattcaaatcttgccccgtgggaatggttgtccaagaaaagaaatcatagtctggaagaagaacaagtcaattgtgtgtgtggaccctcaagctgaatgaatacaaagaatgatggaagtattgagaaaaagaagttcttcaactctaccagttccagtgtttaaganaaagattccctgatgctgatatttccactaagaacacctgcattcttcccttatccctgctctggattttagttttgngcttagttaa

SEQ ID NO: 241 - DNA, 529 bp, Homo sapiens
  misc_feature (1)...(529): n = A,T,C or G
tgtgtccaagagagctcagtctttatccctagacgcttcattgatcgaattcaaatcttgccccgtgggaatggttgtccaagaaaagaaatcatagtctggaagaagaacaagtcaattgtgtgtgtggaccctcaagctgaatggatacaaagaatgatggaagtattgagaaaaagaagttcttcaactctaccagttccagtgtttaagagaaagattccctgatgctgatatttccactaagaacacctgcattcttcccttatccctgctctggattttagttttgtgcttagttaaatcttttccaggaaaaagaacttccccatacaaataagcatgagactatgtaaaaataaccttgcagaagctgatggggcaaactcaagcttcttcactcacagcaccctatatacacttggagtttgcattcttattcatcagggaggaaagtttctttgaaaatagttattcagttataagtaatacaggattattttgattatatacttgntgnttaatgttt

SEQ ID NO: 242 - DNA, 440 bp, Homo sapiens
ctccctgagcagagggacctgcacacagagactccctcctgggctcctggcaccatggccccactgaagatgctggccctggtcaccctcctcctgggggcttctctgcagcacatccacgcagctcgagggaccaatgtgggccgggagtgctgcctggagtacttcaagggagccattccccttagaaagctgaagacgtggtaccagacatctgaggactgctccagggatgccatcgtttttgtaactgtgcagggcagggccatctgttcggaccccaacaacaagagagtgaagaatgcagttaaatacctgcaaagccttgagaggtcttgaagcctcctcaccccagactcctgactgtctcccgggactacctgggacctccaccgttggtgttcaccgcccccaccctgagcgcctgggtccaggggagg

SEQ ID NO: 243 - DNA, 345 bp, Homo sapiens
  misc_feature (1)...(345): n = A,T,C or G
cctcccctggacccaggcgctcagggtgggggcggtgaacaccaacggtggaggtcccaggtagtcccgggagacagtcaggagtctggggtgaggaggcttcaagacctctcaaggctttgcaggtatttaactgcattcttcactctcttgntgttggggtccgaacagatggccctgccctgcacagttacaaaaacgatggcatccctggagcagtcctcagatgtctggtaccacgtcttcagctttctaaggggaatggctcccttgaagtactccaggcagcactcccggcccacattggtccctcgagctgcgtggatgtgctgcananaanccccc

SEQ ID NO: 244 - DNA, 368 bp, Homo sapiens
  misc_feature (1)...(368): n = A,T,C or G
caagcttttttttttttttttttttttttttttttatgantaatggtctatttatngatnccattctattttaacaaanaaaatntttcaaattacaaggtntacaantcaatactgntttgaanngaaaaatnatttgctttgaaagtgtntgcatgtatatatatatgataaatgattataacgtgtgtgtcanngacaanatgtantctttggttgttagttatatactgnctacctgtganangcaaggtaagngggtnacanactntnaaatttatnaaacacttanatttttcanggaagttacntgaaggaactagggagtttcatgantanataaaangttcgggngggatctccaccgg

SEQ ID NO: 245 - DNA, 573 bp, Homo sapiens
ccaaaagaagtaagacagcttgctgaagatttcctgaaagactatattcatataaacattggtgcacttgaactgagtgcaaaccacaacattcttcagattgtggatgtgtgtcatgacgtagaaaaggatgaaaaacttattcgtctaatggaagagatcatgagtgagaaggagaataaaaccattgtttttgtggaaaccaaaagaagatgtgatgagcttaccagaaaaatgaggagagatgggtggcctgccatgggtatccatggtgacaagagtcaacaagagcgtgactgggttctaaatgaattcaaacatggaaaagctcctattctgattgctacagatgtggcctccagagggctagatgtggaagatgtgaaatttgtcatcaattatgactaccctaactcctcagaggattatattcatcgaattggaagaactgctcgcagtaccaaaacaggcacagcatacactttctttacacctaataacataaagcaagtgagcgaccttatctctgtgcttcgtgaagctaatcaagcaattaatcccaagttgcttcag

SEQ ID NO: 246 - DNA, 425 bp, Homo sapiens
gacctgcacacagagactccctcctgggctcctggcaccatggccctactgaagatgctggccctggtcaccctcctcctgggggcttctctgcagcacatccacgcagctcgagggaccaatgtgggccgggagtgctgcctggagtacttcaagggagccattccccttagaaagctgaagacgtggtaccagacatctgaggactgctccagggatgccatcgtttttgtaactgtgcagggcagggccatctgttcggaccccaacaacaagagagtgaagaatgcagttaaatacctgcaaagccttgagaggtcttgaagcctcctcaccccagactcctgactgtctcccgggactacctgggacctccaccgttggtgttcaccgcccccaccctgagcgcctgggtccaggggagg

SEQ ID NO: 247 - DNA, 593 bp, Homo sapiens
atctcgacatctctgcttctcatgctgctggtcagcagcctctctccagtccaaggtgttctggaggtctattacacaagcttgaggtgtagatgtgtccaagagagctcagtctttatccctagacgcttcattgatcgaattcaaatcttgccccgtgggaatggttgtccaagaaaagaaatcatagtctggaagaagaacaagtcaattgtgtgtgtggaccctcaagctgaatggatacaaagaatgatggaagtattgagaaaaagaagttcttcaactctaccagttccagtgtttaagagaaagattccctgatgctgatatttccactaagaacacctgcattcttcccttatccctgctctggattttagttttgtgcttagttaaatcttttccaggaaaaagaacttccccatacaaataagcatgagactatgtaaaaataaccttgcagaagctgatggggcaaactcaagcttcttcactcacagcaccctatatacacttggagtttgcattcttattcatcggggaggaaagtttctttgaaaatagttattcagttataagtaatacaggattat

SEQ ID NO: 248 - DNA, 453 bp, Homo sapiens
  misc_feature (1)...(453): n = A,T,C or G
cagctcagtggcacaagtgaaagcaatgatcgagactaagacgggtataatccctgagacccagattgtgacttgcaatggaaagagactggaagatgggaagatgatggcagattacggcatcagaaagggcaacttactcttcctggcatcttattgtattggagggtgaccaccctgggcatggggtgttggcaggggtcaaaaagcttatttcttttaatctcttactcaacgaacacatcttctgatgatttcccaaaattaatgagaatgagatgagtagagtaagatttgggtgggatgggtaggatgaagtatattgcccaactctatgtttctttgattctaacacaattaattaagtgacatgatttttactaatgtattactgagactagtaaataaatttttaagacnaaaaaaaaaaaaaaaaaaaaaaaaaaaagcttg

SEQ ID NO: 249 - DNA, 608 bp, Homo sapiens
ctcagagctcaagtctgaactctacctccagacagaatgaagttcatctcgacatctctgcttctcatgctgctggtcagcagcctctctccagtccaaggtgttctggaggtctattacacaagcttgaggtgtagatgtgtccaagagagctcagtctttatccctagacgcttcattgatcgaattcaaatcttgccccgtgggaatggttgtccaagaaaagaaatcatagtctggaagaagaacaagtcaattgcgtgtgtggaccctcaagctgaatggatacaaagaatgatggaagtattgagaaaaagaagttcttcaactccaccagttccagtgtttaagagaaagattccctgatgctgatatttccactaagaacacctgcattcttcccttatccctgctctggattttagttttgtgcttagttaaatcttttccaggaaaaagaacttccccatacaaataagcatgagactatgtaaaaataaccttgcagaagctgatggggcaaactcaagcttctttactcacagcaccctatatacacttggagtttgcattcttattcatcagggaggaaagtttctttgaaaata

SEQ ID NO: 250 - DNA, 400 bp, Homo sapiens
ccaggtaccaatgggtgcgctgcaatccagacagtaattctgcaaactgccttgaagaaaaaggaccaatgttcgaactacttccaggtgaatccaacaagatcccccgtctgaggactgacctttttccaaagacgagaatccaggacttgaatcgtatcttcccactttctgaggactactctggatcaggcttcggctccggctccggctctggatcaggatctgggagtggcttcctaacggaaatggaacaggattaccaactagtagacgaaagtgatgctttccatgacaaccttaggtctcttgacaggaatctgccctcagacagccaggacttgggtcaacatggattagaagaggattttatgttataaaagaggattttcccaccttg

SEQ ID NO: 251 - DNA, 393 bp, Homo sapiens
ctgctcatcagatggcgggaagatgaagacagatggtgcagccacagttcgtttgatctctaccttggtccctcccccgaaagtgagcgaaggaggccacttggcacgaccgtgacagtaataaactgcaaaatcttcaggctctaggctgctgacggtgagagtgaagtctgtcccagatccactgccagtgaatctggcggggatgccagcggccctgtaggatgtatcataaatgatgatcctgggagcctggccaggtttctgttgggaccagcctaagtaggtggcaacactctgactggccctgcaggagagggtggctctctcccctggagacaaagacagggtggctggagactgtgacaacacaagttctccggtggagtctgg

SEQ ID NO: 252 - DNA, 425 bp, Homo sapiens
cctggtggaaagaaggctctagaacctgcttatagagccacaacagggtgcagacaactgtgatgtcaaccaatgtcactcgttcgcccaccagaaaagtcctcgtcttcaagtaagcatccagcagccccagaattcgcctcacttcctcctttgcattctcagtggcctgtttgttgtggtgcatgatgcccaaggtggggaacacccaggtactggctgggggcactatatcggaatcagcaaagctcacccactgcaccacctgggctgctgcctctggagtacttccccgcagctcctcattgctcacatagtaggcaatggcgttgctctcaaacacacagaatccatcatcaccctcaaatgctgggaccttgccggcaggaaatttgcggagaaattcaggggtgcggttggtttgg

SEQ ID NO: 253 - DNA, 603 bp, Homo sapiens
aaaaaaacttgtgcaaattgcaatcactgagtgattatggaaaggcaaagtatatacagtaatgtgagagaaactcaaaccaagtaagggtaaaaatgaaatgattaacaccaccagaggaggaagctactatcaaaataaaaccatacttcctaataaaggtaaggccatcataaccccagaaaatgcttcatactttagataattaaaaacacattataaccaaaagcagatagtaacattgagtatgctgatttcaaaaagaagatgggtctagataccaggacagctctttttagtgccttccttaaaaagggcaaaactttttagagccatgtaattgtttatagccatggcctggcttcaggcatctcataagtgaggcttcagaaagtccttgaagagtatatggcagtgaaactgggctcccatctttaccataaagatgttcttcttgagaataagtgcatataggaagtgatcgcttatgacatcatttcattgatcttgaggccatataaagagacttgctgatattagagcagtttctttctaatcaatattccgctgaattccaagcaatgaggcacacaccagtttgtc

SEQ ID NO: 254 - DNA, 485 bp, Homo sapiens
aaaaaaggaaacagaaaacagaagaaatcacttaaggagagctgtcattttctattggtgaggattcctgatcttggggaggttctggaaagttcgtctctgtttcttcttcttcctcttcttggattggaataatttcaatgtcttcttcattctttggttgggaagatgtttcagttagcccaaccacttcttcttttatttcaatagtctgttcttttttttcttctgctgacaggagaactatgttagatttgggtctggagcacgttcttttccattcattctcaacgatgccagctattacaagttcctggaagaaggcaaagatcagcatcactgacaaaatgcccaagaacagagattgtatgctgtaacagtattgggtagatggggagtttttctcagagggattagctggttcacagttgtatatgttaatatatggtgtgtgagctctaataaaattcagactctccattttt

SEQ ID NO: 255 - DNA, 568 bp, Homo sapiens
ctcagagctcaagtctgaactctacctccagacagaatgaagttcatctcgacatctctgcttctcatgctgctggtcagcagcctctctccagtccaaggtgttctggaggtctattacacaagcttgaggtgtagatgtgtccaagagagctcagtctttatccctagacgcttcattgatcgaattcaaatcttgccccgtgggaatggttgtccaagaaaagaaatcatagtctggaagaagaacaagtcaattgtgtgtgtggaccctcaagctgaatggatacaaagaatgatggaagtattgagaaaaagaagttcttcaactctaccagttccagtgtttaagagaaagattccctgatgctgatatttccactaagaacacctgcattcttcccttatccctgctctggattttagttttgtgcttagttaaatcttttccaggaaaaagaacttccccatacaaataagcatgagactatgtaaaaataaccttgcagaagctgatggggcaaactcaagcttcttcactcacagcaccctatatacacttggagttt

SEQ ID NO: 256 - DNA, 518 bp, Homo sapiens
cctcccgcttacgcagcttgtcatactggcgacaggttctctcgaagagcgaggagatgctggtgtggttggaaaaaaggaaacagaaaacagaagaaatcacttaaggagagctgtcattttctattggtgaggattcctgatcttggggaggttctggaaagttcgtctctgtttcttcttcttcctcttcttggattggaataatttcaatgtcttcttcattctttggttgggaagatgtttcagttagcccaaccacttcttcttttatttcaatagtctgttcttttttttcttctgctgacaggagaactatgttagatttgggtctggagcacgttcttttccattcattctcaacgatgccagctattacaagttcctggaagaaggcaaagatcagcatcactgacaaaatgcccaagaacagagattgtatgctgtaacagtattgggtagatggggagtttttctcagagggattagctggttcacagttgtatatgttaatatat

SEQ ID NO: 257 - DNA, 231 bp, Homo sapiens
aaacttgatccaacctctttgcatcttacaaggttaaacagctaaaagaagtaaaataagaaggcaatgcttgtggaatgtacagtgcatattggcggcgcacgcctcattacgattcgcctgcttgcttctcctgttcaatcgtttctttggaaggcagtggatttttctcttgcgtctctgtcttcttcagtttcgacttatcgaatttctcgatctcagccatatcgg

SEQ ID NO: 258 - DNA, 551 bp, Homo sapiens
  misc_feature (1)...(551): n = A,T,C or G
ctgaatatactaaacnttgctctattatctgttgaattgctgtatttcactttttcagcatttggggatcattatttaattgaatttgtagagatcgattttccagacaggtctctgttcttcaatgaacaaatgataagaaacaatttgactccttatatgacaatggaattaaataaattgacactcatctaggaataattctacaatcatctccatctctaagattacctactgcaaacaaagaattgatctttctttctcaaaaaccacatgggtaagatgatcattgtgactctgaatgcaagaataagtgagtggaagctacaaggggagattatctgccaacatagaaagaatctagaagaaaagattttattacaggtaacatgacatagcttggagccatctttttggtctcttgcatacattttctctgcatgtctaaggaagaattcacaaggtagcaagcaccaatactttctgctttggagtttcacaaattgaaaatttgtccctctcttgttaagtcaatcaaacatctaccaatg

SEQ ID NO: 259 - DNA, 231 bp, Homo sapiens
aaacttgatccaacctctttgcatcttacaaagttaaacagctaaaagaagtaaaataagaaggcaatgcttgtggaatgtacagtgcatattggcggcgcacgcctcattacgattcgcctgcttgcttctcctgttcaatcgtttctttggaaggcagtggatttttctcttgcgtctctgtcttcttcagtttcgacttatcgaatttctcgatctcagccatatcgg

SEQ ID NO: 260 - DNA, 278 bp, Homo sapiens
aaaatatccctgaagtgacacactccttttttgagaccgatactggtattcttttattatagagactaaaaggtctgccttactagacttcccactttttgttctgaaaggaattaaggactgcaggtttccagctctgtcttcccgaggccattatgaacagattaaatggaaggacaaattctaaataactgggctttcaacatgaaaagggaaaggctgatggggagttcagaaccttgaatactgtaactgaacatccctcaaggttaatgcag

SEQ ID NO: 261 - DNA, 272 bp, Homo sapiens
ccaaaagaagtaagacagcttgctgaagatttcctgaaagactatattcatataaacattggtgcacttgaactgagtgcaaaccacaacattcttcagattgtggatgtgtgtcatgacgtagaaaaggatgaaaaacttattcgtctaatggaagagatcatgagtgagaaggagaataaaaccattgtttttgtggaaaccaaaagaagatgtgatgagcttaccagaaaaatgaggagagatgggtggcctgccatgggtatccatgg

SEQ ID NO: 262 - DNA, 500 bp, Homo sapiens
  misc_feature (1)...(500): n = A,T,C or G
ccggcagtttgtcacagccacagatgttgtccgagggaaccccaagttgaacttggcttttattgccaacctctttaacagataccctgccctgcacaaaccagagaaccaggacattgactggggggctcttgaaggtgagacgagagaagagcggacatttaggaactggatgaactccctgggtgttaaccctcgagtcaatcatttgtacagtgacttatcagatgccctggtcatcttccagctctatgaaaagatcaaagttcctgttgactggaacagagtaaacaaaccgccataccccaaactgggaggcaatatgaagaagcttgagaattgtaactacgcggtagaattggggaagaatcaagcgaagttctccctggttggcatcggtggacaagatctcaatgaaggaaaccgcactctcacactggccttgatttggcagctaatgagaaggtatacactgaatatcctcnaagaaattggtggtg

SEQ ID NO: 263 - DNA, 287 bp, Homo sapiens
ctctggcctcttactcaccctctaccacagacatggctcagtcactggctctgagcctccttaccctggttctggcctttggcatccccaggacccaaggcagtgatggaggggctcaggactgttgcctcaagtacagccaaaggaagattcccgccaaggttgtccgcagctaccggaagcaggaaccaagcttaggctgctccatcccagctatcctgttcttgccccgcaagcgctctcaggcagagctatgtgcagacccaaaggagctctgggtgcagcag

SEQ ID NO: 264 - DNA, 306 bp, Homo sapiens
ctgcccacctcaccctcagctctggcctctgactcaccctctaccacagacatggctcagtcactggctctgagcctccttatcctggttctggcctttggcatccccaggacccaaggcagtgatggaggggctcaggactgttgcctcaagtacagccaaaggaagattcccgccaaggttgtccgcagctaccggaagcaggaaccaagcttaggctgctccatcccagctatcctgttcttgccccgcaagcgctctcaggcagagctatgtgcagacccaaaggagctctgggtgcagcag

SEQ ID NO: 265 - DNA, 242 bp, Homo sapiens
ctgggagagctagactaagttggtcatgatgcagaagctactcaaatgcagtcggcttgtcctggctcttgccctcatcctggttctggaatcctcagttcaaggttatcctacgcagagagccaggtaccaatgggtgcgctgcaatccagacagtaattctgcaaactgccttgaagaaaaaggaccaatgttcgaactacttccaggtgaatccaacaagatcccccgtctgaggactg

SEQ ID NO: 266 - DNA, 132 bp, Homo sapiens
ctgcttccattggtgggtcatttttgctgtcaccagcaacgttgccacgacgaacatccttgacagacacattcttgacattgaagcccacattgtccccaggaagagcttcactcaaagcttcatggtgca

SEQ ID NO: 267 - DNA, 108 bp, Homo sapiens
ccatgggaatctaattaatttcataatgatgttggttgaacatgataccaaaaaatgcaggtattttcaagaacaataagatagataacagcattaaagcataatcct

SEQ ID NO: 268 - DNA, 414 bp, Homo sapiens
cctgacacaatatccctgttcactttgaagtgaattttgactctatattcagaaccttcctttaacacaatggtttcctttttgagggcttccagatctccagtaaggtccatggtgattggtcccggggcactctcacaaaccagggtgagccgggtgacaacgacattgggggctttcggatctgtcaccacaggaccatctcccagcagcgttttcttgtacttaattagactctcatcatctttgtccatttcctgcagctctttcagggacttctgtggtggaggcttataattgagcttgctgtccagctcatcatcgtcatcctcctccacatgtgggctctggggctttttcagtcattctgatctatttattcagtgcttcacgtctctgtccggggtgcctctg

SEQ ID NO: 269 - DNA, 461 bp, Homo sapiens
cgcgtggagggaatatgtgttctggaagaatagagatcaaattccaaggacggtggggaacagtgtgtgatgataacttcaacatagatcatgcatctgtcatttgtagacaacttgaatgtggaagtgctgtcagtttctctggttcatctaattttggagaaggctctggaccaatctggtttgatgatcttatatgcaaccggaaatgagtcagctctctggaactgcaaacatcaaggatggggaaagcataactgtgatcatgctgaggatgctggagtgatttgctcaaagggagcagatctgagcctgagactggtagatggagtcactgaatgttcaggaagattagaagtgagattccaaggagaatgggggacaatatgtgatgacggctgggacagttacgatgctgctgtggcatgcaagcaactgggatgtccaactgccgtcccagc

SEQ ID NO: 270 - DNA, 206 bp, Homo sapiens
gaatccaacaagatcccccgtctgaggactgacctttttccaaagacgagaatccaggacttgaatcgtatcttcccactttctgaggactactctggatcaggcttcggctccggctccggctctggatcaggatctgggagtggcttcctaacggaaatggacaaggattccaactagtagacgaaagtgatgctttccatgac

SEQ ID NO: 271 - DNA, 500 bp, Homo sapiens
  misc_feature (1)...(500): n = A,T,C or G
atgatgcagaagctactcaaatgcagtcgggttgtcctggctcttgccctcatcctggttctggaatcctcagttcaaggttatcctacgcagagagccaggtaccaatgggtgcgctgcaatccagacagtaattctgcaaactgccttgaagaaaaaggaccaatgttcnaactacttccaggtgaatccaacaagatcccccgtctgaggactgacctttttccaaagaccagaatccaggacttgaatcgtatcttcccnctttctgaggactactctggatcaggcttcggctccggctccggntctggatcaggatctgggagtggcttcctaacggaaatggaacaggattaccaactagtagaccaaagtgatgctttccatgacaaccttaggtctcttgacaggaatctgccctcanacagccnggacttgggtcaacatggattagaagaggattttatgttataaaagaggattttccccccttgncn

SEQ ID NO: 272 - DNA, 511 bp, Homo sapiens
  misc_feature (1)...(511): n = A,T,C or G
ggtcatgatgcagaagctactcaaatgcagtcggcttgtcctggctcttgccctcatcctggttctggaatcctcagttcaaggttatcctacgcagagagccaggtaccaatgggtgcgctgcaatccagacagtaattctgcaaactgccttgaagaaaaaggaccaatgttcgaactacttccaggtgaatccaacaagatcccccgtctgaggactgacctttttccaaagacgagaatccaggacttgaatcgtatcttcccnctttctgaggactactctggatcaggcttcggctcccgctccggctctggatcaggatctgggagtggcttcctaacggaaatggaaccnggattacccaactagtagacgaaagtgatgctttccatgacaacccttaggtctcttgacaggaatctgccctcacacngccaggacttgggtcaacatggattagaagaggattttattgntataaaagaggattttccccnccnttgaccc

SEQ ID NO: 273 - DNA, 101 bp, Homo sapiens
  misc_feature (1)...(101): n = A,T,C or G
gttngtaatnatgcanaagctactcnaatgcagtccnnctttttctggctcttgccctcatcctggttctngaatcctcacttcaaggttatcctacncac

SEQ ID NO: 274 - DNA, 451 bp, Homo sapiens
  misc_feature (1)...(451): n = A,T,C or G
anctagactannntggtcatgatgcagaagctactcaaatgcagtcggcttgtcctggctcttgccctcatcctggttctggaatcctcagttcaaggttatcctacgcagagagccaggtaccaatgggtgcgctgcaatccagacagtaattctgcaaactgccttgaagaaaaaggaccaatgttngaactacttncaggtgaatncaacangatcccccgtctgaggactgacctttttccaaagacgagaatccaggacttgaatcgtatcttcccactttctgaggactactctggatcaggcttcggctccggctccggctctggatcaggatctgggagtggcttcctaacggaaatggaacaggattaccaactantagacgaaagtgatgctttccatgacaaccttangtctcttgacaggaatctgcccncagacagcc

SEQ ID NO: 275 - DNA, 423 bp, Homo sapiens
attgacacttcctggtgggatccgagtgaggcgacggggtaggggttggcgctcaggcggcgaccatggcgtatcacggcctcactgtgcctctcattgtgatgagcgtgttctggggcttcgtcggcttcttggtgccttggttcatccctaagggtcctaaccggggagttatcattaccatgttggtgacctgttcagtttgctgctatctcttttggctgattgcaattctggcccaactcaaccctctctttggaccgcaattgaaaaatgaaaccatctggtatctgaagtatcattggccttgaggaagaagacatgctctacagtgctcagtctttgaggtcacgagaagagaatgccttctagatgcaaaatcacctccaaaccagaccacttttcttgacttgcctgttttgg

SEQ ID NO: 276 - DNA, 433 bp, Homo sapiens
  misc_feature (1)...(433): n = A,T,C or G
tgnncatgatgcanaagctactcaaatgcagtcggcttgtcctggctcttgccctcatcctggttctggaatcctcagttcaaggttatcctacgcagagagccaggtaccaatgggtgcgctgcaatccagacagtaattctgcaaactgccttgaagaaaaaggaccaatgttcgaactacttccangtgaatccaacaagatcccccgtctgaggactgacctttttncaaagacgagaatccaggacttgaatcgtatcttcccactttctgaggactactctggatcaggcttnggntccggctccggctctggatcangatctgggagtggcttcctaacggaaatggaacaggattaccaactagnngacgaaagtgatgctttccatgacaaccttaggtctcttgacaggaatctgccctcaga

SEQ ID NO: 277 - DNA, 478 bp, Homo sapiens
ctggctaggtgtgtgtgtatgtgagtaggggtgctattgattggcacatattttcccccctggagtttaggggtggcagaaagcttttatagtaccaaaaaagtaaacattgataatatggcctgacaacaatcagatatgctaagctctagaagcaaaagcaaggtaggattgcctccaaatgttgacaggtattagccataccacagtaactagatctaatgtgagggctaaatgcctggagaggcagaaccctaaaggatgcttagttatagctccatgctgccgccgagtggcttgatgctccattacaccctccttggatccaaccttccattaaggctgaaggctctagagggcagagtattcaagatgttagatctggtccaagcccaaattctagagttaaaagcagaggggttcttagtggctgaaaaaaaacaaaacctgatgacatttgggactccagttttgagga

SEQ ID NO: 278 - DNA, 208 bp, Homo sapiens
aagctactcaaatgcagtcggcttgtcctggctcttgccctcatcctggttctggaatcctcagttcaaggttatcctacgcagagagccaggtaccaatgggtgcgctgcaatccagacagtaattctgcaaactgccttgaagaaaaaggaccaatgttcgaactacttccaggtgaatccaacaagatcccccgtctgaggactg

SEQ ID NO: 279 - DNA, 330 bp, Homo sapiens; identical to SEQ ID NO: 2

SEQ ID NO: 280 - DNA, 294 bp, Homo sapiens
ccaaactcctccagatgccagacggtctccttcttgtccagatccacatagaacatctcatcttcatcaaattcaaacataaactcccctgttggtctatgcgtctgtacaaacgcggcataagttgacacatggtccgccttgatggccccagctcctcggagactcagcaggaaagccaaggagagggctctcaagatcacagctctgatatggaacattctgtcttcagggcgcatgttgtggggtctataattgatgactgtgagcacaggaacagtgatgaggaactga

SEQ ID NO: 281 - DNA, 269 bp, Homo sapiens; identical to SEQ ID NO: 4

SEQ ID NO: 282 - DNA, 491 bp, Homo sapiens
ccaggagtgtcaaactctgtaagcacacggataccccggagccgtgcgtattcaatgacctccttcacatcctgtgctgtgtagatgtgggtgacagggttgtaggacccctttctcatgagctctggaaaagtgaagctctcatatgggaaggaaggatcatctaccagatgccagtggaacacgttcaatttattgtacgccatgacatccagagtgtccaggatgctagagagtggcaggtaatggcgagatgtatccaacagcaagccccggtgaggaaagcggggaaagtcctcaatctcagtcttgttgataaagaactcggagagctccccagacagtctcagagaggagtaaacactggtcatcatttatggtcagggtataattctccactgactccaaagtaggaagctggttacatccaggtgtgactacagagacaaccaacacattcttctccagtgtatgcccgtttccctaggttg

SEQ ID NO: 283 - DNA, 472 bp, Homo sapiens
  misc_feature (1)...(472): n = A,T,C or G
cctcnnacngaaggctggtgaccaggtcccaggcgggcaagactcagccttggtggggcctgaggacagaggaggcccaggagcatcggggagagaggtggagggacaccgggagagccaggagcgtggacacagccagaactcatcacagaggctggcgtccagtcccgggtcacgtgcagcaggaacaagcagccactctgggggcaccaggtggagaggcaagacgacaaagagggtgcccgtgttcttgcgaaagcggggctgctggccacgagtgctggacagaggcccccacgctctgcttgcccccatcacgccgttccgtgactgtcacgcagaatctgcanacaggaagggagactctaagcgggagtgcggccaagcctgcctccgcccgtcagggaggactcccgggctcactcnaaggaggtgccaccatttccgctttggnnagcttttctttttcttt

SEQ ID NO: 284 - DNA, 349 bp, Homo sapiens
  misc_feature (1)...(349): n = A,T,C or G
aaaaaatttactcatcttccataaagcgacttttaatgtatcaacacttaaagatacacagtgacttaatgaaatatcagcacaactgcatagaattgagctccagagaattatacactcgagctgctttcctgggctctggtttataagggtattggcttagagaccagcttggagtcatttgcccctacccgggaaatgcaggccaggaaacttaagattttgcgggccttttctgtttctaggtaaaatgcagggagctccctgaaggncttgaaaaccatcaaccattcaaatatggtatcctggggacctttcctcttgagtaaanggaagaaaggaggtttgg

SEQ ID NO: 285 - DNA, 179 bp, Homo sapiens
  misc_feature (1)...(179): n = A,T,C or G
aaagntggctcaagactggcccangcataatactgtcaatctaaaggtaaccggcaacatcaaaaagtacatctcaaaagaatcaggcttaaagataaacaggagaactggatatatctaagagtaagaagtgtaaacaatagaaaagaggtagggtttagggttctcatctagggatt

SEQ ID NO: 286 - DNA, 462 bp, Homo sapiens; identical to SEQ ID NO: 16
  misc_feature (1)...(462): n = A,T,C or G

SEQ ID NO: 287 - DNA, 388 bp, Homo sapiens
ggacattcaaatgtctttatccacattcctgaaggataattgttatagattccctacctccataggaatgcttataatggattatctatacaatctccacattcccacattttgcattagagaatggaatcagtcaaaccctgttcccagagtttcccttagagttctcacctgttgtcttatatccatctaggaatccccatctctaatgtaagcttggagatccgggcccccgggggacaggtgactgaaggacaaaaactgatcctgctctgctcagtggctgggggtacaggaaatgtcacattctcctggtacagagaggccacaggaaccagtatgggaaagaaaacccagcgttccctgtcagcagagctggagatcccag

SEQ ID NO: 288 - DNA, 387 bp, Homo sapiens; identical to SEQ ID NO: 20

SEQ ID NO: 289 - DNA, 279 bp, Homo sapiens
  misc_feature (1)...(279): n = A,T,C or G
ngnccacaagatatgttctatagacgtccatgagtcctcttgctgtgngggagcggtatccacagacttntggaataattggcctgtgaggaagctcatcaaagctgcaaacagtacaantgaatgcaataganagncacagggccttattagcctttctgatggaggacttganatttgttgnccaggaanctattgtgtcataaactgaagagacatnccactttgatggattatttttcttttcagaaagacttggcttccttgtcctttctactg

SEQ ID NO: 290 - DNA, 235 bp, Homo sapiens
  misc_feature (1)...(235): n = A,T,C or G
ngtccagtagggctgagatgttgggagccatcaatcaggaaagccgggttagtaaagcagttgaagtgatgattcancacgtagaaaacttgaagaggatgtatgccaaaaagcaccgctgaattagaagaactgaaacaggttcttctgcagaatgaaaggcctttcaatnctcttgaagatgatgatgactgccaaattaaaaaacgttcagcttttctaaactccaagccat

SEQ ID NO: 291 - DNA, 318 bp, Homo sapiens
  misc_feature (1)...(318): n = A,T,C or G
cctttccttgagctgcacgtgaacctgtgtgggcaggcagcgtttgcaggcgtgtttacgggcaggcagcgtttgcaggcgtgtttaccggcaggcagcgtttgcaggcgtgtttacatgcaggcgtancaccatgtgagaccactggtccagggtttcagaggtcctgctcaggtgaatcggctgtgttctcacaagttcacggagctgantgggtgtgcaacatgaaatactagtgctgtgagggacagaagggacagaaagaggctnaagaccatnatccagctatacctgtgcctcggcttttctcagacctcg

SEQ ID NO: 292 - DNA, 381 bp, Homo sapiens
  misc_feature (1)...(381): n = A,T,C or G
ccaagcctcatcaataactgtatccaaaaggagacgctgcttggggtgtacccagagaaaacaccaagctttcctggcttcccggccctccctctccccattagtctttggggtgcatacataagtgttgtgtgaagtctcttggggtttagaagatcttgcactcattgatggagaagagcctccttctgtttcgtctcctggcctggttgacggcagttcggacgacgcactcaaacacctgctgtactccccgattgctaagggctgagcactccaggtagcccttggctctgacatcctgggccagnttcttcccttccatggcattgacgcangaggccctgtggggccccatctcccgctggtcagtctgggtgg

SEQ ID NO: 293 - DNA, 416 bp, Homo sapiens; identical to SEQ ID NO: 37
  misc_feature (1)...(416): n = A,T,C or G

SEQ ID NO: 294 - DNA, 317 bp, Homo sapiens
aaattatgacacaaaattttattaacaaggaaatatccattaattgactactacagtaaaaactttataatgcttgtatcatgaagaaagaccttccttttccttatatattaattgaactacataggcttgctgtacattttgttattcatgttataagaattctagattccattgcttttgaaatatgtttctttttaggaactaaaagtcaacttatagtttgatttctgttttatttgtactgtgtttctgattttgtgggtttctaaataaaaagatcaaacccaccactttcaatatactgttttctattt

SEQ ID NO: 295 - DNA, 156 bp, Homo sapiens; identical to SEQ ID NO: 40
  misc_feature (1)...(156): n = A,T,C or G

SEQ ID NO: 296 - DNA, 533 bp, Homo sapiens; identical to SEQ ID NO: 43
  misc_feature (1)...(533): n = A,T,C or G

SEQ ID NO: 297 - DNA, 529 bp, Homo sapiens
  misc_feature (1)...(529): n = A,T,C or G
cctgtggaaacgggcccctcccggagcccanggaaaagactgcttctctctcagcagccccattcctggttattccagggctgaccaacaaggacatttccacctcacaagctgctgctcactgatgttcccgtgggataagaggggaaattaagtgacaaccgcagcagcatccgctgggtctgtccctgtatcgcatgccagaggcttgcgcatcaccaagggtcgggcgtagctgtgctgccctgcgttgtgtgcatagcctctctctcctctgcttgcttaagtccttcttanccaccctctcccttanggctctaccaggtatgccacggggagcaggaatattaatcctagaatcctgactctcagtggcaatacagagtgtactccagggatgctgggtgaaacccggggaattctactcaccattaaccttgggagtaagaggccatacctcatctgaaactttacctgcccgggcgggccgttcaaaaggccnattcccccnccctttgcgccnttatag

SEQ ID NO: 298 - DNA, 345 bp, Homo sapiens
  misc_feature (1)...(345): n = A,T,C or G
ccaatgtggttggtcttcancttgcanttagccaggttccataccttgaccagcttgtcccagccacaggagacgatgatagggttgctgctgttgggcgagaagcggacacaagacacccactctgagtggctctcatcctggacagtgtatttgcacacacccagggtattccatagcttgatggttttatctcgagatccagagacaatctgccggttgtcagaggagaaggccacactcagcacatccttggtatggcccacaaatcgcctcgtggtggtgcccgttgtgagatcccagaggcgcagggttccatcccaggagcctgagagggcaaactgg

SEQ ID NO: 299 - DNA, 182 bp, Homo sapiens
  misc_feature (1)...(182): n = A,T,C or G
ccacaagatatgttctagagacgtccatgagtcctcttgctgtgtgggagcggnatccacagacttctggaataattggcctgtgaggaagcccatcaaagctgcaaacagtacaatgaatgcaatagagagccagagggccttattagcctttntgatggaggacttgagatttgttgccc

SEQ ID NO: 300 - DNA, 440 bp, Homo sapiens
ctgcaaatggttctgctgaaacatctgccttggacacagggttctcgctcaacctttcagagctgagagaatatacagagggtctcacggaagccaaggaagacgatgatggggaccacagttcccttcagtctggtcagtccgttatctccctgctgagctcagaagaattaaaaaaactcatcgaggaggtgaaggttctggatgaagcaacattaaagcaattagacggcatccatgtcaccatcttacacaaggaggaaggtgctggtcttgggttcagcttggcaggaggagcagatctagaaaacaaggtgattacggttcacagagtgtttccaaatgggctggcctcccaggaagggactattcagaagggcaatgaggttctttcctcaacggcaagtctctcaaggggaccacgcaccatgatgccttgg

SEQ ID NO: 301 - DNA, 396 bp, Homo sapiens
  misc_feature (1)...(396): n = A,T,C or G
cttgcgtccccgcgtgtgtgcgcctaatctcaggtggtccacccgagaccccttgagcaccaaccctagtcccccgcgcggccccttattcgctccgacaagatgaaagaaacaatcatgaaccaggaaaaactcgccaaactgcaggcacaagtgcgcattggtgggaaaggaactgctcgcagaaagaagaaggtggttcatagaacagccacagcagatgacaaaaaacttcagttctccttaaagaagttangggtaaacaatatctctggtattgaagaggtgaatatgtttacaaaccaaggaacagtgatccactttaacaaccctaaagttcaggcatctctggcagcgaacactttcaccattacaggccatgctgagacaaagcag

SEQ ID NO: 302 - DNA, 548 bp, Homo sapiens
  misc_feature (1)...(548): n = A,T,C or G
ctgcgtgattcccgtgattgcgttacaagctttgtctccttcgacttggagtctttgtccaggacaatgagacactcaaagagaacttattgtcctgattgggatgacaaggattgggattatggaaaatggaggagcagcagcagtcataaaagaaggaagagatcacatagcagtgcccaggagaacaagcgctgcaaatacaatcactctaaaatgtgtgatagccattatctggaaagcaggtctataaatgagaaagattatcatagtcgacgctacattgatgagtacagaaatgactacactcaaggatgtgaacctggacatcgccaaagagaccatgaaagccggtatcagaaccatagtagcaagtcttctggtagaagtggaagaagtagttataaaagcaaacacaggattcaccacagtacttcacatcgtcgttcacatggggtatgaaccgtttttacctgcccgggcgggcgctaanggcgaattccagcacactnggcgccgttctaggggatccgagctcggtccanctt

SEQ ID NO: 303 - DNA, 232 bp, Homo sapiens
ccagcgacagcctggcctgggaatggactggcagctcatcactaaaatgactcctttcatggaatccactgctatgcagccacactgaccacagagcaactgaataggtgagcattggattgttgatgacaactcttcagcagaacaattgtgtgtttgaagggactgttttatgatgaaataactgttatttcctggagctaattgttgaatgacagtttgtcaactgttt

SEQ ID NO: 304 - DNA, 232 bp, Homo sapiens; identical to SEQ ID NO: 57

SEQ ID NO: 305 - DNA, 191 bp, Homo sapiens; identical to SEQ ID NO: 58
  misc_feature (1)...(191): n = A,T,C or G

SEQ ID NO: 306 - DNA, 342 bp, Homo sapiens
aaacttttgagttgtagtcagaaactgttgttggactgcatagttttcaaaagtttttggtacatttctgactttagaaatctggggtaggaatccctttccatatgcatatagactattttctgagcttcttcaaaacatgtttcagtgggttcctgaatgttcctgatgatagtctctcttgtcgaactgtcaatgttaatctctctaggggactgtggctggatgtaaatcttataaagcttctttgccctagaaattctgctccaccgtgaggcaattttcttataggtttcacatgccatccagaattgaatattctcgtcactgtgctccattttt

SEQ ID NO: 307 - DNA, 545 bp, Homo sapiens
ccagtagggctgagatgttgggagccatcaatcaggaaagccgggttagtaaagcagttgaagtgatgattcagcacgtagaaaacttgaagaggatgtatgccaaagagcacgctgaattagaagaactgaaacaggttcttctgcagaatgaaaggtctttcaatcctcttgaagatgatgatgactgccaaattaaaaaacgttcagcttctctaaactccaagccatcttctctacgaagagtgactattgcctctttacccagaaatattggaaatgcaggaatggtggctgggatggaaaataatgatcgattcagtagaaggtcaagcagttggcgtattttggggtcaaagcagagtgaacaccgtccctcattacctcgatttattagcacctattcctgggcagatgctgaagaagaaaaatgtgaactaaaaactaaagatgactcagagccatctggagaagaaacagtagaaaggacaaggaagccaagtctttctgaaaagaaaaataatccatcaaagtgggatgtctct

SEQ ID NO: 308 - DNA, 330 bp, Homo sapiens
cctccatctcggctccagtccacactgtagatcgtgtctgggtgcacctctgggcccagtgtcagcatggccgccccagtgcccacgtcccacaccatgatcacgttgtcacaacctgcactgagcagcacgttctgggctgtggtgtgccaggccacaatgcccacacgcttggtgtggccctccagggtgacgacgggctcccgcaggggcagcatcaggcccccatccgggatctcccacaccatgactgtgcagtcctcggagccactggcaatgacgttgtcattgtgcgggcaccaggcgatgtctagcgcaggggctgtgtgg

SEQ ID NO: 309 - DNA, 392 bp, Homo sapiens; identical to SEQ ID NO: 67
  misc_feature (1)...(392): n = A,T,C or G

SEQ ID NO: 310 - DNA, 221 bp, Homo sapiens
  misc_feature (1)...(221): n = A,T,C or G
nccaggctcaggccctggggtgaaaggagacaggtgctgccaagaccatacatcagtcatctggcagcagctcgagaagcatgtcctccacgccgtcaatcttgatgtggtgcactaaagcgccnagaaaacttggagtctgaggatcggtatcgtccatcagggtagagctgccacatgataggcagcaggcttgggcctatctgggtgggggtcatagg

SEQ ID NO: 311 - DNA, 118 bp, Homo sapiens
  misc_feature (1)...(118): n = A,T,C or G
ncctcccagagaaggctggtgaccaggtcccaggcgggcaagactcagccttggtggggcctgaggacagaggaggcccaggagcatcggggagagaggtggagggacaccnggaaaa

SEQ ID NO: 312 - DNA, 133 bp, Homo sapiens
  misc_feature (1)...(133): n = A,T,C or G
gccggncaggtaaagaactaatttgtaaattatgacacaaaattttattaacaaggaaatatccattaattgactactacagtaaaaactttataatgcttgtatcatgaagaaagaccttccttttncctat

SEQ ID NO: 313 - DNA, 274 bp, Homo sapiens
  misc_feature (1)...(274): n = A,T,C or G
ngtaaatgattctttatttcaataaactttaacaaacaatatataatatttcttccttaaaaagctcattcaaagatcataggcagacttcttccccattgtattttagttggggagataaaggcaaaaagaggaaatgtaagctatcttacagtcattctgagaacctctggtttcatgctatactttcccagctaaaagttactaatttacgaagttcagatctgaaacttaaaaatcaanatccatatattaggatgtcctgctgtcacac

SEQ ID NO: 314 - DNA, 268 bp, Homo sapiens
  misc_feature (1)...(268): n = A,T,C or G
gtgatctccccatttgaaggtcgactgattagcaatctaagttctgcccggaactttaattcctctttgccaggtaatgcattcacagatcctggggactagggtgtggacatctttgggaggcattattctgcctgccataatagaattgttnggaagattaaacaacataatatacatgacgtatgttgangcacgcttggcacctgggaaatactcaggatgtactaaccattgctcctacacagntcagctnctgaaggagtcc

SEQ ID NO: 315 - DNA, 201 bp, Homo sapiens
aaaatttccaacctgaagatgggtcataattacacgttcaccgtccaagcaagatgcctttttggcaaccagatctgtggggagcctgccatcctgctgtacgatgagctggggtctggtgcagatgcatctgcaacgcaggctgccagatctacggatgttgctgctgtggtggtgcccatcttattcctgatactgctg

SEQ ID NO: 316 - DNA, 202 bp, Homo sapiens; identical to SEQ ID NO: 78
  misc_feature (1)...(202): n = A,T,C or G

SEQ ID NO: 317 - DNA, 182 bp, Homo sapiens
  misc_feature (1)...(182): n = A,T,C or G
accagcagtcctgcggcacctacctccgcgtgcgccagccgccccccaggcccttcctggacatgggggagggcaccaagaaccgaatcatcacagccgaggggatcatcctcctgttctgcgcggtggtgcctgggacgctgctgctgttnaggaaacgatggcaagaacganaactcngg

SEQ ID NO: 318 - DNA, 149 bp, Homo sapiens; identical to SEQ ID NO: 80
  misc_feature (1)...(149): n = A,T,C or G

SEQ ID NO: 319 - DNA, 240 bp, Homo sapiens
  misc_feature (1)...(240): n = A,T,C or G
ccagcctacaatggggatgttgtgtttctgttcaccttcgtttactatgcctgtgtcttctccaccacgctggggtctgggaggaatggacagacagaggatgagctctacccagggcctgcaggacctgcctgtagcccactctgctcgccttagcactaccactcctgccaaggaggattccatttggcagagcttcttccaggtgcccagctatacctgtgcctcggctttttcana

SEQ ID NO: 320 - DNA, 374 bp, Homo sapiens; identical to SEQ ID NO: 83

SEQ ID NO: 321 - DNA, 285 bp, Homo sapiens
cctttccttgagctgcacgtgaacctgtgtgggcaggcagcgtttgcaggcgtgtttacgggcaggcagcgtttgcaggcgtgtttaccggcaggcagcgtttgcaggcgtgtttacatgcaggcgtagcaccatgtgagaccactggtccagggtttcagaggtcctgctcaggtgaatcggctgtgttctcacaagttcacggagctgagtgggtgtgcaacatgaaatactagtgctgtgagggacagaagggacagaaagaggctgaagaccatcatccag

SEQ ID NO: 322 - DNA, 135 bp, Homo sapiens
aaagagaactaatggaagtggattgaatacagcagtctcaactgggggcaattttgccccccagaggacattgggcaatgtttggagacattttggtcattatacttggggggttgggggatggtgggatgtgtg

SEQ ID NO: 323 - DNA, 297 bp, Homo sapiens
ccattgcgggaaccctcaagttcaacccagagaccgactacctgacgggcacggatggcaagaagttcaggctggaggctccggatgcagatgagcttcccaaaggggagtttgacccagggcaggacacctaccagcacccacccaaggacagcagcgggcagcatgtggacgtgagccccaccagccagcgcctgcagctcctggagccttttgacaagtgggatggcaaggacctggaggacctgcagatcctcatcaaggtcaaagggaagtgtaccactgaccacatctcag

SEQ ID NO: 324 - DNA, 413 bp, Homo sapiens
  misc_feature (1)...(413): n = A,T,C or G
ccttgcctcanatccnnggtcactcggaagaggccatgtctaccctcaatgacactcatggaggaaatgctgagagaagcattcagatgcatgacacaagagccaatgaaaggccctattgctatgcaatctggtccaaaaccactcttcaggaggatgtcttcactggtgggccccacgcaaagcttcttcatgagggaatctaagactttgggggctgtccagattatgaatgggctcttccacattgccctggggggtcttctgatgatcccagcaagggatctatgcacccatctgtgtgactgtgtggtaccctctctgggggaggcattatgtatattattttccggatcactcctggcagnaacggagaaaaaactccangaagttgtttggtcaaaggaaaaatg

SEQ ID NO: 325 - DNA, 340 bp, Homo sapiens
ctggggggtccgggaaaggggttgggccatgagccaggcagctccgaagcagtcactgaggccagggagcctgcacccaggtcatggggcgacctggctctcactcctggcctgggtgctcacctacagaccacttcacttcccctgtccgcagcgtcactatgtcctcataggtggctgtctggtcaatgtccaggccctcgtaggtgtgatcttcctccatgccagccttgctgtcatccttgtccagcagcaggaagataggcacgatgatgaagaggatgatcagcagcgtctggatcatgatgataccatccttcagcgtgttcctctgcttcag

SEQ ID NO: 326 - DNA, 240 bp, Homo sapiens
ccagcctacaatggggatgttgtgtttctgttcaccttcgtttactatgcctgtgtcttctccaccacgctggggtctgggaggaatggacagacagaggatgagctctacccagggcctgcaggacctgcctgtagcccactctgctcgccttagcactaccactcctgccaaggaggattccatttggcagagcttcttccaggtgcccagctatacctgtgcctcggcttttctcag

SEQ ID NO: 327 - DNA, 353 bp, Homo sapiens
aaaaaaacaaagaagaagaagtcacaaagcaattgaaatggagcatccgcttggagaattaagacagggtgctcctgagacagacttccaagacagcttctttgaagtgctgtgtggggttaaatattcttcagcaaagagggtcacaggtaagggccccgtgaaacagcagttcttaatatcatctttatcttcccttaggataatataccccaaaatactttgcatctataagatgtatacatcactgcagttcacgaaacacagtctgctgcccaatacatatccatgttgcatggctaatgaaatgtcaaaccctactgggtacatggcagtggagctccacagcaagg

SEQ ID NO: 328 - DNA, 267 bp, Homo sapiens; identical to SEQ ID NO: 143

SEQ ID NO: 329 - DNA, 228 bp, Homo sapiens
cctccccaggacgacgtcttcccgacgcaagagcacccgtaactgtaacctatcctttatctcgatggttaagggcagccaggcgtgctgcttctcgtccaaatacacgaacttctcccaggcccacaggcggtccgggtggtcggtgactgcctccccgagtgtcgggcactcggccatggcgtcctcgggccgcctaagaagcaagagccagagcctctcaaggcc

SEQ ID NO: 330 - DNA, 580 bp, Homo sapiens
ctgaaggatgaaagagattggcaaggaagcaggaatgagtcagctttgggggaatattacctggtggctcccatcatttattgcttaggacatacccttttacctacttgctatcatgctggacctcagcatttcagggaccagaaaagatggggacaccaatgcaagcccaagactaccatccagaggaccgttcctgcccatgctgcttcctctagttttgctttcagagtggtgtcaccccacttgctaactcaagagtgcatcactaggcttcctgagcaggtttgatcgggatttggcctgggtctgttggtcagggaggcagaggtgtggggagaagggtgaaaggtgactgagccagggttccaggctcctcactcacggggctgaagctgggcatcgtcaggctcagagcccctcgacgtgcggcagcggtagcccttcttcttgagcacgtggcagatcatgaagcctgccaggcccatgaggaagaagaccagcacaagcaggaagagcatatatagcccatgttggggcggttccaggtcaggctgtggttccgacatgaggccctggg

SEQ ID NO: 331 - DNA, 542 bp, Homo sapiens
  misc_feature (1)...(542): n = A,T,C or G
aaactccaaattcctttatcgaagcagctatctgctaatattactgaatgacaagtctttggaaatgatagttaaccgaaaatgcagaaagaatcatagcaactaatgataatgacgggtaaaggatagaaaataaaatttttagccacaggttgtggttacagcatccaggccatcaccgacatctcggcagggctatgccgccacttcgtattaaacgtctactcctccgagaatgcccttattaaattaagtgcaaagtaaggcatcccaccccagacagagggatccacattctttaatcatgatgcgggccactgtaacagggagatggatgcaggacgcagacggggtggggcgcccaagcgacgcacttagacggtgatctgttggttttctctgaaaaatgatctctggtgtgaggcacaaatatctggaaacatccggaagacctggtctggcggcggctcctcgggggcctgcatcacaganccggctccacagctcttcccagcctcttctgccagttgccggacatacag

SEQ ID NO: 332 - DNA, 345 bp, Homo sapiens
ccaatgtggttggtcttcagcttgcagttagccaggttccataccttgaccagcttgtcccagccacgggagacgatgatagggttgctgctgttgggcgagaagcggacacaagacacccactctgagtggctctcatcctggacagtgtatttgcacacacccagggtattccatagcttgatggttttatctcgagatccagagacaatctgccggttgtcagaggagaaggccacactcagcacatccttggtatggcccacaaatcgcctcgtggtggtgcccgttgtgagatcccagaggcgcagggttccatcccaggagcctgagagggcaaactgg

SEQ ID NO: 333 - DNA, 542 bp, Homo sapiens
ctgtatgtccggcaactggcagaagaggctgggaagagctgtggagccggctctgtgatgcaggcccccgaggagccgccgccagaccaggtcttccggatgtttccagatacttgtgcctcacaccagagatcatttttcagagaaaaccaacagatcaccgtctaagtgcgtcgcttgggcgccccaccccgtctgcgtcctgcatccatctccctgttacagtggcccgcatcatgattaaagaatgtggatccctctgtctggggtgggatgccttactttgcacttaatttaataagggcattctcggaggagtagacgtttaatacgaagtggcggcatagccccgccgagatgtcggtgatggcctggatgctgtaaccacaacctgtggctaaaaattttattttctatcctttacccgtcattatcattagttgctatgattctttctgcattttcggttaactatcatttccaaagacttgtcattcagtaatattagcagatagctgcttcgataaaggaatttggagttt

SEQ ID NO: 334 - DNA, 618 bp, Homo sapiens
  misc_feature (1)...(618): n = A,T,C or G
aaaaaaaaaataattaagatacaggtttcaaaccatattaccacgatttcaaaaattttgtgaataaaagaagacacaccgtatttataaagcttctaggggctgtaatagatacataattttggatgtggtataggttggcctatatatacaaaaatacgtcactaaaattaagtggagtcacaataactttttatgtaactttgttttagttctaatttggtaacagtgactcaaaataaatagaatcatattttaggtggaaactcgatgatccatgtaagtagcggggctggagttctgtgctgtctgggcagagaaagcacttggactgaatgatgggcacagctctctctgtgaagtcctgcagagtcactaaccttgagttcatgtgctctaagcttcactgtccctccaacccaagatcccaatttcttttattccatcttgtttcctcttgtaaacagaagagcacaatatgacctgttttcaaaggagccggcaggaatctggttctgataacaaagtccctgtcactcctgtgtctattagttctcctaggtagtttcttcagggctgcgccaacttcacttcacagtanatgaaggaatagtgcca

SEQ ID NO: 335 - DNA, 193 bp, Homo sapiens; identical to SEQ ID NO: 166
  misc_feature (1)...(193): n = A,T,C or G

SEQ ID NO: 336 - DNA, 421 bp, Homo sapiens; identical to SEQ ID NO: 172
  misc_feature (1)...(421): n = A,T,C or G

SEQ ID NO: 337 - DNA, 481 bp, Homo sapiens; identical to SEQ ID NO: 173
  misc_feature (1)...(481): n = A,T,C or G

SEQ ID NO: 338 - DNA, 146 bp, Homo sapiens
  misc_feature (1)...(146): n = A,T,C or G
gtgtttgatggtaaggtttntcacanagccgaaaatgtngctgaanatcaaaaaaatctcacaagaaggggagggagaagagattcgattctgagtctcctactcccgggttctgcgtagagaagccgactgntgctggaggtcng

SEQ ID NO: 339 - DNA, 395 bp, Homo sapiens
  misc_feature (1)...(395): n = A,T,C or G
ctggaaaaggcnaaanagagncttaagaacgtggatgagaacattcgcangctcacngggcgggatccgaatgacntgaggcccatccaagccagattgctggccctttctggtcctggnggaggnagaggacgtggtagtntattactgaggcgtggattctnanatagtgnaggaggacccncagccnaacagagagaccttgaaggggcagtcantangctgggcggggagcgtnggaccagaagagaatcacgccaggaaagcgacccggangatgatgatgttaaaaagccancattgcagncttcagttgtagctacctncaaagagcgcacacgtanagacnttatccagnatcaaaatatggatgaaaagggaaagcaaaggaaccg

SEQ ID NO: 340 - DNA, 579 bp, Homo sapiens
ctgccctacttttcaattcagatatactagtaccttacctagaaataatgttaacctagggtgaagtcactataatctgtagtctattatttgggcatttgctacatgatgagtgctgccagattgtggcaggtaaagagacaatgtaatttgcactccctatgatatttctacatttttagcgaccactagtggaagacattccccaaaattagaaaaaaaggagatagaagatttctgtctatgtaaagttctcaaaatttgttctaaattaataaaactatctttgcgttcttttctgcaacagatgattccaacatgggtgtttgtctattcttctttactcttgaaacattagaccatgggaggctcttacagccttgagttgatatttatacaacccaaatctaggcttgaacggtgaggtgtcaggtcatcaaatattcatgtctatatagtcttacacaggttctcaaaaaaaatgttcatgggataggtcattgataatggattccttattctgagaactccagacgactgaaatatatgagagaaggaaaaggacatagtaggagcagg

SEQ ID NO: 341 - DNA, 585 bp, Homo sapiens; identical to SEQ ID NO: 183

SEQ ID NO: 342 - DNA, 295 bp, Homo sapiens
aaaaagtttctaatattaaagtcagaatattaatacaattaatattaatattaactacagaaaagacaaacagtagagaacagcaaaaaaataaaaaggatctccttttttcccagcccaaattctcctctctaaaagtgtccacaagaaggggtgtttattcttccaacacatttcacttttctgtaaatatacataaacttaaaaagaaaacctcatggagtcatcttgcacacactttcatgcagtgctctttgtagctaacagtgaagatttacctcgttctgctcagagg

SEQ ID NO: 343 - DNA, 534 bp, Homo sapiens
aaatgtttcatttgcagagttttatatccattaagtgcctttgaaagtttccagttgtgtgggctgctgtctcacctcccaccaatttctcctttctccatatggtgctaaaacctcaaagctgaggagggctgcaggacccttagcagattcagtgtgtcacccttgtcctgtgttcacgccagggcttcctaaatgaaagacatcggttacctgcttatgggaaggtgagcagcaaaggaattgaagttcgggacagggtagaattatgggttttcattgtgtttcatgccaaacccacaaaatccaaaatagaattcaagttaaacaaacttctactacaaaatggaaggggaaaaaggctcaggaaggtctatgagaatgagctgacttatctcgttaaatcttaagataaatgagggtaacccaaggctgcaccttggtgtaccaccctgagtggagttgaggtgacttcatttgattgcttcaggcgaactatataggtcaagtccagattataaaaaaattatctgc

SEQ ID NO: 344 - DNA, 464 bp, Homo sapiens; identical to SEQ ID NO: 200
  misc_feature (1)...(464): n = A,T,C or G

SEQ ID NO: 345 - DNA, 437 bp, Homo sapiens
  misc_feature (1)...(437): n = A,T,C or G
cctccgtggcagcagaagatcttttcgtccactatggccgcgatgggcaggcagttgaagcagtcagtgaaggttttccacagtttgatgttgtagcgtctcttgcactcatcgtagaaaccatagatgcggttgatgctggcacactcgtggttcccacggagcaggaagaagttctcggggtacttgatcttataggccagcagcaggcagatggtctccaaggactgcttgcccctgtccacatagtcccccagaaagaggtagttgctctcgggagggaaaccgccatactcaaatagtcgcagaaggtcgtagtactggccgtgtatgtcaccgcagatcttgaggggtgcctccagctccanaagaatgggctggctcagaaaaatctcccgggatttcaggcacagaccgcggatctcgttctctgtcag

SEQ ID NO: 346 - DNA, 562 bp, Homo sapiens
ctgttgactcagattcggcattttaattacattgtttccaagtatgatattctgagagtgtctatagcacttagtgtctgcttcatataaactaccagttattatatatttatgatgcaagtagttttccaaatgtggtgaaagtctgagtctttttatccccatgggtaaaatctgaatctggctctctgtgtctctcagtgcttgtttattgctggtcagagagtaaattcttgataaaagctgttgacttggctctcacagtttatgcagacattggagagacaatttggttatttcaaacatcacaggatttgagtaagaagacctggttatgaaacaaggctctcataattactagttatgactgttgacaagttaccttttcttgtttacaagttatttggcctctttgaattacttgtaaaatagagatagggattctttcttgatcatgaaacatcaaatgaagttatttgatgaaatactttgtcatctggaaattataaatataactaaatgttaattattatttgaaatttgggcacctcatggtggcatt

SEQ ID NO: 347 - DNA, 332 bp, Homo sapiens
aaatattgtacagggaataatcgagcatgcaaaattgaaaaccccatgtaaagacagcatgataagctcactggaaattttttaattaaataagcttaaaaagacattggactaaatgctaatatatggaatataagatttcccaatgttaatttagttaacaacttttttgtagtagcatacacacacataccacctttatgtactatctctagaagtaaaatagtaaactatataagatagatatatatgagtagaacaaggaggacatcttgaggtcatttcagaaatgtacatgattttattgagtctgcacacagtttatgattttt

SEQ ID NO: 348 - DNA, 126 bp, Homo sapiens
  misc_feature (1)...(126): n = A,T,C or G
ggntgttgactcanattcggcattttaattacattgtttccaagtatgatattctgagagtgtctatagcacttagtgtctgcttcatataaactaccagttattatatatttatgatgcaagtag

SEQ ID NO: 349 - DNA, 294 bp, Homo sapiens
ccacaaagccattgtatgtagctttagctcagcgcaaagaagagcgccaggctcacctcactaaccagtatatgcagagaatggcaagtgtacgagctgttcccaaccctgtaatcaacccctaccagccagcacctccttcaggttacttcatggcagctatcccacagactcagaaccgtgctgcatactatcctcctagccaaattgctcaactaagaccaagtcctcgctggactgctcagggtgccagacctcatccattccaaaatatgcccggtgctatccgcccag

SEQ ID NO: 350 - DNA, 237 bp, Homo sapiens; identical to SEQ ID NO: 206

SEQ ID NO: 351 - DNA, 428 bp, Homo sapiens
  misc_feature (1)...(428): n = A,T,C or G
gtacaagcttttttttttttttttttttttttttttttccaccaaagtttatttntntgaaacaatcaccagttgctgtcctntntggcacactganagccccaggagggtctttaactccnttcctcanattatattcatcccaaaaatntancctnggacaatantttggttacagcatantcccagnaatgaggtcccccaaatngctaagttttacatagggganactgggaaattcaaanaatnggatgganaaaccataggatccaanataatgtcagggggttnaaaatnttgganaggcatggtaccatcattgagttngaatctccttctcacttggagnggaagttgtaggattctgcctctaggaaatgngccntccntntgaataattggncccagnaanaggagngtaactagag

SEQ ID NO: 352 - DNA, 563 bp, Homo sapiens
aaaaaaaactacatctctttattgcagaatttatacttgtttgaaaaatacaaaatgtagcgttgataagattgaagcatgttgaaaggtaagtacagggaaaggtcctttcagaatgactgcaacagtgcagcaaggattcccattccccgcctaaaggacaatacctttttaatagaaataaatgagttagttagttagatttttattacagattgaattaaacagttagttacaaagacattctctgatacattcattcatagaggtcttaacgtataaatacatagtaaatatcctataaaatggtaggcaatctcatcgtgcattatctttttgtgctcagacttgacttcacattcagtctctacatacagcttgattagaatcataaaaacaatatgaagacgattgcataaagggatagtttgacaaagcatattcagatattgtaacatttatggtgggtaaaaatgtatcttttgaaacaatatattagactccatttttagctgaaatgaaatttactgattcaatctttttaagaatttgtggatgtttac

SEQ ID NO: 353 - DNA, 524 bp, Homo sapiens; identical to SEQ ID NO: 209

SEQ ID NO: 354 - DNA, 340 bp, Homo sapiens
  misc_feature (1)...(340): n = A,T,C or G
ctgaagcagaggaacacgctgaaggatggtatcatcatgatccanacgctgctgatcatcctnntcntcatcgtgcctatcttcctgctgctggacaaggatgacagcaaggctggcatggaggaagatcacacctacgagggcctggacattgaccagacagccacctatgaggacatagtgacgctgcggacaggggaagtgaagtggtctgtaggtgagcacccaggccaggagtgagagccaggtcgccccatgacctgggtgcaggctccctggcctcagtgactgcttcggagctgcctggctcatggcccaacccctttcccggaccccccag

SEQ ID NO: 355 - DNA, 556 bp, Homo sapiens; identical to SEQ ID NO: 211

SEQ ID NO: 356 - DNA, 561 bp, Homo sapiens
ccaagaggtggactcagagccttccttgagctaaactcggccaaccaaggcacgcagcatgtcccctcaggtctccagtcagtccaggttgaccctcagttctggacgtgtgtatatagctgtatttaatacctcaaggtcattgtggctctggggatgccggggcaggaggacgagggtgcgctgtggacacagcagtccgcggaattccgttctgggaagccaatggtcgccggcaccccttgcttcctccctctgttgtctgcctgtgtgacacacatcaatggcaataacttcttccaactcctcgcagaagtgggagaggccggcagcctgcaccgagaggggctttcctctctcttgctccccgcttcgttctgttttggctgcagagagtggttcatccatactctcattccctcgcctccccttgtggacgggggtcttgccttttcaattcctgtgttttggtgtcttcccttatctgctaccctgaatcacctgccctggtcttgctgtgtgatgggaacatgcttgtaaactgcgtaacaaatctacttt

SEQ ID NO: 357 - DNA, 353 bp, Homo sapiens; identical to SEQ ID NO: 212

SEQ ID NO: 358 - DNA, 202 bp, Homo sapiens
  misc_feature (1)...(202): n = A,T,C or G
ctgaagcagaggaacacgctgaaggatggtatcatcatgatccanacgctgctgatcatcctattcatcatcgtgcctatcttcctgctgctggacaaggatgacagcaaggctggcatggaggaagatcacncctacgagggcctggacattgaccagacagccacctatgaggacatagtgacgctgcggacaggggaag

SEQ ID NO: 359 - DNA, 463 bp, Homo sapiens
  misc_feature (1)...(463): n = A,T,C or G
ctcctntgtatgactgcaagtcctccaagatgccttctgcatntntnaatactacattcacctgattataaatttccttctcagactctgtaggctgggcattttcanantcaaggaaaaaatttggcccctgctcaaggtctgtgcatgtcaaaactttaagaagattccccatgttaaggtaccttcagccagtgctggtgattctgtccttgtccttctatccttggattggcgttccctctttcctagttcacttgttccagtccttcaacttctgtttcttgctaacaggtgtgcaaatgaattaccaactgggtaaccttgaatgagttaatcaaattccaggccatcgtccacgccaccaacagtcaaaggccaaggaagctgttggctgaaaaggtggtctatgttggcgtntggatccctgccctcctgctgactattnccgacttcatctttg

SEQ ID NO: 360 - DNA, 588 bp, Homo sapiens; identical to SEQ ID NO: 215

SEQ ID NO: 361 - DNA, 396 bp, Homo sapiens; identical to SEQ ID NO: 217
  misc_feature (1)...(396): n = A,T,C or G

SEQ ID NO: 362 - DNA, 253 bp, Homo sapiens
  misc_feature (1)...(253): n = A,T,C or G
gaaggatggtatcatcatgatccagacgctgctgatcatcctcttcatcatcgtgcctatcttcctgctgctggacaaggatgacagcaaggctggcatggaggaagatcacacctacgagggcctggacattgaccagacagccacctatgaggacatagtgacgctgcggacaggggaagtgaagtggttctgtaggtgangcacccaggccaggagtgagagccaggtcgccccatgacctgggtgcagg

SEQ ID NO: 363 - DNA, 571 bp, Homo sapiens
  misc_feature (1)...(571): n = A,T,C or G
ccttgcctcagatccaaggtcactcggaagaggccatgtctaccctcaatgacactcatggaggaaatgctgagagaagcattcagatgcatgacacaaggtaagactgccaaaaatcttgttcttgctctcctcattttgttatttgttttatttttaggagttttgagagcaaaatgacaacacccagaaattcagtaaatgggactttcccggcagagccaatgaaaggccctattgctatgcaatctggtccaaaaccactcttcaggaggatgtcttcactggtgggccccgcgcaaagcttcttcatgagggaatctaagactttgggggctgtccagattatgaatgggctcttccacattgccctggggggtcttctgatgattccagcagggatctatgcacccatctgtgtgactgtgtggtaccctctctggggaggcattatgtatattatttccggatcactcctggcagcaacggagaaaaactccaggaagtgttgggtcaaaggaaaaatgataatgaattcattgancctntttgctgccatttctggaatgat

SEQ ID NO: 364 - DNA, 420 bp, Homo sapiens
ctgtagcctctgcaagtgaaaatccaggccgacttgcagtcattggactgatgtccaagtgcaatcaccatacagcagctacaggcagggctggctgatagggagtatgggagaaggacacgctcagatgaaaacatgcatgcaacgattttcaccactgaacacactgttttctgtgatagaaactgtcggccctgctgggggacaagatattcacggcctcactagccagtgagatgccaccagggcggcctgcccctgatgctcctttgttacctgctaaagaaggaccataaggtaaaaggcaccttaccttatggagtgagcccagaccccagggaaaagcttgggtagaacaatccaaggggcagcctgggtgtgagaatccagcccaagctagctgctctagaagcctggagg

SEQ ID NO: 365 - DNA, 374 bp, Homo sapiens
  misc_feature (1)...(374): n = A,T,C or G
agccacttgtttctcatttggtcgaaacagcctgcccacagggatcaccactggctcatatagcttctgcttccagacacactccatcgccttgtcgattttggaatgtctgggctcagacttcatgctcgtgggtgtaatacgatgtacagcaaagcgacccttggtgtcatagatcagacggaaattctctcccgtcttgncaatgctgatgacatccatgaatccagcagnggtaggtnatatcagttcggaccttgccatcnattttaatgaaccgctgcatgcaaatcttctttacttcatctnctgncagggcatacttaagtctgttcctcaggaaaatgatgagggggagacactctctnnacttg

SEQ ID NO: 366 - DNA, 431 bp, Homo sapiens; identical to SEQ ID NO: 219
  misc_feature (1)...(431): n = A,T,C or G

SEQ ID NO: 367 - DNA, 286 bp, Homo sapiens; identical to SEQ ID NO: 220
  misc_feature (1)...(286): n = A,T,C or G

SEQ ID NO: 368 - DNA, 536 bp, Homo sapiens; identical to SEQ ID NO: 221
  misc_feature (1)...(536): n = A,T,C or G

SEQ ID NO: 369 - DNA, 565 bp, Homo sapiens; identical to SEQ ID NO: 222
  misc_feature (1)...(565): n = A,T,C or G

SEQ ID NO: 370 - DNA, 402 bp, Homo sapiens
  misc_feature (1)...(402): n = A,T,C or G
ctgttgactcanattcggcattttaattacattgtttccaagtatgatattctgagagtgtctatagcacttagtgtctgcttcatataaactaccagttattatatatttatgatgcaagtanttttccaaatgtggngaaagtctgagtctttttatccccatgggtaaaatctgaatctggctctctgtgtctctcagtgcttgtttattgctggtcagagagtaaattcttgataaaanctgttgacttggctctcacagtttatgcagacattggagagacaatttggttatttcaaacatcacaggatttgagtaagaagacctggttatgaaacaaggctctcataattactagttatgactgttgacaagntaccttttcttgtttacaantta

SEQ ID NO: 371 - DNA, 346 bp, Homo sapiens
ctgccctacttttcaattcagatatactagtaccttacctagaaataatgttaacctagggtgaagtcactataatctgtagtctattatttgggcatttgctacatgatgagtgctgccagattgtggcaggtaaagagacaatgtaatttgcactccctatgatatttctacatttttagcgaccactagtggaagacattccccaaaattagaaaaaaaggagatagaagatttctgtctatgtaaagttctcaaaatttgttctaaattaataaaactatctttgtgttcttttctgcaacagatgattcaaaaaaaaaaaaaaaaaaaaaaaaaaagcttg

SEQ ID NO: 372 - DNA, 348 bp, Homo sapiens
cctacgacgaggaccggcttttcttcttcgacttttcccagaacactcgggtgccttgcctgcccgaatttgctgactgggctcaggaacagggagatgctcctgccattttatttgacaaagagttctgcgagtggatgatccagcaaatagggccaaaacttgatgggaaaatcccggtgtccagagggtttcctatcgctgaagtgttcacgctgaagcccctggagtttggcaagcccaacactttggtctgttttgtcagtaatctcttcccacccatgctgacagtgaactggcagcatcattccgtccctgtggaaggatttgggcctacttttgtctcag

SEQ ID NO: 373 - DNA, 598 bp, Homo sapiens; identical to SEQ ID NO: 226

SEQ ID NO: 374 - DNA, 381 bp, Homo sapiens
cctgacacaatatccctgttcactttgaagtgaattttgactctatattcagaaccttcctttaacacaatggtttcctttttgagggcttccagatctccagtaaggtccatggtgattggtcccggggcactctcacaaaccagggtgagccgggtgacaacgacattgggggctttcggatctgtcaccacaggaccatctcccagcagcgttttcttgtacttaattagactctcatcatctttgtccatttcctgcagctctttcagggacttctgtggtggaggcttataattgagcttgctgtccagctcatcatcgtcatcctcctccacatgtggctctggggctttttcagtcattctgatctatttattc

SEQ ID NO: 375 - DNA, 573 bp, Homo sapiens; identical to SEQ ID NO: 245

SEQ ID NO: 376 - DNA, 612 bp, Homo sapiens; identical to SEQ ID NO: 227
  misc_feature (1)...(612): n = A,T,C or G

SEQ ID NO: 377 - DNA, 288 bp, Homo sapiens; identical to SEQ ID NO: 228
  misc_feature (1)...(288): n = A,T,C or G

SEQ ID NO: 378 - DNA, 584 bp, Homo sapiens; identical to SEQ ID NO: 231
  misc_feature (1)...(584): n = A,T,C or G

SEQ ID NO: 379 - DNA, 457 bp, Homo sapiens; identical to SEQ ID NO: 232

SEQ ID NO: 380 - DNA, 574 bp, Homo sapiens
ctgctgtaaccaggtttccccttgtgggaagtgttgtttcttgctgggcagttgggaagggaatggagaacagagaagagagtggaaatcacatgctcacttgaactttcctggggaacgtctcctcacagcgtacacaagagcctccctttagaaatggagtgttcattttatcatgggaaaagaatctgagtgggacatgattcagaacaggaccggcccaaggaagtgcaggggctgtggagtgggatggagacaagctctgaaaggacacatgggagatctagatgtagaaggtacacaagtagtaggataactcacaggatggatccactggaggttaagacatgtggtaagacagtgtaataggaagctgctcagttggagaaagtaaggaagcaaacattgttaccgtgggggcaatggagaggacagtgaggagccctttatcctgataagggtggctttgaggtaaaggaaggaaagaggatgccttgagaggccccactgtattagagaggacctggaagccaggatgctaattctggggagatggattccccaggcttactct

SEQ ID NO: 381 - DNA, 571 bp, Homo sapiens; identical to SEQ ID NO: 234
  misc_feature (1)...(571): n = A,T,C or G

SEQ ID NO: 382 - DNA, 471 bp, Homo sapiens
ccaccaccaatttcttcgaggatattcagtgtataccttctcattagctgccaaatcaaggccagtgtgagagtgcggtttccttcattgagatcttgtccaccgatgccaaccagggagaacttcgcttgattcttccccaattctaccgcgtagttacaattctcaagcttcttcatattgcctcccagtttggggtatggcggtttgtttactctgttccagtcaacaggaactttgatcttttcatagagctggaagatgaccagggcatctgataagtcactgtacaaatgattgactcgagggttaacacccagggagttcatccagttcctaaatgtccgctcttctctcgtctcaccttcaagagccccccagtcaatgtcctggttctctggtttgtgcagggcagggtatctgttaaagaggttggcaataaaagccaagttcaacttggggttccctcgg

SEQ ID NO: 383 - DNA, 489 bp, Homo sapiens; identical to SEQ ID NO: 235
  misc_feature (1)...(489): n = A,T,C or G

SEQ ID NO: 384 - DNA, 306 bp, Homo sapiens; identical to SEQ ID NO: 236

SEQ ID NO: 385 - DNA, 560 bp, Homo sapiens; identical to SEQ ID NO: 237
  misc_feature (1)...(560): n = A,T,C or G

SEQ ID NO: 386 - DNA, 186 bp, Homo sapiens
ctgtgccaaggtgctgaatcccatgactcgcagctctgtgccgcagccctggtagacctccgaggtgttgttgcacttctgctggcagaagtagatgccattgtcctcaaaccggatgccttggatggtgagggtggcgagagattcgttctgggactcttccatgcggcccttttccagcttcag

SEQ ID NO: 387 - DNA, 439 bp, Homo sapiens; identical to SEQ ID NO: 240
  misc_feature (1)...(439): n = A,T,C or G

SEQ ID NO: 388 - DNA, 320 bp, Homo sapiens
  misc_feature (1)...(320): n = A,T,C or G
ccacacagactcaccaagccacagacttgtcttccacaagcacgttcttacctcagccacgaagggaccaagccacacgtactaaaggttgaactcaaagatatgtacagggtattaaacaaatnccaaggggaacagntaacttgaatacaaggtcaaaatcagcaacaagntctacaatccagtgctgatatcaaatacaagcttcaaggacaatttcttttcgaaggcttattccantttcgngaggctagcatgaggtgtgngcatttgccaggggcaaatttctattctcaattaacccatgcagnaaatgctac

SEQ ID NO: 389 - DNA, 331 bp, Homo sapiens
ctgccctacttttcaattcagatatactagtaccttacctagaaataatgttaacctagggtgaagtcactataatctgtagtctattatttgggcatttgctacatgatgagtgctgccagattgtggcaggtaaagagacaatgtaatttgcactccctatgatatttctacatttttagcgaccactagtggaagacattccccaaaattagaaaaaaaggagatagaagatttctgtctatgtaaagttctcaaaatttgttctaaattaataaaactatctttgtgttcttttctacaaaaaaaaaaaaaaaaaaaaaaaaaaagg

SEQ ID NO: 390 - DNA, 391 bp, Homo sapiens
  misc_feature (1)...(391): n = A,T,C or G
ctttttttttttttttttttttttttngagttttnattatttgnggngctaaaaanaagggaacatggttggaggcccagtgaganaaacagtgntttgaatcaaagagcanaatgatagaaactgacttcanagcaacttnttggcagcagtatccaatttggaagttgaaggtctgtcctggagccagatgctaacgaaacacagcaaatgcttttcctaaggcacaatagtcttttcagngagctcaggaaccctgtttatgcanatcctcgnngaactttcttgctcctcctgtgcatgaagatgcccactccacanatgatgagccccagcacnaagcccccagctcccgtcaatgtcttactccgggcanaatcagactgngcct

SEQ ID NO: 391 - DNA, 462 bp, Homo sapiens
  misc_feature (1)...(462): n = A,T,C or G
ccttgcctcanatccaaggtcactcggaagaggccatgtctaccctcaatgacactcatggaggaaatgctganagangcattcagatgcatgacacaaggtaagactgccaaaaatcttgttcttgctctcctcattttgttatttgttttatttttaggagtttngagagcaaaatgacnacacccagaaattcagtaaatgggactttcccggcagaaccaatgaaaggccctattgctatgcaatctggtncaaaaccactcttnangaggatgtcttcactggtgggccccacncaaagcttcttcntgagggaatctaanactttgggggctgnccagattatnaatgggctcttccacattgccctggggggtcttntgatgatcccancngggatctatgcacccatctgtgtgactgtgtggtnccctctctggggaggcattatgtatatta

SEQ ID NO: 392 - DNA, 554 bp, Homo sapiens
  misc_feature (1)...(554): n = A,T,C or G
aaagcgaattcatactataacagcagaaacaaaacttcagatttcagaatttgttattggcaaaatttattctcattatacctgcttcatatgggtatattactattaaaacagaataccatagagtaattgcattatttgaaaattctntcattttacaatgcacttcaccaatgaaacagntaatttccattttgaaaattaaaagaaaacagcacagagaagttaaatgcggtgtagcaaagttatggggtctgcttgagggcactaacctcaacagattattcctcctctccttagaataaccatgaaaatacaaatttacttagcacatttttgctttttaagtagctggttcattttctgaatttcccacattcagagttccagtcattattgttacatcatgtttgcagaaaccttgtcttatttagtgtctatttgcatataaccctgaaaacattattatttgaaaacttttctatatctcaaattaatatacattttcataacctacctttgnattaagacttgcaattttatcaatctattat

SEQ ID NO: 393 - DNA, 555 bp, Homo sapiens
ctgttgactcagattcggcattttaattacattgtttccaagtatgatattctgagagtgtctatagcacttagtgtctgcttcatataaactaccagttattatatatttatgatgcaagtagttttccaaatgtggtgaaagtctgagtctttttatccccatgggtaaaatctgaatctggctctctgtgtctctcagtgcttgtttattgctggtcagagagtaaattcttgataaaagctgttgacttggctcccacagtttatgcagacattggagagacaatttggttatttcaaacatcacaggatttgagtaagaagacctggttatgaaacaaggctctcataattactagttatgactgttgacaagttaccttttcttgtttacaagttatttggcctctttgaattacttgtaaaatagagatagggattctttcttgatcatggaacatcaaatgaagttatttgatgaaatactttgtcatctggaaattataaatataactaaatgttaattattatttgaaatttgggcacctcatgg

SEQ ID NO: 394 - DNA, 340 bp, Homo sapiens; identical to SEQ ID NO: 325

SEQ ID NO: 395 - DNA, 482 bp, Homo sapiens
aaaaaaacagaacatttacaagacaccagttattttgtgccccatatgtcattaaaaaagtttactttacctttattattatttccctaggctagtcaagcagcaaaccattaatcggtcggagaaaccttcatgacatatgcccgactggctcttcgccacccacttgaaggacactacccaatcgatggaagcctttaatcgcacagccctccctattagcggactattggcggatgcagacatgttctactcgagcagttaccaaggaccactttactgcgatcaggattccaacgaccacctaatttcgtatctttcaactcttttcgaccggacctcttattcggaagcgttacaggaagacaggtctcaacttagggatcagatcacgttatcaacgctctgggatcgctgcaacctggcacttcaaggaagtgcaccgataacgtctagaccggcaaacacagatctagaggtgg

SEQ ID NO: 396 - DNA, 448 bp, Homo sapiens
gaaagaatccctatctctattttacaagtaattcaaagaggccaaataacttgtaaacaagaaaaggtaacttgtcaacagtcataactagtaattatgagagccttgtttcataaccaggtcttcttactcaaatcctgtgatgtttgaaataaccaaattgtctctccaatgtctgcataaactgtgagagccaagtcaacagcttttatcaagaatttactctctgaccagcaataaacaagcactgagagacacagagagccagattcagattttacccatggggataaaaagactcagactttcaccacatttggaaaactacttgcatcataaatatataataactggtagtttatatgaagcagacactaagtgctatagacactctcagaatatcatacttggaaacaatgtaattaaaatgccgaatctgagtcaacag

SEQ ID NO: 397 - DNA, 573 bp, Homo sapiens; identical to SEQ ID NO: 245

SEQ ID NO: 398 - DNA, 340 bp, Homo sapiens; identical to SEQ ID NO: 325

SEQ ID NO: 399 - DNA, 593 bp, Homo sapiens; identical to SEQ ID NO: 247

SEQ ID NO: 400 - DNA, 504 bp, Homo sapiens
aaatcctgagtcaagccaaaaaaaaaaaaaaaaaccaaaacaaaacaaaaaaaacaaataaagccatgccaatctcatcttgttttctgcgcaagttaggttttgtcaagaaagggtgtaacgcaactaagtcatagtccgcctagaagcatttgcggtggacgatggaggggccggactcgtcatactcctgcttgctgatcacatctgctggaaggtggacagcgaggccaggatggagccgccgatccacacggagtacttgcgctcaggaggagcaatgatcttgatcttcattgtgctgggtgccagggcagtgatctccttctgcatcctgtcggcaatgccagggtacatggtggtgccgccagacagcactgtgttggcgtacaggtctttgcggatgtccacgtcacacttcatgatggagttgaaggtagtttcgtggatgccacaggactccatgcccaggaaggaaggctggaagagtgcctcagggcagcg

SEQ ID NO: 401 - DNA, 608 bp, Homo sapiens; identical to SEQ ID NO: 249

SEQ ID NO: 402 - DNA, 588 bp, Homo sapiens
ctgggccaggagctgtgcccagtgcctgcagccttcataagcacacacgtccattccctactaaggcccagacctcctggtatctgccccgggctccctcatcccacctccatccggagttgcccaagatgcatgtccagcataggcaggattgctcggtggtgagaaggttaggtccggctcagactgaataagaagagataaaatttgccttaaaacttacctggcagtggctttgctgcacggtctgaaaccacctgttcccaccctcttgaccgaaatttccttgtgacacagagaagggcaaaggtctgagcccagagttgacggagggagtatttcagggttcacttcaggggctcccaaagcgacaagatcgttagggagagaggcccagggtggggactgggaatttaaggagagctgggaacggatcccttaggttcaggaagcttctgtgcaagctgcgaggatggcttgggccgaagggttgctctgcccgccgcgctagctgtgagctgagcaaagccctgggctcacagcaccccaaaagcctgtggcttcagtcctgcgtctgcaccacacatt

SEQ ID NO: 403 - DNA, 425 bp, Homo sapiens; identical to SEQ ID NO: 252

SEQ ID NO: 404 - DNA, 603 bp, Homo sapiens
  misc_feature (1)...(603): n = A,T,C or G
ctggtggttaacaagtggatcgtcatgttcagtagtttatacattatgtgagaagtaacgttctgattctttttcttacacagaattggcagagggggtcgatttgggaggaaaggtgtggctataaactttgttactgaagaagacaagaggattcttcgtgacattgagactttctacaatactacagtggaggagatgcccatgaatgtggctgaccttatttaattcctgggatgagagttttggatgcagtgctcgctgttgctgaataggcgatcacaacgtgcattgtgcttctttctttgggaatatttgaatcttgtctcaatgctcataacggatcagaaatacagattttgatagcaaagcgacgttagtcgtgagctcttgtgaggaaagtcattggctttatcctctttagagttagactgttggggtgggtataaaagatggggtctgtaaaatctttctttcttagaaatttatttcctagttctgtagaaatggntgnattagatgttctctatcatttaataatatacttgnggactaaaagatataagtgctgnataaaatcagccaattatgttaaactagcat

SEQ ID NO: 405 - DNA, 603 bp, Homo sapiens; identical to SEQ ID NO: 253

SEQ ID NO: 406 - DNA, 578 bp, Homo sapiens
ctgctgtggaagggctccttcaagcccagcgagcatgtgaaacccagggccccaggaaacctgacagttcacaccaatgtctccgacactctgctgctgacctggagcaacccgtatccccctgacaattacctgtataatcatctcacctatgcagtcaacatttggagtgaaaacgacccggcagatttcagaatctataacgtgacctacctagaaccctccctccgcatcgcagccagcaccctgaagtctgggatttcctacagggcacgggtgagggcctgggctcagtgctataacaccacctggagtgagtggagccccagcaccaagtggcacaactcctacagggagcccttcgagcagcacctcctgctgggcgtcagcgcttcctgcattgtcatcctggccgtctgcctgttgtgctatgtcagcatcaccaagattaagaaagaatggtgggatcagattcccaacccagcccgcagccgcctcgtggctataataatccaggatgctcaggggtcacagtgggagaagcggtcccgaggccaggaaccagccaagtgcccaca

SEQ ID NO: 407 - DNA, 568 bp, Homo sapiens; identical to SEQ ID NO: 255

SEQ ID NO: 408 - DNA, 125 bp, Homo sapiens
  misc_feature (1)...(125): n = A,T,C or G
ctggggggtccaggaaaggggttgggccatgagccaggcagctccgaagcagtcactgaggccagggagcctgcacccagnncatgggncgaccnggctctcactcctggcctgggtgctcacct

SEQ ID NO: 409 - DNA, 291 bp, Homo sapiens
ccagtgcttagacaaatttggggttggggggaacactttggtttgaaagcacagagcagtttgccatgtttcttctgtgcctaccattctcccttggcctcaacttctgtaagatgggggggggacaaaaagagaagtaaagttaagaagaaagtggaaaattaaaaaaaagatgtcaaagtttttacatgcatatatttcagcttatgctgaagacctacctgtatgttgcacattgaatcatactttcagaacccctcagaaaccatccctctctccctaaagaatttt

SEQ ID NO: 410 - DNA, 231 bp, Homo sapiens; identical to SEQ ID NO: 259

SEQ ID NO: 411 - DNA, 406 bp, Homo sapiens
cctaagaactgagacttgtgacacaaggccaacgacctaagattagcccagggttgtagctggaagacctacaacccaaggatggaaggcccctgtcacaaagcctacctagatggatagaggacccaagcgaaaaaggtatctcaagactaacggccggaatctggaggcccatgacccagaacccaggaaggatagaagcttgaagacctggggaaatcccaagatgagaaccctaaaccctacctcttttctattgtttacacttcttactcttagatatttccagttctcctgtttatctttaagcctgattcttttgagatgtactttttgatgttgccggttacctttagattgacagtattatgcctgggccagtcttgagccagctttacctcggccg

SEQ ID NO: 412 - DNA, 278 bp, Homo sapiens; identical to SEQ ID NO: 260

SEQ ID NO: 413 - DNA, 284 bp, Homo sapiens
ccgggcaggtctggaagccttgttggcccctaagcctttgtttcatgctacagtactgaggggtatgtgtccccaatgcacagccacccgcacacaactcaatgagcttcctgggaaacactattcccccacctccaccttaggtggctgcctcagttttccaaccactggaatcagtccctcagctcctgcctctagtctccaccccaaaagttcagtcgtctctgtcttggagggcactgtcggccccctcaggttgaagttcaacactcctcaatgagcag

SEQ ID NO: 414 - DNA, 288 bp, Homo sapiens
aaaaatacagcttttattctgagacattgaccttcactagagtgggacctgtggccccagcctggctggagaagcagtccagggcctgagtgacaccatttccctttcctgaaataggaacaagttattccaaaggagaaaggagagcccagagagatctgtacaggacctctcttgcacatggtgactggaggcagagggtggggagctggagaggagtccagtccctccaacaaatattgagggcttcaaagagctcttcctggacgtttctcttaatctggattt

SEQ ID NO: 415 - DNA, 348 bp, Homo sapiens
  misc_feature (1)...(348): n = A,T,C or G
ccaaaagaagtaagacagcttgctgaagatttcctgaaagactatattcatataaacattggtgcacttgaactgagtgcaaaccacaacattcttcagattgtggatgtgtgtcatgacntanaaaaggatgaaaaacttattngtctaatggaagagatcatgagtgagaaggagaataaaaccattgtttttgtggaaaccaaaagaagatgtgatgagcttaccagaaaaatgaggagagatgggtggcctgccatgggtatccatggngacaagagtcaacaagagcgtgactgggctctaaatgaatccaaacatggaaaagctcctattctgattnctaca

SEQ ID NO: 416 - DNA, 284 bp, Homo sapiens
  misc_feature (1)...(284): n = A,T,C or G
ggcggcaagatggcagtgcaaatatccaagaagaggaagtttgtcgctgatggcatcttcaaagctgaactgaatgagtttcttactcgggagctggctgaagatggctactctggagttgagggtgcgagttacaccaaccaggacagaaatcattatcttanccaccagaacacanaatgttcttggtgagaagggccggcggattcgggaactgactgctgtagttcagaagaggtttggctttccagagggcagtgtagagctttatgctnaaaaggtgg

SEQ ID NO: 417 - DNA, 212 bp, Homo sapiens
ccaatgtggttggtcttcagcttgcagttagccaggttccataccttgaccagcttgtcccagccacaggagacgatgatagggttgctgctgttgggcgagaagcggacacaagacacccactctgagtggctctcatcctggacagtgtatttgcacacacccagggtattccatagcttgatggttttatctcgagatccaaaaacaat

SEQ ID NO: 418 - DNA, 285 bp, Homo sapiens
cctttccttgagctgcacgtgaacctgtgtgggcaggcagcgtttgcaggcgtgtttacgggcaggcagcgtttgcaggcgtgtttaccggcaggcagcgtttgcaggcgtgtttacatgcaggcgtagcaccatgtgagaccactggtccagggtttcagaggtcctgctcaggtgaatcggctgtgttctcacaagttcacggagctgagtgggtgtgcaacatgaaatactagtgctgtgagggacagaaaggacagaaagaggctgaagaccatcatccag

SEQ ID NO: 419 - DNA, 271 bp, Homo sapiens
ggtggcaacaaacctgaccacatgattaagcctgttgaagtcactgagtcagcataaataaagactgcacaggagaattacccctatacctgagcctcaaccttctgggggaaagggaactagataacatacttcttacttgtctgtacagtaccttgttgcagatgggtgatatataatggtaatagaatagcacagccagacttgcttcctgcatggtagggagagacacaaaagatgggaaactgcttttccacaaggaatctccgta

SEQ ID NO: 420 - DNA, 287 bp, Homo sapiens; identical to SEQ ID NO: 263

SEQ ID NO: 421 - DNA, 286 bp, Homo sapiens
ccagagcggtgagtcccaccacctcgaactctgggaattcgagccacagctctgccagtaccccaagactcagcactagtctgatgacctgctaattcactgacagcatagggctgtctgttgtttttgcgcaagttggtgtgaacaaagttcacaatatctggtcgaataggagccttgaatacagcaggcaaagtgacatttttgccagatgactcccccttttcggagtacaccgatatcagtgggcgagcacacgccatggcggagagaggagacagccacg

SEQ ID NO: 422 - DNA, 306 bp, Homo sapiens; identical to SEQ ID NO: 264

SEQ ID NO: 423 - DNA, 242 bp, Homo sapiens; identical to SEQ ID NO: 265

SEQ ID NO: 424 - DNA, 132 bp, Homo sapiens; identical to SEQ ID NO: 266

SEQ ID NO: 425 - DNA, 414 bp, Homo sapiens; identical to SEQ ID NO: 268

SEQ ID NO: 426 - DNA, 101 bp, Homo sapiens
  misc_feature (1)...(101): n = A,T,C or G
ctgtgattctccactgaaattttttttttaagggagctcaaggtcacaagaagaaatgaaaggaacaatcagcagccctgttcanaaggnggtttgaagac

SEQ ID NO: 427 - DNA, 353 bp, Homo sapiens
gtttcagccgaaggactcttctattcggaagtacaccctcactattaggaagattcttaggggtaatttttctgaggaaggaggactagccaacttaagaattacaggaagaaagtggtttggaagacagccaaagaaataaaagcagattaaactgtatcaggtacattccagcctgttggcaactccataaaaacatttcagattttaatccgaatttagctaatgagactggatttttgttttttatgttgtgtgtcacagagctaaaaactcagttcccaaatccccagtttatgcagccgccatcaggtattttaagctaaacttcttcacccctgagagcatgtcag

SEQ ID NO: 428 - DNA, 104 bp, Homo sapiens
  misc_feature (1)...(104): n = A,T,C or G
tatttaaaaactcaacaggacctacactacntgttcaaatctgtaatctttcacaccncactaacaaagttnttaggaaaacaggactacccaaanatgttacc

SEQ ID NO: 429 - DNA, 471 bp, Homo sapiens
  misc_feature (1)...(471): n = A,T,C or G
ccaaaaaanntcaagattnnntttttttatttgtactgaaaaactaatcataactgttaattctcagccatctttgaagcttgaaagaagagtctttggtattttgtaaacgttagcagactttcctgccagtgtcagaaaatcctatttatgaatcctgtcggtattccttggtatctgaaaaaaataccaaatagtaccatacatgagttatttctaagtttgaaaagtaaaaagaaattgcatcacactaattacaaaatacaagttctggaaaaaatatttttcttcattttaaaacttttttaactaataatggctttgaaagaagaggcttaatttgggggtggtaactaaaatcaaaagaaatgattgacttgagggtctctgtttggtaaaaatacatcattagcttaaataagcagcagaaggttagttttaattatgtancttctgtnaatattaagtgtt

SEQ ID NO: 430 - DNA, 395 bp, Homo sapiens
  misc_feature (1)...(395): n = A,T,C or G
aggcgacnnggtaggggnnggcgctcaggcggcgaccatggcgtatcacggcctcactgtgcctctcattgtgatgagcgtgttctggggcttcgtcggcttcttggtgccttggttcatccctaagggtcctaaccggggagttatcattaccatgttggtgacctgttcagtttgctgctatctcttttggctgattgcaattctggcccaactcaaccctctctttggaccgcaattgaaaaatgaaaccatctggtatctgaagtatcattggccttgaggaagaagacatgctctacagtgctcagtctttgaggtcacgagaagagaatgccttctagatgcaaaatcacctccaaaccagaccacttttcttgacttgcctgttttgg

SEQ ID NO: 431 - DNA, 303 bp, Homo sapiens
  misc_feature (1)...(303): n = A,T,C or G
caggcatgaaaaaatgacaagaattttaaaacaagggcatcatttgatctttaaatatgactattttctttaaaaacgatggattttgaccaacctagatgtacaccatagtttatagatcaaataaaagctattaaaaatatcttaacttnttacaaatgttagcagtctttgtgtgcagtattagagatcagagttgtgattgtttctgagcatgtcttgtgggttataactatgttttcaattaaaattataagattgagatactttctggaagatgtatagaaaatgttgntatattca

SEQ ID NO: 432 - DNA, 477 bp, Homo sapiens
  misc_feature (1)...(477): n = A,T,C or G
tttttttnnttttttttnntaaaanaaggattttaggtttntttggngaaacaaaagcagatataaaaagttacaaagattttanattttcattcacaaaaaaagtcattcacattttacactatacacgttatgatataaatacaggaaagtattatgtgcattgtaaagagaaaggaaaaatagaaacctactagatcaacacagngttgttctgtgctctaaaatacctaaaggnggattacatttaatgcaacaaccaagggaacctgcttaaacatactgngtattattgtagctagagtcattccttctaagccaaaggaggttttataaaaaanaatcaatattgggccaatccctttgngccctttttctctttttctatgngcattttattttttgnctactcttcttcaagttgctctaaactgaaattagggaaggagtctcactttccnttanaggtttttcttt

SEQ ID NO: 433 - DNA, 566 bp, Homo sapiens
ccaggttttagatattaacctggctgcagagccaaaagtgaaccgaggaaaagcaggtgtgaaacgatctgcagcggagatgtacgggtcagtaacagaacacccttctccgtcccctctactcagctcctcttttgacttggactatgactttcaacgggactattatgataggatgtacagttacccagcacgtgtacctcctcctcctcctattgctcgggctgtagtgccctcgaaacgtcagcgtgtatcaggaaacacttcacgaaggggcaaaagtggcttcaattctaagagtggacagcggggatcttccaagtctggaaagttgaaaggagatgaccttcaggccattaagaaggagctgacccagataaaacaaaaagtggattctctcctggaaaacctggaaaaaattgaaaaggaacagagcaaacaagcagtagagatgaagaatgataagtcagaagaggagcagagcagcagctccgtgaagaaagatgagactaatgtgaagatggagtctgaggggggtgcagatgactctgctgaggagggggacc

SEQ ID NO: 434 - DNA, 384 bp, Homo sapiens
  misc_feature (1)...(384): n = A,T,C or G
ccacaggggaaggcaagaggcgatagctgggggtcacttgtcactagatggaagctccttggtccacacagtcccaaagaaaggtctgcctttgggcccacgaaacccatcccagccctcacaggctgaacctcaccctgggttttcccagagaggtgcccaagaagacccaagctgccccaagtcagaggagcagcaggaaacagcctcagaagtccgtcactcttcagtactcctcccttagaatgtccacttcctgtttggtgaccatggcaaccaaaagacaatggcagtgcagtgcgtgtgggatgggggagctccatcttccttgggtacatggggaggagactccagtgaccangagaagcggggagagccatggga

SEQ ID NO: 435 - DNA, 468 bp, Homo sapiens
  misc_feature (1)...(468): n = A,T,C or G
ctgtggctgtctgtcagagaagcacatttttctgcagataattagaatggcttcccccatctctcacggactgtcccaagtctagaaaagaattgagttcctcttctattagtcaaataaaagggaagagaatgtttgtcttcctttcctttctgtagtgttaagaaaataaacgaacttaatgattctaaattatcagtgagcttaacactgtactatagaccaaagattaccttttcaaaaagtcctttgaggtgaaatattttgtatacgtaatacatagatgcacatataaacacacacatatagaatctcaatattttaacacttctttgggtagttgtactaactcactaaccctgaggaaaaagttaagaaattgaaagtgttttcttcanaagttgagatttaacaataaaaggtgttactttgataactaaaaggaactttattatcctcttcctaaaa

SEQ ID NO: 436 - DNA, 124 bp, Homo sapiens
  misc_feature (1)...(124): n = A,T,C or G
gtagggttgccagatgcnntacaanatttctggttaaatttgaatttcagtaaacaatgaatagtttttcattgtaccatgaaatatccaaaacatacttatatgtnaagtattatttatttgn

SEQ ID NO: 437 - DNA, 126 bp, Homo sapiens; identical to SEQ ID NO: 348
  misc_feature (1)...(126): n = A,T,C or G

SEQ ID NO: 438 - DNA, 612 bp, Homo sapiens; identical to SEQ ID NO: 227
  misc_feature (1)...(612): n = A,T,C or G

SEQ ID NO: 439 - DNA, 330 bp, Homo sapiens; identical to SEQ ID NO: 2

SEQ ID NO: 440 - DNA, 472 bp, Homo sapiens; identical to SEQ ID NO: 283
  misc_feature (1)...(472): n = A,T,C or G

SEQ ID NO: 441 - DNA, 349 bp, Homo sapiens; identical to SEQ ID NO: 284
  misc_feature (1)...(349): n = A,T,C or G

SEQ ID NO: 442 - DNA, 179 bp, Homo sapiens; identical to SEQ ID NO: 285
  misc_feature (1)...(179): n = A,T,C or G

SEQ ID NO: 443 - DNA, 170 bp, Homo sapiens; identical to SEQ ID NO: 15

SEQ ID NO: 444 - DNA, 342 bp, Homo sapiens
  misc_feature (1)...(342): n = A,T,C or G
ngtctcacaggtagtctcctgagtagttgacggctagcggggagctagttccgccgcatagttatagtgttgatgtgtgaacgctgacctgtcctgtgtgctaagagctatgcagcttagctgaggcgcctagattactagatgtgctgtatcacggggaatgaggtgggggtgcttattttttaatgaactaatcagagcctcttgagaaattgttactcattgaactggagcatcaagacatctcatggaagtggatacggagtgatttggtgtccatgcttttcaccctnaggacatttaatcngagaacctcctgtngaattttgtgggagacacttg

SEQ ID NO: 445 - DNA, 387 bp, Homo sapiens; identical to SEQ ID NO: 20

SEQ ID NO: 446 - DNA, 279 bp, Homo sapiens; identical to SEQ ID NO: 289
  misc_feature (1)...(279): n = A,T,C or G

SEQ ID NO: 447 - DNA, 235 bp, Homo sapiens; identical to SEQ ID NO: 290
  misc_feature (1)...(235): n = A,T,C or G

SEQ ID NO: 448 - DNA, 292 bp, Homo sapiens; identical to SEQ ID NO: 29

SEQ ID NO: 449 - DNA, 318 bp, Homo sapiens; identical to SEQ ID NO: 291
  misc_feature (1)...(318): n = A,T,C or G

SEQ ID NO: 450 - DNA, 317 bp, Homo sapiens; identical to SEQ ID NO: 294

SEQ ID NO: 451 - DNA, 156 bp, Homo sapiens; identical to SEQ ID NO: 40
  misc_feature (1)...(156): n = A,T,C or G

SEQ ID NO: 452 - DNA, 345 bp, Homo sapiens; identical to SEQ ID NO: 298
  misc_feature (1)...(345): n = A,T,C or G

SEQ ID NO: 453 - DNA, 182 bp, Homo sapiens; identical to SEQ ID NO: 299
  misc_feature (1)...(182): n = A,T,C or G

SEQ ID NO: 454 - DNA, 440 bp, Homo sapiens; identical to SEQ ID NO: 300

SEQ ID NO: 455 - DNA, 396 bp, Homo sapiens; identical to SEQ ID NO: 301
  misc_feature (1)...(396): n = A,T,C or G

SEQ ID NO: 456 - DNA, 232 bp, Homo sapiens; identical to SEQ ID NO: 303

SEQ ID NO: 457 - DNA, 232 bp, Homo sapiens; identical to SEQ ID NO: 57

SEQ ID NO: 458 - DNA, 342 bp, Homo sapiens; identical to SEQ ID NO: 306

SEQ ID NO: 459 - DNA, 545 bp, Homo sapiens; identical to SEQ ID NO: 307

SEQ ID NO: 460 - DNA, 330 bp, Homo sapiens; identical to SEQ ID NO: 308

SEQ ID NO: 461 - DNA, 118 bp, Homo sapiens; identical to SEQ ID NO: 311
  misc_feature (1)...(118): n = A,T,C or G

SEQ ID NO: 462 - DNA, 310 bp, Homo sapiens
  misc_feature (1)...(310): n = A,T,C or G
atgttgggagccatcaatcaggaaagccgggttagtaaagcagttgaagtgatgattcagcacgtanaaaacttgaagaggatgtatgccaaanagcacgcttgaattagaagaactgaaacaggttcttctgcataatgaaaggtctttcaatcctcttgaagatgatgatgactgccaaattaaaaaacgtccagcttctctaaactccaagccatcttctctacgaagagtgactattgcctctttacccanaaatattggaaatgcaggaatggtggctgggatggaaaataatgatccgattcnn

SEQ ID NO: 463 - DNA, 133 bp, Homo sapiens; identical to SEQ ID NO: 312
  misc_feature (1)...(133): n = A,T,C or G

SEQ ID NO: 464 - DNA, 182 bp, Homo sapiens; identical to SEQ ID NO: 317
  misc_feature (1)...(182): n = A,T,C or G

SEQ ID NO: 465 - DNA, 149 bp, Homo sapiens; identical to SEQ ID NO: 80
  misc_feature (1)...(149): n = A,T,C or G

SEQ ID NO: 466 - DNA, 374 bp, Homo sapiens; identical to SEQ ID NO: 83

SEQ ID NO: 467 - DNA, 545 bp, Homo sapiens; identical to SEQ ID NO: 307

SEQ ID NO: 468 - DNA, 285 bp, Homo sapiens; identical to SEQ ID NO: 321

SEQ ID NO: 469 - DNA, 135 bp, Homo sapiens; identical to SEQ ID NO: 322

SEQ ID NO: 470 - DNA, 511 bp, Homo sapiens
ccagtagggctgagatgttgggagccatcaatcaggaaagccgggttagtaaagcagttgaagtgatgattcagcacgtagaaaacttgaagaggatgtatgccaaagagcacgctgaattagaagaactgaaacaggttcttctgcagaatgaaaggtctttcaatcctcttgaagatgatgatgactgccaaattaaaaaacgttcagcttctctaaactccaagccatcttctctacgaagagtgactattgcctctttacccagaaatattggaaatgcaggaatggtggctgggatggaaaataatgatcgattcagtagaaggtcaagcagttggcgtattttggggtcaaagcagagtgaacaccgtccctcattacctcgatttattagcacctattcctgggcagatgctgaagaagaaaaatgtgaactaaaaactaaagatgactcagagccatctggagaagaaacagtagaaaggacaaggaagccaagtctttctga

SEQ ID NO: 471 - DNA, 562 bp, Homo sapiens
  misc_feature (1)...(562): n = A,T,C or G
ctgagacaaaagtaggcccaaatccttccacagggatggaatgatgctgccagttcactgtcagcatgggtgggaagagattactgacaaaacagaccaaagtgttgggcttgccaaactccaggggcttcagcgtgaacacttcagcgataggaaaccctggtggggggattgaagtgtagggggaaaaagagactagtttagatggtatctctgtgtttggaggggccatggcatatggaggggagggcagagaagaacacagtgggtcaggctttgggagacagagatgagcgaggagctgggctctgaagggaggtcttcttccaggcaaggactgcanctagacgtagaagcagagccagatccaggctactctggacccctccaccatgacttccttcagcacttcctgtctagagctcacattgatgtctaaccatgcactgtcttctcactaagacatagtcacgtcatcagatatttccactcttcccatccatcttgctgggcatagtagcacaagtgttaatattcagtangtatcagttggtacctgttg

SEQ ID NO: 472 - DNA, 487 bp, Homo sapiens; identical to SEQ ID NO: 135
  misc_feature (1)...(487): n = A,T,C or G

SEQ ID NO: 473 - DNA, 340 bp, Homo sapiens; identical to SEQ ID NO: 325

SEQ ID NO: 474 - DNA, 542 bp, Homo sapiens; identical to SEQ ID NO: 331
  misc_feature (1)...(542): n = A,T,C or G

SEQ ID NO: 475 - DNA, 342 bp, Homo sapiens; identical to SEQ ID NO: 306

SEQ ID NO: 476 - DNA, 421 bp, Homo sapiens; identical to SEQ ID NO: 172
  misc_feature (1)...(421): n = A,T,C or G

SEQ ID NO: 477 - DNA, 562 bp, Homo sapiens; identical to SEQ ID NO: 346

SEQ ID NO: 478 - DNA, 294 bp, Homo sapiens; identical to SEQ ID NO: 349

SEQ ID NO: 479 - DNA, 237 bp, Homo sapiens; identical to SEQ ID NO: 206

SEQ ID NO: 480 - DNA, 563 bp, Homo sapiens; identical to SEQ ID NO: 352

SEQ ID NO: 481 - DNA, 340 bp, Homo sapiens; identical to SEQ ID NO: 354
  misc_feature (1)...(340): n = A,T,C or G

SEQ ID NO: 482 - DNA, 353 bp, Homo sapiens; identical to SEQ ID NO: 212

SEQ ID NO: 483 - DNA, 202 bp, Homo sapiens; identical to SEQ ID NO: 358
  misc_feature (1)...(202): n = A,T,C or G

SEQ ID NO: 484 - DNA, 306 bp, Homo sapiens
aaaaacaatctacaggcagttctttacaagtctcatatttacagatagcacaagctatggcatggcgtatggcctccctcctaaatatacgattctttggcatattggaattggtcagcctcaaagaccggctggctacatcgtcgcacgagacagtcccgcttattcctctgcacggactcggagacggtcctcagcgggaggagctcaggtctccctgggccagacacgtgccccagagagtccccagaagcatggacagttctgctctgtttccatcgctcaggcaggggagagagtccgtgg

SEQ ID NO: 485 - DNA, 396 bp, Homo sapiens; identical to SEQ ID NO: 217
  misc_feature (1)...(396): n = A,T,C or G

SEQ ID NO: 486 - DNA, 253 bp, Homo sapiens; identical to SEQ ID NO: 362
  misc_feature (1)...(253): n = A,T,C or G

SEQ ID NO: 487 - DNA, 374 bp, Homo sapiens; identical to SEQ ID NO: 365
  misc_feature (1)...(374): n = A,T,C or G

SEQ ID NO: 488 - DNA, 529 bp, Homo sapiens; identical to SEQ ID NO: 223

SEQ ID NO: 489 - DNA, 402 bp, Homo sapiens; identical to SEQ ID NO: 370
  misc_feature (1)...(402): n = A,T,C or G

SEQ ID NO: 490 - DNA, 556 bp, Homo sapiens
gtttgatgaccgtcgcggacgcccagtgggatttcccatgcggggaagaggtggttttgacagaatgcctcctggtcggggtgggcgtcccatgcctccatctagaagagattatgatgatatgagccctcgtcgaggaccacctccccctcctcccggacgaggcggccggggtggtagcagagctcggaatcttcctcttcctccaccaccaccacctagagggggagacctcatggcctatgacagaagagggagacctggagaccgttacgacggcatggttggtttcagtgctgatgaaacttgggactctgcaatagatacatggagcccatcagaatggcagatggcttatgaaccacagggtggctccggatatgattattcctatgcagggggtcgtggctcatatggtgatcttggtggacctattattactacacaagtaactattcccaaagatttggctggatctattattggcaaaggtggtcagcggattaaacaaatccgtcatgagtcgggagcttcgatcaaaattgatgagccttta

SEQ ID NO: 491 - DNA, 381 bp, Homo sapiens; identical to SEQ ID NO: 374

SEQ ID NO: 492 - DNA, 573 bp, Homo sapiens; identical to SEQ ID NO: 245

SEQ ID NO: 493 - DNA, 288 bp, Homo sapiens; identical to SEQ ID NO: 228
  misc_feature (1)...(288): n = A,T,C or G

SEQ ID NO: 494 - DNA, 574 bp, Homo sapiens; identical to SEQ ID NO: 380

SEQ ID NO: 495 - DNA, 471 bp, Homo sapiens; identical to SEQ ID NO: 382

SEQ ID NO: 496 - DNA, 489 bp, Homo sapiens; identical to SEQ ID NO: 235
  misc_feature (1)...(489): n = A,T,C or G

SEQ ID NO: 497 - DNA, 306 bp, Homo sapiens; identical to SEQ ID NO: 236

SEQ ID NO: 498 - DNA, 345 bp, Homo sapiens
  misc_feature (1)...(345): n = A,T,C or G
ccaatgtggttggtcttcagcttgcagttagccaggttccataccttgaccagcttgtcccagccacaggagacgatgatagggttgctgctgttgggcgagaagcggacacaagacacccactctgagtggctctcatcctggacagtgtatttgcacacacccagggtattccatagcttgatggttttatctcgagatccanagacaatctgccggttgtcagaggagaaggccacactcancacatccttggcatggcccacaaatcgnctngtggtggtgcccgttgtgagatcccagaggcgcagggttccatcccaggagcctgagagggcaaactgg

SEQ ID NO: 499 - DNA, 555 bp, Homo sapiens; identical to SEQ ID NO: 393

SEQ ID NO: 500 - DNA, 340 bp, Homo sapiens; identical to SEQ ID NO: 325

SEQ ID NO: 501 - DNA, 482 bp, Homo sapiens; identical to SEQ ID NO: 395

SEQ ID NO: 502 - DNA, 448 bp, Homo sapiens; identical to SEQ ID NO: 396

SEQ ID NO: 503 - DNA, 573 bp, Homo sapiens; identical to SEQ ID NO: 245

SEQ ID NO: 504 - DNA, 340 bp, Homo sapiens; identical to SEQ ID NO: 325

SEQ ID NO: 505 - DNA, 593 bp, Homo sapiens; identical to SEQ ID NO: 247

SEQ ID NO: 506 - DNA, 425 bp, Homo sapiens; identical to SEQ ID NO: 252

SEQ ID NO: 507 - DNA, 603 bp, Homo sapiens; identical to SEQ ID NO: 253

SEQ ID NO: 508 - DNA, 578 bp, Homo sapiens; identical to SEQ ID NO: 406

SEQ ID NO: 509 - DNA, 568 bp, Homo sapiens; identical to SEQ ID NO: 255

SEQ ID NO: 510 - DNA, 125 bp, Homo sapiens; identical to SEQ ID NO: 408
  misc_feature (1)...(125): n = A,T,C or G

SEQ ID NO: 511 - DNA, 231 bp, Homo sapiens; identical to SEQ ID NO: 259

SEQ ID NO: 512 - DNA, 278 bp, Homo sapiens; identical to SEQ ID NO: 260

SEQ ID NO: 513 - DNA, 288 bp, Homo sapiens; identical to SEQ ID NO: 414

SEQ ID NO: 514 - DNA, 284 bp, Homo sapiens; identical to SEQ ID NO: 416
  misc_feature (1)...(284): n = A,T,C or G

SEQ ID NO: 515 - DNA, 211 bp, Homo sapiens
  misc_feature (1)...(211): n = A,T,C or G
ctgtctcacactttacaagctgtgagagacacatcagagccctgggcactgtcactgcttgcagcctgagagtagctccctccttttctatctgagctgttcctcctccacatcacagcagcgaccacagctccagtgatcacagctccaaggagaaccaggccagcaatgatgcccacgatggggacggtgggctgggaaganggctccn

SEQ ID NO: 516 - DNA, 212 bp, Homo sapiens; identical to SEQ ID NO: 417

SEQ ID NO: 517 - DNA, 272 bp, Homo sapiens; identical to SEQ ID NO: 261

SEQ ID NO: 518 - DNA, 285 bp, Homo sapiens; identical to SEQ ID NO: 418

SEQ ID NO: 519 - DNA, 287 bp, Homo sapiens; identical to SEQ ID NO: 263

SEQ ID NO: 520 - DNA, 286 bp, Homo sapiens; identical to SEQ ID NO: 421

SEQ ID NO: 521 - DNA, 242 bp, Homo sapiens; identical to SEQ ID NO: 265

SEQ ID NO: 522 - DNA, 132 bp, Homo sapiens; identical to SEQ ID NO: 266

SEQ ID NO: 523 - DNA, 414 bp, Homo sapiens; identical to SEQ ID NO: 268

SEQ ID NO: 524 - DNA, 104 bp, Homo sapiens; identical to SEQ ID NO: 428
  misc_feature (1)...(104): n = A,T,C or G

SEQ ID NO: 525 - DNA, 423 bp, Homo sapiens; identical to SEQ ID NO: 275

SEQ ID NO: 526 - DNA, 478 bp, Homo sapiens; identical to SEQ ID NO: 277

SEQ ID NO: 527 - DNA, 384 bp, Homo sapiens
cctgacacaatatccctgttcactttgaagtgaattttgactctatattcagaaccttcctttaacacaatggtttcctttttgagggcttccagatctccagtaaggtccatggtgattggtcccggggcactctcacaaaccagggtgagccgggtgacaacgacattgggggctttcggatctgtcaccacaggaccatctcccagcagcgttttcttgtacttaattagactctcatcatctttgtccatttcctgcagctctttcagggacttctgtggtggaggcttataattgagcttgctgtccagctcatcatcgtcatcctcctccacatgtggctctggggctttttcagtcattctgatctatttattcagt

SEQ ID NO: 528 - DNA, 208 bp, Homo sapiens; identical to SEQ ID NO: 278

SEQ ID NO: 529 - DNA, 330 bp, Homo sapiens; identical to SEQ ID NO: 2

SEQ ID NO: 530 - DNA, 294 bp, Homo sapiens; identical to SEQ ID NO: 280

SEQ ID NO: 531 - DNA, 269 bp, Homo sapiens; identical to SEQ ID NO: 4

SEQ ID NO: 532 - DNA, 197 bp, Homo sapiens
cctgaacaaggacctctgccctccctattcagacccttcgttgcctcacctggtcaatacaaccacttcacctctgaccgcaggggcaggggactagatagaatgacctactgagcctcgtctgtctgtctgtctgtctgtctctctctctctgtttgtctctttgtgtgtccgacaagaacccagactgagggggc

SEQ ID NO: 533 - DNA, 364 bp, Homo sapiens; identical to SEQ ID NO: 9
  misc_feature (1)...(364): n = A,T,C or G

SEQ ID NO: 534 - DNA, 382 bp, Homo sapiens; identical to SEQ ID NO: 10
  misc_feature (1)...(382): n = A,T,C or G

SEQ ID NO: 535 - DNA, 349 bp, Homo sapiens; identical to SEQ ID NO: 284
  misc_feature (1)...(349): n = A,T,C or G

SEQ ID NO: 536 - DNA, 170 bp, Homo sapiens; identical to SEQ ID NO: 15

SEQ ID NO: 537 - DNA, 387 bp, Homo sapiens; identical to SEQ ID NO: 20

SEQ ID NO: 538 - DNA, 533 bp, Homo sapiens; identical to SEQ ID NO: 43
  misc_feature (1)...(533): n = A,T,C or G

SEQ ID NO: 539 - DNA, 332 bp, Homo sapiens; identical to SEQ ID NO: 44

SEQ ID NO: 540 - DNA, 375 bp, Homo sapiens; identical to SEQ ID NO: 50

SEQ ID NO: 541 - DNA, 443 bp, Homo sapiens
ccatttgactaaccagtcctacaaatttcacatatccgtcactcagatgagcatataccaagtcagaggaaacaaaacatgcacatatacaaaagtagaaagagaaaacactcatgccttcagaagttcacaaattaaaagccctttaataatataaaacagttgaacactggaatgtttttttctaggtcatgaaaaaagtgaattccaaatctatgtaataaatctaaaataatacagcatcactgtcttctgttctggtgtttatcaaacctgcacatgagtttttagaaggtgaattggggatgcttcagaatgtattttctccaaacagatggagcctgaaaactgtgtgattttccaaaccaagtggagaaaagcaggaagaaattggtgtttagctggtcagcagacggggatccccgggatgcaatcagccttgg

SEQ ID NO: 542 - DNA, 232 bp, Homo sapiens; identical to SEQ ID NO: 57

SEQ ID NO: 543 - DNA, 392 bp, Homo sapiens; identical to SEQ ID NO: 67
  misc_feature (1)...(392): n = A,T,C or G

SEQ ID NO: 544 - DNA, 371 bp, Homo sapiens; identical to SEQ ID NO: 74

SEQ ID NO: 545 - DNA, 187 bp, Homo sapiens
  misc_feature (1)...(187): n = A,T,C or G
gacctgctcggaggaatggcgccgccgggttcaagcactgtcttcctgttggccctgacaatcatagccagcacctgggctctgacgcccactcactacctcaccaagcatgacgnggagagactaaaagcctcgctggatccgccctttcacaaagttggaagtctngtcttctactccatcntgg

SEQ ID NO: 546 - DNA, 558 bp, Homo sapiens
  misc_feature (1)...(558): n = A,T,C or G
ccatgggatggctcttctgaccattgggggccaggccaggccaggccaggcttagggcagcaaggaccaggccaaaggggcagggcctcctttggaggggttgaggggtacatcctcggctggtgtttgcatccaggggtccagcaggatctcttccagtgagggtcgggaagaaggtttgggggccaggcaccggcggattagggcacagcaatcttggggaaaacatgggcttgggaagtggagctcagcttccagaatctcctggtccctctcaaagggaatgtccccacacaccatgtcatagaggaggatgcccagtgaccagacagtggccgggagtgcatggtactggtgtcgagagatccactctggggggctgtacacccttgtcccatcaaagtcagtgtagggttcatcatgaagcagggcaccagaaccaaaatcaatgagtttggcacagccacggcgtaggtctatcaggatgntctcatccttgatgtcacgatggacaactncacgggaaatggcagtgctggatggctgccactactttgg

SEQ ID NO: 547 - DNA, 357 bp, Homo sapiens; identical to SEQ ID NO: 84

SEQ ID NO: 548 - DNA, 260 bp, Homo sapiens
  misc_feature (1)...(260): n = A,T,C or G
ccaagtagtggcanccatccagcactgccattcccgtggagttgtccatcgtgacatcaaggatgagaacatcctgatagacctacgccgtggctgtgccaaactcattgattttggttctggtgccctgcttcatgatgaaccctacactgactttgatgggacaagggtgtacagccccccagagtggatctctcgacaccagtaccatgcactcccggccactgtctggtcactgggcatcctnctctatgacatgg

SEQ ID NO: 549 - DNA, 366 bp, Homo sapiens; identical to SEQ ID NO: 105
  misc_feature (1)...(366): n = A,T,C or G

SEQ ID NO: 550 - DNA, 368 bp, Homo sapiens; identical to SEQ ID NO: 136

SEQ ID NO: 551 - DNA, 539 bp, Homo sapiens
ccttggtcctagcacccactcgagaattggctcagcagatacagaaggtggtcatggcactaggagactacatgggcgcctcctgtcacgcctgtatcgggggcaccaacgtgcgtgctgaggtgcagaaactgcagatggaagctccccacatcatcgtgggtacccctggccgtgtgtttgatatgcttaaccggagatacctgtcccccaaatacatcaagatgtttgtactggatgaagctgacgaaatgttaagccgtggattcaaggaccagatctatgacatattccaaaagctcaacagcaacacccaggtagttttgctgtcagccacaatgccttctgatgtgcttgaggtgaccaagaagttcatgagggaccccattcggattcttgtcaagaaggaagagttgaccctggagggtatccgccagttctacatcaacgtggaacgagaggagtggaagctggacacactatgtgacttgtatgaaaccctgaccatcacccaggcagtcatcttcatcaacacccgg

SEQ ID NO: 552 - DNA, 529 bp, Homo sapiens
  misc_feature (1)...(529): n = A,T,C or G
aaatcctgagtcaagccaaaaaaaaaaaaaccaaaacaaaacaaaaaaaacaaataaagccatgccaatctcatcttgttttctgcgcaagttaggttttgtcaagaaagggtgtaacgcaactaagtcatagtccgcctagaagcatttgcggtggacgatggaggggccggactcgtcatactcctgcttgctgatccacatctgctggaaggtggacagcgaggccaggatggagccgccgatccacacggagtacttgcgctcaggaggagcaatgatcttgatcttcattgngctgggtgccagggcagngatctccttctgcatcctgtcggnaatgccagggtacatggtggtgccgccagacagcactgngttggcgtacaggtctttgcggatgtccacgtcacacttcatgatggagttgaaggtagtttcgtggatgccacaggactccatgcccaggaaggaaggctgnaanagtgcctcagggcagcggaaccgctcattgccaatggtgatgacc

SEQ ID NO: 553 - DNA, 375 bp, Homo sapiens; identical to SEQ ID NO: 161

SEQ ID NO: 554 - DNA, 193 bp, Homo sapiens; identical to SEQ ID NO: 166
  misc_feature (1)...(193): n = A,T,C or G

SEQ ID NO: 555 - DNA, 421 bp, Homo sapiens; identical to SEQ ID NO: 172
  misc_feature (1)...(421): n = A,T,C or G

SEQ ID NO: 556 - DNA, 372 bp, Homo sapiens; identical to SEQ ID NO: 175

SEQ ID NO: 557 - DNA, 119 bp, Homo sapiens; identical to SEQ ID NO: 185
  misc_feature (1)...(119): n = A,T,C or G

SEQ ID NO: 558 - DNA, 375 bp, Homo sapiens; identical to SEQ ID NO: 50

SEQ ID NO: 559 - DNA, 130 bp, Homo sapiens; identical to SEQ ID NO: 197
  misc_feature (1)...(130): n = A,T,C or G

SEQ ID NO: 560 - DNA, 464 bp, Homo sapiens; identical to SEQ ID NO: 200
  misc_feature (1)...(464): n = A,T,C or G

SEQ ID NO: 561 - DNA, 332 bp, Homo sapiens; identical to SEQ ID NO: 347

SEQ ID NO: 562 - DNA, 237 bp, Homo sapiens; identical to SEQ ID NO: 206

SEQ ID NO: 563 - DNA, 443 bp, Homo sapiens
aaactcattgattaaataatgattaatgcattctccacattttaatattgcaaaggcccattggagtttctgaagtggctccacagaattgaaataatttcaaataactgtaaaggaactgaaaatcttcacagagatgaagtggggtttccattaggtgctttgaaatttgataacaaatcatcaacttccactggtcaatatatagattttgggtgtctgaggccccaagattagatgccactaatctccaaagattccctccaattatgaaatattttaatgtctacttttagagagcactagccagtatatgaccatgtgattaatttcttttcacactagataaaattacctggttcaaaagtggtttttgtttattaaatttggtaataaatatatataatacacagacaggatagtttttatgctgaagtttttgg

SEQ ID NO: 564 - DNA, 524 bp, Homo sapiens; identical to SEQ ID NO: 209

SEQ ID NO: 565 - DNA, 556 bp, Homo sapiens; identical to SEQ ID NO: 211

SEQ ID NO: 566 - DNA, 353 bp, Homo sapiens; identical to SEQ ID NO: 212

SEQ ID NO: 567 - DNA, 286 bp, Homo sapiens; identical to SEQ ID NO: 220
  misc_feature (1)...(286): n = A,T,C or G

SEQ ID NO: 568 - DNA, 529 bp, Homo sapiens; identical to SEQ ID NO: 223

SEQ ID NO: 569 - DNA, 556 bp, Homo sapiens; identical to SEQ ID NO: 490

SEQ ID NO: 570 - DNA, 598 bp, Homo sapiens; identical to SEQ ID NO: 226

SEQ ID NO: 571 - DNA, 647 bp, Homo sapiens
  misc_feature (1)...(647): n = A,T,C or G
ctgagggaggggtcagggtgggtgcgcggtgacggggagggcaaaggtggtgtcagtatcttcattttgaggattggggttcagagcacttctggggtgtcagctcctccttgtccccccgtggggctccgtaggactggaaagaggacatgaagagctctgacagagagcagcagaaactctggaactgtttccagagggcctgcactgcatggaccagggccaccaccttctccttcacccaggccagaaccccgtgccaccaggtctgcagccgctgcagcatggcctggaaccatctcatgaccttgtcacaaaagctctccccaggctcctcggttgcgggatcctcaacatccgggacaggggatctgttgcctcggcaccgtaatccatctctttctttttcaagtagaggagtgagctctaggtgctgctcctcataataagccgccactgtctccaggtagccctctttgaagtcgtcctccagctctgccaggctcgacatcacctgtccacgtcctgattctgcattttgcattttatcataaaatctttctatggcctggtgcattcgggccttcagcttcttcatgtcatcagagaggaccttcgggaagcacatggcggccaaangttcaagg

SEQ ID NO: 572 - DNA, 360 bp, Homo sapiens
cctgacacaatatccctgttcactttgaagtgaattttgactctatattcagaaccttcctttaacacaatggtttcctttttgagggcttccagatctccagtaaggtccatggtgattggtcccggggcactctcacaaaccagggtgagccgggtgacaacgacattgggggctttcggatctgtcaccacaggaccatctcccagcagcgttttcttgtacttaattagactctcatcatctttgtccatttcctgcagctctttcagggacttctgtggtggaggcttataattgagcttgctgtccagctcatcatcgtcatcctcctccacatgtggctctggggctttttca

SEQ ID NO: 573 - DNA, 457 bp, Homo sapiens; identical to SEQ ID NO: 232

SEQ ID NO: 574 - DNA, 388 bp, Homo sapiens
  misc_feature (1)...(388): n = A,T,C or G
aaaaacaaaacaaaacgatccttttgattgtgtggtgcagacgcaggactgaagccacaggcttttggggtgctgtgagcccagggctttgctcagctcacagctagcgcggcgggcagagcaacccttcggcccaagccatcctcgcagcttgtacagaagcttcctgaacctaagggatccgttcccagctctccttaaattcccagtccccaccctgggcctctctccctaacgatcttgtcgctttgggagcctctgaagtgaaccctgaaatactccctccgtcaactctgggctcagacctttgcccttctctgngtcacaaggaaatttcggtcaaganggtgggaacaggtggtttcagaccgtgcagcaaagccactgc

SEQ ID NO: 575 - DNA, 571 bp, Homo sapiens; identical to SEQ ID NO: 234
  misc_feature (1)...(571): n = A,T,C or G

SEQ ID NO: 576 - DNA, 306 bp, Homo sapiens; identical to SEQ ID NO: 236

SEQ ID NO: 577 - DNA, 342 bp, Homo sapiens
  misc_feature (1)...(342): n = A,T,C or G
aaaaacaaaacaaaacgatccttttgaatgtgtggngcagacgcaggactgaagccacaggcttttggggtgctgtgagcccagggctttgctcagctcacagctagcgcggcgggcagagcaacccttcggcccaagccatcctcgcagcttgcacagaagcttcctgaacctaagggatccgttcccagctctccttaaattcccagtccccaccctgggcctctctccctaacgatcttgtcgctttgggagcccctgaagngaaccctgaaatactccctccgtcaactctgggctcagacctttgcccttctctgtgtcacaaggaaatttcggtca

SEQ ID NO: 578 - DNA, 560 bp, Homo sapiens; identical to SEQ ID NO: 237
  misc_feature (1)...(560): n = A,T,C or G

SEQ ID NO: 579 - DNA, 504 bp, Homo sapiens; identical to SEQ ID NO: 400

SEQ ID NO: 580 - DNA, 303 bp, Homo sapiens
ctggagatggcagccgttgtttgcggagcccaggctgactccggattcaacgttgctggggagagaaaagcagtatagactccaccttccaggatgtccatttcggggagaggagcaggtgggaccctcaagaaaatgacggagaacatcccagacagatgggactcaagcaggatgggtgctatatccaagaagccaagaagggagagtttcgtgcactgtggttaacaggagggctgcctggaggcagtggctgagccagaaagtaacacagagctcatgcttggagagagagagtcttgg

SEQ ID NO: 581 - DNA, 363 bp, Homo sapiens
  misc_feature (1)...(363): n = A,T,C or G
tctatgaggccctagagctccgggacaatgataagactcgctatatggggaagggtgtctcaaaggctgttgagcacatcaataaaactattgcgcctgccctggttagcaagaaactgaacgtcacagaacaagagaagattgacaaactgatgatcgagatggatggaacagaaaataaatctaantttggtgcgaacgccattctgggggtgtcccttgccgtctgcaaagctggtgccgttgagaagggggtccccctgtaccgccacatcgctgacttggctggcaactctgaagtcatcctgccagtcccggcgttcaatgtcatcaatggcggttctcatgctggcaacaagctgg

SEQ ID NO: 582 - DNA, 584 bp, Homo sapiens
  misc_feature (1)...(584): n = A,T,C or G
aaataatccaggcaggagaagagaggagggcacacttggaactcccctccccacaatacgtgattatttacattttagtaattggacaatcccggctcaggaggaggttgcaagaatctgcaaaagttggagggagcgccccaggagaacaaacagcaagccttatttcccctagcccatcccccaaaaaaccatccatcccatcctagtgtctggtggtgtccggtggtgtccatcttccattccttcccaaattatggaagtaaggttcttctcaccagaataagagcacttgggataacagagtagggtcccctcacccaaaaaaaaaaaaaaaaangaagccttggggtaacaacagggcattacctcccccagaataaagaatcctgggctgaggcaggtaagcagcttgacccaatatgggaccctaggctaggggaaagggtccctttactaaaataaaagctactggggtattggaaggaaagcacccttgcccaagtaagagcatatgaactaagtttgngtggnggtagtaggaggngccaatgtggggtgacacatcatcagaataagagtcc

SEQ ID NO: 583 - DNA, 547 bp, Homo sapiens
  misc_feature (1)...(547): n = A,T,C or G
ctgattgnncacctgaccacacgcccccacaggctctgaccagcagcctatgagggggtttggcaccaagctctgtccaatcaggtaggctgggcctgaactagccaatcagatcaactctgtcttgggcgtttgaactcagggagggaggcccttgggagcaggtgcttgtggacaaggctccacaagcgttgagccttggaaaggtagacaagcgttgagccactaagcagaggaccttgggttcccaatacaaaaatacctactgctgagagggctgctgaccatttggtcaggattcctgttgcctttatatccaaaataaactcccctttcttgaggttgtctgagtcttgggtctatgccttgaaaaaagctgaattattggacagtctcacctcctgccatagggtcctgaatgtttcagaccacaaggggctccacacctttgctgtgtgttctggggcaacctactaatcctctctgcaagtcggtctccttatccccccaaatggnaattgnatttgccttctccactttgggaggc

SEQ ID NO: 584 - DNA, 400 bp, Homo sapiens; identical to SEQ ID NO: 250

SEQ ID NO: 585 - DNA, 393 bp, Homo sapiens; identical to SEQ ID NO: 251

SEQ ID NO: 586 - DNA, 425 bp, Homo sapiens; identical to SEQ ID NO: 252

SEQ ID NO: 587 - DNA, 595 bp, Homo sapiens
ctgagggaggggtcagggtgggtgcgcggtgacggggagggcaaaggtggtgtcagtatcttcattttgaggattggggttcagagcacttctggggtgtcagctcctccttgtccccccgtggggctccgtaggactggaaagaggacatgaagagctctgacagagagcagcagaaactctggaactgtttccagagggcctgcactgcatggaccagggccaccaccttctccttcacccaggccagaaccccgtgccaccaggcctgcagccgctgcagcatggcctggaaccatctcatgaccttgtcacaaaagctctccccaggctcctcggttgcgggatcctcaacatccgggacaggggatctgttgcctcggcaccgtaatccatctctttctttttcaagtagaggagtgagctctgggtgctgctcctcataataagccgccactgtctccaggtagccctctttgaagtcgtcctccagctctgccaggctcgacatcaccattcgggccttcagctttttcatgtcatcagagaggaccttcgggaagcacatggcggccaaaagttcaaggagccaagg

SEQ ID NO: 588 - DNA, 278 bp, Homo sapiens; identical to SEQ ID NO: 260

SEQ ID NO: 589 - DNA, 284 bp, Homo sapiens; identical to SEQ ID NO: 416
  misc_feature (1)...(284): n = A,T,C or G

SEQ ID NO: 590 - DNA, 211 bp, Homo sapiens; identical to SEQ ID NO: 515
  misc_feature (1)...(211): n = A,T,C or G

SEQ ID NO: 591 - DNA, 286 bp, Homo sapiens; identical to SEQ ID NO: 421

SEQ ID NO: 592 - DNA, 242 bp, Homo sapiens; identical to SEQ ID NO: 265

SEQ ID NO: 593 - DNA, 132 bp, Homo sapiens; identical to SEQ ID NO: 266

SEQ ID NO: 594 - DNA, 108 bp, Homo sapiens; identical to SEQ ID NO: 267

SEQ ID NO: 595 - DNA, 206 bp, Homo sapiens; identical to SEQ ID NO: 270

SEQ ID NO: 596 - DNA, 322 bp, Homo sapiens
  misc_feature (1)...(322): n = A,T,C or G
ttctgccacctatggggnccaggcaggtgtggtgccttggctaagtccacanacttctgagaggcccacgctttcttcttctccanaaataaaccctgaaactcaagcagctttaatcagagggcaggattccacgatagcagcatcagaacagcaagtggcanccnagaattcttgattccnatgatcangcaacagtaaaccctgtggaatttaatactgaggttgcaacaccaccattttcccttctgganacttctaatgaaacanatttcctgattggcattaatgaagagncactggaaggcacngcaatctattt

SEQ ID NO: 597 - DNA, 500 bp, Homo sapiens; identical to SEQ ID NO: 271
  misc_feature (1)...(500): n = A,T,C or G

SEQ ID NO: 598 - DNA, 511 bp, Homo sapiens; identical to SEQ ID NO: 272
  misc_feature (1)...(511): n = A,T,C or G

SEQ ID NO: 599 - DNA, 101 bp, Homo sapiens; identical to SEQ ID NO: 273
  misc_feature (1)...(101): n = A,T,C or G

SEQ ID NO: 600 - DNA, 414 bp, Homo sapiens
gcttcctaacggaaatggaacaggattaccaactagtagacgaaagtgatgctttccatgacaaccttaggtctcttgacaggaatctgccctcagacagccaggacttgggtcaacatggattagaagaggattttatgttataaaagaggattttcccaccttgacaccaggcaatgtagttagcatattttatgtaccatggttatacgattaatcttgggacaaagaattttatagaaatttttaaacatctgaaaaagaagcttaagttttatcatccttttttttctcatgaattcttaaaggattatgctttaatgctgttatctatcttattgttcttgaaaatacctgcattttttggtatcatgttcaaccaacatcattatgaaattaattagattcccatgg

SEQ ID NO: 601 - DNA, 525 bp, Homo sapiens
  misc_feature (1)...(525): n = A,T,C or G
ctggtgtcaagacctgggttagaggtttgtcaaacagaggcagggcccagtcacctctttggaggggagtgatgagaaggggattttggtcacctgagagggttgagtaaacttggatcagggcacaggcttctctcaccatactcagctttttgcactcactccctagttgagcctactggcatcaagctctagatgccaaggctgggatggctgtggagcaggagctatggcccaagtagctctgagaggggaagagacctaaaacccctagcagggaaaatactgacgctaggtgtgaacatatcctctcttttcacaagagtcctgatggggctggctgagcttttgggtactcatccctactgttatagctggagaggatttgggtattgaagcagggaggggcagatcccacgaagtgactgcagatctggaataataagtaaggggtagatctgcccatagagctcactttagaccggcctatactcctacaaggaattggggtangatcttctactc

SEQ ID NO: 602 - DNA, 433 bp, Homo sapiens; identical to SEQ ID NO: 276
  misc_feature (1)...(433): n = A,T,C or G

SEQ ID NO: 603 - DNA, 510 bp, Homo sapiens
  misc_feature (1)...(510): n = A,T,C or G
gaggaagaaacagctccctaatgacaaatgcatctgtgggcgggaggggacttgggattgtgctggaactggatttctgaattgctactacatcttttttcctctcatccaggtctcttcagagctgctgtgcccagtggtgcttcaactggtatctatgaggccctagagctccgggacaatgataagactcgctatatggggaagggtgtctcaaaggctgttgagcacatnaataaaactattgcgcctgccctggttagcaagaaactgaacgtcacagaacaagagaagattgacaaactgatgatcgagatggatggaacagaaaataaatctaagtttggtgcgaacgccattctgggggtgtcccttgccgtctgcaaagctggtgccgttgagaagggggtccccctgtaccgccacatcgctgacttggctggcaactctgaagtcatcctgccagtcccggcgttcaatgtcatcaatggcggntctcatgctggcaac

SEQ ID NO: 604 - DNA, 478 bp, Homo sapiens; identical to SEQ ID NO: 277

SEQ ID NO: 605 - DNA, 384 bp, Homo sapiens; identical to SEQ ID NO: 527

SEQ ID NO: 606 - DNA, 208 bp, Homo sapiens; identical to SEQ ID NO: 278

SEQ ID NO: 607 - DNA, 550 bp, Homo sapiens
  misc_feature (1)...(550): n = A,T,C or G
gcagaagctactcaaatgcngtcggcttgtcctggctcttgccctcatcctggttctggaatcctcagttcaaggttatcctacgcagagagccaggtaccaatgggtgcgctgcaatccagacagtaattctgcaaactgccttgaagaaaaaggaccaatgttcgaactacttccaggtgaatccaacaagatcccccgtctgaggactgacctttttccaaagacgagaatccaggacttgaatcgtatcttcccactttctgaggactactctggatcaggcttcggctccggctccggctctggatcaggatctgggagtggcttcctaacggaaatggaacaggattaccaactagtagacgaaagtgatgctttccatgacaaccttaggtctcttgacaggaatctgccctcagacagccaggacttgggtcaacatggattagaagaggattttatgttataaaagaggattttcccaccttgacaccaggcaatgtagttagcatattttatgtaccatggttatatgattaatcttggg

SEQ ID NO: 608 - DNA, 564 bp, Homo sapiens
ccagaggatcagtgtccgatgaggaaatgatggagctcagagaagcttttgccaaagttgcttcaatgagttgaatgacttgttcaaggctgcttgcttgcctttgcctgggtatagagtacgagaaattacagaaaacctgatggctacaggtgatctggaccaagatggaaggatcagctttgatgagtttatcaagattttccatggcctaaaaagcacagatgttgccaagacctttagaaaagcaatcaataagaaggaagggatttgtgcaatcggtggtacttcagagcagtctagcgttggcacccaacactcctattcagaggaagaaaagtatgcctttgtcaactggataaacaaagccctggaaaatgatcctgattgtcggcatgtcatcccaatgaacccaaacacgaatgatctctttaatgctgttggagatggcattgtcctttgtaaaatgatcaacctgtcagtgccagacacaattgatgaaagaacaatcaacaaaaagaagctaacccctttcaccattcaggaaaatctgaacttggctct

SEQ ID NO: 609 - DNA, 564 bp, Homo sapiens
tgcagatggaagctccccacatcatcgtgggtacccctggccgtgtgtttgatatgcttaaccggagatacctgtcccccaaatacatcaagatgtttgtactggatgaagctgacgaaatgttaagccgtggattcaaggaccagatctatgacatattccaaaagctcaacagcaacacccaggtagttttgctgtcagccacaatgccttctgatgtgcttgaggtgaccaagaagttcatgagggaccccattcggattcttgtcaagaaggaagagttgaccctggagggtatccgccagttctacatcaacgtggaacgagaggagtggaagctggacacactatgtgacttgtatgaaaccctgaccatcacccaggcagtcatcttcatcaacacccggaggaaggtggactggctcaccgagaagatgcatgctcgagatttcactgtatccgccatgcatggagatatggaccaaaaggaacgagacgtgattatgagggagtttcgttctggctctagcagagttttgattaccactgacctgctggacctgc

SEQ ID NO: 610 - DNA, 550 bp, Homo sapiens
ccagatgccaagtgacaagaccattgggggaggagatgattccttcaacaccttcttcagtgaaacgggtgctggcaagcatgtaccccgggcagtgtttgtagacttggaacccacagtcattgatgaagttcgcactggcacttaccgccagctcttccaccctgagcaactcatcacaggcaaggaagatgctgccaataactatgcccgagggcactacaccattggcaaggagatcattgacctcgtgttggaccgaattcgcaagctggctgaccagtgcaccggtcttcagggcttcttggttttccacagctttggtgggggaactggttctgggttcacctcgctgctcatggaacgtctctcagttgattatggcaagaagtccaagctggagttctccatttacccggcgccccaggtttccacaggagaggagaccagagtctgcctggagtgcagactgggagggggcagatgactggggtggagcatgaagaaatttctggggtgattatcctatcttatttggggtgatatttac

SEQ ID NO: 611 - DNA, 349 bp, Homo sapiens; identical to SEQ ID NO: 284
  misc_feature (1)...(349): n = A,T,C or G

SEQ ID NO: 612 - DNA, 342 bp, Homo sapiens; identical to SEQ ID NO: 444
  misc_feature (1)...(342): n = A,T,C or G

SEQ ID NO: 613 - DNA, 246 bp, Homo sapiens; identical to SEQ ID NO: 34

SEQ ID NO: 614 - DNA, 178 bp, Homo sapiens; identical to SEQ ID NO: 39
  misc_feature (1)...(178): n = A,T,C or G

SEQ ID NO: 615 - DNA, 406 bp, Homo sapiens
  misc_feature (1)...(406): n = A,T,C or G
ncgaggtcctccccaaagccagtcctgtgtcaccaatcaaaggaaaggaagccgtcagcagagatgaacagaataaccaccaaggaagccacttcctcctgccccccaaaatcccctcttggagagacccgccagaaactctggaggagcctcaaaatgctccccgagagaggccagagggtccggcagcagctaaaaagccacctcgccactgtgaacttgtcgtcactcttggatgtccggagatccacggtgatctcaggccctgggaccggaaaaggcagccaagatcactcaggggatcccacctcgggggacagaggctacacggatccctgtgcggccacatctntnaaaagcccctcacagccccaggcaccaaaanacanaaaggtccccaccagga

SEQ ID NO: 616 - DNA, 445 bp, Homo sapiens
ctgccgccgtggaatccaaaatttcgggagctgtgaccctttcctcatgtaaaacgagtagtcttggacgatctgggcataggaaccaatcagaaacaatcgcttcagcaatcaagaccattgttcatcatggaggaacccgtggatacctctgagcctctatctgcattaccattcactgggcagcagtcttttgagccaagtggcaaatttggacagtatccatcgatgcagatgaaccacatccaggcactggggaagtggaggacatagaacagctcaatcagtgtttgatccaacacttccatctcattaagacaagtttgatttttctttgctttttatttcatggaatacatgagaatctcttaactgttggagtttccaaggaggcatacctcatgacttcagttaatgggaagaacaaaactaaaatgctgtatgg

SEQ ID NO: 617 - DNA, 240 bp, Homo sapiens
cctaagccgcctaaggggctgcctcggctgtccatcagttacctcgtttcctgagcagagtaattgggtgagattgttcatggaggcattgctggctctctagtcctggaacctacagttggtccaattcattatgccaaagggtccgtctaggaggttcttgttccaagtattgagattcccgagagaagtaggtccccttagatagaagcagagtttctcagaggtatttagcagcag

SEQ ID NO: 618 - DNA, 268 bp, Homo sapiens
aaaatttattttattttacaatacttttagatttatagaaaagttgggaagatggtacaaagagttcccatatataccatacccagtttcccctaataacatcttacattggtatattatggttgtcacaattaaatgggctaatattgatacattagtattaactaaagtccatactttgttcagatttcattagtttttatgtaatgtcttttgtctgttctaggatcccgttgaagataccacattacacttaggctcctgttgg

SEQ ID NO: 619 - DNA, 277 bp, Homo sapiens
  misc_feature (1)...(277): n = A,T,C or G
cgcttttttaggcctagttgaaagtcaagaaggacagcagcaagcataggctcaggattaaagaaaaaaatctgctcacagtctgttctggaggtcacatcaccaacaaagctcacgccctatgcagttctgagaaggtggaggcaccaggctcaaaagaggaaatttanaatttctcattgggagagtaaggtacccccatcccagaatgataactgcacagtggcagaacaaactccaccctaatgtgggtggaccccatccagtctgttgaagg

SEQ ID NO: 620 - DNA, 233 bp, Homo sapiens
ctgtgcgtgctcacgggctcctcctgctggaagagagagagatgtgcacgccactcctatggcatgtctagcaggtctgagcagtgttcatagaagaaaaatgttttaacagtctcagattttgggaggtagggggaaaaaaatcattgaaatctgggaaagacatttttaagctgctgacttcacctgcaaaatctaacaggttggattagtttttttttttttttttacct

SEQ ID NO: 621 - DNA, 311 bp, Homo sapiens
  misc_feature (1)...(311): n = A,T,C or G
ctgcaagacagcagagaanctgccaatatccagttagcagatgactttgctggcaagcagaggaagncggtaaaagcttgtctcccagccaggaaacttgacaccaagntaagatttggagctaggaaacaaacccaaaaggctcacagcaagcggagaaaaaaaccccaaaatctgtaacctgtatcacaaagcgttcatatccttcagatataaagagttattagatatcaataagaaaaatgcaaacactcctgaaaagtagaaaaaagctatgaacaggcaattcactgaaattaaaaaaaaaaaaa

SEQ ID NO: 622 - DNA, 243 bp, Homo sapiens
ctgtggcttagctggctttgctggtcgtaatggaggacaaaagtgccttctggtgaaactcagcttccatagtgatggaacctaagggtagcagagtttatggtgaccctgtagtgtatctccagaaatggtgattgtttgaatgcatgtaagacattccctagggactccaagaaatattgattagaggaagatgtggtgctttgaaagggacttggtgttcctacatgaaccaagtgaagg

SEQ ID NO: 623 - DNA, 388 bp, Homo sapiens; identical to SEQ ID NO: 287

SEQ ID NO: 624 - DNA, 529 bp, Homo sapiens; identical to SEQ ID NO: 297
  misc_feature (1)...(529): n = A,T,C or G

SEQ ID NO: 625 - DNA, 571 bp, Homo sapiens
ctgagctcctctggttcttctctagacctgctccctctctgaaatgcaaggccgtgcctttaatgggcttttggcattctgtctccagacctcccttctcatctgaagggctctcaggagaacagagaaaaaaccagcctgtctccaaactggcccgtctcagggactgggggcctttacccccagtgaaagatgcagactttacagcgctgcagtacagtagagttaagtgactccttcagatagttggatgggtctctcgatcattcctgataataacattttgcctatgttaagtgctttccacctatcatgttaccttctaactactcccttggttggatacaggtattagccccatttcacaattaagaaattgaggcttaaaaggattaaagagttttttagaggagaaacagctcttccttacagaaggatcccaagtaataaatgtgaatgctccctctccagaaggtggcacttaattcccctgtcctggagtttgacctcgcttagtgactggcttctgatgaataaaatggggaaaaggaaaaatagtaactccacagtg

SEQ ID NO: 626 - DNA, 449 bp, Homo sapiens; identical to SEQ ID NO: 52
  misc_feature (1)...(449): n = A,T,C or G

SEQ ID NO: 627 - DNA, 410 bp, Homo sapiens; identical to SEQ ID NO: 60

SEQ ID NO: 628 - DNA, 343 bp, Homo sapiens; identical to SEQ ID NO: 48
  misc_feature (1)...(343): n = A,T,C or G

SEQ ID NO: 629 - DNA, 117 bp, Homo sapiens; identical to SEQ ID NO: 71
  misc_feature (1)...(117): n = A,T,C or G

SEQ ID NO: 630 - DNA, 111 bp, Homo sapiens
  misc_feature (1)...(111): n = A,T,C or G
agcactggtggtgctcaccatggctggacgtctctctcggctctctctcactgacagactctggactctatgtntactcaacaccctagtgcagtggccacgaaaacagca

SEQ ID NO: 631 - DNA, 303 bp, Homo sapiens
  misc_feature (1)...(303): n = A,T,C or G
ctggacgangaangntnctgacactcactaggactgtgactagatgttccagtggcagaaagtcctcctggtttccttcgggccctggcgtaatgcagcagagcagcagcanctacnannacnaagatgttgaccaccagccccntgattcccgcagtggtaaggcctgttctgttcctggaagttcctgtaacattgagtgtcaccactttactgtgctgggcccccaggccattgtcaagcctcacatgagtagtttccagaatgntctgtagtcagagagaggttgaaggatgcccctcc

SEQ ID NO: 632 - DNA, 246 bp, Homo sapiens
  misc_feature (1)...(246): n = A,T,C or G
ncgangtctgaagcccactaaggaatccaggagatgtgctgggccctggagtgggagcaccttgccactggattagaaaacctgccagtcagggctttaactgggaaacaggtgacagtccagcagggccctgcattctggtcagactgagaatgaggacatgtgaaacaaaggccagtagatatggtctggggcagnctaaatcttccacttcaatgctgcttctccccaaggggaactttgcgg

SEQ ID NO: 633 - DNA, 544 bp, Homo sapiens
  misc_feature (1)...(544): n = A,T,C or G
aaatgcgcatgtaatttatttatgataatgtaaatacttcttaaatgtctgtaactcttcaaaagtgatgcttcaggataaatgagctgctaagcattttaagaatttaccgtaactctaatatactggaggggaagggatggatctgaaaggctaccatcagtaagaggaataaaacttgctctgtgtcctccagaagtctggacagtgatcagcaggtaatagacacagaggaactgatttcaacttttgaaaaagagttttccactaattaacactgtcccacggcggaataggttccctgaagatgttgagtgctgaaagtgatcaagcagaggctagagggcttcttgcctgggagcaggggagggttgggggagaaggacaagaggacagtggggtaggtgacctctagcatcattgtcactgctaatattctatcttgtgcattcatttgctcattcacacagcttcccaagatggcccccaatgatccttgccagtggngtattcatgcccttgggcaattccttnccagactgaa

SEQ ID NO: 634 - DNA, 220 bp, Homo sapiens
ccacctgggggcaggtagccccggcttgcttgttctctctttcctagcccaggaatcgggtccttgggtctaaagcacagggccaagttctcaaggatcaacatcccagacagctcccatggtctggggcttggagctggtatgaagggtgaaccaggttccatcctggactgtttatggttggagggcctgggcccctggcaccaagaccttcacttcc

SEQ ID NO: 635 - DNA, 224 bp, Homo sapiens
  misc_feature (1)...(224): n = A,T,C or G
cctaaaaaagcggcctcggtgggaatgcatttctcttgctccacgtctattttagttgcatatctgtagtgatgacaaatgcctccagccttgtcctctgcaaggctgcactgggctgcatacaggctcctgtctcaggtgtctggtttcctccttgaaaggttggggcagcggagtcagccctgtctatctgggcaaggncctgacacttggaancatgaaaa

SEQ ID NO: 636 - DNA, 453 bp, Homo sapiens
ctgtcatgaggtctcttctatagccatcaggtcttctcacagggatattcaccaccttgctctggataggcacatggccgttgtcagctctacagtaatatttgccggcatcactctctttcacagctgggatctccagctctgctgacagggaacgctgggttttctttcccatactggttcctgtggcctctctgtaccaggagaatgtgacatttcctgtacccccagccactgagcagagcaggatcagtttttgtccttcagtcacctgtcccccgggggcccggatctccaagcttacattagagatggggattcctagatggatataagacaacaggtgagaactctaagggaaactctgggaacagggtttgactgattccattctctaatgcaaaatgtgggaatgtggagattgtatagataatccattataagcattcctat

SEQ ID NO: 637 - DNA, 215 bp, Homo sapiens
ccgcccgggcaggtccacccaggaactcctgactgctttccttcccctgcttgctatacattgtctggaactggctaagaaatggggaacatttgtgaaaaccaagaaatgtaatggttttggatgaataaaatagaccaaagttaaggtaagtgcacaaatatcagtgtcaggctatggaagaaagataaagagatacttcttttttttttttt

SEQ ID NO: 638 - DNA, 497 bp, Homo sapiens
  misc_feature (1)...(497): n = A,T,C or G
gttcggggagagggtggtancacagggcttgggatatcggcagtgtgggaaatgcgaagcatttctcatcatcatcatctctgctacagncatgtttctgcatgtcagcgagcgacactgtccctgcctcaggttggaggttttatcanccaaagtgtttttttcatgtatcgttcgttccattcatccactctgnnccttgncagcctttgaaaggcttggttgctcccaggctgctgttctcagggaccttaaaagggacctggttagtcttggggcagagagtatctacttgggcactctcttccaagaaagaccttgtctccattttcattaggacaatgcttcttgtgtgtgttctggaagatcttctaaatggaatgcttgttgcactgntcccangcgagtggntgccatgagacctgangaccacacttgggggaccaatcatgtncttnaccactgngccttagaatcgcccctggacagagttcctg

SEQ ID NO: 639 - DNA, 591 bp, Homo sapiens
ctgataacgttcacagccccatcctcagcacgtggattcgagtcaccgtgagaattccggtatctcaccctgtcctcaccttcagggctcccagggcccacactgtggtgggggacctgctggagcttcactgtgagtccctgagaggctctcccccgatcctgtaccgattttatcatgaggatgtcaccctggggaacagctcagccccctctggaggaggagcctccttcaacctctctctgactgcagaacattctggaaactactcctgtgatgcagacaatggcctgggggcccagcacagtcatggagtgagtctcagggtcacagttccggtgtctcgccccgtcctcaccctcagggctcccggggcccaggctgtggtgggggacccgctggagcttcactgtgagtccctgagaggctccttcccgatcctgtactggttttatcacgaggatgacaccttggggaacatctcggcccactctggaggaggggcatccttcaacctctctctgactacagaacattctggaaactactcatgtgaggctgacaatggcctggggcccagcacagtaaagt

SEQ ID NO: 640 - DNA, 349 bp, Homo sapiens
ccagagtgcaggatacatcattggcaccaagggtctttttcaattcttggtcaatcctctgcagcaagcacccccggatgacgtcctcatagatgccctcagtggtcagagcctggctgcccacggcaaggacatccccctcgaactcaggcagctcctttttgcagcctggctcgagttggctcagcacaaaaggtaaaaagatgcagagaccccagcctcggatgaacctcctctgcgccaacccgctgtccgatttgaatttcttcagcacgcgccccctgactctctccagcctctgggcagcctggtcacagttgagggccgtcgtcagacactggtcagccag

SEQ ID NO: 641 - DNA, 555 bp, Homo sapiens
aaaggatgcactcttgccattttatgtactggaagatcattggtcagatgaatactgtgtctgacaaaaatgtaaactgtataaactgaggaacctcagctaatcagtattactttgtagatcaccatgcccaccacatttcaaactcaaactatctgtagatttcaaaatccattgtgtttgagtttgtttgcagttccctcagcttgctggtaattgtggtgttttgttttttgttttgttttcaatgcaaatgtgatgtaatattcttattttctttggatcaaagctggactggaaattgtatcgtgtaattatttttgtgttcttaatgttatttggtacttaagttgtaaataacgtctactactgtttattccagtttctactacctcaggtgtcctatagatttttcttctaccaaagttcactttcacaatgaaattatatttgctgtgtgactatgattcctaagatttccagggcttaagggctaacttctattagcaccttactgtgtaagcaaatgttacaaaaaaaaaaaaaaatctctgg

SEQ ID NO: 642 - DNA, 179 bp, Homo sapiens; identical to SEQ ID NO: 191
  misc_feature (1)...(179): n = A,T,C or G

SEQ ID NO: 643 - DNA, 582 bp, Homo sapiens
  misc_feature (1)...(582): n = A,T,C or G
ccattggatggctggggattcaccagagaaacggacacaccaggttctattctaaaaacattaagtggtttcccaggacagcagtcttccctgattttatcttctgcttcggaggcaaacttgacttctatgtgttctagctcaagcgaattagtcagatagactatattctccataagcacagccttttcatcaaattctaattgcaaatccagaatacgaggccccatcttctccagattttccttaatcatggcaacaaatggcatgactttcttcatgtatttcttcagttctggcatactgcttagttcactagcaatgactttgttgtcaggcagttttccgttattggcctcaaagtgtttacgtagaacagacagggtggtatgttgccaaggtggatagttctttgccacatagatggtgcaatgtgagggcttctgcaggggttgtttgtcagtcttcttccctttagctggcatcatatagttcttgagtcgtagtctaaggtcatgtgttacttccataagatactgngaggagtgtattaaaacttcattaacaggacctgccacaggc

SEQ ID NO: 644 - DNA, 420 bp, Homo sapiens
  misc_feature (1)...(420): n = A,T,C or G
ctggggcacacagaggaggggcctgggtaccccttttggggaaactgagacgaagctatttagaacagcttgaaaataagagacttttctagaatggggtggcagctaaagtagcttctttttctttctttcagaatgctcagatgcatcagttccttaatatacacgtgaaatttgaaaactgtacattcggtgagattaaattttatatacaactagcaattgtccagctttgttgctcattttcaattaaggctaaagtgttcaacatgagaaaatgtgatacatttgatacagtgtggggtgggagtggatgggcagctcttggtggtactggaccttncacaaggctgtgtccacccagaatccatgctggcaggagggaggcagaggtatcaaaccanacctctcaccaagcgg

SEQ ID NO: 645 - DNA, 505 bp, Homo sapiens
  misc_feature (1)...(505): n = A,T,C or G
aaagacagaatccctgagtgctgagcagattctcaaaacacatttanaatccctgaaattagaaagatcaatgacaaaatatctgtcagccaggccacaaacaggtgtaaaattatgaaaggagtggttggatgtgccaagtttggtaaagtggtgactgcatctgagaaagaggctgtgaggctgaactcttggtggcttccttctgtaacttccagagggagtcttcaacacaggccccgtgctcgtaggaatacggtagcacctatgtaggaagtgcgtggagttttctgtcttctttctgtgtgatttttggcctttttatcagcacttctcccctcccaggagcctggggatgccaaacatccagaatgtgatgggacaagatgggggcaggggcctcacctccctgcagaggtccggccaggtctccttgtccctggacaatctcctgagcctctctgcttggtggagcaggcacctgtgtgcagaattcccactgtgg

SEQ ID NO: 646 - DNA, 474 bp, Homo sapiens; identical to SEQ ID NO: 205
  misc_feature (1)...(474): n = A,T,C or G

SEQ ID NO: 647 - DNA, 478 bp, Homo sapiens
ccagcatcaccacagcctggggcccagaaggagccataacctgttgctgcctgatggagggcccagcatgggacacaagccagatcatcatcaccgggagtcaagacggcatggtccgggtttggaagactgaggatgtgaagatgtctgttcctggacggccagcaggagaggagcccctggctcagcctccaagcccaagaggccacaagtgggagaagaacctggccttgagtcgagagctggacgttagcattgctttgacagggaagcccagcaaaaccagccccgcagtgactgctctggccgtgtccagaaaccacaccaaactcctggttggtgatgagagggggagaatattctgctggtctgcagatgggtaggaagagagaggcagcagaggctctggcacaacagtgccaggctgagggtggcagaggtgactggggcctgagctctgcctacagaagaaaccccc

SEQ ID NO: 648 - DNA, 443 bp, Homo sapiens; identical to SEQ ID NO: 563

SEQ ID NO: 649 - DNA, 563 bp, Homo sapiens; identical to SEQ ID NO: 352

SEQ ID NO: 650 - DNA, 306 bp, Homo sapiens; identical to SEQ ID NO: 484

SEQ ID NO: 651 - DNA, 561 bp, Homo sapiens; identical to SEQ ID NO: 356

SEQ ID NO: 652 - DNA, 420 bp, Homo sapiens; identical to SEQ ID NO: 364

SEQ ID NO: 653 - DNA, 196 bp, Homo sapiens
tcagaagtgtgctcctctggcctcagttctcctcttttggaacaacataaaacaaatttaattttctacgcctctggggatatctgctcagccaatggaaaatctgggttcaaccagcccctgccatttcttaagactttctgctgcactcacaggatcctgagctgcacttacctgtgagagtcttcaaactttt

SEQ ID NO: 654 - DNA, 581 bp, Homo sapiens
  misc_feature (1)...(581): n = A,T,C or G
ctgctcgacagcatatggcaccagcccattttcaatttgctgagcatcggccaaagcctgtatgcgaaagccaaggagctggacagagtgaaggaaattcaggagcagctcttccatatcaagaagctgttgaagacctgtaggtttgctaacagtgcattaaaggagtttgtagggcaggtgccgggacacttgactgatgagctccacctgttctcccttgaggacctggtcaggatcaagaaagggctgctggcacccttactcaaggacattctgaaagcttcccttgcacatgtggctggctgtgagctgtgtcaaggaaagggctttatttgtgaattttgccagaatacgactgtcatcttcccatttcagacagcaacatgtagaagatgttcagcgtgcagggcttgctttcacaaacagtgcttccagtcctccgagtgcccccggtgtgcgaggatcacagcgaggagaaaacttctggaaagtgtggcctctgcagcaacatgatgcccctgagtactgngaaaaagactgttcaacatgccttatgataacaccgatttgngtctatt

SEQ ID NO: 655 - DNA, 482 bp, Homo sapiens; identical to SEQ ID NO: 395

SEQ ID NO: 656 - DNA, 252 bp, Homo sapiens
  misc_feature (1)...(252): n = A,T,C or G
aaaatacttttataaaattataaattgataataatccccncaaactgaagngaaatacttttaatactacttgaaattaaagtacagttgnttatacaacaatgaataaggacaagatatnaaactgaaaattcaaaaataaacagaagaaatgtaaacagttctaaaatatcagtatttataaatgttgcttagaggaaggctattcaaagcatggtccattaactatttgtgagctgtccagaatgaaag

SEQ ID NO: 657 - DNA, 379 bp, Homo sapiens
  misc_feature (1)...(379): n = A,T,C or G
aaaataagctatggtttttccagtagccaaaatgatcctgcaccanagctcatanactgagaacctgancatgcaaanccacagtctgggtgaagggatgtctgctttgtaaatgacctgctaattctttgcaacccacagtaatttggtttctgtgaacccacagaagcaggcccaccaaaaagggccttgtctgctagcctggagtatacatgantcactggcggtgggatcagtcattttttaggctgccccattttcctaacatgttaaaatgtgtgttctcagtcttttcaagagaggaagaagcaaagcggcacttacagagtgtgtgatangacacagatctgtggcgagggattggggaaggtgggtggca

SEQ ID NO: 658 - DNA, 551 bp, Homo sapiens; identical to SEQ ID NO: 258
  misc_feature (1)...(551): n = A,T,C or G

SEQ ID NO: 659 - DNA, 278 bp, Homo sapiens; identical to SEQ ID NO: 260

SEQ ID NO: 660 - DNA, 414 bp, Homo sapiens; identical to SEQ ID NO: 268

SEQ ID NO: 661 - DNA, 353 bp, Homo sapiens; identical to SEQ ID NO: 427

SEQ ID NO: 662 - DNA, 101 bp, Homo sapiens
  misc_feature (1)...(101): n = A,T,C or G
agggggntggtggctgncntnatnaggacctggacggcctggnctgagctgaccnatgccngatntactggtnctncactgaangtacacaanatcnttaa

SEQ ID NO: 663 - DNA, 442 bp, Homo sapiens
cctccaattccacagagcacaatttaaaactacagcatatgaaaatagcaaatgcaaaaaaacaaaaacaaaaacacaacacaaaatgccacatgtaaatggtggagtatgtatttatacataacatccccacatacatacatacactcaaaacaatactatataatttttctatgtgaacatacaatgtccttctggaagaacatacaaaaactggtaacagtagctaactttaggggagaatccttgattagggttggtagatgaaaagacttcagccctttctgtaaggtgggcagcacatatttacaaaaggaatgtatctctgtattgtgtgtgaatataccattaatttctaaaaggttccatgagaaaattttcgaagaattgcacaaacatcctttgctatgtagacaaagatggtgactcggcacaaagccag

SEQ ID NO: 664 - DNA, 317 bp, Homo sapiens
  misc_feature (1)...(317): n = A,T,C or G
ctggtggttaacaagtggatcgtcatgttcagtagtttatacattatgtgagaagtaacgttctgattctttttcttacacagaattggcagagggggtcgatttgggaggaaaggtgtggctataaactttgttactgaagaagacaagaggattcttcgtgacattgagactttctacaatactacagtggaggagatgcccatgaatgtgactgaccttatttaattcctgggatgagagttttcgatgcagtgctcgctgttgntgaataggcnatcacnacgtgcattgtgcttctttctttggnaatattt

SEQ ID NO: 665 - DNA, 1324 bp, Homo sapiens
cttgagaggctctggctcttgcttcttaggcggcccgaggacgccatggccgagtgcccgacactcggggaggcagtcaccgaccacccggaccgcctgtgggcctgggagaagttcgtgtatttggacgagaagcagcacgcctggctgcccttaaccatcgagataaaggataggttacagttacgggtgctcttgcgtcgggaagacgtcgtcctggggaggcctatgacccccacccagataggcccaagcctgctgcctatcatgtggcagctctaccctgatggacgataccgatcctcagactccagtttctggcgcttagtgtaccacatcaagattgacggcgtggaggacatgcttctcgagctgctgccagatgactgatgtatggtcttggcagcacctgtctcctttcaccccagggcctgagcctggccagcctacaatggggatgttgtgtttctgttcaccttcgtttactatgcctgtgtcttctccaccacgctggggtctgggaggaatggacagacagaggatgagctctacccagggcctgcaggacctgcctgtagcccactctgctcgccttagcactaccactcctgccaaggaggattccatttggcagagcttcttccaggtgcccagctatacctgtgcctcggcttttctcagctggatgatggtcttcagcctctttctgtcccttctgtccctcacagcactagtatttcatgttgcacacccactcagctccgtgaacttgtgagaacacagccgattcacctgagcaggacctctgaaaccctggaccagtggtctcacatggtgctacgcctgcatgtaaacacgcctgcaaacgctgcctgccggtaaacacgcctgcaaacgctgcctgcccgtaaacacgcctgcaaacgctgcctgcccacacaggttcacgtgcagctcaaggaaaggcctgaaaggagcccttatctgtgctcaggactcagaagcctctgggtcagtggtccacatcccgggacgcagcaggaggccaggccggcgagccctgtggatgagccctcagaacccttggcttgcccacgtggaaaagggatagaggttgggtttcccccctttatagatggtcacgcacctgggtgttacaaagttgtatgtggcatgaatactttttgtaatgattgattaaatgcaagatagtttatctaacttcgtgcgcaatcagcttctatccttgacttagattctggtggagagaagtgagaataggcagcccccaaataaaaaatattcatggaaaaaaaaaaaaaaa

SEQ ID NO: 666 - protein, 114 aa, Homo sapiens
MAECPTLGEAVTDHPDRLWAWEKFVYLDEKQHAWLPLTIEIKDRLQLRVLLRREDVVLGRPMTPTQIGPSLLPIMWQLYPDGRYRSSDSSFWRLVYHIKIDGVEDMLLELLPDD

SEQ ID NO: 667 - DNA, 1659 bp, Homo sapiens
tcagcgggcgagtccccggctcctccagctccttcctcctcttcctcctcctcctccacctccggcttttgggggatcactgtcctctctcggcagcagaatgagccggcaggtggtccgctccagcaagttccgccacgtgtttggacagccggccaaggccgaccagtgctatgaagatgtgcgcgtctcacagaccacctgggacagtggcttctgtgctgtcaaccctaagtttgtggccctgatctgtgaggccagcgggggaggggccttcctggtgctgcccctgggcaagactggacgtgtggacaagaatgcgcccacggtctgtggccacacagcccctgtgctagacatcgcctggtgcccgcacaatgacaacgtcattgccagtggctccgaggactgcacagtcatggtgtgggagatcccggatgggggcctgatgctgcccctgcgggagcccgtcgtcaccctggagggccacaccaagcgtgtgggcattgtggcctggcacaccacagcccagaacgtgctgctcagtgcaggttgtgacaacgtgatcatggtgtgggacgtgggcactggggcggccatgctgacactgggcccagaggtgcacccagacacgatctacagtgtggactggagccgagatggaggcctcatttgtacctcctgccgtgacaagcgcgtgcgcatcatcgagccccgcaaaggcactgtcgtagctgagaaggaccgtccccacgaggggacccggcccgtgcgtgcagtgttcgtgtcggaggggaagatcctgaccacgggcttcagccgcatgagtgagcggcaggtggcgctgtgggacacaaagcacctggaggagccgctgtccctgcaggagctggacaccagcagcggtgtcctgctgcccttctttgaccctgacaccaacatcgtctacctctgtggcaagggtgacagctcaatccggtactttgagatcacttccgaggcccctttcctgcactatctctccatgttcagttccaaggagtcccagcggggcatgggctacatgcccaaacgtggcctggaggtgaacaagtgtgagatcgccaggttctacaagctgcacgagcggaggtgtgagcccattgccatgacagtgcctcgaaagtcggacctgttccaggaggacctgtacccacccaccgcagggcccgaccctgccctcacggctgaggagtggctggggggtcgggatgctgggcccctcctcatctccctcaaggatggctacgtacccccaaagagccgggagctgagggtcaaccggggcctggacaccgggcgcaggagggcagcaccagaggccagtggcactcccagctcggatgccgtgtctcggctggaggaggagatgcggaagctccaggccacggtgcaggagctccagaagcgcttggacaggctggaggagacagtccaggccaagtagagccccgcagggcctccagcagggtcagccattcacacccatccactcacctcccattcccagccacatggcagagaaaaaaatcataataaaatggctttattttctggtaaaaaaaaaaaaaaaaaaaaaaaaaaaaaaaaaaaaaaaaaaaaaaaaaaagggggggggga

SEQ ID NO: 668 - protein, 461 aa, Homo sapiens
MSRQVVRSSKFRHVFGQPAKADQCYEDVRVSQTTWDSGFCAVNPKFVALICEASGGGAFLVLPLGKTGRVDKNAPTVCGHTAPVLDIAWCPHNDNVIASGSEDCTVMVWEIPDGGLMLPLREPVVTLEGHTKRVGIVAWHTTAQNVLLSAGCDNVIMVWDVGTGAAMLTLGPEVHPDTIYSVDWSRDGGLICTSCRDKRVRIIEPRKGTVVAEKDRPHEGTRPVRAVFVSEGKILTTGFSRMSERQVALWDTKHLEEPLSLQELDTSSGVLLPFFDPDTNIVYLCGKGDSSIRYFEITSEAPFLHYLSMFSSKESQRGMGYMPKRGLEVNKCEIARFYKLHERRCEPIAMTVPRKSDLFQEDLYPPTAGPDPALTAEEWLGGRDAGPLLISLKDGYVPPKSRELRVNRGLDTGRRRAAPEASGTPSSDAVSRLEEEMRKLQATVQELQKRLDRLEETVQAK

SEQ ID NO: 669 - protein, 79 aa, Homo sapiens
GKHPDPSAWHRPSDTEPLNKGTPTPHHILRSGAPQVDTRTLTPCPSSTPQVSPRLPPRSLCSRPPLRSFKPTRPHWCVS

SEQ ID NO: 670 - protein, 124 aa, Homo sapiens
TFRHRAPEQGHPNTSSYTEVRGSPGGHQDSDPLPLIHPAGQPKAAPSVTLFPPSSEELQANKATLVCLISDFYPGAVTVAWKADSSPVKAGVETTTPSKQSNNKYAASSYLSLTPEQWKSHKSY

SEQ ID NO: 671 - protein, 50 aa, Homo sapiens
PAGWMRGRGSESWCPPGEPLTSVYDEVLGCPCSGALCLKVYARQRGQGVF

SEQ ID NO: 672 - protein, 108 aa, Homo sapiens
VAFVGLPLLRRQAQVAAGRVLVVALFGGCGGLHSRLDGAAICLPGHCHGSRVEVTYETHQCGLVGLKLLRGGREQSDRGGSLGLTCGVDEGQGVRVLVSTWGAPDLSI

SEQ ID NO: 673 - protein, 58 aa, Homo sapiens [sequence omitted]

SEQ ID NO: 674 - protein, 109 aa, Homo sapiens
HTAPVLDIAWCPHNDNVIASGSEDCTVMVWEIPDGGLMLPLREPVVTLEGHTKRVGIVAWHTTAQNVLLSAGCDNVIMVWDVGTGAAMLTLGPEVHPDTIYSVDWSRDG

SEQ ID NO: 675 - protein, 100 aa, Homo sapiens
IVSGCTSGPSVSMAAPVPTSHTMITLSQPALSSTFWAVVCQATMPTRLVWPSRVTTGSRRGSIRPPSGISHTMTVQSSEPLAMTLSLCGHQAMSSTGAVW

SEQ ID NO: 676 - protein, 103 aa, Homo sapiens [sequence omitted]

SEQ ID NO: 677 - protein, 89 aa, Homo sapiens
TGFYPDHVELSWWVNGKEVHSGVSTDPQPLKEQPALNDSRYCLSSRLRVSATFWQNPRNHFRCQVQFYGLSENDEWTQDRAKPVTQIVS

SEQ ID NO: 678 - protein, 89 aa, Homo sapiens
ADDLGDRFGPILGPLVILREPVELDLTAEVVAGVLPEGGRDPQAAAQAVSGVIEGGLLLEGLRVCADPTVHLLPIHPPAQLHVVGVEAC

SEQ ID NO: 679 - protein, 59 aa, Homo sapiens
QRKWLRGFCQKVAETLRRLLRQYLESLRAGCSLRGCGSVLTPLCTSFPFTHQLSSTWSG

SEQ ID NO: 680 - protein, 123 aa, Homo sapiens
  variant (1)...(123): Xaa = Any amino acid
TXXINRXEAGDEADYYCQVWDRNNDHVVFGGGTKLAVLGQPKAAPSVTLFPPSSEELQANKATLVCLISDFYPGAVTVAWKAXSSPVKAGVETTTPSKQSNNKYAASSYLSLTPEQWKSHXTT

SEQ ID NO: 681 - protein, 85 aa, Homo sapiens
  variant (1)...(85): Xaa = Any amino acid
CSXVGLPLLRRQAQIAAGRVLVVALFGGCGGLHSRLDGAAXCLPGHCHGSRVEVTYETHQCGLVGLKLLRGGREQSDRGGSLGLT

SEQ ID NO: 682 - protein, 85 aa, Homo sapiens
VASVGLPLLRRQAQIAAGRVLVVALFGGCGGLHSRLDGAAICLPGHCHGSRVEVTYETHQCGLVGLKLLRGGREQSDRGGSLGLT

SEQ ID NO: 683 - protein, 123 aa, Homo sapiens
TLTINRVEAGDEADYYCQVWDRNNDHVVFGGGTKLAVLGQPKAAPSVTLFPPSSEELQANKATLVCLISDFYPGAVTVAWKADSSPVKAGVETTTPSKQSNNKYAASSYLSLTPEQWKSHRSY

SEQ ID NO: 684 - protein, 161 aa, Homo sapiens
  variant (1)...(161): Xaa = Any amino acid
PCLRSKVTRKRPCLPSMTLMEEMLREAFRCMTQEPMKGPIAMQSGPKPLFRRMSSLVGPTQSFFMRESKTLGAVQIMNGLFHIALGGLLMIPAGIYAPICVTGVVPSLGRHYVYYFRITPGSNRKKNSRKCLVKGKNDNEFIXPSLLAFSGKNSFQIMGPY

SEQ ID NO: 685 - protein, 60 aa, Homo sapiens
  variant (1)...(60): Xaa = Any amino acid
LGWYPLWGGIMYIISGSLLAATGKKTPGSVWSKEKMIMNSLXPLCLPFLERILFKSWDHT

SEQ ID NO: 686 - protein, 67 aa, Homo sapiens
LPQIQGHSEEAMSTLNDTHGGNAERSIQMHDTRANERPYCYAIWSKTTLQEDVFTGGPHAKLLHEGI

SEQ ID NO: 687 - protein, 68 aa, Homo sapiens
DFGGCPDYEWALPHCPGGSSDDPSRDLCTHLCDWGGTLSGEALCILFPDHSWQQPEKKLQEVFGQRKK

SEQ ID NO: 688 - protein, 106 aa, Homo sapiens
  variant (1)...(106): Xaa = Any amino acid
VWSHDLKRILSRKGKQRGXNEFIIIFSFDQTLPGVFFPVAARSDPEIIYIMPPQRGYHPSHTDGCIDPCWDHQKTPQGNVEEPIHNLDSPQSLRFPHEEALRGAHQ

SEQ ID NO: 689 - protein, 94 aa, Homo sapiens
IPAGIIRRPPRAMWKSPFIIWTAPKVLDSLMKKLCVGPTSEDILLKSGFGPDCIAIGPFIGSCVMHLNASLSISSMSVIEGRHGLFRVTLDLRQ

SEQ ID NO: 690 - protein, 151 aa, Homo sapiens
  variant (1)...(151): Xaa = Any amino acid
PGGQHGGDWSWRVTVEPQDSGTSALPLVSLFFYVVTDGKEVLLPEVGAKGQLKFISGHTSELGNFRFTLLPPTSPGDTAPKYGSYNVFWTSNPGLPLLTEMVKSRLNSWFQHRPPGASPERYLGLPGSLKWEDRXPSGQGXGAVLDTAGDP

SEQ ID NO: 691 - protein, 59 aa, Homo sapiens
WGSARRGLELESDCRASGLRYFCPPFGLPVLLCGDRWQGSPTTRGWGQGAVEVYQWAHQ

SEQ ID NO: 692 - protein, 85 aa, Homo sapiens
  variant (1)...(85): Xaa = Any amino acid
FKGHLLYQELPXALAHLDXCPPTSGILASRGSVQGRPLGADAETSYLGDSLPSLSAGAVLGWRSRRHCSCHTWGLYPLDWLVAKV

SEQ ID NO: 693 - protein, 53 aa, Homo sapiens
TSTAPWPQPLVVGLPCHLSPHRRTGRPKGGQKYLSPEALQSLSSSSPLRADPQ

SEQ ID NO: 694 - protein, 62 aa, Homo sapiens
ATLYHLCQQGQSWVGGPEDIVAAILGGCIPWTGWWQKCKAEVTKFTGVPTDKLQLPLGPNLW

SEQ ID NO: 695 - protein, 51 aa, Homo sapiens
LPYLGAVSPGLVGGKSVKRKLPSSLVCPLINFNCPLAPTSGSRTSLPSVTT

SEQ ID NO: 696 - protein, 71 aa, Homo sapiens
  variant (1)...(71): Xaa = Any amino acid
IRSKSHPGLGPSTHSRIGSADTEGGHGTRRLHGRLLSRLYPGHQRXVLTCINCXWNSPHHRGYPWPXXLKC

SEQ ID NO: 697 - protein, 97 aa, Homo sapiens
  variant (1)...(97): Xaa = Any amino acid
ASYSYXXEKPSAIQQRAILPCIKGYDVIAQAQSGTGKTATFAISILXQIELDLKATQALVLAPTRELAQQIQKVVMALGDYMGASCHACIRGTNVXC

SEQ ID NO: 698 - protein, 52 aa, Homo sapiens
  variant (1)...(52): Xaa = Any amino acid
PPSVSAEPILEWVLGPRPGWLLDLIQSXAESIWQMWPFSQSQIGLEQSHHNP

SEQ ID NO: 699 - protein, 70 aa, Homo sapiens
SGHSMDMRVPAQLLGLLLLWLPGAKCDIQMTQSPSTLSASVGDTSYNKLSGLSEYRSVVGLASTETRQSP

SEQ ID NO: 700 - protein, 97 aa, Homo sapiens
  variant (1)...(97): Xaa = Any amino acid
PNLLPPCLHLSEIQVTISCRASQNIDRWLAWHQQKPGKAPNVLIYATSSLEEGVSLRFTGSGSGTQFNLTITSLQPDDSATYYXQHYSASLRSFWTS

SEQ ID NO: 701 - protein, 72 aa, Homo sapiens [sequence omitted]

SEQ ID NO: 702 - protein, 51 aa, Homo sapiens
EARQLIVTCISDRCRQGGRRLGHLDVTFGTWEPEQQEPQELSGDPHVHAVS

SEQ ID NO: 703 - protein, 61 aa, Homo sapiens
  variant (1)...(61): Xaa = Any amino acid
LLAAYLLLLCLEGVVXSTPALTGLAICLPGHCHXSRVEVTYETHQXGLVGLKLLXGGRETE

SEQ ID NO: 704 - protein, 56 aa, Homo sapiens
  variant (1)...(56): Xaa = Any amino acid
VAAVGLPLLRRQAQIAAGRVLVVALFGGCGXLHSRLDGACYLPSRPLSXLPGRSHL

SEQ ID NO: 705 - protein, 76 aa, Homo sapiens
  variant (1)...(76): Xaa = Any amino acid
VSPXLPPRSFCFPPSXEELQANKAXLVCLISDFYPGXVTVAWKADSKPRQGGSGXHHTLQTKQQQVRGQQLSEPDA

SEQ ID NO: 706 - protein, 154 aa, Homo sapiens
  variant (1)...(154): Xaa = Any amino acid
TLTINRVEAGDEADYYCQVWDRNNDHVVFGGGTKLAVLGQPKAAPSVTLFPPSSEELQANKATLVCLISDFYPGAVTVAWKADSSPVKAGVETTTPSKQSNNKYAASSYLSLTPEQWKSHRSYRPARAAKGEFQHTWRRYYGSXSVPTWRNHXH

SEQ ID NO: 707 - protein, 67 aa, Homo sapiens
  variant (1)...(67): Xaa = Any amino acid
YXHDYAKLVPSXIHSNGAKCAGIRPWPPGQVCSFCGTSTAQASGSDSCWPRTCCCFVWRVWWSPLPP

SEQ ID NO: 708 - protein, 116 aa, Homo sapiens
  variant (1)...(116): Xaa = Any amino acid
MXMITPSWYRXGSIVTAPSVLEFALGRPGRSVASVGLPLLRRQAQIAAGRVLVVALFGGCGGLHSRLDGAAICLPGHCHGSRVEVTYETHQCGLVGLKLLRGGREQSDRGGSLGLT

SEQ ID NO: 709 - protein, 125 aa, Homo sapiens
  variant (1)...(125): Xaa = Any amino acid
TLTINRVEAGDEADYYCQVWDRNNDHVVFGGGTKLAVLGQPKAAPSVTLFPPSSEELQANKATLVCLISDFYPGAVTVAWKADSSPVKAGVETTTPSKQSNNKYAXQQLSEALTPEQVESPTEAT

SEQ ID NO: 710 - protein, 70 aa, Homo sapiens
  variant (1)...(70): Xaa = Any amino acid
LLXRVLVVALFGGCGGLHSRLDGAAICLPGHCHGSRVEVTYETHQCGLVGLKLLRGGREQSDRGGSLGLT

SEQ ID NO: 711 - protein, 53 aa, Homo sapiens
  variant (1)...(53): Xaa = Any amino acid
VASVGLSTCSGVKASDSCXAAYLLLLCLEGVVVSTPALTGLLSAFQATVTAPG

SEQ ID NO: 712 - protein, 56 aa, Homo sapiens
PPRVRAPSVPGPRPSRQRSFHSAWDDGEEKNPDLPHPGPKESAGDVHQAEVRADEE

SEQ ID NO: 713 - protein, 56 aa, Homo sapiens
RRGSVRPASQGPGRADKDHSTQPGTMGRKKIQISRILDQRNRQVTFTKRKFGLMKK

SEQ ID NO: 714 - protein, 56 aa, Homo sapiens
LLHQPELPLGERHLPIPLVQDAGDLDFFPPHRPRLSGMIFVCSAWALGRWAHGPAA

SEQ ID NO: 715 - protein, 120 aa, Homo sapiens
  variant (1)...(120): Xaa = Any amino acid
PAICTDKYRCLKHNLNSLIKRSNSTAATNEXPEVTVFSKSPVTLGQPNILICLVDNIFPPVXNITWLSNGHSVTEXVSETSFLSKSDHSFFKISTSPSSLLXEESYDCKXXHWGLGQASS

SEQ ID NO: 716 - protein, 52 aa, Homo sapiens
  variant (1)...(52): Xaa = Any amino acid
AMGTQSQXVFLRPASSPRVIIPSSRSVPHPPPFWXRRVMTARXXTGDWDKPL

SEQ ID NO: 717 - protein, 60 aa, Homo sapiens
  variant (1)...(60): Xaa = Any amino acid
VPIAQPCDVXHRRKDVVHKTDEDVGLTQCHGRLGKHCDLRXLIGSSGRVGAFNQTVQVMF

SEQ ID NO: 718 - protein, 52 aa, Homo sapiens [sequence omitted]

SEQ ID NO: 719 - protein, 53 aa, Homo sapiens [sequence omitted]

SEQ ID NO: 720 - protein, 59 aa, Homo sapiens [sequence omitted]

SEQ ID NO: 721 - protein, 68 aa, Homo sapiens
  variant (1)...(68): Xaa = Any amino acid
QVLGWLTWAPWAWGRCVTRFGLCREKIGSYGDLGWRWMRQHPAGACPWTRATLGLLSRLELEGEDLXR

SEQ ID NO: 722 - protein, 51 aa, Homo sapiens
  variant (1)...(51): Xaa = Any amino acid
XGXGPRPPAQGGTRALEWPESRDRPQQGADASTSIPDPRNSQSSLCRAQIL

SEQ ID NO: 723 - protein, 52 aa, Homo sapiens
SGPSPGTGPSRVLTHPPPSQIPVTPNLLSAEPKSCDTPPPCPRCPGKPAQDL

SEQ ID NO: 724 - protein, 57 aa, Homo sapiens
RKQHWWCLSHGLDRSPPRPPLSLHRLCDLLCVDSDTLSVSGPRKDGQDYLWGKQYWE

SEQ ID NO: 725 - protein, 97 aa, Homo sapiens
GSSTGGASAMAWTVLLLGLLSHCTDSVTSYVLTQTPSVSVAPGKTAKITCGGNNIGSNNVHWYYQKPGQAPVLIISFDNDRPSGISERFSGFNSGDM

SEQ ID NO: 726 - protein, 65 aa, Homo sapiens
  variant (1)...(65): Xaa = Any amino acid
QAXDEADYYCQXWDRNNDHVVFGGGTKLAXLXXPNAAPSXTLFPPSSEELQANXATXVCLIXDFY

SEQ ID NO: 727 - protein, 60 aa, Homo sapiens
  variant (1)...(60): Xaa = Any amino acid
KXAMRPTITVKXGIVIMTMSSSAEGPNWXSXVXPTLPPQXLCSRPPLRSFKPTXPHXCVS

SEQ ID NO: 728 - protein, 59 aa, Homo sapiens
  variant (1)...(59): Xaa = Any amino acid
DTXVWXCWLEAPQRRAGTEXLRGQRWXDXGXPVWSLRRRRHGHYYDPXLDSNSRPHRXL

SEQ ID NO: 729 - protein, 56 aa, Homo sapiens
GVFLHTFTSSALSIYTHTQHPQYLTSNRLYHLYLTMTPGRRSKFFFTISNSSLSLF

SEQ ID NO: 730 - protein, 50 aa, Homo sapiens
ISQITKSSLRQQFKTVPGIKIYSHLRSLPSHLHLLSLKYIHTHPTPSILD

SEQ ID NO: 731 - protein, 70 aa, Homo sapiens
RSAYAARWVAKSLVKGGLCRRVLVQVSYAIGVSHPLSISIFHYGTSQKSERELLEIVKKNFDLRPGVIVR

SEQ ID NO: 732 - protein, 53 aa, Homo sapiens
GLLMLLVGWQNPLLKEVCAGGFLFRSLMLLEFLIHYLSPFSIMVPLRRVRESY

SEQ ID NO: 733 - protein, 76 aa, Homo sapiens
  variant (1)...(76): Xaa = Any amino acid
KQHWWCLSHGLDRSPPRPPLSLHRLCDLLCVDSDTLSVSGPXKDGQDYLWGKQYWELQCTLVLPKARPGPCPNHLF

SEQ ID NO: 734 - protein, 96 aa, Homo sapiens
  variant (1)...(96): Xaa = Any amino acid
SSTGGASAMAWTVLLLGLLSHCTDSVTSYVLTQTPSVSVAPXKTAKITCGGNNIGSYSVHWYYQKPGQAPVLIISFDDXRPSXISERFSGLQFWGT

SEQ ID NO: 735 - protein, 85 aa, Homo sapiens
  variant (1)...(85): Xaa = Any amino acid
VASVGLPLLRRQAQIAAGRVLVVALFGGCXGLHSRLDGAAICLPGHCHGSRVEVTYETHQCGLVGLKLLTGGREQSDRGGSLGLT

SEQ ID NO: 736 - protein, 87 aa, Homo sapiens
  variant (1)...(87): Xaa = Any amino acid
VLGQPKAAPSVTLFPPSCEELQANKATLVCLISDFYPGAVTVAWKADSSPVKAGVETXTPSKQSNNKYAASSYLSLTPEQWKSHRSY

SEQ ID NO: 737 - protein, 125 aa, Homo sapiens
RSTLTINRVEAGDEADYYCQVWDRNNDHVVFGGGTKLAVLSQPKAAPSVTLFPPSSEELQANKATLVCLISDFYPGAVTVAWKADSSPVKAGVETTTPSKQSNNKYAASSYLSLTPEHWKSHKSY

SEQ ID NO: 738 - protein, 85 aa, Homo sapiens
VAFVGLPMLRGQAQIAAGRVLVVALFGGCGGLHSRLDGAAICLPGHCHGSRVEVTYETHQCGLVGLKLLRGGREQSDRGGSLGLT

SEQ ID NO: 739 - protein, 67 aa, Homo sapiens [sequence omitted]

SEQ ID NO: 740 - protein, 97 aa, Homo sapiens; identical to SEQ ID NO: 725

SEQ ID NO: 741 - protein, 57 aa, Homo sapiens
SWPSFLGPLTLRVSESTHRRSQSLCSERGGRGGERSRPWLRHHQCCFLRPRLSRFLP

SEQ ID NO: 742 - protein, 143 aa, Homo sapiens
  variant (1)...(143): Xaa = Any amino acid
TLTINRVEAGDEADYYCQVWDRNNDHVVFGGGTKLAVLGQPKAAPSVTLFPPSSEELQANKATLVCLISDFYPGAVTVAWKADSSPVKAGVETTTPSKQSNNKYAASSYLXLTPEQWKSHRSYSLGLAYLGHPWGNGGXCVTK

SEQ ID NO: 743 - protein, 53 aa, Homo sapiens
  variant (1)...(53): Xaa = Any amino acid
HXFPHCPTGAQGKPSPGCSFCGTSTAQASXSDSCWPRTCCCFVWRVWWSPLPP

SEQ ID NO: 744 - protein, 105 aa, Homo sapiens
  variant (1)...(105): Xaa = Any amino acid
FCDTXSPIAPRVPKVSQAQAVASVGLPLLRRQXQIAAGRVLVVALFGGCGGLHSRLDGAAICLPGHCHGSRVEVTYETHQCGLVGLKLLRGGREQSDRGGSLGLT

SEQ ID NO: 745 - protein, 59 aa, Homo sapiens
  variant (1)...(59): Xaa = Any amino acid
XGXGPEHTFGWNSLRDQKAPVSHRAEEPGQKSNPRVRCAGETQSSLYLSGWQEGTGSGR

SEQ ID NO: 746 - protein, 78 aa, Homo sapiens
  variant (1)...(78): Xaa = Any amino acid
GTKRPQYPTELRSQARKVTPEFAVQGRHRALFICQDGRRGQGQGAEGXMSVLGAKAPRDLRTGGQVSKVKQLPVQIRA

SEQ ID NO: 747 - protein, 50 aa, Homo sapiens
  variant (1)...(50): Xaa = Any amino acid
PQSSLCRGDTELSLSVRMAGGDRVRALRVXCRCWGPRPREISGQVVRCLR

SEQ ID NO: 748 - protein, 56 aa, Homo sapiens
  variant (1)...(56): Xaa = Any amino acid
NSSPCRSGHSGKHPDPSAWHRPSDTEPLNXGTPTPHHILRAGAPQVDTRTLTPLPL

SEQ ID NO: 749 - protein, 118 aa, Homo sapiens
  variant (1)...(118): Xaa = Any amino acid
GVGVXLFRGSVSEGLCQAEGSGCFPLCPDLHGELFYLRHLTTCPEISRGLGPQHRHXTLSALTLSPPAILTDKESSVSPLHSELWGYFSGLAPQLCGILGPFGPSGCSSQMCVLDXGR

SEQ ID NO: 750 - protein, 60 aa, Homo sapiens
  variant (1)...(60): Xaa = Any amino acid
GARGSESWCPPGEPLPSVYDEVLGCXCSGALCLKVYARQRGQGVFHYALICTGSCFTLDT

SEQ ID NO: 751 - protein, 67 aa, Homo sapiens
  variant (1)...(67): Xaa = Any amino acid
AAPSVTLFPPSSEELQANKATLVCLISDFYPGAVTVAWXADSTPXKAGVETTTPXKQSNNKYPASSY

SEQ ID NO: 752 - protein, 67 aa, Homo sapiens
  variant (1)...(67): Xaa = Any amino acid
IAAGRVLVVALFXGCGGLHSRLXGGAICXPGHCHGSRVEVTYETHQCGLVGLKLLRGGREQSDRGGS

SEQ ID NO: 753 - protein, 97 aa, Homo sapiens; identical to SEQ ID NO: 725

SEQ ID NO: 754 - protein, 56 aa, Homo sapiens
KQHWWCLSHGLDRSPPRPPLSLHRLCDLLCVDSDTLSVSGPRKDGQDYLWGKQYWE

SEQ ID NO: 755 - protein, 139 aa, Homo sapiens
  variant (1)...(139): Xaa = Any amino acid
XPXXRSKVTRKRPCLPSMTLMEEMLREAFRCMTQGKTAKKSCSCSPHFVICFIFXSFESKMTTPRNSVNGTFPAEPMKXPIAMQSGPKPLFRRMSSLVGPTQSFFMRESKTLGAVQIMNGLFHIALGXLLMIPXGXYAP

SEQ ID NO: 756 - protein, 51 aa, Homo sapiens
  variant (1)...(51): Xaa = Any amino acid
EQNDNTQKFSKWDFPGRANERXYCYAIWSKTTLQEDVFTGGPHAKLLHEGI

SEQ ID NO: 757 - protein, 92 aa, Homo sapiens
  variant (1)...(92): Xaa = Any amino acid
GAXIPXGIIRXPPRAMWKSPFIIWTAPKVLDSLMKKLCVGPTSEDILLKSGFGPDCIAIXPFIGSAGKVPFTEFLGVVILLSKLXKIKQITK

SEQ ID NO: 758 - protein, 53 aa, Homo sapiens
  variant (1)...(53): Xaa = Any amino acid
PAGWMRGRGSKSWCPPGEPLTSVYDEVLGCPCSGALCLKVYARQRGXGVFTMP

SEQ ID NO: 759 - protein, 108 aa, Homo sapiens
  variant (1)...(108): Xaa = Any amino acid
VAFVGLPLLRRQAQVAAGRVLVVALFGGCGGLHSRLDGAAICLPGHCHGSRVEVTYETHQCGLVGLKLLXGGREQSDRGGSLGLTCGVDEGQGVKVLVSTWGAPDLSI

SEQ ID NO: 760 - protein, 78 aa, Homo sapiens
  variant (1)...(78): Xaa = Any amino acid
KHXXPSAWHRPSDTEPLNKGTPTPHHILRSGAPQVDTRTLTPCPSSTPQVSPRLPPRSLCSRPPXRSFKPTRPHWCVS

SEQ ID NO: 761 - protein, 124 aa, Homo sapiens
  variant (1)...(124): Xaa = Any amino acid
TFRHRAPEQGHPNTSSYTEVRGSPGGHQDFDPLPLIHPAGQPKAAPSVTLFPPSXEELQANKATLVCLISDFYPGAVTVAWKADSSPVKAGVETTTPSKQSNNKYAASSYLSLTPEQWKSHKSY

SEQ ID NO: 762 - protein, 62 aa, Homo sapiens
NGQVVGEKKVPGSLEKNVKRCSRPMRRIRQEIHRCARLLRSTCQQQLPSLSLGEQDSGVWDF

SEQ ID NO: 763 - protein, 59 aa, Homo sapiens
KSQTPESCSPKLKEGSCCWQVLLRSLAHLCISCLILLIGLEHLFTFFSREPGTFFSPTT

SEQ ID NO: 764 - protein, 87 aa, Homo sapiens
  variant (1)...(87): Xaa = Any amino acid
VSPKAAPSVTLFPPSSEELQANKATLVCLISDFYPGAVTVAWKADSSPVKAGVETTTPSKQXNNKYXASSYLSLTPEQWKXHISYXP

SEQ ID NO: 765 - protein, 55 aa, Homo sapiens
  variant (1)...(55): Xaa = Any amino acid
STLTINRXEAGDEADYYCQVWDRNNDHVVFGGGTKLAVLGQPQGCPLGHSVPALL

SEQ ID NO: 766 - protein, 121 aa, Homo sapiens
  variant (1)...(121): Xaa = Any amino acid
RXVAYVXLPLLRRQAQIAAGXVLVVXLFGGCGGLHSRLDGAAICLPGHCHGSRVEVTYETHQCGLVGLKLLRGGREQSDRGGSLGADLGRPVWSLRRRRHGHYYDPTLDSNSRPHRRLXPC

SEQ ID NO: 767 - protein, 60 aa, Homo sapiens
NSVMMVFKDSRKGVMSQNLPECPSIVRRKRTSLVDVHVLIPWRLGHQTMRFGNICYQDEP

SEQ ID NO: 768 - protein, 73 aa, Homo sapiens
  variant (1)...(73): Xaa = Any amino acid
ARSXWLSDPPRPLPHTRAPEHTFGWNSLRDQKAPVSHRAEEPGQKSNPRVRCAGETQSSLYLSGWQEGTGSGH

SEQ ID NO: 769 - protein, 74 aa, Homo sapiens
  variant (1)...(74): Xaa = Any amino acid
GTKRPQYPTELRSQARKVTPEFAVQERHRALFICQDGRRGQGQGTEGXMSVWGAKAPRDLRTXXHVSXVKXLPR

SEQ ID NO: 770 - protein, 50 aa, Homo sapiens
  variant (1)...(50): Xaa = Any amino acid
PQSSLCRRDTELSLSVRMAGGDRVRALRVXCRCGGPRPREISGXVXMCLX

SEQ ID NO: 771 - protein, 62 aa, Homo sapiens
  variant (1)...(62): Xaa = Any amino acid
QIKRALCLSCTANSGVTFLAWLLSSVGYWGLLVPQAVPAKCVFWSPCMGQGPGGIGEPXRPR

SEQ ID NO: 772 - protein, 59 aa, Homo sapiens
  variant (1)...(59): Xaa = Any amino acid
RELCVSPAQRTLGLLFWPGSSALWDTGAFWSLRLFQPNVCSGARVWGKGLGGSESHXDR

SEQ ID NO: 773 - protein, 102 aa, Homo sapiens
  variant (1)...(102): Xaa = Any amino acid
TGKXFYXRHMXXCPEISRGLGPPHRHXTLSALTLSPPAILTDKESSVSLLHSELWGYFSGLAPQLCGILGPFGPSGCSSQMCVLEPVYGARAWGDRRAXSTA

SEQ ID NO: 774 - protein, 102 aa, Homo sapiens
  variant (1)...(102): Xaa = Any amino acid
MDMRVPAQLLGLLLLWLPGAKCDIQMTQSPSTLSASVGDTVTISCRASQNIDRWLAWHQQKPGKAPNVLIYATSSLEEGVSLRFTGSGSGTQFNLTXTRSAA

SEQ ID NO: 775 - protein, 54 aa, Homo sapiens
  variant (1)...(54): Xaa = Any amino acid
CPNLCDFQFRRRGLIKIYWQWIWDTIQFNHXQVCSLTIXQLIIXNIILHXXXVL

SEQ ID NO: 776 - protein, 68 aa, Homo sapiens
DIRGFAWFLLMPGQPPIYILRGPTTYCNCISDRCRQGGRRLGHLDVTFGTWEPEQQEPQELSGDPHVH

SEQ ID NO: 777 - protein, 50 aa, Homo sapiens
  variant (1)...(50): Xaa = Any amino acid
QNXXXMQNNVXNNKLXNRQAADLXMVKLNCVPDPLPVNLNETPSSKLEVA

SEQ ID NO: 778 - protein, 138 aa, Homo sapiens
  variant (1)...(138): Xaa = Any amino acid
QYTHEFDGDEQFYVDLGRKETAWCLPVLRQFRFDPQFALTNIAVLKHNLNSLIKRSNSTAATNEVPEVTVFSKSPVTLGQPNILICLVDNIFPPVXNITWLSNGHSVTXXVSETSFLSKSDHXFFXIXYPTLLPSSEE

SEQ ID NO: 779 - protein, 60 aa, Homo sapiens
  variant (1)...(60): Xaa = Any amino acid
VPIAQPCDVXHRRKDVVHKTDEDVGLTQCHGRLGKHCDLRNLIGSSGRVGAFNQTVQVMF

SEQ ID NO: 780 - protein, 66 aa, Homo sapiens
PSVTGDLENTVTSGTSLVAAVELERLIRLFKLCFRTAMFVSANCGSNLNCLRTGKHQAVSFLPRST

SEQ ID NO: 781 - protein, 84 aa, Homo sapiens
  variant (1)...(84): Xaa = Any amino acid
SVASVGLPLLRRQAQIAAGRVLVVALFGGCGXLHSRLDGXAIXLPGHCHGSRVEVTYETHQCGLVGLXLLIXGREQSDRXGSLG

SEQ ID NO: 782 - protein, 84 aa, Homo sapiens
  variant (1)...(84): Xaa = Any amino acid
PKAAXSVTLFPPXYEEXQANKATLVCLISDFYPGAVTVAWKXDSXPVKAGVEXTTPSKQSNNKYAASSYLSLTPEQWKSHRSYR

SEQ ID NO: 783 - protein, 51 aa, Homo sapiens
  variant (1)...(51): Xaa = Any amino acid
DTFKWAQCQPTGLLTGTTSQMPFSAHTLQAEARGXHPSGDGXCXCVXVCSA

SEQ ID NO: 784 - protein, 59 aa, Homo sapiens
  variant (1)...(59): Xaa = Any amino acid
PXXVQMSETPSNGPSASQLGSSLAPRPRCPSLPTPCRLRPEEXTPPEMGXVXVCXYVLX

SEQ ID NO: 785 - protein, 59 aa, Homo sapiens
  variant (1)...(59): Xaa = Any amino acid
RRTYXHTXTXPISGGVXSSGLSLQGVGREGHLGRGASEEPSWLALGPFEGVSDIWTXXG

SEQ ID NO: 786 - protein, 58 aa, Homo sapiens
  variant (1)...(58): Xaa = Any amino acid
AEHXHTHXHXPSPEGXPPLASACRVWAEKGIWDVVPVRSPVGWHWAHLKVSQTFGPXX

SEQ ID NO: 787 - protein, 52 aa, Homo sapiens
  variant (1)...(52): Xaa = Any amino acid
PKEVRQLAEDFLKDYIHINIGALELXANHNILXXVDVCHDXXKDEKLIRLME

SEQ ID NO: 788 - protein, 55 aa, Homo sapiens
  variant (1)...(55): Xaa = Any amino acid
QHWWXXSHGXGRSPLRPPLSLHXLCXLLCVDSDTLSVSGPRKGGQDYLWGKQYWE

SEQ ID NO: 789 - protein, 95 aa, Homo sapiens
  variant (1)...(95): Xaa = Any amino acid
STGXXSAMXWAVLLFGLLSHCTXSVXSYVLTQTPSVSVAPGKAAKITCGGNNIGSNNVXWYYQKPGQAPVLIISFDNDRPSGISERFSGFNSGDM

SEQ ID NO: 790 - protein, 90 aa, Homo sapiens
VLTVINYRPHNMRPEDRMFHIRAVILRALSLAFLLSLRGAGAIKADHVSTYAAFVQTHRPTGEFMFEFDEDEMFYVDLDKKETVWHLEEF

SEQ ID NO: 791 - protein, 55 aa, Homo sapiens
VSEELGPSRRTMCQLMPRLYRRIDQQGSLCLNLMKMRCSMWIWTRRRPSGIWRSL

SEQ ID NO: 792 - protein, 56 aa, Homo sapiens
LACCSGPWSCPVLQHGVSEAPWRLLHGSSDSDTDGAELPTGFGWGHQTTFLGVLYV

SEQ ID NO: 793 - protein, 177 aa, Homo sapiens
  variant (1)...(177): Xaa = Any amino acid
LPAALAPGPVLFSSMVCLRLPGGSCMAVLTVTLMVLSSPLALAGDTRPRFLEYSTSECHFFNGTERVRFLDRYFYNQEEYVRFDSDVGEFRAVTELGRPDEEYWNSQKDFLEDRRAAVDTYCRHNYGVGESFTVQRRVHPKVTVYPSKTHPCSTTTSWSVLXVVSIQAALNXVVPEW

SEQ ID NO: 794 - protein, 56 aa, Homo sapiens
APHWLWLGTPDHVSWSTLRLSVISSMGRSGCGSWTDTSITKRSTCASTATWGSSGR

SEQ ID NO: 795 - protein, 70 aa, Homo sapiens [sequence omitted]

SEQ ID NO: 796 - protein, 53 aa, Homo sapiens
STPRNVVWCPQPKPVGSSAPSVSLSELPCRSLQGASDTPCWRTGQDQGPEQQA

SEQ ID NO: 797 - protein, 146 aa, Homo sapiens [sequence omitted]

SEQ ID NO: 798 - protein, 58 aa, Homo sapiens
HSDVEYSKKRGLVSPAKASGELSTISVTVRTAMQEPPGSLRHTMLENRTGPGARAAGK

SEQ ID NO: 799 - protein, 110 aa, Homo sapiens
ALNEDLRSWTAADMAAQITKRKWEAAHEAEQLRAYLDGTCVEWLRRYLENGKETLQRTDPPKTHMTHHPISDHEATLRCWALGFYPAEITLTWQRDGEDQTQDTELVETR

SEQ ID NO: 800 - protein, 110 aa, Homo sapiens
PGLHELRVLGLVLPIPLPGQCDLRRVEAQGPAPQGGLMVRDGVVGHMCLGGVRALQRLLPVLQVSAEPLHARAIQVGSQLLRLMGRLPLALGDLSRHVRRGPRAQVLVQG

SEQ ID NO: 801 - protein, 70 aa, Homo sapiens
SPQGRSPGPSTSGWPHGQRWGGGSYVSWGGPCAAASPSRSPGICGATPRTCHPGRLSTAPPHGPPPTCAW

SEQ ID NO: 802 - protein, 53 aa, Homo sapiens
  variant (1)...(53): Xaa = Any amino acid
PRGQXWADLGRPVWSLRRRRHGYYYXPXLDSNSXPSSPASDPFDGXGXDLWPX

SEQ ID NO: 803 - protein, 85 aa, Homo sapiens
  variant (1)...(85): Xaa = Any amino acid
XAXVGLPLLRRQAXIAAGRVLVVALFGGCGGLHSRLDGAAICLPGHCHGSRVEVTYETHQCGLVGLKLLRGGREQSDRGGXLGLT

SEQ ID NO: 804 - protein, 129 aa, Homo sapiens
  variant (1)...(129): Xaa = Any amino acid
RAKGPXLXHQKGQKPAMKXDYYCQVXDXNNNHVVFGGGTILAVLSQPKXAPSVTLFPPSSEELQANKATLVCLISDFYPGAVTVAWKADSSPVKAGVETTTPSKQSNNKYAASSYXSLTPEQWKSHXSX

SEQ ID NO: 805 - protein, 140 aa, Homo sapiens
  variant (1)...(140): Xaa = Any amino acid
TLTINRVEAGDEADYYCQVWDLNNDHVVFGGGTKLAVLGQPKAAPSVTLFPPSSEELQANKATLVCLISDFYPGAVTVAWKADSSPVKXGVETTTPXKQSNNKYAASSYXSLTPEQWKSHRXYRPARAXXGEFQHTGGRY

SEQ ID NO: 806 - protein, 71 aa, Homo sapiens
  variant (1)...(71): Xaa = Any amino acid
ETSYXHDXAKLGTELXSTSNAPQCAGIRXXPPGQVCXFCGTSTAQASGXDSCWPRTCCCFVXRVWWSPLXP

SEQ ID NO: 807 - protein, 120 aa, Homo sapiens
  variant (1)...(120): Xaa = Any amino acid
KPAMXMIXPSLVPSSXPLVTPPSVLEFAXXRPGRSVXSVGLPLLRRQAXIAAGRVLVVALFXGCGGLHSXLDGAAICLPGHCHGSRVEVTYETHQCGLVGLKLLRGGREQSDRGGSLGLT

SEQ ID NO: 808 - protein, 80 aa, Homo sapiens
  variant (1)...(80): Xaa = Any amino acid
TXXXNRGEAGDEADYYCQVWDLNNDHVVFGGGTKLXVLGQPKAAPSVTLFPPSSEELQANKATLVCLISDXYPXAVTVAW

SEQ ID NO: 809 - protein, 63 aa, Homo sapiens
  variant (1)...(63): Xaa = Any amino acid
KKIKIYXVYXLTSYTQRIXDFSLKIIIKPPISPVEKEILRFXCFFFQHNSVTYGWEKICREII

SEQ ID NO: 810 - protein, 123 aa, Homo sapiens
  variant (1)...(123): Xaa = Any amino acid
TLTINRVEAGDEADYYCQVWDRNNDHVVFGGGTKLAVLGQPKAAPSVTLFPPSSEELQANKATLVCLISDXYPGAVTVAWKADSSPVKAGVETTTPSKQSNNKYAASSYLSLTPEQWKSHRSY

SEQ ID NO: 811 - protein, 50 aa, Homo sapiens
  variant (1)...(50): Xaa = Any amino acid
LLAAYLLLLCLEGVVVSTPALTGLLSAFQATVTAPGXKSLMRHTSVALLA

SEQ ID NO: 812 - protein, 85 aa, Homo sapiens
  variant (1)...(85): Xaa = Any amino acid
VASVGLPLLRRQAQIAAGRVLVVALFGGCGGLHSRLDGAAICLPGHCHGSRVXVTYETHQCGLVGLKLLRGGREQSDRGGSLGLT

SEQ ID NO: 813 - protein, 71 aa, Homo sapiens
DIRGFAWFLLMPGQPPIYILRGPTTYCNCISDRCRQGGRRLGHLDVTFGTWEPEQQEPQELSGDPHVHAVS

SEQ ID NO: 814 - protein, 124 aa, Homo sapiens
SGHSMDMRVPAQLLGLLLLWLPGAKCDIQMTQSPSTLSASVGDTVTISCRASQNIDRWLAWHQQKPGKAPNVLIYATSSLEEGVSLRFTGSGSGTQFNLTITSLQPDDSATYYCQHYSASLRSF

SEQ ID NO: 815 - protein, 114 aa, Homo sapiens
  variant (1)...(114): Xaa = Any amino acid
TLTINRVEAGDEADYYCQVWDRNNDHVVFGGGTKLAVLGQPKAAPSVTLFPPSSEELQANKATLVCLISDFYPGAVTVAWKXDSSPVKAGVETTTPSKQSNNKYRGQQLSEPDA

SEQ ID NO: 816 - protein, 70 aa, Homo sapiens
  variant (1)...(70): Xaa = Any amino acid
LLPAVLVVALFGGCGGLHSRLDGAAIXLPGHCHGSRVEVTYETHQCGLVGLKLLRGGREQSDRGGSLGLT

SEQ ID NO: 817 - protein, 61 aa, Homo sapiens
TCISRFLGQLFIISLKSHDINSGPHTWGLKKSGTYNRNHIMSLISKPVSCLWTVCVRHAYL

SEQ ID NO: 818 - protein, 65 aa, Homo sapiens
  variant (1)...(65): Xaa = Any amino acid
TLTINRVEAGDGADYYCQVWDRNNDHVVFGGGTKLAVLSQPKAAPSXTLFPPXSXELXANKXTLV

SEQ ID NO: 819 - protein, 61 aa, Homo sapiens
  variant (1)...(61): Xaa = Any amino acid
TPVXPCWLXAXQXRAGTEXPRGQPWADLGRPVWSLRRRRHGHYYDPTLDNNSRPHRRLRPC

SEQ ID NO: 820 - protein, 141 aa, Homo sapiens
  variant (1)...(141): Xaa = Any amino acid
EPXNPSEKNSPSTQYCYSIQSLFLGILSVMLIFAFFQELVIAGIVENEWKXXCSXPKSNIVLLSXEEKKEQTIEIKEEVVGLTETSSQPKNEEDIEIIPIQEEEEEETETNFXEPPQDQESSPIENDSSPXVISSXFXXLF

SEQ ID NO: 821 - protein, 101 aa, Homo sapiens
  variant (1)...(101): Xaa = Any amino acid
SWGGSXKFVSVSSSSSSWIGIISMSSSFFGWEDVSVSPTTSSFISIVCSFFSSXDRRTMLDLGXEHXLFHSFSTMPAITSSWKKAKISITDKMPKNRDCML

SEQ ID NO: 822 - protein, 66 aa, Homo sapiens
DHLKSCYQDSHEDPTKMKRFLFLLLTISLLVMVQIQTGLSGQNDTSQTSSPSASSSMSGGIFLFFV

SEQ ID NO: 823 - protein, 75 aa, Homo sapiens
TKRSLQTALRSPKKLLPRQPRRSYQNEALPLPPTHHQPPGYGTDTNWTLRTKRHQPNQQPLSIQQHERRHFPFLR

SEQ ID NO: 824 - protein, 59 aa, Homo sapiens
TKKRKMPPLMLLDAEGLLVWLVSFCPESPVCICTITRRLMVSRRKRKRFILVGSSWLSW

SEQ ID NO: 825 - protein, 59 aa, Homo sapiens
  variant (1)...(59): Xaa = Any amino acid
PCLRSXXTXKRPCLPXMTLMEEMLREAFXCMTQGKTAKNLVLALLILLFVLFLGVLRAK

SEQ ID NO: 826 - protein, 63 aa, Homo sapiens
  variant (1)...(63): Xaa = Any amino acid
SGCCHFALKTPKNKTNNKMRRARTRFLAVLPCVMHXNASLSISSMSVIXGRHGLXRVXLDLRQ

SEQ ID NO: 827 - protein, 85 aa, Homo sapiens
  variant (1)...(85): Xaa = Any amino acid
VASVGLPLLRRQAQIAAGRVLVVALFGGCGGLHSRLDGAAICLXGHCHXXRVEVTYETHQCXLVGLKLXXGGREXSDRGGSLGLT

SEQ ID NO: 828 - protein, 85 aa, Homo sapiens
  variant (1)...(85): Xaa = Any amino acid
GQPKAAPSVTXFPPSXXELQANKXTLVCLISDFYPXXVTVAXKADSSPVKAGVETTTPSKQSNNKYAASSYLSLTPEQWKSHRSY

SEQ ID NO: 829 - protein, 61 aa, Homo sapiens
ALDRKSLDCPEEVVSRNMDVKGAPAEVLGGNEGHDIGREDGGGDCSDASTDLGDQDAAAIT

SEQ ID NO: 830 - protein, 103 aa, Homo sapiens
VMAAASWSPRSVDASLQSPPPSSRPMSCPSFPPRTSAGAPLTSIFLLTTSSGQSRLFLSSAHCPILSIPQAISPFLGICYGSTPLPGTKTSHMIMTAPHCSGL

SEQ ID NO: 831 - protein, 83 aa, Homo sapiens
  variant (1)...(83): Xaa = Any amino acid
SVXLPLLTRXAQIAAGRVLVVALXGGCGGLHPRLDGAAICLPGHCHGSRVEVTYETHQCGLVGLKLLXGGREQSDRGGSLGLT

SEQ ID NO: 832 - protein, 119 aa, Homo sapiens
  variant (1)...(119): Xaa = Any amino acid
TINRVEAGDEADYYCQVWDRNNDHVXFGGGTKLAVLGQPKAAPSVTLFPPSXEELQANKATLVCLISDFYPGAVTVAWKADSSPVKAGVETTTPSXQSNNKYAASSYLSXTREQWKXHR

SEQ ID NO: 833 - protein, 85 aa, Homo sapiens
  variant (1)...(85): Xaa = Any amino acid
VASVGLPLLRRQAQIAAGRVLVVALFGGCGGLHSRLDGAAICLPGHCHGSRVEVTYETHQCGLVGLKLLXGGREQSDRGGXLGLT

SEQ ID NO: 834 - protein, 121 aa, Homo sapiens
  variant (1)...(121): Xaa = Any amino acid
PSTGSXPXMRXTXNCXVWDRNNDHVVFGGGTKLAVLGQPKXAPSVTLFPPSXEELQANKATLVCLISDFYPGAVTVAWKADSSPVKAGVETTTPSKQSNNKYAASSYLSLTPEQWKSHRSY

SEQ ID NO: 835 - protein, 127 aa, Homo sapiens
  variant (1)...(127): Xaa = Any amino acid
VASVGLPLLRRQAQIAAGRVLVVALFGGCGGLHSRLDGAAICLPGHCHGSRVEVTYETHQCGLVGLKLLRGGREQSDRGGSLGLTXDGQFGPSAEDDMVIITIPHLTVIVGLIAGFDPVDGQGGPRP

SEQ ID NO: 836 - protein, 127 aa, Homo sapiens
  variant (1)...(127): Xaa = Any amino acid
RPRSTLTINRVEAGDEADYYCQVWDRNNDHVVFGGGTKLAVXGQPKAAPSVTLFPPSSEELQANKATLVCLISDFYPGAVTVAWKADSSPVKAGVETTTPSKQSNNKYAASSYLSLTPEQWKSHRSY

SEQ ID NO: 837 - protein, 85 aa, Homo sapiens; identical to SEQ ID NO: 682

SEQ ID NO: 838 - protein, 123 aa, Homo sapiens; identical to SEQ ID NO: 683

SEQ ID NO: 839 - protein, 85 aa, Homo sapiens
  variant (1)...(85): Xaa = Any amino acid
VASVGLPLLGRQAQVAAGRVLVVALFGGFGGLHSRLDGAAICLPGHCHSSRVEVTYETHQXGLXGLXLLXGGREXXDXGGXLGLT

SEQ ID NO: 840 - protein, 54 aa, Homo sapiens
LLPGSCDSGLEGRWQPRQGGSGDHQTLQTEQQQVRGQQLPEPDARAVEVPQKLQ

SEQ ID NO: 841 - protein, 110 aa, Homo sapiens
  variant (1)...(110): Xaa = Any amino acid
DYYCQVXDRNNDHVVFGGGTKLAVLGQPKXAPXVXXFPPSXEEXQAXKAXLVCLISDFYPGAVTVAWKADGSPVKAGVETTKPSKQSNNKYAASSYLSLTPEQWKSHRSY

SEQ ID NO: 842 - protein, 85 aa, Homo sapiens; identical to SEQ ID NO: 682

SEQ ID NO: 843 - protein, 125 aa, Homo sapiens
  variant (1)...(125): Xaa = Any amino acid
RSTLTINRVEADDEXDYYCQVWDRNNDHVVFGGGTKLAVLGQPKAAPSVTLFPPSSEELQANKATLVCLISDFYPGAVTVAWKADSSPVKAGVETTTPSKQSNNKYAASSYLSLTPEQWKSHRSY

SEQ ID NO: 844 - protein, 94 aa, Homo sapiens
  variant (1)...(94): Xaa = Any amino acid
XLACCSGPWSCPVLQHGVSEAPWRLLHGSSDSDTDGAELPTCFGLGTPDHVSWSTLRLSVISSMGRSGCGSWTDTSITKRSTCASTATWGSSGR

SEQ ID NO: 845 - protein, 57 aa, Homo sapiens
VLPAALAPGPVLFSSMVCLRLPGGSCMAVLTVTLMVLSSPLALGWGHQTTFLGVLYV

SEQ ID NO: 846 - protein, 93 aa, Homo sapiens
  variant (1)...(93): Xaa = Any amino acid
APHLLWAGDTRPRFLEYSTSECHFFNGTERVRFLDRYFYNQEEYVRFDSDVGEFRAVXELGRADEEYWNSXXGLPGXQAXRGGHLLXTQLRGW

SEQ ID NO: 847 - protein, 121 aa, Homo sapiens
  variant (1)...(121): Xaa = Any amino acid
VSTAXRLXSRKSXXAVPVLLISPPQLXHRPELPHVAVEAHVLLLVIEVSVQEPHPLRPIEEMTLRRRVLQETWSGVPSPKQVGSSAPSVSLSELPCRSLQGASDTPCWRTGQDQGPEQQAR

SEQ ID NO: 848 - protein, 54 aa, Homo sapiens
  variant (1)...(54): Xaa = Any amino acid
QPRSCXCSRCPPXPACXPGSPXWLFQYSSSARPSXVTARNSPTSLSKRTYSSWL

SEQ ID NO: 849 - protein, 59 aa, Homo sapiens
HSDVEYSKKRGLVSPAQSKWGAQHHQCHCQNCHAGASREPQTHHAGEQDRTRGQSSRQD

SEQ ID NO: 850 - protein, 67 aa, Homo sapiens
  variant (1)...(67): Xaa = Any amino acid
NPVVVXAVGVHRXPPXFQEVLXGCSSTPHQPAPAXSPPGTPPRRCRSARTPLGYRSICPGTAPAPSH

SEQ ID NO: 851 - protein, 55 aa, Homo sapiens
  variant (1)...(55): Xaa = Any amino acid
STPRNVVWCPQPKASGELSTISVTVRTAMQEPPGSLRHTMLENRTGPGARAAGKX

SEQ ID NO: 852 - protein, 146 aa, Homo sapiens
  variant (1)...(146): Xaa = Any amino acid
KMESLNFIRAHTPYINIYNCEPPNPSEKNSPSTQYXYSIQSLFLGILSVMLIFAFFQELVIXGIVDNEWKRTCSRPKSNIVLLSAEEKKEXTIEIKEEVVGLTETSSQPKNEEXIEIIPXQEEEEERNXRRTFQNXPRSGILTNRK

SEQ ID NO: 853 - protein, 137 aa, Homo sapiens
  variant (1)...(137): Xaa = Any amino acid
CHFLLVRIPDLXRFWKVRLXFLSSSSSXIGIISMXSSFFGWEDVSVSPTTSSFISIXCSFFSSADRRTMLDLGLEHVLFHSLSTMPXITSSWKKAKISITDKMPKNRDCMLXQYWVDGEFFSEGLGGSQLYMLIYGV

SEQ ID NO: 854 - protein, 59 aa, Homo sapiens
  variant (1)...(59): Xaa = Any amino acid
AATASIAGAPTQYPPGRGGPPPPMGRRTPPPGMMGPPPXFXTSYGCPQWGIPXGRXLQW

SEQ ID NO: 855 - protein, 59 aa, Homo sapiens
  variant (1)...(59): Xaa = Any amino acid
PLEXSSXGDPPLGAPIGGXKXGRWAHHAWRGCSSAHRWGRTPTARWVLGWSPGNTGCGS

SEQ ID NO: 856 - protein, 50 aa, Homo sapiens
KLLEGTCYNGRLIWKVTDYKMKKREAVDGHTVSIFSQSFYTNPLWLPALC

SEQ ID NO: 857 - protein, 61 aa, Homo sapiens
RRERRWMGTQCPSSASPSTPTRCGYRLCARAYLNGDGSGRGSHLSLYFVVMRGEFDSLLQW

SEQ ID NO: 858 - protein, 85 aa, Homo sapiens; identical to SEQ ID NO: 682

SEQ ID NO: 859 - protein, 123 aa, Homo sapiens; identical to SEQ ID NO: 683

SEQ ID NO: 860 - protein, 123 aa, Homo sapiens
GHSMDMRVPAQLLGLLLLWLPGAKCDIQMTQSPSTLSASAGNTVTISCRASQNIDRWLAWHQQKPGKAPNVLIYATSSLEEGVSLRFTGSGSGTQFNLTITSLQPDDSATYYCQHYSASLRSF

SEQ ID NO: 861 - protein, 71 aa, Homo sapiens
DIRGFAWFLLMPGQPPIYILRGPTTYCNCISGRCRQGGRRLGHLDVTFGTWEPEQQEPQELSGDPHVHAVS

SEQ ID NO: 862 - protein, 57 aa, Homo sapiens
GSSTGGASAMAWTVLLLGLLSHCTDSVTSYVLTQTPSVSVAPGKDGQDYLWGKQYWE

SEQ ID NO: 863 - protein, 65 aa, Homo sapiens
LRHPQCQWPQEKTAKITCGGNNIGSNNVHWYYQKPGQAPVLIISFDNDRPSGISERFSGFNSGDM

SEQ ID NO: 864 - protein, 72 aa, Homo sapiens
KQHWWCLSHGLDRSPPRPPLSLHRLCDLLCVDSDTLSVSGPRKRRPRLPVGETILGVTMYTGITRSQARPLS

SEQ ID NO: 865 - protein, 72 aa, Homo sapiens
DRGLAWLLVIPVYIVTPNIVSPTGNLGRLFLGPLTLRVSESTHRRSQSLCSERGGRGGERSRPWLRHHQCCF

SEQ ID NO: 866 - protein, 69 aa, Homo sapiens
SSTGGASAMAWTVLLLGLLSHCTGDPPRVSPTCPAQGFWVQRVLNSELRRALPVVGRMLMTLVQGGKVG

SEQ ID NO: 867 - protein, 59 aa, Homo sapiens
AALVVPQPWPGPFSSSASSLTAQVIPPGSHQPAQPKASGSSVSLILSSGGPFLWWAGCS

SEQ ID NO: 868 - protein, 115 aa, Homo sapiens
  variant (1)...(115): Xaa = Any amino acid
VASVGLPLLRRQAQIAAGRVLVVALFGGCGGLHSRLDGAAICLPGHCHGSRVEVTYETHQRGLVGLKLLXXRRETEXPRGXLGLTRTAVWSSAKHMALLRSTLDSNSXLIXGFTL

SEQ ID NO: 869 - protein, 97 aa, Homo sapiens
  variant (1)...(97): Xaa = Any amino acid
CHVFGGGPNCRPSQPKXAPRXFCFPPXXEEFQANKATLVCLISDFYPGAVTVAWKADSSPVKAGVETTTPSKQSNNKYAASSYLSLTPEQWKSHRSY

SEQ ID NO: 870 - protein, 75 aa, Homo sapiens
  variant (1)...(75): Xaa = Any amino acid
XGFALRCRGRVHPDHHRVKPXMSXLLLSSVDRNNAMCLAEDQTAVLVSPRXPLGXSVSRLXXRSFKPTRPRWCVS

SEQ ID NO: 871 - protein, 67 aa, Homo sapiens
  variant (1)...(67): Xaa = Any amino acid
PRMMKTVPTTMPTRPTDNPRAQTTVSVSSDIGAGISGSQCFRRGLSSPQCSTLQSXLSSXEGRRVRX

SEQ ID NO: 872 - protein, 66 aa, Homo sapiens
  variant (1)...(66): Xaa = Any amino acid
XLTLLPSXEEXYDCKVEHWGLDKPLLKHWEPEIPAPMSELTETVVCALGLSVGLVGIVVGTVFIIR

SEQ ID NO: 873 - protein, 63 aa, Homo sapiens
  variant (1)...(63): Xaa = Any amino acid
GLCLVSVDARPTTDLYSERPRQLIVTGISDRCRQGGRRLGHLDVTFGTWEPEQQEPXELSGDP

SEQ ID NO: 874 - protein, 77 aa, Homo sapiens
VVGASQNIDRWLAWHQQKPGKAPNVLIYATSSLEEGVSLRFTGSGSGTQFNLTITSLQPDDSATYYCQHYSASLRSF

SEQ ID NO: 875 - protein, 97 aa, Homo sapiens
  variant (1)...(97): Xaa = Any amino acid
GSSTGGASAMAWTVLLLGLLSHCTDSVTSYVLTQTPSVSVAPGKTAKITCGGNNIGSHNVHWYYQKPGQAPVLIISFDNDRXSXISERFSGFNSGDM

SEQ ID NO: 876 - protein, 76 aa, Homo sapiens
KQHWWCLSHGLDRSPPRPPLSLHRFCDFLCVDSDTLSVSGPRKDGQDYLWGKQYWESQCTLVLPEARPGPCPNHLF

SEQ ID NO: 877 - protein, 94 aa, Homo sapiens
  variant (1)...(94): Xaa = Any amino acid
NEKALLLCNLVQNHSSGRMSSLVGPTQSFFMRESKTLGAVQIMNGLFHIALGGLLMIPAGIYAPICVTVWYPLWGGIMYIISGSLLXQRKKLQE

SEQ ID NO: 878 - protein, 60 aa, Homo sapiens
  variant (1)...(60): Xaa = Any amino acid
DFGGCPDYEWALPHCPGGSSDDPSRDLCTHLCDCVVPSLGRHYVYYFRITPAXTEKTPGS

SEQ ID NO: 879 - protein, 60 aa, Homo sapiens
IPAGIIRRPPRAMWKSPFIIWTAPKVLDSLMKKLCVGPTSEDILPEEWFWTRLHSNRAFS

SEQ ID NO: 880 - protein, 62 aa, Homo sapiens
SGNNIHNASPERVPHSHTDGCIDPCWDHQKTPQGNVEEPIHNLDSPQSLRFPHEEALRGAHQ

SEQ ID NO: 881 - protein, 71 aa, Homo sapiens [sequence omitted]

SEQ ID NO: 882 - protein, 73 aa, Homo sapiens
TKISLNIEVWNYFFDISANSLKLKDPQITVNSLKQGCTMASHAKDGTRRNTTAVNCEDNFHFFPRREQFTGQR

SEQ ID NO: 883 - protein, 118 aa, Homo sapiens
MRVPAQLLGLLLLWLPGAKCDIQMTQSPSTLSASVGDTVTISCRASQNIDRWLAWHQQKPGKAPNVLIYATSSLEEGVSLRFTGSGSGTQFNLTITSLQPDDSATYYCQHYSASLRSF

SEQ ID NO: 884 - protein, 66 aa, Homo sapiens
DIRGFAWFLLMPGQPPIYILRGPTTYCNCISDRCRQGGRRLGHLDVTFGTWEPEQQEPQELSGDPH

SEQ ID NO: 885 - protein, 109 aa, Homo sapiens
TLTINRIEAGDEADYYCQVWDLNNDHVVFGGGTKLAVLGQPKAAPSVTLFPPSSEELQANKATLVCLISDFYPGAVTVAWKADSSPVKAGVETTTPSKQSNNKYAAAAI

SEQ ID NO: 886 - protein, 85 aa, Homo sapiens
CSFCGTSTAQASGSDSCCRVLVVALFGGCGGLHSRLDGAAICLPGHCHGSRVEVTYETHQCGLVGLKLLRGGREQSDRGGSLGLT

SEQ ID NO: 887 - protein, 51 aa, Homo sapiens
VASVGLPLLRRQAQIAAAAYLLLLCLEGVVVSTPALTGLLSAFQATVTAPG

SEQ ID NO: 888 - protein, 118 aa, Homo sapiens
  variant (1)...(118): Xaa = Any amino acid
TLTINRVEAGDEADYYCQVWDLNNDHVVFGGGTKLAVLGQPKAAPSVTLFPPSSEELQANKATLVCLISDFYPGAXTVAWKADSSPVKAGVETTTPXKQSNNKYAASSYLSLTPEQWK

SEQ ID NO: 889 - protein, 80 aa, Homo sapiens
  variant (1)...(80): Xaa = Any amino acid
LPLLRRQAQIAAGRVLVVALFXGCGGLHSRLDGAAICLPGHCXGSRVEVTYETHQCGLVGLKLLRGGREQSDRGGSLGLT

SEQ ID NO: 890 - protein, 62 aa, Homo sapiens
LSLGLRKQHWWCLSHGLDRSPPRPPLSLHRLCDLLCVDSDTLSVSGPRKDGQDYLWGKQYWE

SEQ ID NO: 891 - protein, 97 aa, Homo sapiens; identical to SEQ ID NO: 725

SEQ ID NO: 892 - protein, 52 aa, Homo sapiens
SWPSFLGPLTLRVSESTHRRSQSLCSERGGRGGERSRPWLRHHQCCFLRPRL

SEQ ID NO: 893 - protein, 68 aa, Homo sapiens
  variant (1)...(68): Xaa = Any amino acid
TLTINRVEAGDEADYYCQVWDRNNDHVVFGGGTKLAVLGQPKAAPSXTLFPPSSEELQANKATLVCLI

SEQ ID NO: 894 - protein, 62 aa, Homo sapiens
  variant (1)...(62): Xaa = Any amino acid
DTPVWPCWLEAPQRRAGTEXPRGQPWADLGRPVWSLRRRRHGHYYDPTLDSNSRPHRRLRPC

SEQ ID NO: 895 - protein, 85 aa, Homo sapiens; identical to SEQ ID NO: 682

SEQ ID NO: 896 - protein, 123 aa, Homo sapiens
TLTINRVEAGDEADYYCQVWDHNNDHVVFGGGTKLAVLGQPKAAPSVTLFPPSSEELQANKATLVCLISDFYPGAVTVAWKADSSPVKAGVETTTPSKQSNNKYAASSYLSLTPEQWKSHRSY

SEQ ID NO: 897 - protein, 115 aa, Homo sapiens
PAQLLGLLLLWLPGAKCDIQMTQSPSTLSASVGDTVTISCRASQNIDRWLAWHQQKPGKAPNVLIYATSSLEEGVSLRFTGSGSGTQFNLTITSLQPDDSATYYCQHYSASLRSF

SEQ ID NO: 898 - protein, 63 aa, Homo sapiens
DIRGFARFLLMPGQPPIYILRGPTTYCNCISDRCRQGGRRLGHLDVTFGTWEPEQQEPQELSG

SEQ ID NO: 899 - protein, 85 aa, Homo sapiens; identical to SEQ ID NO: 682

SEQ ID NO: 900 - protein, 53 aa, Homo sapiens
DGQFGPSAEDDMVIITIPHLTVIVGLIAGFDPVDGQGGHVPRIEARPGPCPNH

SEQ ID NO: 901 - protein, 139 aa, Homo sapiens
MIRTGAWPGFNSGDMATLTINRVEAGDEADYYCQVWDRNNDHVVFGGGTKLAVLGQPKAAPSVTLFPPSSEELQANKATLVCLISDFYPGAVTVAWKADSSPVKAGVETTTPSKQSNNKYAASSYLSLTPEQWKSHRSY

SEQ ID NO: 902 - protein, 85 aa, Homo sapiens
  variant (1)...(85): Xaa = Any amino acid
VASVXLPLLRRQAQIAAGRVLVVALFGGCGGLHSRLDGAAICLPGHCHGSRVEVTYETHXXGLXGLKLXRGGREQSDRGGSLGLT

SEQ ID NO: 903 - protein, 107 aa, Homo sapiens
  variant (1)...(107): Xaa = Any amino acid
VKCGIXNNDXVXXGXGTKLAVLGQPKAAPSVTLFPPSSXELQAXKAXXVCLISDFYPGAVTVAWKADSSPVKAGVETTTPSKQSNNKYAASSYLSLTPEQWKXHRSY

SEQ ID NO: 904 - protein, 55 aa, Homo sapiens
  variant (1)...(55): Xaa = Any amino acid
VASXGLPLLRRQAQIAAGRVLVXALFGGCGXLHSXLDGAXICLPGHCHXSRXEVT

SEQ ID NO: 905 - protein, 55 aa, Homo sapiens
  variant (1)...(55): Xaa = Any amino acid
SDFXPGXVTVAWKADXSPVKXGVEXTTPSKQSXNKYAASSYLSLTPEQWKSXRSY

SEQ ID NO: 906 - protein, 101 aa, Homo sapiens
  variant (1)...(101): Xaa = Any amino acid
VASVXLPLLRRQAQIAAGRVLVVALFGGCGGLHSRLDGAAICLPXHCHGSRVEVTYETHQCGLVGLKLLXGXRXQSDRXGXLGLTXDGQXGPSAEXDMVII

SEQ ID NO: 907 - protein, 101 aa, Homo sapiens
  variant (1)...(101): Xaa = Any amino acid
NNDHVXFGGGTXLAVXGQPKXAXSVTLXPXSXEELQANKATLVCLISDFYPGAVTVXWKADSSPVKAGVETTTPSKQSNNKYAASSYLSLTPEQWKXHRSY

SEQ ID NO: 908 - protein, 57 aa, Homo sapiens
  variant (1)...(57): Xaa = Any amino acid
PRGQPWADLNLGLDPGSGSQLCDSRASAPRALGPSKVSXEVPPSDPLFPIPQEMEPT

SEQ ID NO: 909 - protein, 189 aa, Homo sapiens
  variant (1)...(189): Xaa = Any amino acid
VASVGLPLLRRQAQIAAGRVLVVALFGGCGGLHSRLDGAAICLPGHCHGSRVEVTYETHQCGLVGLKLLRGGREQSDRGGSLGLTSIWVWILALGPSSVIPEHQPRGHWVLLKSPXRCLPQTPCSQFPRRWNPRNPRVNLFRQEPRLRGPEQNKAXRPSLRLSDTQRDKQRERDRQTDXQTRLSRSFYL

SEQ ID NO: 910 - protein, 113 aa, Homo sapiens
  variant (1)...(113): Xaa = Any amino acid
ASSVXLSVCLSLSVCLFVCLTGADWVXKPCSVLAPSVWVLVGTGLPLGYVGSISWGIGNKGSEGGTXWETLEGPSALGADARESQSWDPEPGSRPRLRSAQGCPLGHSVPALL

SEQ ID NO: 911 - protein, 50 aa, Homo sapiens
  variant (1)...(50): Xaa = Any amino acid
QAQTGSXSLVLFWPPQSGFLSEQVYPWVTWVPSPGELGTRGLREAPXGRL

SEQ ID NO: 912 - protein, 85 aa, Homo sapiens
GQPKAAPSVTLFPPSSEELQANKATLVCLISDFYPGAVTVAWKADSSPVKAGVETTTPSKQSNNKYAASSYLSLTPEQWKSHRSY

SEQ ID NO: 913 - protein, 85 aa, Homo sapiens
  variant (1)...(85): Xaa = Any amino acid
VASVXLPLLRRQAQIAAGRVLVVALFGGCGGLHSRLDGAAICLPGHCHGSRVEVTYETHQCGLVGLKLLRGGREQSDRGGSLGLT

SEQ ID NO: 914 - protein, 111 aa, Homo sapiens
  variant (1)...(111): Xaa = Any amino acid
ADYYCXVWDXNNDHVVFGGGTKLAVLGQPKAAPSVTLFPPSSEELQANKATLVCLISDFYPGAVTVAWKADSSPVKAGVETTTPSKQSNNKYAASSYLSLTPEQWKXHRSY

SEQ ID NO: 915 - protein, 75 aa, Homo sapiens
  variant (1)...(75): Xaa = Any amino acid
VSPXLPPXXLMXXPSSEELQANKATLVCLIXDFYPGAVTVAWKAXSXPVKAXVXTXTXSKQSNNKYAXXSYLSPD

SEQ ID NO: 916 - protein, 54 aa, Homo sapiens
  variant (1)...(54): Xaa = Any amino acid
TLTINRVEAGDEADYYCQVWDRNNDHVVFGGXTKLAXLGQPXXAPXXTHXXALL

SEQ ID NO: 917 - protein, 109 aa, Homo sapiens
  variant (1)...(109): Xaa = Any amino acid
VRTQIAXXRVLVVALFGXCXGXHXRLDGXAXCLPGHCHGSRVEVXYETHQCGLVGLKLLRGGXXHEXXRGQXWADLXRPVWXXRRRRHGHYYDPTLDSNSRPHRRLRPC

SEQ ID NO: 918 - protein, 85 aa, Homo sapiens; identical to SEQ ID NO: 682

SEQ ID NO: 919 - protein, 52 aa, Homo sapiens
  variant (1)...(52): Xaa = Any amino acid
TINRXEAGDEXXYYCQVWDRNNDHXVFDGGTKTGRPRSAQGCPLGHSVPALL

SEQ ID NO: 920 - protein, 121 aa, Homo sapiens
  variant (1)...(121): Xaa = Any amino acid
PSTGXKPAMXPXITVKCGIVIMTMXSSTEGPKLAVLGQPKAAPSVTLFPPSSEELQANKATLVCLISDFYPGAVTVAWKADSSPVKAGVETTTPSKQSNNKYAASSYLSLTPEQWKSHRSY

SEQ ID NO: 921 - protein, 109 aa, Homo sapiens
  variant (1)...(109): Xaa = Any amino acid
VASVXLPLLRRXAQIAAGRVLVVALFGGCGGLHSRLDGAAICLPGHCHGSRVEVTYETHQCGLVGLKLLRGGREXSDRGGXLXLTXDGQFGPSAEDDMVIITIPHLTVI

SEQ ID NO: 922 - protein, 109 aa, Homo sapiens
  variant (1)...(109): Xaa = Any amino acid
YYCQVWDRNNDHVVFGGGTKLAVXGQXKXAPSVTXFPPSSEELQANKATLVCLISDFYPGAVTVAWKADSSPVKAGVETTTPSKQSNNKYAASSYLSXTPEQWKXHRSY

SEQ ID NO: 923 - protein, 83 aa, Homo sapiens
  variant (1)...(83): Xaa = Any amino acid
SVGLPLLRRXAXIAAGRVLVVAXXGGCGGXHSRLDGAAICLPGHCHGSRVEVTYETHXCGLVGLKLLXGGREQSDRGGSLGLT

SEQ ID NO: 924 - protein, 122 aa, Homo sapiens
  variant (1)...(122): Xaa = Any amino acid
ATLTINRVEAGDEADYYCQVWDRNNDHVVFGGGTKLAVLGQPKAAPSVTLFPPSXEELQANKATXVCLISDFYPGAVTVAWKADSSPVKAGVXTTTPSXXSNNKYAASSYXSXTPEQWKSHR

SEQ ID NO: 925 - protein, 84 aa, Homo sapiens
  variant (1)...(84): Xaa = Any amino acid
TLTINRVEAGDEADYYCQVWDRNNDHVXFXGGTKLAVLGQPKAAPSVTLFPPSSEELQANKATLVCLISDFYPGAVTVAWKADS

SEQ ID NO: 926 - protein, 121 aa, Homo sapiens
  variant (1)...(121): Xaa = Any amino acid
GHSMDMRVPAQLLGLLLLWLPGAKCDIQMTQSPSTLSASVGDTVTISXRASXNIDRWLAWHQQKPGKAPNVLIYATSSLEEGVSLRFTGSGSGTQFNLTITSLQPDDSATYYCQHYXASLX

SEQ ID NO: 927 - protein, 71 aa, Homo sapiens
  variant (1)...(71): Xaa = Any amino acid
DIRGFAWFLLMPGQPPIYIXRGPXTYCNCISDRCRQGGRRLGHLDVTFGTWEPEQQEPQELSGDPHVHAVS

SEQ ID NO: 928 - protein, 150 aa, Homo sapiens
KMESLNFIRAHTPYINIYNCEPANPSEKNSPSTQYCYSIQSLFLGILSVMLIFAFFQELVIAGIVENEWKRTCSRPKSNIVLLSAEEKKEQTIEIKEEVVGLTETSSQPKNEEDIEIIPIQEEEEEETETNFPEPPQDQESSPIENDSSP

SEQ ID NO: 929 - protein, 53 aa, Homo sapiens [sequence omitted]

SEQ ID NO: 930 - protein, 101 aa, Homo sapiens
SWGGSGKFVSVSSSSSSWIGIISMSSSFFGWEDVSVSPTTSSFISIVCSFFSSADRRTMLDLGLEHVLFHSFSTMPAITSSWKKAKISITDKMPKNRDCML

SEQ ID NO: 931 - protein, 123 aa, Homo sapiens
TLTINRVEAGDEADYYCQVWDRNYDHVVFGGGTKLAVLGQPKAAPSVTLFPPSSEELQANKATLVCLISDFYPGAVTVAWKADSSPVKAGVETTTPSKQSNNKYAASSYLSLTPEQWKSHRSY

SEQ ID NO: 932 - protein, 85 aa, Homo sapiens; identical to SEQ ID NO: 682

SEQ ID NO: 933 - protein, 150 aa, Homo sapiens; identical to SEQ ID NO: 928

SEQ ID NO: 934 - protein, 101 aa, Homo sapiens; identical to SEQ ID NO: 930

SEQ ID NO: 935 - protein, 61 aa, Homo sapiens [sequence omitted]

SEQ ID NO: 936 - protein, 114 aa, Homo sapiens
  variant (1)...(114): Xaa = Any amino acid
IPPKLCSRTCENLRDCTCQEKVVSFQFEVSIQQDICGPLGLRLIAGDTLRVYRLSGFCLGQQDKGFQKEYLSLGRQPLXHLFFXLFIYFFIYSYLCRLCDLLCVDSDTLSVSGP

SEQ ID NO: 937 - protein, 64 aa, Homo sapiens
  variant (1)...(64): Xaa = Any amino acid
GFTDSLDFVWDSRTRDFKRNTFHLEGNLSXIYSFXYLFIFLFILIFADSVTSYVLTQTPSVSVA

SEQ ID NO: 938 - protein, 82 aa, Homo sapiens [sequence omitted]

SEQ ID NO: 939 - protein, 88 aa, Homo sapiens
  variant (1)...(88): Xaa = Any amino acid
EPEGLHLPRESSEFSVRSLHTTGHLWATGATADCRGYPEGLQTLWILSGTAGQGISKGIPFTWKATSLXFILLXIYLFFYLFLSLQTL

SEQ ID NO: 940 - protein, 66 aa, Homo sapiens
KLTTFSWQVQSLRFSQVLEHSLGGIQPHQPPTLHQGHEHPAHHRKGPPELRIKDTLDPEALGWAGW

SEQ ID NO: 941 - protein, 136 aa, Homo sapiens
  variant (1)...(136): Xaa = Any amino acid
IXKRINXREVAFQVKGIPFEIPCPAVPDKIQRVCKPSGYPLQSAVAPVAHKCPVVWRLRTENSLLSLGRCSPSGSHKSLSTVWGEFSPTSLPPCTRVMSILPTTGRALLSSELRTRWTQKPWAGQVGETLGGSPVQ

SEQ ID NO: 942 - protein, 84 aa, Homo sapiens
  variant (1)...(84): Xaa = Any amino acid
TLTINRVEAGDEADYYCQVWDRNNDHVVFGGGTKLAVLGQPKAAPSVTLFPPSSEELQANKATLVCLISDFYPXAVTVAWKAXS

SEQ ID NO: 943 - protein, 85 aa, Homo sapiens
  variant (1)...(85): Xaa = Any amino acid
VASVGLPLLXRXAQIAAGRVLVVALFGGCGGLHSRLDGAAICLPGHCHGSRVEVTYETHQCGLVGLKLLIGGRXQXDRXGSLXLT

SEQ ID NO: 944 - protein, 121 aa, Homo sapiens
  variant (1)...(121): Xaa = Any amino acid
TINRVEAGXEADYYCQVWDRNNDHVVFGGGTKLAVLGQXKAAXSVXLXPPSYEELQANKATLVCLISDFYPGAVTVAWKADSSPVKAGVETTTPSKQSNNKYAASSYLSXTXEQWKSHRSY

SEQ ID NO: 945 - protein, 119 aa, Homo sapiens
  variant (1)...(119): Xaa = Any amino acid
VASVGLPLLRRQAQIAAGRVLVVALFGGCGGLHSRLDGAAICLPGHCHGSRVEVTYETHQCGLVGLKLLRGGREQSDRGGSLGLTXXGQFGPSAXDDMVHYYDPTLDSNSRPHRRLXPC

SEQ ID NO: 946 - protein, 121 aa, Homo sapiens
  variant (1)...(121): Xaa = Any amino acid
PSTGXKPAMRPTITVKCGIVIMNHVVXGGGTKLAXXGQPKAAPSVTLFPPSSEELQANKATLVCLISDFYPGAVTVAWKADSSPVKAGVETTTPSKQSNNKYAASSYLSLTPEQWKSHRSY

SEQ ID NO: 947 - protein, 56 aa, Homo sapiens
  variant (1)...(56): Xaa = Any amino acid
TATLTINRXEAGDEADYYCQVWDRNNEPCRLXRRDQTGRXRSAQGCPLGHSVPALL

SEQ ID NO: 948 - protein, 62 aa, Homo sapiens
  variant (1)...(62): Xaa = Any amino acid
TLTINRVEAGDEADYYCQVWDRNNDHVVFXGGTKLAVLGXPKAAPSVTLFPPSSXELQXNKA

SEQ ID NO: 949 - protein, 101 aa, Homo sapiens
  variant (1)...(101): Xaa = Any amino acid
VASVXLPLLXRQAQIAAGRVLVVALFGGCGGLHSRLDGAAICLPGHCHGSRVEVTYETHXCGLVGLKLLRGGREXXDRXGSLGLTXDGQFGSSAXXDMVNY

SEQ ID NO: 950 - protein, 102 aa, Homo sapiens
  variant (1)...(102): Xaa = Any amino acid
LIIDHVXXGGGTKLAVXGQPKAAXSVXXFPPSSEELQANKATXVCLISDFYPGAVTVAWKADSSPVKAGVETTTPSKQSNNKYAASSYLSLTXEQWKXHRSY

SEQ ID NO: 951 - protein, 67 aa, Homo sapiens
  variant (1)...(67): Xaa = Any amino acid
VASVXLPLLRRQAQIAAGRVLVVALFGGCGGLHSRLDGAAICLPGHCHGSRVEVTYETHQCGLXGLK

SEQ ID NO: 952 - protein, 67 aa, Homo sapiens
  variant (1)...(67): Xaa = Any amino acid
LQAXKATLVCLISDFYPGAVTVAWKADSSPVKAGVETTTPSKQSNNKYAASSYLSLTPEQWKXHRSY

SEQ ID NO: 953 - protein, 83 aa, Homo sapiens
  variant (1)...(83): Xaa = Any amino acid
TLTINRVEAGDEADYYCQVWDRNNDHVVFGGGTKLAVLGQPKAAPSVTLFPPSSEELQANKATLVCLISDFLPGSRDXGLXGX

SEQ ID NO: 954 - protein, 58 aa, Homo sapiens
  variant (1)...(58): Xaa = Any amino acid
LRKQHWWCLSHGLDRSPPRPPLSLHRLCDLLCVDSDTLSVSGPXKDGQDYLWGKQYWE

SEQ ID NO: 955 - protein, 77 aa, Homo sapiens
  variant (1)...(77): Xaa = Any amino acid
GSSTGGASAMAWTVLLLGLLSHCTDSVTSYVLTQTPSVSVAPXKTAKITCGGNNIGSNNVHWYYQKXGXAPVPNHLF

SEQ ID NO: 956 - protein, 55 aa, Homo sapiens
  variant (1)...(55): Xaa = Any amino acid
LRHPQCQWPXERRPRLPVGETILGVTMYTGITRSXAXPLFLIISFDNDRXSGISE

SEQ ID NO: 957 - protein, 69 aa, Homo sapiens
  variant (1)...(69): Xaa = Any amino acid
VASXGLPLLRRQAQIAAGRVLVVTLFGGCGGLHSRLDGAAICLPGHCHGSRVEVTYETHXCGLVGLKLL

SEQ ID NO: 958 - protein, 69 aa, Homo sapiens
  variant (1)...(69): Xaa = Any amino acid
EELQANKATXVCLISDFYPGAVTVAWKADSSPVKAGVETTTPSKQSNNKYAASSYLSLTPEQWKSXRSY

SEQ ID NO: 959 - protein, 97 aa, Homo sapiens; identical to SEQ ID NO: 725

SEQ ID NO: 960 - protein, 56 aa, Homo sapiens
KQHWWCLGHGLDRSPPRPPLSLHRLCDLLCVDSDTLSVSGPRKDGQDYLWGKQYWE

SEQ ID NO: 961 - protein, 87 aa, Homo sapiens
GSSTGGASAMAWTVLLPGLLSHCTDSVTSYVLTQTPSVSVAPGKTAKITCGGNNIGSYSVHWYYQKPGQAPVLIISFDNDRPPGQVQ

SEQ ID NO: 962 - protein, 63 aa, Homo sapiens
  variant (1)...(63): Xaa = Any amino acid
SSLLITTGRPGRSNEDTPQLYVACGRGPRSSLRVLRHGLEVSEMAVSELPGXPKRCLDSASTH

SEQ ID NO: 963 - protein, 76 aa, Homo sapiens
KQHWWCLSHGLDRSPPRPPLSLHRLCDLLCVDSDTLSVSGPRKDGQDYLWGKQYWELQCTLVLPKARPGPCPNHLF

SEQ ID NO: 964 - protein, 71 aa, Homo sapiens
  variant (1)...(71): Xaa = Any amino acid
CRHQTHLQCVDALSRQRLGXPGSSETAISDTSSPCLRTLRDDRGPLPQATYNCGVSSLDLPGRPVVIKRDD

SEQ ID NO: 965 - protein, 89 aa, Homo sapiens
  variant (1)...(89): Xaa = Any amino acid
GGIHERHNDVGIKLIFNVSTHCPDSVWGXQVAQKQPFLTPQVHVLGLSEMIGVPYHRPHTTVEYLHWTCPGGRSLSKEMIRTGAWPGFW

SEQ ID NO: 966 - protein, 66 aa, Homo sapiens
  variant (1)...(66): Xaa = Any amino acid
TLTINRVEAGDEADYYCQVWDRNNDHVVFGGXTKLAVLGQPKAAPSVTLFPPSSEELQANKATLVC

SEQ ID NO: 967 - protein, 51 aa, Homo sapiens
  variant (1)...(51): Xaa = Any amino acid
VAXAGLPLLRRQAQIAAGRVLVVALFGGCGGLHSRLDGAAICLPGHCHGSR

SEQ ID NO: 968 - protein, 51 aa, Homo sapiens
  variant (1)...(51): Xaa = Any amino acid
PGAVTVAWKADSSPVKAGVETTTPSKQSNNKYAASSYLSLTPEQWKSGXSY

SEQ ID NO: 969 - protein, 52 aa, Homo sapiens
  variant (1)...(52): Xaa = Any amino acid
TLTINRVEAGDEADYYCQVWDLNDDHVVFGGXTKLAVLGQPKAAPSVTLXPP

SEQ ID NO: 970 - protein, 66 aa, Homo sapiens
  variant (1)...(66): Xaa = Any amino acid
TLTINRVEAGDEADYYCQVWDRNNDHVVFGGXTKLAVLGQXKAXPSVTLFPPSXXELQANKATLVC

SEQ ID NO: 971 - protein, 56 aa, Homo sapiens
  variant (1)...(56): Xaa = Any amino acid
VASXXLPLLRRQAXIAAGRVLVVALFGGCGGLHSRLDGAAICLPGHCHGSRVEVTL

SEQ ID NO: 972 - protein, 55 aa, Homo sapiens
  variant (1)...(55): Xaa = Any amino acid
SDFYPGAVTVAWKADSSPVKAGVETTTPSKQSNNKYAASSYXSLTPEQWKXXRSY

SEQ ID NO: 973 - protein, 101 aa, Homo sapiens; identical to SEQ ID NO: 930

SEQ ID NO: 974 - protein, 150 aa, Homo sapiens; identical to SEQ ID NO: 928

SEQ ID NO: 975 - protein, 53 aa, Homo sapiens
  variant (1)...(53): Xaa = Any amino acid
VASXGLPLLRRQAQIAAGRVLVVALFGGCGGLHSRLDGAAICLPGHCHGSRVE

SEQ ID NO: 976 - protein, 53 aa, Homo sapiens
  variant (1)...(53): Xaa = Any amino acid
FYPGAVTVAWKADSSPVKAGVETTTPSKQSNNKYAASSYLSLTPEQWKSXRSY

SEQ ID NO: 977 - protein, 97 aa, Homo sapiens
  variant (1)...(97): Xaa = Any amino acid
TLTINRVEAGDEADYYCQVWDHNNDHVVFGGGTKLAVLGQPKAAPSVTLFPPSSEELQANKATLVCLISDFYPGAVTXXWKAXXSPVXAGVXTTTPS

SEQ ID NO: 978 - protein, 59 aa, Homo sapiens
  variant (1)...(59): Xaa = Any amino acid
GGCGGXHSRXDGAXXCLPXXCHGSRVEVTYETHQCGLVGLKLLRGGREQSDRGGSLGLT

SEQ ID NO: 979 - protein, 83 aa, Homo sapiens
  variant (1)...(83): Xaa = Any amino acid
TLTINRVXAGDEADYYCQVWDRNNDHVVFGGGTKLAVLGQPKAAPSVTLXPXSXXELQANKATLVCLISDFYPGAVTVAWKAX

SEQ ID NO: 980 - protein, 60 aa, Homo sapiens
  variant (1)...(60): Xaa = Any amino acid
LEGVVVSTPALTGLLXCLPGHCHGSRVEVTYETHQCGLVGLKLXXGXRXQSDRGGSLGLT

SEQ ID NO: 981 - protein, 123 aa, Homo sapiens
  variant (1)...(123): Xaa = Any amino acid
VASVGLPLFRRQAQIAAGRVLVVALFGGCGGLHSRLDGAAICLPGHCHGSRVEVTYETHQCGLVGLKLLRGGREQSDRGGSLGLTXDGQFGPSTEDDMVIITIPHLTVIVGLIAGFDPVDGQG

SEQ ID NO: 982 - protein, 123 aa, Homo sapiens
  variant (1)...(123): Xaa = Any amino acid
TLTINRVEAGDEADYYCQVWDRNNDHVVFGGGTKLAVXGQPKAAPSVTLFPPSSEELQANKATLVCLISDFYPGAVTVAWKADSSPVKAGVETTTPSKQSNNKYAASSYLSLTPEQWKSHRSY

SEQ ID NO: 983 - protein, 150 aa, Homo sapiens
  variant (1)...(150): Xaa = Any amino acid
KMESLNFIRAHTPYINIYNCEPANPSEKNSPSTQYCYSIQSLFLGILSVMLIFAFFQELVIAGIVENEWKRTCSRPKSNIVLLSAEEKKEQTIEIKEEVVGLTETSSQPKNEEDIEIIPIQEEEEEETETNFPEPPQDQESSXIENDSSP

SEQ ID NO: 984 - protein, 101 aa, Homo sapiens; identical to SEQ ID NO: 930

SEQ ID NO: 985 - protein, 122 aa, Homo sapiens
SMDMRVPAQLLGLLLLWLPGAKCDIQMTQSPSTLSASVGDTVTISCRASQNIDRWLAWHQQKPGKAPNVLIYATSSLEEGVSLRFTGSGSGTQFNLTITSLQPDDSATYYCATLFCISSQFW

SEQ ID NO: 986 - protein, 69 aa, Homo sapiens
DIRGFAWFLLMPGQPPIYILRGPTTYCNCISDRCRQGGRRLGHLDVTFGTWEPEQQEPQELSGDPHVHA

SEQ ID NO: 987 - protein, 118 aa, Homo sapiens
  variant (1)...(118): Xaa = Any amino acid
TLTINRVEAGDEADYYCQVWDRNNDHVVFGGGTKLAVLGQPKAAPSVTLFPPSSXXLXANKATLVCLISDFYPGAVTVAWKADSSPVKAGVETTTPSKQSNNKYXASXYLSLTPEQWK

SEQ ID NO: 988 - protein, 80 aa, Homo sapiens
  variant (1)...(80): Xaa = Any amino acid
LPLLRRQAQIXAGXVLVVALFGGCGGLHSRLDGAAICLPGHCHGSRVEVTYETHQCGLVGXKXXRGGREQSDRGGSLGLT

SEQ ID NO: 989 - protein, 63 aa, Homo sapiens
  variant (1)...(63): Xaa = Any amino acid
LLAAYLLLLCXEGVXVSTPALXGLLXXFQSHXHGSRVEVTYETHXCGLVXXKLLRGGREQSDR

SEQ ID NO: 990 - protein, 56 aa, Homo sapiens
  variant (1)...(56): Xaa = Any amino acid
VASVGLPLLRRQAQIAAGRVLVVALXXGCXXLHSRLXXAAIXLPEPXSRLPGRSHL

SEQ ID NO: 991 - protein, 123 aa, Homo sapiens
TLTINRVEAGDEANYYCQVWDRNNDHVVFGGGTKLAVLGQPKAAPSVTLFPPSSEELQANKATLVCLISDFYPGAVTVAWKADSSPVKAGVETTTPSKQSNNKYAASSYLSLTPEQWKSHRSY

SEQ ID NO: 992 - protein, 85 aa, Homo sapiens
VASVGLPLLRRQAQIAAGRVLVVALFGGCGGLHSRLDGAAICLPGHCHGSRVEVTYEAHQCGLVGLKLLRGGREQSDRGGSLGLT

SEQ ID NO: 993 - protein, 123 aa, Homo sapiens; identical to SEQ ID NO: 683

SEQ ID NO: 994 - protein, 85 aa, Homo sapiens; identical to SEQ ID NO: 682

SEQ ID NO: 995 - protein, 88 aa, Homo sapiens
TVINYRPHNMRPEDRMFHIRAVILRALSLAFLLSLRGAGAIKADHVSTYAAFVQTHRPTGEFMFEFDEDEMFYVDLDKKETVWHLEEF

SEQ ID NO: 996 - protein, 55 aa, Homo sapiens; identical to SEQ ID NO: 791

SEQ ID NO: 997 - protein, 83 aa, Homo sapiens
SVGLPLLRRQAQIAAGRVLVVALFGGCGGLHSRLDGAAICLPGHCHGSRVEVTYETHQCGLVGLKLLRGGREQSDRGGSLGLT

SEQ ID NO: 998 - protein, 121 aa, Homo sapiens
TLTINRVEAGDKADYYCQVWDLNNDHVVFGGGTKLAVLGQPKAAPSVTLFPPSSEELQANKATLVCLISDFYPGAVTVAWKADSSPVKAGVETTTPSKQSNNKYAASSYLSLTPEQWKSHR

SEQ ID NO: 999 - protein, 56 aa, Homo sapiens; identical to SEQ ID NO: 754

SEQ ID NO: 1000 - protein, 96 aa, Homo sapiens
SSTGGASAMAWTVLLLGLLSHCTDSVTSYVLTQTPSVSVAPGKTAKITCGGNNIGSNNVHWYYQKPGQAPVLIISFDNDRPSGISERFSGFNSGDM

SEQ ID NO: 1001 - protein, 81 aa, Homo sapiens
LGLLSHCTDSVTSYVLTQTPSVSVAPGKTAKITCGGNNIGSNNVHWYYQKPGRAPVLIISFDNDWPSGISERFSGFNSGDM

SEQ ID NO: 1002 - protein, 170 aa, Homo sapiens
QAFSFEAQGGLANIAILNNNLNTLIQRSNHTQATNDPPEVTVFPKEPVELGQPNTLICHIDKFFPPVLNVTWLCNGELVTEGVAESLFLPRTDYSFHKFHYLTFVPSAEDFYDCRVEHWGLDQPLLKHWEAQEPIQMPETTETVLCALGLVLGLVGIIVGTVLIIKSLRS

SEQ ID NO: 1003 - protein, 61 aa, Homo sapiens
PCFPRSLWSWASPTPSSATLTSSSHQCSTSRGCATGSWSLRVSLRASSCPEQITASTSSIT

SEQ ID NO: 1004 - protein, 51 aa, Homo sapiens [sequence omitted]

SEQ ID NO: 1005 - protein, 59 aa, Homo sapiens
PERRDFMMRTVPTMMPTRPSTRPRAQSTVSVVSGIWIGSWASQCLRSGWSKPQCSTLQS

SEQ ID NO: 1006 - protein, 61 aa, Homo sapiens
SVLGRKRLSATPSVTSSPLHSHVTLSTGGKNLSMWQMRVLGWPSSTGSLGNTVTSGGSLVA

SEQ ID NO: 1007 - protein, 106 aa, Homo sapiens
GHKGQVMELVEAVICSGQEEALSDTLSDQLPVAQPRDVEHWWEELVNVADEGVGLAQLHRLLGKHGHLRGIVGGLSVVGTLDQGIQVVVQYSNVSQPALSLKGKGL

SEQ ID NO: 1008 - protein, 59 aa, Homo sapiens
SVGLPLLRRQAQIAAGRVLVVALFGGCGGLHSRLDGAAICLPGHCHGSRVEVTYETHQC

SEQ ID NO: 1009 - protein, 59 aa, Homo sapiens
TLVCLISDFYPGAVTVAWKADSSPVKAGVETTTPSKQSNNKYAASSYLSLTPEQWKSHR

SEQ ID NO: 1010 - protein, 85 aa, Homo sapiens; identical to SEQ ID NO: 682

SEQ ID NO: 1011 - protein, 123 aa, Homo sapiens; identical to SEQ ID NO: 683

SEQ ID NO: 1012 - protein, 83 aa, Homo sapiens; identical to SEQ ID NO: 997

SEQ ID NO: 1013 - protein, 83 aa, Homo sapiens
GQPKAAPSVTLFPPSSEELQANKATLVCLISDFYPGAVTVAWKADSSPVKAGVETTTPSKQSNNKYAASSYLSLTPEQWKSHR

SEQ ID NO: 1014 - protein, 55 aa, Homo sapiens
PRMMKTVPTTMPTRPTDNPRAQTTVSVSSDIGAGISGSQCFRRGLSSPQCSTLQS

SEQ ID NO: 1015 - protein, 50 aa, Homo sapiens
  variant (1)...(50): Xaa = Any amino acid
PSVTGDLENTVTSGTSLVAAVELERLIRLFKLCFXTAMFVSANCGSNLNC

SEQ ID NO: 1016 - protein, 59 aa, Homo sapiens
  variant (1)...(59): Xaa = Any amino acid
HRGWNLRLPVFQKRLVQSPVLHLAVITLLSRREEGEVTDLEEGMITLGEEAGLXNTFCD

SEQ ID NO: 1017 - protein, 76 aa, Homo sapiens
  variant (1)...(76): Xaa = Any amino acid
VPIAXPCDVDHRRKDVVHKTDEDVGLTQCHGRLGKHCDLRNLIGSSGRVGAFNQTVQVMFXDSDVCQCKLRVKSKL

SEQ ID NO: 1018 - protein, 52 aa, Homo sapiens
  variant (1)...(52): Xaa = Any amino acid
AMGTQSQKVFXRPASSPRVIIPSSRSVTSPSSLLLRRVMTARWSTGDWTSLF

SEQ ID NO: 1019 - protein, 165 aa, Homo sapiens
  variant (1)...(165): Xaa = Any amino acid
QFRFDPQFALTNIAVXKHNLNSLIKRSNSTAATNEVPEVTVFSKSPVTLGQPNILICLVDNIFPPVVNITWXSNGHSVTEGVXETSFLSKSDHSFFKISYLTLLPSAEESYDCKVEHWGLDKPLLKHWEPEIPAPMSELTETVVCALGLSVGLVGIVVGTVFIIR

SEQ ID NO: 1020 - protein, 85 aa, Homo sapiens; identical to SEQ ID NO: 682

SEQ ID NO: 1021 - protein, 123 aa, Homo sapiens; identical to SEQ ID NO: 896

SEQ ID NO: 1022 - protein, 50 aa, Homo sapiens
  variant (1)...(50): Xaa = Any amino acid
LLAAYLLLLCLEGVXVSTPALTGLLSAFQATVXAPGXKSLXRHTXVALXA

SEQ ID NO: 1023 - protein, 80 aa, Homo sapiens
  variant (1)...(80): Xaa = Any amino acid
VASXGLPLLRRQAQIAAGRVLVVALFGGCXGLHSRLDGAAICLPGHCHXSRVXVTXETHXCGLXGLXLLIGGREQXDRGG

SEQ ID NO: 1024 - protein, 80 aa, Homo sapiens
  variant (1)...(80): Xaa = Any amino acid
APSVXLFPPSYEEXQAXKATXVCLXSDXYPGXVTVAWKADSSPVKAGVETXTPSKQSNNKYAASSYLSLTPEQWKSXRSY

SEQ ID NO: 1025 - protein, 101 aa, Homo sapiens
  variant (1)...(101): Xaa = Any amino acid
TLTINRVEAGDEADYYCQVWDRNNDHVVFGGGTKLAVLGQPKAAPSVTLFPPSSEELQANKATLVCLISDFYPGAVTVAWKADSXPVKAGVETTTPSKQXN

SEQ ID NO: 1026 - protein, 63 aa, Homo sapiens
  variant (1)...(63): Xaa = Any amino acid
VXLFGGCGGLHSRLDGXAICLPGHCHGSRVEVTYETHQCGLVGLKLLRGGREQSDRGGSLGLT

SEQ ID NO: 1027 - protein, 75 aa, Homo sapiens
GCLSQHIGGHRVTFSWQVQSLRFSQVLEHSLGGIQPHQPPTLHQGHEHPAHHRKGPPELRIKDTLDPEALGWAGW

SEQ ID NO: 1028 - protein, 77 aa, Homo sapiens
EVTELLSLGRCSPSGSHKSLSTVWGEFSPTSLPPCTRVMSILPTTGRALLSSELRTRWTQKPWAGQVGETLGGSPVQ

SEQ ID NO: 1029 - protein, 82 aa, Homo sapiens [sequence omitted]

SEQ ID NO: 1030 - protein, 84 aa, Homo sapiens
EPEGLHLPRESNSVTSYVLTQTPSVSVAPGKTAKITCGGNNIGSNNVHWYYQKPGQAPVLIISFDNDRPSGISERFSGFNSGDM

SEQ ID NO: 1031 - protein, 60 aa, Homo sapiens
EAALVVPQPWPGPFSSSASSLTAQVIPPGSHQPAQPKASGSSVSLILSSGGPFLWWAGCS

SEQ ID NO: 1032 - protein, 71 aa, Homo sapiens
GEVSRSAARGGCPEPQGWSWGLSVLPQAFQVQKALWGLGLCQGKESCLGGGREVREVTHVALEPAKSNVSM

SEQ ID NO: 1033 - protein, 77 aa, Homo sapiens
CPKRASPGALGLGLREERSVGQRPGVAALSPRAGPGVCQSFPRLSRSRRLCGVWGCVRVRKAALVEEEKSERSHMWP

SEQ ID NO: 1034 - protein, 54 aa, Homo sapiens
  variant (1)...(54): Xaa = Any amino acid
PESSRYPSLLASGSGSRGGGSSQSXVSSMPWGLCRTGRLEEPLCLDRFCRLPHL

SEQ ID NO: 1035 - protein, 50 aa, Homo sapiens
LLFLHQGSFPYPDTAPDPTKPSGPGKPGEGLTDPRTSPGAQGSHPGPLTD

SEQ ID NO: 1036 - protein, 69 aa, Homo sapiens
LEPPPRLPLPEARREGYLEDSGHLLLAQGLKDAGPPNLTLRLPATFSPGFCRLASLPLLSHADVGLSRF

SEQ ID NO: 1037 - protein, 61 aa, Homo sapiens
  variant (1)...(61): Xaa = Any amino acid
SGGACRTCPGTVAPQACLSCRVPMAWSLHXTDWSPLPDSHFQKLGGRDTWKTPVTSFLLRA

SEQ ID NO: 1038 - protein, 59 aa, Homo sapiens
KMLVLPTSLSDSLPPFPLGSAVLPHFPSCHMLTLDLAGSKATCVTSLTSLPPPRQLSLP

SEQ ID NO: 1039 - protein, 56 aa, Homo sapiens
HSPRPHKAFWTWKAWGRTDRPQDQPWGSGQPPRAADRLTSPHGGPAPKPQGWPVWD

SEQ ID NO: 1040 - protein, 85 aa, Homo sapiens; identical to SEQ ID NO: 682

SEQ ID NO: 1041 - protein, 123 aa, Homo sapiens; identical to SEQ ID NO: 683

SEQ ID NO: 1042 - protein, 96 aa, Homo sapiens
  variant (1)...(96): Xaa = Any amino acid
VASVGLPLLRRQAQIAAGRVLVVALFGGCGGLHSRLDGAAICLPGHCHGSRVEVTYETHQCGLVGLKLLRGGREQSDRGGSLGLTXDGQFXPSAED

SEQ ID NO: 1043 - protein, 96 aa, Homo sapiens
  variant (1)...(96): Xaa = Any amino acid
VFGGGXKLAVXGQPKAAPSVTLFPPSSEELQANKATLVCLISDFYPGAVTVAWKADSSPVKAGVETTTPSKQSNNKYAASSYLSLTPEQWKSHRSY

SEQ ID NO: 1044 - protein, 85 aa, Homo sapiens
  variant (1)...(85): Xaa = Any amino acid
VASVGLPLLRRQAQIAAGRVLVVALFGGCGGLHSRLDGAAICLPGHCHGSRVEVTYETHXCGLVGLKLLXGGREQSDRGGSLGLT

SEQ ID NO: 1045 - protein, 90 aa, Homo sapiens
  variant (1)...(90): Xaa = Any amino acid
KLAVLGQPKAAPSVTLFPPSXEELQANKATXVCLISDFYPGAVTVAWKADSSPVKAGVETTTPSKQSNNKYAASSYLSLTPEQWKSHRSY

SEQ ID NO: 1046 - protein, 124 aa, Homo sapiens; identical to SEQ ID NO: 814

SEQ ID NO: 1047 - protein, 71 aa, Homo sapiens [sequence omitted]

SEQ ID NO: 1048 - protein, 95 aa, Homo sapiens
  variant (1)...(95): Xaa = Any amino acid
TLTINRVEAGDEADYYCQVWDRNNDHVVFGGGTKLAVLGQPKAAPSVTLFPPSSEELQANKATLVCLISDFYPGAVTVAWKAXSXPXKAGVETTT

SEQ ID NO: 1049 - protein, 57 aa, Homo sapiens
  variant (1)...(57): Xaa = Any amino acid
CGGLHSRLXGXAXCLPGHCHGSRVEVTYETHQCGLVGLKLLRGGREQSDRGGSLGLT

SEQ ID NO: 1050 - protein, 98 aa, Homo sapiens
TLTINRVEAGDEADYYCQVWDRNNDHVVFGGGTKLAVLGQPKAAPSVTLFPPSSEELQANKATLACLISDFYPGAVTVAWKADSSPVKAGVETTTPSK

SEQ ID NO: 1051 - protein, 60 aa, Homo sapiens
FGGCGGLHSRLDGAAICLPGHCHGSRVEVTYETRQCGLVGLKLLRGGREQSDRGGSLGLT

SEQ ID NO: 1052 - protein, 60 aa, Homo sapiens
SWPSFLGPLTLRVSESTHRRSQTLCSERGGRGGERSRPWLRHHQCCFLRQSYPCLKWYLL

SEQ ID NO: 1053 - protein, 80 aa, Homo sapiens
LCLRKQHWWCLSHGLDRSPPRPPLSLHRVCDLLCVDSDTLSVSGPRKDGQDYLWGKQYWELQCTLVLPKARPGPCPNHLF

SEQ ID NO: 1054 - protein, 97 aa, Homo sapiens
GSSTGGASAMAWTVLLLGLLSHCTESVTSYVLTQTPSVSVAPGKTAKITCGGNNIGSYSVHWYYQKPGQAPVLIISFDNDRPSGISERFSGFNSGDM

SEQ ID NO: 1055 - protein, 97 aa, Homo sapiens; identical to SEQ ID NO: 725

SEQ ID NO: 1056 - protein, 56 aa, Homo sapiens; identical to SEQ ID NO: 754

SEQ ID NO: 1057 - protein, 64 aa, Homo sapiens
  variant (1)...(64): Xaa = Any amino acid
EPXPLRPIEEMTLRRRVLQETWXGVPSQSQWGAXHHXCHXQNXHAGTSREPXTHHAGXQDRTRG

SEQ ID NO: 1058 - protein, 53 aa, Homo sapiens
  variant (1)...(53): Xaa = Any amino acid
HSDVEYSKKRXLVSPAKASGELXTIXVTXRTXMQEPPGSXRHTMLXNRTGPGA

SEQ ID NO: 1059 - protein, 51 aa, Homo sapiens
  variant (1)...(51): Xaa = Any amino acid
GPWSCPVXQHGVSXAPWRFLHXSSXSDXDGXELPTGFGWGHQXTFLGVLYV

SEQ ID NO: 1060 - protein, 64 aa, Homo sapiens
  variant (1)...(64): Xaa = Any amino acid
APGPVLXSSMVCXRLPGGSCMXVLXVTXMVXSSPLALAGDTXPRFLEYSTSECHFFNGTERXRF

SEQ ID NO: 1061 - protein, 85 aa, Homo sapiens; identical to SEQ ID NO: 682

SEQ ID NO: 1062 - protein, 123 aa, Homo sapiens
  variant (1)...(123): Xaa = Any amino acid
TLTINRVEAGXEADYYCQVWDRNNDHVVFGGGTKLAVLGQPKAAPSVTLFPPSSEELQANKATLVCLISDFYPGAVTVAWKADSSPVKAGVETTTPSKQSNNKYAASSYLSLTPEQWKSHRSY

SEQ ID NO: 1063 - protein, 59 aa, Homo sapiens
PCLRSKVTRKRPCLPSMTLMEEMLREAFRCMTQGKTAKNLVLALLILLFVSFLGVLRAK

SEQ ID NO: 1064 - protein, 51 aa, Homo sapiens
EQNDNTQKFSKWDFPGRANERPYCYAIWSKTTLQEDVFTGGPHAKLLHEGI

SEQ ID NO: 1065 - protein, 120 aa, Homo sapiens
  variant (1)...(120): Xaa = Any amino acid
DCQKSCSCSPHFVICFIFRSFESKMTTPRNSVNGTFPAEPMKGPIAMQSGPKPLFRRMSSLVGPTQSFFMRESKTLGAVQIMNGLFHIALGGLLMIPAGIYAPICVTVWYPLWGXXGSIK

SEQ ID NO: 1066 - protein, 89 aa, Homo sapiens
IPAGIIRRPPRAMWKSPFIIWTAPKVLDSLMKKLCVGPTSEDILLKSGFGPDCIAIGPFIGSAGKVPFTEFLGVVILLSKLLKMKQITK

SEQ ID NO: 1067 - protein, 60 aa, Homo sapiens
  variant (1)...(60): Xaa = Any amino acid
LYASXXSPERVPHSHTDGCIDPCWDHQKTPQGNVEEPIHNLDSPQSLRFPHEEALRGAHQ

SEQ ID NO: 1068 - protein, 64 aa, Homo sapiens [sequence omitted]

SEQ ID NO: 1069 - protein, 59 aa, Homo sapiens
PCLRSKVTRKRPCLPSMTLMEEMLREAFRCMTQGKTAKNLVLALLILLFVLFLGVLRAK

SEQ ID NO: 1070 - protein, 51 aa, Homo sapiens; identical to SEQ ID NO: 1064

SEQ ID NO: 1071 - protein, 108 aa, Homo sapiens
DCQKSCSCSPHFVICFIFRSFESKMTTPRNSVNGTFPAEPMKGPIAMQSGPKPLFRRMSSLVGPTQSFFMRESKTLGAVQIMNGLFHIALGGLLMIPAGIYAPICVTV

SEQ ID NO: 1072 - protein, 64 aa, Homo sapiens
ISGCCHFALKTPKNKTNNKMRRARTRFLAVLPCVMHLNASLSISSMSVIEGRHGLFRVTLDLRQ

SEQ ID NO: 1073 - protein, 89 aa, Homo sapiens
IPAGIIRRPPRAMWKSPFIIWTAPKVLDSLMKKLCVGPTSEDILLKSGFGPDCIAIGPFIGSAGKVPFTEFLGVVILLSKLLKIKQITK

SEQ ID NO: 1074 - protein, 59 aa, Homo sapiens; identical to SEQ ID NO: 1069

SEQ ID NO: 1075 - protein, 51 aa, Homo sapiens
EQNDNTQKFSKWDFPGRANERPYCYAIWSKTTLQEDVFTGGPHARLLHEGI

SEQ ID NO: 1076 - protein, 76 aa, Homo sapiens
  variant (1)...(76): Xaa = Any amino acid
DFGGCPDYEWALPHCPGGSSDDPSRDLCTHLCDCVVPSLGRHYVYYFRITPGSNGEKLQEVFGQRKNDNEFIXPLC

SEQ ID NO: 1077 - protein, 149 aa, Homo sapiens
  variant (1)...(149): Xaa = Any amino acid
DCQKSCSCSPHFVICFIFRSFESKMTTPRNSVNGTFPAEPMKGPIAMQSGPKPLFRRMSSLVGPTQGFFMRESKTLGAVQIMNGLFHIALGGLLMIPAGIYAPICVTVWYPLWGGIMYIISGSLLAATEKNSRKCLVKGKMIMNSXXLF

SEQ ID NO: 1078 - protein, 89 aa, Homo sapiens
IPAGIIRRPPRAMWKSPFIIWTAPKVLDSLMKKPCVGPTSEDILLKSGFGPDCIAIGPFIGSAGKVPFTEFLGVVILLSKLLKIKQITK

SEQ ID NO: 1079 - protein, 62 aa, Homo sapiens; identical to SEQ ID NO: 880

SEQ ID NO: 1080 - protein, 64 aa, Homo sapiens; identical to SEQ ID NO: 1072

SEQ ID NO: 1081 - protein, 94 aa, Homo sapiens [sequence omitted]

SEQ ID NO: 1082 - protein, 61 aa, Homo sapiens [sequence omitted]

SEQ ID NO: 1083 - protein, 58 aa, Homo sapiens
  variant (1)...(58): Xaa = Any amino acid
GNPDPRPTDGGXGGXXVRLSGRNCPVDVIDHQYFLLEQRDLSERAHFKFIRCIGQNPV

SEQ ID NO: 1084 - protein, 139 aa, Homo sapiens
  variant (1)...(139): Xaa = Any amino acid
XTGAVSFXMXEETQTQDQPMEEXEVXTFAFQAEIAQLMSLIINTFYSNKEIFLRELISNSSDALDKIRYESLTDPSKLDSEKELHINLIPNKQDRTLTIVDTGIGMTKADLINNLGTIAKSGTKAFMEALQAGADISMI

SEQ ID NO: 1085 - protein, 66 aa, Homo sapiens
  variant (1)...(66): Xaa = Any amino acid
PCLXSXVTRKRPCLPSMTLMEEMLXEAFXCMTQGKTAKNLXLALLILLXVLXLGVXRAKXXHPEIQ

SEQ ID NO: 1086 - protein, 51 aa, Homo sapiens
  variant (1)...(51): Xaa = Any amino acid
EQNXXTQKFSKWDFPGRXNERPYCYAIWSKTTLQEDXFTGGPHAKLLHEGI

SEQ ID NO: 1087 - protein, 52 aa, Homo sapiens
  variant (1)...(52): Xaa = Any amino acid
DFGGCPDYEWALPHCPGGSSDDPXRDLCXHLCDCVVPSLGRHYVYYFRITPG

SEQ ID NO: 1088 - protein, 125 aa, Homo sapiens
  variant (1)...(125): Xaa = Any amino acid
DCQKSXSCSPHFVIXFXFRSXESKXTXPRNSVNGTFPAXPMKGPIAMQSGPKPLFRRMXSLVGPTQSFFMRESKTLGAVQIMNGLFHIALGGLLMIPXGIYXPICVTVWYPLWGGIMYIISGSLL

SEQ ID NO: 1089 - protein, 89 aa, Homo sapiens
  variant (1)...(89): Xaa = Any amino acid
IPXGIIRRPPRAMWKSPFIIWTAPKVLDSLMKKLCVGPTSEXILLKSGFGPDCIAIGPFIXSAGKVPFTEFLGXXILLSXLLKXKXITK

SEQ ID NO: 1090 - protein, 62 aa, Homo sapiens
  variant (1)...(62): Xaa = Any amino acid
SGNNIHNASPERVPHSHTDGXIDPXWDHQKTPQGNVEEPIHNLDSPQSLRFPHEEALRGAHQ

SEQ ID NO: 1091 - protein, 64 aa, Homo sapiens
  variant (1)...(64): Xaa = Any amino acid
ISGXCXFALXTPKXKXNNKMRRARXRFLAVLPCVMHXNASXSISSMSVIEGRHGLFRVTXDXRQ

SEQ ID NO: 1092 - protein, 123 aa, Homo sapiens
GHSMDMRVPAQLLGLLLLWLPGAKCDIQMTQSPSTLSASVGDTVTISCRASQNIDRWLAWHQQKPGKAPNVLIYATSSLEEGVSLRFTGSGSGTQFNLTITSLQPDDSATYYCQHYSASLRSF

SEQ ID NO: 1093 - protein, 71 aa, Homo sapiens; identical to SEQ ID NO: 813

SEQ ID NO: 1094 - protein, 85 aa, Homo sapiens
  variant (1)...(85): Xaa = Any amino acid
VASVGLPLLRRQAQIAAGRVLVVALFGGCGXLHSRLDGAAICLPGHCHGSRVEVTYETHQCGLVGLKLLRGGREQSDRGGSLGLT

SEQ ID NO: 1095 - protein, 123 aa, Homo sapiens
  variant (1)...(123): Xaa = Any amino acid
TLTINRVEAGDEADYYCQVWDRNNDHVVFGGGTKLAVLGQPKAAPSVTLFPPSSEELQANKATLVCLISDFYPGAVTVAWKADSSPVKAGVEXTTPSKQSNNKYAASSYLSLTPEQWKSHRSY

SEQ ID NO: 1096 - protein, 85 aa, Homo sapiens; identical to SEQ ID NO: 682

SEQ ID NO: 1097 - protein, 102 aa, Homo sapiens
TLTINRVEAGDEADYYCQVWDRNNDHVVFGGGTKLAVLSQPKAAPSVTLFPPSSEELQANKATLVCLISDFYPGAVTVAWKADSSPVKAGVETTTPSKQSNN

SEQ ID NO: 1098 - protein, 85 aa, Homo sapiens; identical to SEQ ID NO: 682

SEQ ID NO: 1099 - protein, 108 aa, Homo sapiens
  variant (1)...(108): Xaa = Any amino acid
YXQVWDRNYDHVVFGGGTKLAVLGQPKAAPSVTLFPPSSEELQANKATLVCLISDFYPGAVTVAWKADSSPVKAGVETTTPSKQSNNKYAASSYLSLTPEQWKSHRSY

SEQ ID NO: 1100 - protein, 56 aa, Homo sapiens
  variant (1)...(56): Xaa = Any amino acid
VASVGLPLLXRQAQIAAGRVLVVALFGGCGGLHSXLDGXXYLPSXPLXRLXGRSHL

SEQ ID NO: 1101 - protein, 54 aa, Homo sapiens
  variant (1)...(54): Xaa = Any amino acid
KATXVCLISDFYXGAVXVXWKADSXPRQXGSGDHHTLQTKQQQVRGQQLSEPDX

SEQ ID NO: 1102 - protein, 55 aa, Homo sapiens
  variant (1)...(55): Xaa = Any amino acid
VTSTXEPXQWXGRQIXXPVKXGVETTTPSKQSNNKYAASSYLSLTXEQWKSHRSY

SEQ ID NO: 1103 - protein, 56 aa, Homo sapiens
  variant (1)...(56): Xaa = Any amino acid
TLTINRVEAGDEADYYCQVWDRNNDHVXFGGGTKLAVLGXPKAAPSVTLFXPXSXE

SEQ ID NO: 1104 - protein, 85 aa, Homo sapiens; identical to SEQ ID NO: 682

SEQ ID NO: 1105 - protein, 123 aa, Homo sapiens
TLTINRVEAGDEADYYCQVWDLNNDHVVFGGGTKLAVLGQPKAAPSVTLFPPSSEELQANKATLVCLISDFYPGAVTVAWKADSSPVKAGVETTTPSKQSNNKYAASSYLSLTPEQWKSHRSY

SEQ ID NO: 1106 - protein, 194 aa, Homo sapiens
QYTHEFDGDEQFYVDLGRKETVWCLPVLRQFRFDPQFALTNIAVLKHNLNSLIKRSNSTAATNEVPEVTVFSKSPVTLGQPNILICLVDNIFPPVVNITWLSNGHSVTEGVSETSFLSKSDHSFFKISYLTLLPSAEESYDCKVEHWGLDKPLLKHWEPEIPAPMSELTETVVCALGLSVGLVGIVVGTVFIIR

SEQ ID NO: 1107 - protein, 52 aa, Homo sapiens
AMGTQSQKVFLRPASSPRVIIPSSRSVTSPSSLLLRRVMTARWSTGDWTSLF

SEQ ID NO: 1108 - protein, 55 aa, Homo sapiens; identical to SEQ ID NO: 1014

SEQ ID NO: 1109 - protein, 66 aa, Homo sapiens
PSVTGDLENTVTSGTSLVAAVELERLIRLFKLCFRTAMFVSANCGSNLNCLRTGKHQTVSFLPRST

SEQ ID NO: 1110 - protein, 59 aa, Homo sapiens
HRGWNLRLPVFQKRLVQSPVLHLAVITLLSRREEGEVTDLEEGMITLGEEAGLRNTFCD

SEQ ID NO: 1111 - protein, 60 aa, Homo sapiens
VPIAQPCDVDHRRKDVVHKTDEDVGLTQCHGRLGKHCDLRNLIGSSGRVGAFNQTVQVMF

SEQ ID NO: 1112 - protein, 51 aa, Homo sapiens
  variant (1)...(51): Xaa = Any amino acid
KQHWWCLSHGLDRSPXRXPLSPXRLCDLLCVDSDTXSXXGPRXXGQDYLWG

SEQ ID NO: 1113 - protein, 51 aa, Homo sapiens
  variant (1)...(51): Xaa = Any amino acid
SSTGGASAMAWTVLXLXLLSHXTDSVTSYVLTQTPXVXXAPGXTAKITCGG

SEQ ID NO: 1114 - protein, 79 aa, Homo sapiens
PTVTLFPPSSEELQANKATLVCLISDFYPGAVTVAWKADGSPVKAGVETTKPSKQSNNKYAASSYLSLTPEQWKSHRSY

SEQ ID NO: 1115 - protein, 54 aa, Homo sapiens; identical to SEQ ID NO: 840

SEQ ID NO: 1116 - protein, 59 aa, Homo sapiens
VASVGLPLLGRQAQVAAGRVLVVALFGGFGGLHSRLDGAAICLPGHCHSSRVEVTDQTH

SEQ ID NO: 1117 - protein, 85 aa, Homo sapiens
  variant (1)...(85): Xaa = Any amino acid
VASVGLPLLRRQAQIAAGRVLVVALFGGCGGLHSRLDGAAICLPGHCHGSRVEVTYETHQCGLVGLKLLXGGREQSDRGGSLGLT

SEQ ID NO: 1118 - protein, 93 aa, Homo sapiens
  variant (1)...(93): Xaa = Any amino acid
XGTKXAVLGQPKAAPSVTLFPPSXEELQANKATLVCLISDFYPGAVTVAWKADSSPVKAGVETTTPSKQSNNKYAASSYLSLTPEQWKSHRSY

SEQ ID NO: 1119 - protein, 194 aa, Homo sapiens; identical to SEQ ID NO: 1106

SEQ ID NO: 1120 - protein, 52 aa, Homo sapiens; identical to SEQ ID NO: 1107

SEQ ID NO: 1121 - protein, 55 aa, Homo sapiens; identical to SEQ ID NO: 1014

SEQ ID NO: 1122 - protein, 66 aa, Homo sapiens; identical to SEQ ID NO: 1109

SEQ ID NO: 1123 - protein, 59 aa, Homo sapiens; identical to SEQ ID NO: 1110

SEQ ID NO: 1124 - protein, 60 aa, Homo sapiens; identical to SEQ ID NO: 1111

SEQ ID NO: 1125 - protein, 94 aa, Homo sapiens
TGGASAMAWTVLLLGLLSHCTDSVTSYVLTQTPSVSVAPGKTAKITCGGNNIGSNNVHWYYQKPGQAPVLIISFDNDRPSGISERFSGFNSGDM

SEQ ID NO: 1126 - protein, 53 aa, Homo sapiens
WWCLSHGLDRSPPRPPLSLHRLCDLLCVDSDTLSVSGPRKDGQDYLWGKQYWE

SEQ ID NO: 1127 - protein, 71 aa, Homo sapiens; identical to SEQ ID NO: 813

SEQ ID NO: 1128 - protein, 124 aa, Homo sapiens; identical to SEQ ID NO: 814

SEQ ID NO: 1129 - protein, 63 aa, Homo sapiens
  variant (1)...(63): Xaa = Any amino acid
NNDHVVFGGGTKLAVLGQPKAAPSVTLFPPXXEXLQANKATLVCLISDFYPGAVTVAWKAXSS

SEQ ID NO: 1130 - protein, 73 aa, Homo sapiens
WWCLSHGLDRSPPRPPLSPHRFCDFLCVDSNTLSVSGPRKDGQDYLWGKQYWESQCTLVLPEARPGPCPNHLF

SEQ ID NO: 1131 - protein, 57 aa, Homo sapiens
GGASAMAWTVLLLGLLSHRTDSVTSYVLTQTPSVSVAPGKTAKITCGGNNIGSHNVH

SEQ ID NO: 1132 - protein, 85 aa, Homo sapiens
  variant (1)...(85): Xaa = Any amino acid
SQESVQEPFLTPVMDNKAXPEEDEPQHEASNATQHLALGRFRLSPPLHGDGVLEAGVLHVAGVDVSMLGSHFQHHQDLEXPVTXS

SEQ ID NO: 1133 - protein, 56 aa, Homo sapiens
DYFNWDWLSLFCNACLSLPRIPNCLCQPVPLRSESYSGCHAATRSSPFIPTPRRWL

SEQ ID NO: 1134 - protein, 70 aa, Homo sapiens
  variant (1)...(70): Xaa = Any amino acid
ICPEQDAEWHWRLRAGAHLPRXGPYYPSQESERAPALTPETILTGIGYHFSVTPACPCPEFPTACVSLSP

SEQ ID NO: 1135 - protein, 82 aa, Homo sapiens
  variant (1)...(82): Xaa = Any amino acid
LGXGDWXFQILVMLEMTPQHGDVYTCHVEHPSLQNPITVEWRAQSESAQSKMLSGIGGFVLGLIFLGXGLIIHHRSQKGLLH

SEQ ID NO: 1136 - protein, 56 aa, Homo sapiens
RLLVPAQNSQLPVSACPPEIRVLQWLSRSHQVISFHPHPKALAVTLLPALTQSLCL

SEQ ID NO: 1137 - protein, 85 aa, Homo sapiens; identical to SEQ ID NO: 682

SEQ ID NO: 1138 - protein, 123 aa, Homo sapiens; identical to SEQ ID NO: 683

SEQ ID NO: 1139 - protein, 123 aa, Homo sapiens
  variant (1)...(123): Xaa = Any amino acid
TLTINRVEAGDEADYYCQVWDRNNDHVVFGGGTKLXXLGXXKAAPSVTLFPPSSEELQANKATLVCLISDFYPGAATVAWKADSSPVKAGVETTTPSKQSNNKYAASSYLSLTPEQWKSHRSY

SEQ ID NO: 1140 - protein, 85 aa, Homo sapiens
  variant (1)...(85): Xaa = Any amino acid
VASVGLPLLRRQAQIAAGRVLVVALFGGCGGLHSRLDGAAICLPGHCRGSRVEVTYETHQCGLVGLKLLRGGREQSDRGGSLXXT

SEQ ID NO: 1141 - protein, 85 aa, Homo sapiens; identical to SEQ ID NO: 682

SEQ ID NO: 1142 - protein, 123 aa, Homo sapiens; identical to SEQ ID NO: 683

SEQ ID NO: 1143 - protein, 115 aa, Homo sapiens
TLPPDRMKFISTSLLLMLLVSSLSPVQGVLEVYYTSLRCRCVQESSVFIPRRFIDRIQILPRGNGCPRKEIIVWKKNKSIVCVDPQAEWIQRMMEVLRKRSSSTLPVPVFKRKIP

SEQ ID NO: 1144 - protein, 55 aa, Homo sapiens
EKEVLQLYQFQCLRERFPDADISTKNTCILPLSLLWILVLCLVKSFPGKRTSPYK

SEQ ID NO: 1145 - protein, 51 aa, Homo sapiens
SHAYLYGEVLFPGKDLTKHKTKIQSRDKGRMQVFLVEISASGNLSLKHWNW

SEQ ID NO: 1146 - protein, 60 aa, Homo sapiens
VRRSSSVAQVKAMIETKTGIIPETQIVTCNGKRLEDGKMMADYGIRKGNLLFLACYCIGG

SEQ ID NO: 1147 - protein, 74 aa, Homo sapiens
DPDCDLQWKETGRWEDDGRLRHQKGQLTLPGMLLYWRVTTLGMGCWQGSKSLFLLISYSTNTSSDDFPKLMRMR

SEQ ID NO: 1148 - protein, 74 aa, Homo sapiens [sequence omitted]

SEQ ID NO: 1149 - protein, 57 aa, Homo sapiens
SIPGGYNTDISRVFNGNNCTSCQQKLLPGPLEIYDIDAITFPFIDVLFHLEVKIGAT

SEQ ID NO: 1150 - protein, 78 aa, Homo sapiens
LDVLQMKEEDVLKFLAAGTHLGGTNLDFQMEQYIYKRKSDGIYIINLKRTWEKLLLAARAIVAIENPADVSVISSRNT

SEQ ID NO: 1151 - protein, 115 aa, Homo sapiens
TLSPDRMKFISTSLLLMLLVSSLSPVQGVLEVYYTSLRCRCVQESSVFIPRRFIDRIQILPRGNGCPRKEIIVWKKNKSIVCVDPQAEWIQRMMEVLRKRSSSTLPVPVFKRKIP

SEQ ID NO: 1152 - protein, 55 aa, Homo sapiens; identical to SEQ ID NO: 1144

SEQ ID NO: 1153 - protein, 51 aa, Homo sapiens
PHAYLYGEVLFPGKDLTKHKTKIQSRDKGRMQVFLVEISASGNLSLKHWNW

SEQ ID NO: 1154 - protein, 59 aa, Homo sapiens [sequence omitted]

SEQ ID NO: 1155 - protein, 110 aa, Homo sapiens
EQRDLHTETPSWAPGTMAPLKMLALVTLLLGASLQHIHAARGTNVGRECCLEYFKGAIPLRKLKTWYQTSEDCSRDAIVFVTVQGRAICSDPNNKRVKNAVKYLQSLERS

SEQ ID NO: 1156 - protein, 145 aa, Homo sapiens
PPLDPGAQGGGGEHRRWRSQVVPGDSQESGVRRLQDLSRLCRYLTAFFTLLLLGSEQMALPCTVTKTMASLEQSSDVWYHVFSFLRGMAPLKYSRQHSRPTLVPRAAWMCCREAPRRRVTRASIFSGAMVPGAQEGVSVCRSLCS

SEQ ID NO: 1157 - protein, 132 aa, Homo sapiens
TPTVEVPGSPGRQSGVWGEEASRPLKALQVFNCILHSLVVGVRTDGPALHSYKNDGIPGAVLRCLVPRLQLSKGNGSLEVLQAALPAHIGPSSCVDVLQRSPQEEGNQGQHLQWGHGARSPGGSLCVQVPLL

SEQ ID NO: 1158 - protein, 174 aa, Homo sapiens
ALAPGPVLFSSMVCLRLPGGSCMAVLTVTLMVLSSPLALAGDTRPRFLEYSTSECHFFNGTERVRFLDRYFYNQEEYVRFDSDVGEFRAVTELGRPDEEYWNSQKDFLEDRRAAVDTYCRHNYGVVESFTVQRRVHPKVTVYPSKTQPLQHHNLLVCSVSGFYPGSIEVRWFRN

SEQ ID NO: 1159 - protein, 56 aa, Homo sapiens; identical to SEQ ID NO: 794

SEQ ID NO: 1160 - protein, 52 aa, Homo sapiens
SGPWSCPVLQHGVSEAPWRLLHGSSDSDTDGAELPTGFGWGHQTTFLGVLYV

SEQ ID NO: 1161 - protein, 54 aa, Homo sapiens
HSDVEYSKKRGLVSPAKASGELSTISVTVRTAMQEPPGSLRHTMLENRTGPGAR

SEQ ID NO: 1162 - protein, 70 aa, Homo sapiens
SSPQPRSCVCSRCPPRPACLPGSPSGCSSTPHQAAPAPSPPGTPPRRCRSARTPLGYRSICPGTAPAPSH

SEQ ID NO: 1163 - protein, 50 aa, Homo sapiens
STPRNVVWCPQPKPVGSSAPSVSLSELPCRSLQGASDTPCWRTGQDQGPE

SEQ ID NO: 1164 - protein, 143 aa, Homo sapiens
RIHSHLRMDSPLHCEALHNPVVVSAVGVHRGPPVFQEVLLAVPVLLIRPPQLRHRPELPHVAVEAHVLLLVIEVSVQEPHPLRPIEEMTLRRRVLQETWSGVPSQSQWGAQHHQCHCQNCHAGASREPQTHHAGEQDRTRGQS

SEQ ID NO: 1165 - protein, 63 aa, Homo sapiens [sequence omitted]

SEQ ID NO: 1166 - protein, 50 aa, Homo sapiens
  variant (1)...(50): Xaa = Any amino acid
YICEYGLSFLADQISRRLLYTXEVHSYRKFKKSTLSFLSNSSEVMGSCSS

SEQ ID NO: 1167 - protein, 115 aa, Homo sapiens; identical to SEQ ID NO: 1143

SEQ ID NO: 1168 - protein, 55 aa, Homo sapiens; identical to SEQ ID NO: 1144

SEQ ID NO: 1169 - protein, 51 aa, Homo sapiens; identical to SEQ ID NO: 1145

SEQ ID NO: 1170 - protein, 117 aa, Homo sapiens
AAMARGPKKHLKRVAAPKHWMLDKLTGVFAPRPSTGPHKLRECLPLIIFLRNRLKYALTGDEVKKICMQRFIKIDGKVRTDITYPAGFMDVISIDKTGENFRLIYDTKGRFAVHRIT

SEQ ID NO: 1171 - protein, 117 aa, Homo sapiens
CNTMYSKATLGVIDQTEILSRLVNADDIHESSRVGYISSDLAIDFNEPLHANLLYFISCQGILKSVPQENDEGETLSQLVGTGGWTRSKHTGQFIQHPMLWSCHPLQMLLGTTSHGC

SEQ ID NO: 1172 - protein, 83 aa, Homo sapiens
VISVRTLPSILMNRCMQIFFTSSPVRAYLSLFLRKMMRGRHSLNLWGPVDGRGANTPVNLSSIQCFGAATRFRCFLGPRAMAA

SEQ ID NO: 1173 - protein, 170 aa, Homo sapiens
CYSFASMGMLEARIRILTNNSQTPILSPQEVVSCSQYAQGCDGGFPYLIAGKYAQDFGLVEEACFPYTGTDSPCKMKEDCFRYYSSEYHYVGGFYGGCNEALMKLELVHHGPMAVAFEVYDDFLHYKKGIYHHTGLRDPFNPFELTNHAVLLVGYGTDSASGMDYWIVKN

SEQ ID NO: 1174 - protein, 91 aa, Homo sapiens
KGLLDQCGGRSPFCSGGSHHILQKQLPWAHDGPTQASSGLHCSLHRNLLHSGTQRSNNESSLPSFCMENQCLCRGSKLLPPAQNLGRTFLQ

SEQ ID NO: 1175 - protein, 109 aa, Homo sapiens [sequence omitted]

SEQ ID NO: 1176 - protein, 51 aa, Homo sapiens; identical to SEQ ID NO: 1145

SEQ ID NO: 1177 - protein, 78 aa, Homo sapiens
RCRCVQESSVFIPRRFIDRIQILPRGSGCPRKEIIVWKKNKSIVCVGPQAEWIQRMMEVLRKRSSSTLPVPVFKRKIP

SEQ ID NO: 1178 - protein, 53 aa, Homo sapiens
IFSRKKNFPIQISMRLCKNNLVEADGANSSFFTHSTLYTLGVCILIHQGGKFL

SEQ ID NO: 1179 - protein, 55 aa, Homo sapiens; identical to SEQ ID NO: 1144

SEQ ID NO: 1180 - protein, 99 aa, Homo sapiens
LSFLEVLCTYAPHLYLAFAWSDHSSFSLTLNVENVAIVAACVVTLLLLSNFLTLKKGRMSASECDFLLTCSLDRLFSIVFFLSFSPSTTRETAPDGKDI

SEQ ID NO: 1181 - protein, 57 aa, Homo sapiens
YFFCHFLHQQPGRLHLMEKIYDCFMTFLNYLFFIPHLRFWWSPFCIIVLRMIKKNNN

SEQ ID NO: 1182 - protein, 87 aa, Homo sapiens
SSHISFPSGAVSLVVDGENDKKNTILKSLSKEQVSRKSHSEALILPFFSVRKLLKRRSVTTQAATMATFSTFNVREKELWSLHAKAR

SEQ ID NO: 1183 - protein, 53 aa, Homo sapiens
AMLFLQKTDGCWLFRASLMGCGNSKNVPQCQPCRKINGMGSVLSLVVIFFYHP

SEQ ID NO: 1184 - protein, 59 aa, Homo sapiens
STHSAFLQCKKVAQKKKRDNTSCYNGYILYIQCKREGAMVTPCKGQIEMWCVCAEYLKK

SEQ ID NO: 1185 - protein, 115 aa, Homo sapiens; identical to SEQ ID NO: 1143

SEQ ID NO: 1186 - protein, 55 aa, Homo sapiens; identical to SEQ ID NO: 1144

SEQ ID NO: 1187 - protein, 51 aa, Homo sapiens; identical to SEQ ID NO: 1145

SEQ ID NO: 1188 - protein, 98 aa, Homo sapiens
  variant (1)...(98): Xaa = Any amino acid
PNCLSNVCINCESQXXQLLSRIYSLTSNKQALRDTESQIQILPMGIKRLRLSPHLENYLHHKYIITGSLYEADTKCYRHSQNIILGNNVIKMPNLSQQ

SEQ ID NO: 1189 - protein, 142 aa, Homo sapiens
  variant (1)...(142): Xaa = Any amino acid
WTXLEGVEVQTDYVPLLNSLAAYGWQLTCVLPTPVVKTTSEGSVSTKQIVFLQRPCLPQKIKKKESKFQWRFSREEMHNRQMRKSKGKLSARDKQQAEENEKNLEDQSSKAGDMGNCVSGQQQEGGVSEEMKGPVQEDKGEQ

SEQ ID NO: 1190 - protein, 64 aa, Homo sapiens
TRWRPMAGSSPVCYQLPSSRLPARGVYPPSRLSFFRDLVYLRKSRRRNRSFSGDSPEKKCTTGR

SEQ ID NO: 1191 - protein, 86 aa, Homo sapiens
  variant (1)...(86): Xaa = Any amino acid
DXPGRCRSADRLRAPAELAGGLWLAAHLCATNSRRQDYQRGECIHQADCLSSETLSTSENQEEGIEVSVAILQRRNAQQADEEIKR

SEQ ID NO: 1192 - protein, 73 aa, Homo sapiens
CSPLSSWTGPFISSETPPSCCCPETQFPMSPALEDWSSKFFSFSSACCLSLALSLPFDFLICLLCISSLENRH

SEQ ID NO: 1193 - protein, 52 aa, Homo sapiens
VLPCPLGQGPSSPRRLHPPAAVLKHSFPCLQLWKTGLLSSSHFLLLVVCLWH

SEQ ID NO: 1194 - protein, 115 aa, Homo sapiens
  variant (1)...(115): Xaa = Any amino acid
TLPPDRMKFISTSLLLMLLVSSLSPVQGVLEVYYTSLRCRCVQXSSVFIPXRFIDRIQILPRGNGCPRKEIIVWKKNKSIVCVDPQAEWIQRMMEVLRKRSSSTLPVPVFKRKIP

SEQ ID NO: 1195 - protein, 70 aa, Homo sapiens
  variant (1)...(70): Xaa = Any amino acid
LPPFLSELFLLHITAATTAPVITAPRRTRPAMMPTMGMVGWEDSSHLXVRGLGRPSCCTWQVYLCSSPEG

SEQ ID NO: 1196 - protein, 63 aa, Homo sapiens
  variant (1)...(63): Xaa = Any amino acid
ALPPPHHGSDHSSSDHSSKENQASNDAHDGDGGLGRQLPSXGEGLGQTLMLHMAGVSLLLSRR

SEQ ID NO: 1197 - protein, 50 aa, Homo sapiens
  variant (1)...(50): Xaa = Any amino acid
GSAQAPHXEMGAVFPAHHPHRGHHCWPGSPWSCDHWSCGRCRDVEEEELR

SEQ ID NO: 1198 - protein, 92 aa, Homo sapiens
  variant (1)...(92): Xaa = Any amino acid
PSGEEQRYTCHVQHEGLPKPLTXRWELSSQPTIPIVGIIAGLVLLGAVITGAVVAAVMWRRKSSDRKGGSYTQAASSDSAQGSDVSLTACKV

SEQ ID NO: 1199 - protein, 55 aa, Homo sapiens
  variant (1)...(55): Xaa = Any amino acid
EKEVLQLYQFQCLRERFPDADISTKNTCILPLSLLWILVLXLVKSFPGKRTSPYK

SEQ ID NO: 1200 - protein, 115 aa, Homo sapiens; identical to SEQ ID NO: 1143

SEQ ID NO: 1201 - protein, 51 aa, Homo sapiens
  variant (1)...(51): Xaa = Any amino acid
SHAYLYGEVLFPGKDLTKXKTKIQSRDKGRMQVFLVEISASGNLSLKHWNW

SEQ ID NO: 1202 - protein, 115 aa, Homo sapiens; identical to SEQ ID NO: 1143

SEQ ID NO: 1203 - protein, 55 aa, Homo sapiens; identical to SEQ ID NO: 1144

SEQ ID NO: 1204 - protein, 51 aa, Homo sapiens; identical to SEQ ID NO: 1145

SEQ ID NO: 1205 - protein, 50 aa, Homo sapiens
RIGFSHQGYNCWWWCHSTHPQISDWEERTTEDCLKDAWIPCYLRTLNTLT

SEQ ID NO: 1206 - protein, 134 aa, Homo sapiens
ASAEFEMAGGKAGKDSGKAKTKAVSRSQRAGLQFPVGRIHRHLKSRTTSHGRVGATAAVYSAAILEYLTAEVLELAGNASKDLKVKRITPRHLQLAIRGDEELDSLIKATIAGGGVIPHIHKSLIGKKGQQKTV

SEQ ID NO: 1207 - protein, 67 aa, Homo sapiens
RCDEGVGGGISPWVRLAFSLPCLLELQRNSKWLAVRLERTPERPRQRRFPARREPACSSQWAVFIDT

SEQ ID NO: 1208 - protein, 60 aa, Homo sapiens
DNKESRHPLDSLLLSFLPNQRFVDVWNDTTTSNCSLDERIQFFISTNSKLQVTRGNTLYL

SEQ ID NO: 1209 - protein, 64 aa, Homo sapiens
IRPTGNCKPALCERETAFVLAFPESFPALPPAISNSAEAQASKAEKRLIGPTVRSHHLLLRRTA

SEQ ID NO: 1210 - protein, 53 aa, Homo sapiens
ILGVDEYGPLGTASRLSASGKPPLSWPFRSPFQPYRQPFRIPLKLKQARQRKG

SEQ ID NO: 1211 - protein, 99 aa, Homo sapiens
  variant (1)...(99): Xaa = Any amino acid
PPLDPGAQGGGGEHQRWRSQVVPGDSQESGVRRLQDLSRLCRYLTAFFTLLLLGSEQMALPCTVTKTMXSLEQXXDXWXHVFSFLXGMAPLKYSRXALP

SEQ ID NO: 1212 - protein, 86 aa, Homo sapiens
  variant (1)...(86): Xaa = Any amino acid
TPTVEVPGSPGRQSGVWGEEASRPLKALQVFNCILHSLVVGVRTDGPALHSYKNDGXPGAXXRXLXPRLQLSXGNGSLEVLQAXTP

SEQ ID NO: 1213 - protein, 64 aa, Homo sapiens
  variant (1)...(64): Xaa = Any amino acid
GSXCLEYFKGAIPXRKLKTWXQXSXXCSRXAIVFVTVQGRAICSDPNNKRVKNAVKYLQSLERS

SEQ ID NO: 1214 - protein, 84 aa, Homo sapiens
PPLDPGAQGGGGEHQRWRSQVVPGDSQESGVRRLQDLSRLCRYLTAFFTLLLLGSEQMALPCTVTKTMASLEQSSDVWYHVFSF

SEQ ID NO: 1215 - protein, 71 aa, Homo sapiens
TPTVEVPGSPGRQSGVWGEEASRPLKALQVFNCILHSLVVGVRTDGPALHSYKNDGIPGAVLRCLVPRLQL

SEQ ID NO: 1216 - protein, 199 aa, Homo sapiens
HLIYKCGGIDKRTIEKFGKEAAEMGKGSFKYAWVLDKLKAERERGITIDISLWKFETSKYYVTIIDAPGHRDFIKNMITGTSQADCAVLIVAAGVGEFEAGISKNGQTREHALLAYTLGVKQLIVGVNKMDSTEPPYSQKRYEEIVKEVSTYIKKIGYNPDTVAFVPISGWNGDNMLEPSANMPWFKGWKVTRKDGNAS

SEQ ID NO: 1217 - protein, 76 aa, Homo sapiens
TGIAILTGDFPSLEPRHVSTWLQHVVTIPTRNWHKCYCVGVVANFLNVSADFLNNFLISLLAVGWLSGIHFVNTDN

SEQ ID NO: 1218 - protein, 122 aa, Homo sapiens
LFHTQCVSQKGMLSGLPILGDTSFKFTNTSSNNQDSTVSLRCPCNHVFDKVSVSWGINDSHIVLAGLKFPQGDINGDTTFTLSFQFIQDPGILEGALSHLSSLLPKFFNGSFVDATAFIDQM

SEQ ID NO: 1219 - protein, 56 aa, Homo sapiens
YLLVSNFHKEISMVIPRSRSAFSLSKTQAYLKEPFPISAASFPNFSMVLLSMPPHL

SEQ ID NO: 1220 - protein, 62 aa, Homo sapiens
VFLSPWVKSESGSLCLSVLVYCWSESKFLIKAVDLALTVYADIGETIWLFQTSQDLSKKTWL

SEQ ID NO: 1221 - protein, 86 aa, Homo sapiens
EPSQQLLSRIYSLTSNKQALRDTESQIQILPMGIKRLRLSPHLENYLHHKYIITGSLYEADTKCYRHSQNIILGNNVIKMPNLSQQ

SEQ ID NO: 1222 - protein, 95 aa, Homo sapiens
  variant (1)...(95): Xaa = Any amino acid
PLXVALAQRKEERQAHLTNQYMQRMASVRAVPNPVINPYQPAPPSGYFMAAIPQTQNXAAYYPPSQIAQLRPSPRWTAQGARPHPFQNMPGAIRP

SEQ ID NO: 1223 - protein, 115 aa, Homo sapiens
TLPPDRMKFISTSLLLMLLVSSLSPVQGVLEVYYTSLGCRCVQESSVFIPRRFIDRIQILPRGNGCPRKEIIVWKKNKSIVCVDPQAEWIQRMMEVLRKRSFSTLPVPVFKRKIP

SEQ ID NO: 1224 - protein, 51 aa, Homo sapiens
IFSRKKNFPIQISMRLCKNNLAEADGANSSFFTHSTLYTLGVCILIHQGGK

SEQ ID NO: 1225 - protein, 64 aa, Homo sapiens
SSSRHLCFSCCWSAASLQSKVFWRSITQAWGVDVSKRAQSLSLDASLIEFKSCPVGMVVQEKKS

SEQ ID NO: 1226 - protein, 55 aa, Homo sapiens
EKEVFQLYQFQCLRERFPDADISTKNTCILPLSLLWILVLCLVKSFPGKRTSPYK

SEQ ID NO: 1227 - protein, 51 aa, Homo sapiens; identical to SEQ ID NO: 1145

SEQ ID NO: 1228 - protein, 73 aa, Homo sapiens
YSIFFCHFLHQQPGRLHLMEKIYDCFMTFLNYLFFIPHLRFWWSPFCIIVLRMIKKITTRDNTEPIPFIFLQG

SEQ ID NO: 1229 - protein, 70 aa, Homo sapiens
SFSLTLNVENVAIVAACVVTLLLLSNFLTLKKGRMSASECDFLLTCSLDRLFSIVFFFVIFSINNQGDCT

SEQ ID NO: 1230 - protein, 82 aa, Homo sapiens
ECHEAVIYLFHQVQSPWLLMEKMTKKNTILKSLSKEQVSRKSHSEALILPFFSVRKLLKRRSVTTQAATMATFSTFNVREKE

SEQ ID NO: 1231 - protein, 72 aa, Homo sapiens
AMLFLQKTDGCWLFRASLMGCGNSKNVPQCQPCRKINGMGSVLSLVVIFFIILKTMMQKGLHQKRRCGIKKR

SEQ ID NO: 1232 - protein, 50 aa, Homo sapiens
YSIFFCHFLHQQPGRLHLMEKIYDCFMTFLNYLFLFHIYVFGGVPFASLF

SEQ ID NO: 1233 - protein, 94 aa, Homo sapiens
LSFLEVLCTYAPHLYLAFAWSDHSSFSLTLNVENVAIVAACVVTLLLLSNFLTLKKGRMSASECDFLLTCSLDRLFSIVFFFVIFSINNQGDCT

SEQ ID NO: 1234 - protein, 53 aa, Homo sapiens
  variant (1)...(53): Xaa = Any amino acid
XMLFLQKTDGCWLFRASLMGCGNSKNVPQCQPCRKINGMGSVLSLVVIFFYHP

SEQ ID NO: 1235 - protein, 59 aa, Homo sapiens; identical to SEQ ID NO: 1184

SEQ ID NO: 1236 - protein, 91 aa, Homo sapiens
ECHEAVIYLFHQVQSPWLLMEKMTKKNTILKSLSKEQVSRKSHSEALILPFFSVRKLLKRRSVTTQAATMATFSTFNVREKELWSLHAKAR

SEQ ID NO: 1237 - protein, 55 aa, Homo sapiens
PRLLPAPPWRRATSCLTARSSPLAMSGSAALRHSSSLPSWAWSPVASTKLPSTPS

SEQ ID NO: 1238 - protein, 54 aa, Homo sapiens
RSRSLLLLSASTPCGSAAPSWPRCPPSSRCGSASRSMTSPAPPSSTANASRRTM

SEQ ID NO: 1239 - protein, 147 aa, Homo sapiens
TAASSSSLEKSYELPDGQVITIGNERFRCPEALFQPSFLGMESCGIHETTFNSIMKCDVDIRKDLYANTVLSGGTTMYPGIADRMQKEITALAPSTMKIKIIAPPERKYSVWIGGSILASLSTFQQMWISKQEYDESGPSIVHRKCF

SEQ ID NO: 1240 - protein, 135 aa, Homo sapiens
KHLRWTMEGPDSSYSCLLIHICWKVDSEARMEPPIHTEYLRSGGAMILIFIVLGARAVISFCILSAMPGYMVVPPDSTVLAYRSLRMSTSHFMMELKVVSWMPQDSMPRKEGWKSASGQRNRSLPMVMTWPSGSS

SEQ ID NO: 1241 - protein, 151 aa, Homo sapiens
IVRLEAFAVDDGGAGLVILLLADPHLLEGGQRGQDGAADPHGVLALRRSNDLDLHCAGCQGSDLLLHPVGNARVHGGAARQHCVGVQVFADVHVTLHDGVEGSFVDATGLHAQEGRLEECLRAAEPLIANGDDLAVRQLVALLQGGAGSSR

SEQ ID NO: 1242 - protein, 85 aa, Homo sapiens
  variant (1)...(85): Xaa = Any amino acid
PPLDPGAQGGGGEHQRWRSQVVPGDSQESGVRRLQDLSRLCRYLTAFFTLLLXGSEQMALPCXVTKTMASLEQSSDVWYHVFSFL

SEQ ID NO: 1243 - protein, 72 aa, Homo sapiens
  variant (1)...(72): Xaa = Any amino acid
TPTVEVPGSPGRQSGVWGEEASRPLKALQVFNCILHSLVXGVRTDGPALXSYKNDGIPGAVLRCLVPRLQLS

SEQ ID NO: 1244 - protein, 50 aa, Homo sapiens
  variant (1)...(50): Xaa = Any amino acid
RKLKTWYQTSEDCSRDAIVFVTXQGRAICSDPXNKRVKNAVKYLQSLERS

SEQ ID NO: 1245 - protein, 115 aa, Homo sapiens; identical to SEQ ID NO: 1143

SEQ ID NO: 1246 - protein, 55 aa, Homo sapiens; identical to SEQ ID NO: 1144

SEQ ID NO: 1247 - protein, 51 aa, Homo sapiens
  variant (1)...(51): Xaa = Any amino acid
XHAYLYGEVLFPGKDLTKHKTKIQSRDKGRMQVFLVEISASGNLSLKHWNW

SEQ ID NO: 1248 - protein, 62 aa, Homo sapiens
  variant (1)...(62): Xaa = Any amino acid
VFLSPWVKSESGSLCXSVLVYCWSESKFLIKAVDLALTVYAXIGETIWLFQTSQDXSKXTWL

SEQ ID NO: 1249 - protein, 86 aa, Homo sapiens
  variant (1)...(86): Xaa = Any amino acid
EPSQQLLSRIYSLTSNKQALXDTESQIQILPMGIKRLRLSPHLENYLHHKYIITGSLYEADTKCYRHSQNIILGNNVIKMPNLSQQ

SEQ ID NO: 1250 - protein, 69 aa, Homo sapiens [sequence omitted]

SEQ ID NO: 1251 - protein, 102 aa, Homo sapiens
LPTSPSALASYSPSTTDMAQSLALSLLILVLAFGIPRTQGSDGGAQDCCLKYSQRKIPAKVVRSYRKQEPSLGCSIPAILFLPRKRSQAELCADPKELWVQQ

SEQ ID NO: 1252 - protein, 77 aa, Homo sapiens [sequence omitted]

SEQ ID NO: 1253 - protein, 60 aa, Homo sapiens [sequence omitted]

SEQ ID NO: 1254 - protein, 115 aa, Homo sapiens; identical to SEQ ID NO: 1143

SEQ ID NO: 1255 - protein, 55 aa, Homo sapiens
  variant (1)...(55): Xaa = Any amino acid
EKEVLQLYQFQCLRERFPDADISTKNTCILPLSLLWILVLCLVKSFPGKRXSPYK

SEQ ID NO: 1256 - protein, 51 aa, Homo sapiens
  variant (1)...(51): Xaa = Any amino acid
SHAYLYGEXLFPGKDLTKHKTKIQSRDKGRMQVFLVEISASGNLSLKHWNW

SEQ ID NO: 1257 - protein, 64 aa, Homo sapiens
PNHFFFYFNSLFFFSSADRRTMLDLGLEHVLFHSFSTMPAITSSWKKAKISITDKMPKNRDCML

SEQ ID NO: 1258 - protein, 59 aa, Homo sapiens
SWGGSGKFVSVSSSSSSWIGIISMSSSFFGWEDVSVSPTTSSFISIVCSFFLLLTGELC

SEQ ID NO: 1259 - protein, 71 aa, Homo sapiens
HSSPVSRRKKEQTIEIKEEVVGLTETSSQPKNEEDIEIIPIQEEEEEETETNFPEPPQDQESSPIENDSSP

SEQ ID NO: 1260 - protein, 94 aa, Homo sapiens
  variant (1)...(94): Xaa = Any amino acid
KMESXNFIRAHTPYINIXNYEPANPXEKNSPSTQYCYSIQSLFLGILSVMLIFAFFQELVIAGIVENEWKRTCSRPKSNIVLLSAEEKKNRLLK

SEQ ID NO: 1261 - protein, 164 aa, Homo sapiens
LNMLGEKLLGPNASPDGLIPWTRFCKENINDKNFPFWLWIESILELIKKHLLPLWNDGCIMGFISKERERALLKDQQPGTFLLRFSESSREGAITFTWVERSQNGGEPDFHAVEPYTKKELSAVTFPDIIRNYKVMAAENIPENPLKYLYPNIDKDHAFGKYYS

SEQ ID NO: 1262 - protein, 72 aa, Homo sapiens
RTSSRGPSCCGSVRAPGKGPSHSHGWSGPRTEANLTSMRLNPTRRKNFLLLLSLTSFAITKSWLLRIFLRIP

SEQ ID NO: 1263 - protein, 120 aa, Homo sapiens
GVILSKGMVFVNIWIQILQGILRNILSSHDFVIANDVRESNSRKFFLRVGFNRMEVRFASVLGPLHPCECDGPFPGALTEPQQEGPRLLVLQQGTLSLLADEAHDAPIIPEREQVFFNEF

SEQ ID NO: 1264 - protein, 114 aa, Homo sapiens
GSTAWKSGSPPFWDRSTHVNVMAPSRELSLNRSRKVPGCWSFNRARSRSLLMKPMMHPSFQRGSRCFLMSSRMLSIQSQKGKFLSFIFSLQNLVHGMRPSGLALGPRSFSPNMF

SEQ ID NO: 1265 - protein, 88 aa, Homo sapiens
TLPPDRMKFISTSLLLMLLVSSLSPVQGVLEVYYTSLRCRCVQESSVFIPRRFIDRIQILPRGNGCPRKEIIVWKKNKSIVCVDPQAE

SEQ ID NO: 1266 - protein, 75 aa, Homo sapiens
CVQESSVFIPRRFIDRIQILPRGNGCPRKEIIVWKKNKSIVCVDPQAEWIQRMMEVLRKRSSSTLPVPVFKRKIP

SEQ ID NO: 1267 - protein, 53 aa, Homo sapiens
IFSRKKNFPIQISMRLCKNNLAEADGANSSFFTHSTLYTLGVCILIHQGGKFL

SEQ ID NO: 1268 - protein, 55 aa, Homo sapiens; identical to SEQ ID NO: 1144

SEQ ID NO: 1269 - protein, 52 aa, Homo sapiens
DYVKITLQKLMGQTQASSLTAPYIHLEFAFLFIREESFFENSYSVISNTGLF

SEQ ID NO: 1270 - protein, 51 aa, Homo sapiens; identical to SEQ ID NO: 1145

SEQ ID NO: 1271 - protein, 112 aa, Homo sapiens
LPEQRDLHTETPSWAPGTMAPLKMLALVTLLLGASLQHIHAARGTNVGRECCLEYFKGAIPLRKLKTWYQTSEDCSRDAIVFVTVQGRAICSDPNNKRVKNAVKYLQSLERS

SEQ ID NO: 1272 - protein, 59 aa, Homo sapiens
AEGPAHRDSLLGSWHHGPTEDAGPGHPPPGGFSAAHPRSSRDQCGPGVLPGVLQGSHSP

SEQ ID NO: 1273 - protein, 146 aa, Homo sapiens
PPLDPGAQGGGGEHQRWRSQVVPGDSQESGVRRLQDLSRLCRYLTAFFTLLLLGSEQMALPCTVTKTMASLEQSSDVWYHVFSFLRGMAPLKYSRQHSRPTLVPRAAWMCCREAPRRRVTRASIFSGAMVPGAQEGVSVCRSLCSG

SEQ ID NO: 1274 - protein, 134 aa, Homo sapiens
TPTVEVPGSPGRQSGVWGEEASRPLKALQVFNCILHSLVVGVRTDGPALHSYKNDGIPGAVLRCLVPRLQLSKGNGSLEVLQAALPAHIGPSSCVDVLQRSPQEEGDQGQHLQWGHGARSPGGSLCVQVPLLRE

SEQ ID NO: 1275 - protein, 115 aa, Homo sapiens
  variant (1)...(115): Xaa = Any amino acid
PPLDPGAQGGGGEHQRWRSQVVPGDSQESGVRRLQDLSRLCRYLTAFFTLLXLGSEQMALPCTVTKTMASLEQSSDVWYHVFSFLRGMAPLKYSRQHSRPTLVPRAAWMCCXXXP

SEQ ID NO: 1276 - protein, 102 aa, Homo sapiens
  variant (1)...(102): Xaa = Any amino acid
TPTVEVPGSPGRQSGVWGEEASRPLKALQVFNCILHSLXVGVRTDGPALHSYKNDGIPGAVLRCLVPRLQLSKGNGSLEVLQAALPAHIGPSSCVDVLXXXP

SEQ ID NO: 1277 - protein, 80 aa, Homo sapiens
  variant (1)...(80): Xaa = Any amino acid
GXXXQHIHAARGTNVGRECCLEYFKGAIPLRKLKTWYQTSEDCSRDAIVFVTVQGRAICSDPNXKRVKNAVKYLQSLERS

SEQ ID NO: 1278 - protein, 64 aa, Homo sapiens
  variant (1)...(64): Xaa = Any amino acid
MIITCVSXTXCXLWLLVIYXLPVXXKVXGXXTXKFXKHLXFSXKLXEGTREFHXXIKXSXGIST

SEQ ID NO: 1279 - protein, 79 aa, Homo sapiens
  variant (1)...(79): Xaa = Any amino acid
QXKXFKLQGXQXNTXLXXKXICFESXCMYIYMINDYNVCVXDXMXSLVVSYILXTCXXQGKXXTXXXIYXTLXFFXEVX

SEQ ID NO: 1280 - protein, 78 aa, Homo sapiens
  variant (1)...(78): Xaa = Any amino acid
NSLVPSXNFXEKXKCXINXXXCXXLTLXXTGXQYITNNQRXHXVXDTHVIIIYHIYIHAXTFKANXFXXQXSIXLXTL

SEQ ID NO: 1281 - protein, 191 aa, Homo sapiens
PKEVRQLAEDFLKDYIHINIGALELSANHNILQIVDVCHDVEKDEKLIRLMEEIMSEKENKTIVFVETKRRCDELTRKMRRDGWPAMGIHGDKSQQERDWVLNEFKHGKAPILIATDVASRGLDVEDVKFVINYDYPNSSEDYIHRIGRTARSTKTGTAYTFFTPNNIKQVSDLISVLREANQAINPKLLQ

SEQ ID NO: 1282 - protein, 51 aa, Homo sapiens
LKQLGINCLISFTKHRDKVAHLLYVIRCKESVCCACFGTASSSSNSMNIIL

SEQ ID NO: 1283 - protein, 51 aa, Homo sapiens
NPVTLLLTLVTMDTHGRPPISPHFSGKLITSSFGFHKNNGFILLLTHDLFH

SEQ ID NO: 1284 - protein, 55 aa, Homo sapiens
LLSPWIPMAGHPSLLIFLVSSSHLLLVSTKTMVLFSFSLMISSIRRISFSSFSTS

SEQ ID NO: 1285 - protein, 107 aa, Homo sapiens
DLHTETPSWAPGTMALLKMLALVTLLLGASLQHIHAARGTNVGRECCLEYFKGAIPLRKLKTWYQTSEDCSRDAIVFVTVQGRAICSDPNNKRVKNAVKYLQSLERS

SEQ ID NO: 1286 - protein, 56 aa, Homo sapiens
PAHRDSLLGSWHHGPTEDAGPGHPPPGGFSAAHPRSSRDQCGPGVLPGVLQGSHSP

SEQ ID NO: 1287 - protein, 141 aa, Homo sapiens
PPLDPGAQGGGGEHQRWRSQVVPGDSQESGVRRLQDLSRLCRYLTAFFTLLLLGSEQMALPCTVTKTMASLEQSSDVWYHVFSFLRGMAPLKYSRQHSRPTLVPRAAWMCCREAPRRRVTRASIFSRAMVPGAQEGVSVCR

SEQ ID NO: 1288 - protein, 113 aa, Homo sapiens
TPTVEVPGSPGRQSGVWGEEASRPLKALQVFNCILHSLVVGVRTDGPALHSYKNDGIPGAVLRCLVPRLQLSKGNGSLEVLQAALPAHIGPSSCVDVLQRSPQEEGDQGQHLQ

SEQ ID NO: 1289 - protein, 106 aa, Homo sapiens
ISTSLLLMLLVSSLSPVQGVLEVYYTSLRCRCVQESSVFIPRRFIDRIQILPRGNGCPRKEIIVWKKNKSIVCVDPQAEWIQRMMEVLRKRSSSTLPVPVFKRKIP

SEQ ID NO: 1290 - protein, 53 aa, Homo sapiens
IFSRKKNFPIQISMRLCKNNLAEADGANSSFFTHSTLYTLGVCILIHRGGKFL

SEQ ID NO: 1291 - protein, 55 aa, Homo sapiens; identical to SEQ ID NO: 1144

SEQ ID NO: 1292 - protein, 51 aa, Homo sapiens
DYVKITLQKLMGQTQASSLTAPYIHLEFAFLFIGEESFFENSYSVISNTGL

SEQ ID NO: 1293 - protein, 51 aa, Homo sapiens; identical to SEQ ID NO: 1145

SEQ ID NO: 1294 - protein, 74 aa, Homo sapiens
DPDCDLQWKETGRWEDDGRLRHQKGQLTLPGILLYWRVTTLGMGCWQGSKSLFLLISYSTNTSSDDFPKLMRMR

SEQ ID NO: 1295 - protein, 56 aa, Homo sapiens
SSVAQVKAMIETKTGIIPETQIVTCNGKRLEDGKMMADYGIRKGNLLFLASYCIGG

SEQ ID NO: 1296 - protein, 74 aa, Homo sapiens
LIVLESKKHRVGQYTSSYPSHPNLTLLISFSLILGNHQKMCSLSKRLKEISFLTPANTPCPGWSPSNTIRCQEE

SEQ ID NO: 1297 - protein, 115 aa, Homo sapiens
TLPPDRMKFISTSLLLMLLVSSLSPVQGVLEVYYTSLRCRCVQESSVFIPRRFIDRIQILPRGNGCPRKEIIVWKKNKSIACVDPQAEWIQRMMEVLRKRSSSTPPVPVFKRKIP

SEQ ID NO: 1298 - protein, 53 aa, Homo sapiens; identical to SEQ ID NO: 1267

SEQ ID NO: 1299 - protein, 55 aa, Homo sapiens
EKEVLQLHQFQCLRERFPDADISTKNTCILPLSLLWILVLCLVKSFPGKRTSPYK

SEQ ID NO: 1300 - protein, 53 aa, Homo sapiens [sequence omitted]

SEQ ID NO: 1301 - protein, 125 aa, Homo sapiens
RYQWVRCNPDSNSANCLEEKGPMFELLPGESNKIPRLRTDLFPKTRIQDLNRIFPLSEDYSGSGFGSGSGSGSGSGSGFLTEMEQDYQLVDESDAFHDNLRSLDRNLPSDSQDLGQHGLEEDFML

SEQ ID NO: 1302 - protein, 59 aa, Homo sapiens
SSESGKIRFKSWILVFGKRSVLRRGILLDSPGSSSNIGPFSSRQFAELLSGLQRTHWYL

SEQ ID NO: 1303 - protein, 100 aa, Homo sapiens
GCHGKHHFRLLVGNPVPFPLGSHSQILIQSRSRSRSLIQSSPQKVGRYDSSPGFSSLEKGQSSDGGSCWIHLEVVRTLVLFLQGSLQNYCLDCSAPIGTW

SEQ ID NO: 1304 - protein, 50 aa, Homo sapiens
SWEPGQVSVGTSLSRWQHSDWPCRRGWLSPLETKTGWLETVTTQVLRWSL

SEQ ID NO: 1305 - protein, 131 aa, Homo sapiens
PDSTGELVLSQSPATLSLSPGERATLSCRASQSVATYLGWSQQKPGQAPRIIIYDTSYRAAGIPARFTGSGSGTDFTLTVSSLEPEDFAVYYCHGRAKWPPSLTFGGGTKVEIKRTVAAPSVFIFPPSDEQ

SEQ ID NO: 1306 - protein, 53 aa, Homo sapiens
RLHRRTCVVTVSSHPVFVSRGESHPLLQGQSECCHLLRLVPTETWPGSQDHHL

SEQ ID NO: 1307 - protein, 78 aa, Homo sapiens
CPRWGTPRYWLGALYRNQQSSPTAPPGLLPLEYFPAAPHCSHSRQWRCSQTHRIHHHPQMLGPCRQEICGEIQGCGWF

SEQ ID NO: 1308 - protein, 134 aa, Homo sapiens [sequence omitted]

SEQ ID NO: 1309 - protein, 66 aa, Homo sapiens
ASSSPRIRLTSSFAFSVACLLWCMMPKVGNTQVLAGGTISESAKLTHCTTWAAASGVLPRSSSLLT

SEQ ID NO: 1310 - protein, 141 aa, Homo sapiens
QTNRTPEFLRKFPAGKVPAFEGDDGFCVFESNAIAYYVSNEELRGSTPEAAAQVVQWVSFADSDIVPPASTWVFPTLGIMHHNKQATENAKEEVRRILGLLDAYLKTRTFLVGERVTLVDITVVCTLLWLYKQVLEPSFHQ

SEQ ID NO: 1311 - protein, 61 aa, Homo sapiens
CHKRSLPICTYSQEEHLYGKDGSPVSLPYTLQGLSEASLMRCLKPGHGYKQLHGSKKFCPF

SEQ ID NO: 1312 - protein, 51 aa, Homo sapiens
SIFWGYDGLTFIRKYGFILIVASSSGGVNHFIFTLTWFEFLSHYCIYFAFP

SEQ ID NO: 1313 - protein, 101 aa, Homo sapiens; identical to SEQ ID NO: 930

SEQ ID NO: 1314 - protein, 150 aa, Homo sapiens; identical to SEQ ID NO: 928

SEQ ID NO: 1315 - protein, 115 aa, Homo sapiens; identical to SEQ ID NO: 1143

SEQ ID NO: 1316 - protein, 55 aa, Homo sapiens; identical to SEQ ID NO: 1144

SEQ ID NO: 1317 - protein, 51 aa, Homo sapiens; identical to SEQ ID NO: 1145

SEQ ID NO: 1318 - protein, 68 aa, Homo sapiens
PPAYAACHTGDRFSRRARRCWCGWKKGNRKQKKSLKESCHFLLVRIPDLGEVLESSSLFLLLPLLGLE

SEQ ID NO: 1319 - protein, 101 aa, Homo sapiens; identical to SEQ ID NO: 930

SEQ ID NO: 1320 - protein, 137 aa, Homo sapiens
YINIYNCEPANPSEKNSPSTQYCYSIQSLFLGILSVMLIFAFFQELVIAGIVENEWKRTCSRPKSNIVLLSAEEKKEQTIEIKEEVVGLTETSSQPKNEEDIEIIPIQEEEEEETETNFPEPPQDQESSPIENDSSP

SEQ ID NO: 1321 - protein, 59 aa, Homo sapiens
NKKAMLVECTVHIGGARLITIRLLASPVQSFLWKAVDFSLASLSSSVSTYRISRSQPYR

SEQ ID NO: 1322 - protein, 64 aa, Homo sapiens
TAKRSKIRRQCLWNVQCILAAHASLRFACLLLLFNRFFGRQWIFLLRLCLLQFRLIEFLDLSHI

SEQ ID NO: 1323 - protein, 57 aa, Homo sapiens
EGNACGMYSAYWRRTPHYDSPACFSCSIVSLEGSGFFSCVSVFFSFDLSNFSISAIS

SEQ ID NO: 1324 - protein, 51 aa, Homo sapiens
RRQRRKRKIHCLPKKRLNRRSKQANRNEACAANMHCTFHKHCLLILLLLAV

SEQ ID NO: 1325 - protein, 64 aa, Homo sapiens
  variant (1)...(64): Xaa = Any amino acid
LNILNXALLSVELLYFTFSAFGDHYLIEFVEIDFPDRSLFFNEQMIRNNLTPYMTMELNKLTLI

SEQ ID NO: 1326 - protein, 100 aa, Homo sapiens
LNKRGTNFQFVKLQSRKYWCLLPCEFFLRHAEKMYARDQKDGSKLCHVTCNKIFSSRFFLCWQIISPCSFHSLILAFRVTMIILPMWFLRKKDQFFVCSR

SEQ ID NO: 1327 - protein, 52 aa, Homo sapiens
NSKAESIGACYLVNSSLDMQRKCMQETKKMAPSYVMLPVIKSFLLDSFYVGR

SEQ ID NO: 1328 - protein, 59 aa, Homo sapiens; identical to SEQ ID NO: 1321

SEQ ID NO: 1329 - protein, 64 aa, Homo sapiens; identical to SEQ ID NO: 1322

SEQ ID NO: 1330 - protein, 57 aa, Homo sapiens; identical to SEQ ID NO: 1323

SEQ ID NO: 1331 - protein, 51 aa, Homo sapiens; identical to SEQ ID NO: 1324

SEQ ID NO: 1332 - protein, 50 aa, Homo sapiens
DRYWYSFIIETKRSALLDFPLFVLKGIKDCRFPALSSRGHYEQIKWKDKF

SEQ ID NO: 1333 - protein, 51 aa, Homo sapiens
WPREDRAGNLQSLIPFRTKSGKSSKADLLVSIIKEYQYRSQKRSVSLQGYF

SEQ ID NO: 1334 - protein, 90 aa, Homo sapiens
PKEVRQLAEDFLKDYIHINIGALELSANHNILQIVDVCHDVEKDEKLIRLMEEIMSEKENKTIVFVETKRRCDELTRKMRRDGWPAMGIH

SEQ ID NO: 1335 - protein, 52 aa, Homo sapiens
PWIPMAGHPSLLIFLVSSSHLLLVSTKTMVLFSFSLMISSIRRISFSSFSTS

SEQ ID NO: 1336 - protein, 166 aa, Homo sapiens
  variant (1)...(166): Xaa = Any amino acid
RQFVTATDVVRGNPKLNLAFIANLFNRYPALHKPENQDIDWGALEGETREERTFRNWMNSLGVNPRVNHLYSDLSDALVIFQLYEKIKVPVDWNRVNKPPYPKLGGNMKKLENCNYAVELGKNQAKFSLVGIGGQDLNEGNRTLTLALIWQLMRRYTLNILXEIGG

SEQ ID NO: 1337 - protein, 76 aa, Homo sapiens
LPNQGQCESAVSFIEILSTDANQGELRLILPQFYRVVTILKLLHIASQFGVWRFVYSVPVNRNFDLFIELEDDQGI

SEQ ID NO: 1338 - protein, 73 aa, Homo sapiens
VTVQMIDSRVNTQGVHPVPKCPLFSRLTFKSPPVNVLVLWFVQGRVSVKEVGNKSQVQLGVPSDNICGCDKLP

SEQ ID NO: 1339 - protein, 68 aa, Homo sapiens
LTRGLTPREFIQFLNVRSSLVSPSRAPQSMSWFSGLCRAGYLLKRLAIKAKFNLGFPRTTSVAVTNCR

SEQ ID NO: 1340 - protein, 60 aa, Homo sapiens
WRGSGLLPQVQPKEDSRQGCPQLPEAGTKLRLLHPSYPVLAPQALSGRAMCRPKGALGAA

SEQ ID NO: 1341 - protein, 95 aa, Homo sapiens
LASYSPSTTDMAQSLALSLLTLVLAFGIPRTQGSDGGAQDCCLKYSQRKIPAKVVRSYRKQEPSLGCSIPAILFLPRKRSQAELCADPKELWVQQ

SEQ ID NO: 1342 - protein, 50 aa, Homo sapiens
AWFLLPVAADNLGGNLPLAVLEATVLSPSITALGPGDAKGQNQGKEAQSQ

SEQ ID NO: 1343 - protein, 102 aa, Homo sapiens [sequence omitted]

SEQ ID NO: 1344 - protein, 60 aa, Homo sapiens; identical to SEQ ID NO: 1340

SEQ ID NO: 1345 - protein, 50 aa, Homo sapiens
AWFLLPVAADNLGGNLPLAVLEATVLSPSITALGPGDAKGQNQDKEAQSQ

SEQ ID NO: 1346 - protein, 76 aa, Homo sapiens
TKLVMMQKLLKCSRLVLALALILVLESSVQGYPTQRARYQWVRCNPDSNSANCLEEKGPMFELLPGESNKIPRLRT

SEQ ID NO: 1347 - protein, 68 aa, Homo sapiens
CRSYSNAVGLSWLLPSSWFWNPQFKVILRREPGTNGCAAIQTVILQTALKKKDQCSNYFQVNPTRSPV

SEQ ID NO: 1348 - protein, 87 aa, Homo sapiens
ILTLYSEPSFNTMVSFLRASRSPVRSMVIGPGALSQTRVSRVTTTLGAFGSVTTGPSPSSVFLYLIRLSSSLSISCSSFRDFCGGGL

SEQ ID NO: 1349 - protein, 55 aa, Homo sapiens
HNGFLFEGFQISSKVHGDWSRGTLTNQGEPGDNDIGGFRICHHRTISQQRFLVLN

SEQ ID NO: 1350 - protein, 120 aa, Homo sapiens
LKKPQSPHVEEDDDDELDSKLNYKPPPQKSLKELQEMDKDDESLIKYKKTLLGDGPVVTDPKAPNVVVTRLTLVCESAPGPITMDLTGDLEALKKETIVLKEGSEYRVKIHFKVNRDIVS

SEQ ID NO: 1351 - protein, 124 aa, Homo sapiens
IMHLSFVDNLNVEVLSVSLVHLILEKALDQSGLMILYATGNESALWNCKHQGWGKHNCDHAEDAGVICSKGADLSLRLVDGVTECSGRLEVRFQGEWGTICDDGWDSYDAAVACKQLGCPTAVP

SEQ ID NO: 1352 - protein, 69 aa, Homo sapiens
RGGNMCSGRIEIKFQGRWGTVCDDNFNIDHASVICRQLECGSAVSFSGSSNFGEGSGPIWFDDLICNRK

SEQ ID NO: 1353 - protein, 80 aa, Homo sapiens
LHLPVSGSDLLPLSKSLQHPQHDHSYAFPILDVCSSRELTHFRLHIRSSNQIGPEPSPKLDEPEKLTALPHSSCLQMTDA

SEQ ID NO: 1354 - protein, 59 aa, Homo sapiens
ESNKIPRLRTDLFPKTRIQDLNRIFPLSEDYSGSGFGSGSGSGSGSGSGFLTEMDKDSN

SEQ ID NO: 1355 - protein, 68 aa, Homo sapiens
SWKASLSSTSWNPCPFPLGSHSQILIQSRSRSRSLIQSSPQKVGRYDSSPGFSSLEKGQSSDGGSCWI

SEQ ID NO: 1356 - protein, 158 aa, Homo sapiens
  variant (1)...(158): Xaa = Any amino acid
MMQKLLKCSRVVLALALILVLESSVQGYPTQRARYQWVRCNPDSNSANCLEEKGPMFXLLPGESNKIPRLRTDLFPKTRIQDLNRIFXLSEDYSGSGFGSGSXSGSGSGSGFLTEMEQDYQLVDQSDAFHDNLRSLDRNLPSXSXDLGQHGLEEDFML

SEQ ID NO: 1357 - protein, 68 aa, Homo sapiens
  variant (1)...(68): Xaa = Any amino acid
CRSYSNAVGLSWLLPSSWFWNPQFKVILRREPGTNGCAAIQTVILQTALKKKDQCXNYFQVNPTRSPV

SEQ ID NO: 1358 - protein, 64 aa, Homo sapiens
  variant (1)...(64): Xaa = Any amino acid
SSEXGKIRFKSWILVFGKRSVLRRGILLDSPGSSXNIGPFSSRQFAELLSGLQRTHWYLALCVG

SEQ ID NO: 1359 - protein, 103 aa, Homo sapiens
  variant (1)...(103): Xaa = Any amino acid
GCHGKHHFGLLVGNPVPFPLGSHSQILIQXRSRSRSLIQSSPQKXGRYDSSPGFWSLEKGQSSDGGSCWIHLEVVXTLVLFLQGSLQNYCLDCSAPIGTWLSA

SEQ ID NO: 1360 - protein, 123 aa, Homo sapiens
  variant (1)...(123): Xaa = Any amino acid
VMMQKLLKCSRLVLALALILVLESSVQGYPTQRARYQWVRCNPDSNSANCLEEKGPMFELLPGESNKIPRLRTDLFPKTRIQDLNRIFXLSEDYSGSGFGSRSGSGSGSGSGFLTEMEXGLPN

SEQ ID NO: 1361 - protein, 68 aa, Homo sapiens; identical to SEQ ID NO: 1347

SEQ ID NO: 1362 - protein, 64 aa, Homo sapiens
  variant (1)...(64): Xaa = Any amino acid
SSEXGKIRFKSWILVFGKRSVLRRGILLDSPGSSSNIGPFSSRQFAELLSGLQRTHWYLALCVG

SEQ ID NO: 1363 - protein, 104 aa, Homo sapiens
  variant (1)...(104): Xaa = Any amino acid
GLSWKASLSSTSWVIXVPFPLGSHSQILIQSRSGSRSLIQSSPQKXGRYDSSPGFSSLEKGQSSDGGSCWIHLEVVRTLVLFLQGSLQNYCLDCSAPIGTWLSA

SEQ ID NO: 1364 - protein, 148 aa, Homo sapiens
  variant (1)...(148): Xaa = Any amino acid
TXXVMMQKLLKCSRLVLALALILVLESSVQGYPTQRARYQWVRCNPDSNSANCLEEKGPMXELLXGEXNXIPRLRTDLFPKTRIQDLNRIFPLSEDYSGSGFGSGSGSGSGSGSGFLTEMEQDYQLXDESDAFHDNLXSLDRNLPXDS

SEQ ID NO: 1365 - protein, 68 aa, Homo sapiens
  variant (1)...(68): Xaa = Any amino acid
CRSYSNAVGLSWLLPSSWFWNPQFKVILRREPGTNGCAAIQTVILQTALKKKDQCXNYXQVNXTXSPV

SEQ ID NO: 1366 - protein, 103 aa, Homo sapiens
  variant (1)...(103): Xaa = Any amino acid
GCHGKHHFRLXVGNPVPFPLGSHSQILIQSRSRSRSLIQSSPQKVGRYDSSPGFSSLEKGQSSDGGXCXIHLXVVXTLVLFLQGSLQNYCLDCSAPIGTWLSA

SEQ ID NO: 1367 - protein, 64 aa, Homo sapiens
  variant (1)...(64): Xaa = Any amino acid
SSESGKIRFKSWILVFGKRSVLRRGIXLXSPXSSXNIGPFSSRQFAELLSGLQRTHWYLALCVG

SEQ ID NO: 1368 - protein, 50 aa, Homo sapiens
LTLPGGIRVRRRGRGWRSGGDHGVSRPHCASHCDERVLGLRRLLGALVHP

SEQ ID NO: 1369 - protein, 93 aa, Homo sapiens
GDGVGVGAQAATMAYHGLTVPLIVMSVFWGFVGFLVPWFIPKGPNRGVIITMLVTCSVCCYLFWLIAILAQLNPLFGPQLKNETIWYLKYHWP

SEQ ID NO: 1370 - protein, 65 aa, Homo sapiens
TGHQHGNDNSPVRTLRDEPRHQEADEAPEHAHHNERHSEAVIRHGRRLSANPYPVASLGSHQEVS

SEQ ID NO: 1371 - protein, 68 aa, Homo sapiens
  variant (1)...(68): Xaa = Any amino acid
CXSYSNAVGLSWLLPSSWFWNPQFKVILRREPGTNGCAAIQTVILQTALKKKDQCSNYFXVNPTRSPV

SEQ ID NO: 1372 - protein, 143 aa, Homo sapiens
  variant (1)...(143): Xaa = Any amino acid
XMMXKLLKCSRLVLALALILVLESSVQGYPTQRARYQWVRCNPDSNSANCLEEKGPMFELLPXESNKIPRLRTDLFXKTRIQDLNRIFPLSEDYSGSGXXSGSGSGSXSGSGFLTEMEQDYQLXDESDAFHDNLRSLDRNLPS

SEQ ID NO: 1373 - protein, 64 aa, Homo sapiens
  variant (1)...(64): Xaa = Any amino acid
SSESGKIRFKSWILVFXKRSVLRRGILLDSXGSSSNIGPFSSRQFAELLSGLQRTHWYLALCVG

SEQ ID NO: 1374 - protein, 103 aa, Homo sapiens
  variant (1)...(103): Xaa = Any amino acid
GCHGKHHFRXLVGNPVPFPLGSHSQIXIQSRSRXXSLIQSSPQKVGRYDSSPGFSSLXKGQSSDGGSCWIHXEVVRTLVLFLQGSLQNYCLDCSAPIGTWLSA

SEQ ID NO: 1375 - protein, 73 aa, Homo sapiens
RMLSYSSMLPPSGLMLHYTLLGSNLPLRLKALEGRVFKMLDLVQAQILELKAEGFLVAEKKQNLMTFGTPVLR

SEQ ID NO: 1376 - protein, 52 aa, Homo sapiens
LHAAAEWLDAPLHPPWIQPSIKAEGSRGQSIQDVRSGPSPNSRVKSRGVLSG

SEQ ID NO: 1377 - protein, 64 aa, Homo sapiens
WKVGSKEGVMEHQATRRQHGAITKHPLGFCLSRHLALTLDLVTVVWLIPVNIWRQSYLAFASRA

SEQ ID NO: 1378 - protein, 55 aa, Homo sapiens
LKTGVPNVIRFCFFSATKNPSAFNSRIWAWTRSNILNTLPSRAFSLNGRLDPRRV

SEQ ID NO: 1379 - protein, 69 aa, Homo sapiens
KLLKCSRLVLALALILVLESSVQGYPTQRARYQWVRCNPDSNSANCLEEKGPMFELLPGESNKIPRLRT

SEQ ID NO: 1380 - protein, 66 aa, Homo sapiens
SYSNAVGLSWLLPSSWFWNPQFKVILRREPGTNGCAAIQTVILQTALKKKDQCSNYFQVNPTRSPV

SEQ ID NO: 1381 - protein, 58 aa, Homo sapiens [sequence omitted]

SEQ ID NO: 1382 - protein, 109 aa, Homo sapiens; identical to SEQ ID NO: 674

SEQ ID NO: 1383 - protein, 100 aa, Homo sapiens; identical to SEQ ID NO: 675

SEQ ID NO: 1384 - protein, 103 aa, Homo sapiens [sequence omitted]

SEQ ID NO: 1385 - protein, 55 aa, Homo sapiens
HMVRLDGPSSSETQQESQGEGSQDHSSDMEHSVFRAHVVGSIIDDCEHRNSDEEL

SEQ ID NO: 1386 - protein, 97 aa, Homo sapiens
QFLITVPVLTVINYRPHNMRPEDRMFHIRAVILRALSLAFLLSLRGAGAIKADHVSTYAAFVQTHRPTGEFMFEFDEDEMFYVDLDKKETVWHLEEF

SEQ ID NO: 1387 - protein, 55 aa, Homo sapiens; identical to SEQ ID NO: 791

SEQ ID NO: 1388 - protein, 89 aa, Homo sapiens; identical to SEQ ID NO: 677

SEQ ID NO: 1389 - protein, 89 aa, Homo sapiens; identical to SEQ ID NO: 678

SEQ ID NO: 1390 - protein, 59 aa, Homo sapiens; identical to SEQ ID NO: 679

SEQ ID NO: 1391 - protein, 136 aa, Homo sapiens
RSVKLCKHTDTPEPCVFNDLLHILCCVDVGDRVVGPLSHELWKSEALIWEGRIIYQMPVEHVQFIVRHDIQSVQDAREWQVMARCIQQQAPVRKAGKVLNLSLVDKELGELPRQSQRGVNTGHHLWSGYNSPLTPK

SEQ ID NO: 1392 - protein, 124 aa, Homo sapiens
MMTSVYSSLRLSGELSEFFINKTEIEDFPRFPHRGLLLDTSRHYLPLSSILDTLDVMAYNKLNVFHWHLVDDPSFPYESFTFPELMRKGSYNPVTHIYTAQDVKEVIEYARLRGIRVLTEFDTP

SEQ ID NO: 1393 - protein, 52 aa, Homo sapiens
DCLGSSPSSLSTRLRLRTFPAFLTGACCWIHLAITCHSLASWTLWMSWRTIN

SEQ ID NO: 1394 - protein, 59 aa, Homo sapiens
GNGHTLEKNVLVVSVVTPGCNQLPTLESVENYTLTINDDQCLLLSETVWGALRVLYQQD

SEQ ID NO: 1395 - protein, 88 aa, Homo sapiens
GQRRPRSIGERGGGTPGEPGAWTQPELITEAGVQSRVTCSRNKQPLWGHQVERQDDKEGARVLAKAGLLATSAGQRPPRSACPHHAVP

SEQ ID NO: 1396 - protein, 157 aa, Homo sapiens
  variant (1)...(157): Xaa = Any amino acid
LXXKAGDQVPGGQDSALVGPEDRGGPGASGREVEGHRESQERGHSQNSSQRLASSPGSRAAGTSSHSGGTRWRGKTTKRVPVFLRKRGCWPRVLDRGPHALLAPITPFRDCHAESAXRKGDSKRECGQACLRPSGRTPGLTXRRCHHFRFXXLFFFF

SEQ ID NO: 1397 - protein, 156 aa, Homo sapiens
  variant (1)...(156): Xaa = Any amino acid
XXXRLVTRSQAGKTQPWWGLRTEEAQEHRGERWRDTGRARSVDTARTHHRGWRPVPGHVQQEQAATLGAPGGEARRQRGCPCSCESGAAGHECWTEAPTLCLPPSRRSVTVTQNLXTGRETLSGSAAKPASARQGGLPGSLXGGATISALXSFSFS

SEQ ID NO: 1398 - protein, 75 aa, Homo sapiens
  variant (1)...(75): Xaa = Any amino acid
RAEAGLAALPLRVSLPXCRFCVTVTERRDGGKQSVGASVQHSWPAAPLSQEHGHPLCRLASPPGAPRVAACSCCT

SEQ ID NO: 1399 - protein, 111 aa, Homo sapiens
  variant (1)...(111): Xaa = Any amino acid
QSRNGVMGASRAWGPLSSTRGQQPRFRKNTGTLFVVLPLHLVPPEWLLVPAARDPGLDASLCDEFWLCPRSWLSRCPSTSLPDAPGPPLSSGPTKAESCPPGTWSPAFXXR

SEQ ID NO: 1400 - protein, 104 aa, Homo sapiens
  variant (1)...(104): Xaa = Any amino acid
WGQAERGGLCPALVASSPAFARTRAPSLSSCLSTWCPQSGCLFLLHVTRDWTPASVMSSGCVHAPGSPGVPPPLSPMLLGLLCPQAPPRLSLARLGPGHQPXXX

SEQ ID NO: 1401 - protein, 53 aa, Homo sapiens [sequence omitted]

SEQ ID NO: 1402 - protein, 67 aa, Homo sapiens
  variant (1)...(67): Xaa = Any amino acid
KPPFFXLLKRKGPQDTIFEWLMVFKXFRELPAFYLETEKARKILSFLACISRVGANDSKLVSKPIPL

SEQ ID NO: 1403 - protein, 120 aa, Homo sapiens; identical to SEQ ID NO: 715
  variant (1)...(120): Xaa = Any amino acid

SEQ ID NO: 1404 - protein, 52 aa, Homo sapiens; identical to SEQ ID NO: 716
  variant (1)...(52): Xaa = Any amino acid

SEQ ID NO: 1405 - protein, 60 aa, Homo sapiens; identical to SEQ ID NO: 717
  variant (1)...(60): Xaa = Any amino acid

SEQ ID NO: 1406 - protein, 52 aa, Homo sapiens [sequence omitted]

SEQ ID NO: 1407 - protein, 75 aa, Homo sapiens
SSHLLSYIHLGIPISNVSLEIRAPGGQVTEGQKLILLCSVAGGTGNVTFSWYREATGTSMGKKTQRSLSAELEIP

SEQ ID NO: 1408 - protein, 63 aa, Homo sapiens
DIQMSLSTFLKDNCYRFPTSIGMLIMDYLYNLHIPTFCIREWNQSNPVPRVSLRVLTCCLISI

SEQ ID NO: 1409 - protein, 68 aa, Homo sapiens
GISSSADRERWVFFPILVPVASLYQENVTFPVPPATEQSRISFCPSVTCPPGARISKLTLEMGIPRWI

SEQ ID NO: 1410 - protein, 56 aa, Homo sapiens; identical to SEQ ID NO: 729

SEQ ID NO: 1411 - protein, 50 aa, Homo sapiens; identical to SEQ ID NO: 730

SEQ ID NO: 1412 - protein, 70 aa, Homo sapiens; identical to SEQ ID NO: 731

SEQ ID NO: 1413 - protein, 53 aa, Homo sapiens; identical to SEQ ID NO: 732

SEQ ID NO: 1414 - protein, 69 aa, Homo sapiens
  variant (1)...(69): Xaa = Any amino acid
XHKICSIDVHESSCCXGAVSTDXWNNWPVRKLIKAANSTXECNRXXQGLISLSDGGLXICXPGXYCVIN

SEQ ID NO: 1415 - protein, 64 aa, Homo sapiens
  variant (1)...(64): Xaa = Any amino acid
XPXQQXSSPPSERLIRPCXXLLHSXVLFAALMSFLTGQLFXKSVDTAPXQQEDSWTSIEHILWX

SEQ ID NO: 1416 - protein, 92 aa, Homo sapiens
  variant (1)...(92): Xaa = Any amino acid
VERTRKPSLSEKKNNPSKWXVSSVYDTIXSWXTNXKSSIRKANKALXXSIAFXCTVCSFDELPHRPIIPXVCGYRSXTARGLMDVYRTYLVX

SEQ ID NO: 1417 - protein, 77 aa, Homo sapiens
  variant (1)...(77): Xaa = Any amino acid
GLEFRKAERFLIWQSSSSSRXLKGLSFCRRTCFSSSNSAVLFGIHPLQVFYVXNHHFNCFTNPAFLIDGSQHLSPTG

SEQ ID NO: 1418 - protein, 75 aa, Homo sapiens
  variant (1)...(75): Xaa = Any amino acid
PFLELHVNLCGQAAFAGVFTGRQRLQACLPAGSVCRRVYMQAXHHVRPLVQGFRGPAQVNRLCSHKFTELXGCAT

SEQ ID NO: 1419 - protein, 74 aa, Homo sapiens
  variant (1)...(74): Xaa = Any amino acid
AAREPVWAGSVCRRVYGQAAFAGVFTGRQRLQACLHAGVXPCETTGPGFQRSCSGESAVFSQVHGAXWVCNMKY

SEQ ID NO: 1420 - protein, 66 aa, Homo sapiens
  variant (1)...(66): Xaa = Any amino acid
LDXGLXPLSVPSVPHSTSISCCTPXQLRELVRTQPIHLSRTSETLDQWSHMVXRLHVNTPANAACR

SEQ ID NO: 1421 - protein, 127 aa, Homo sapiens
  variant (1)...(127): Xaa = Any amino acid
PPRLTSGRWGPTGPXASMPWKGRXWPRMSEPRATWSAQPLAIGEYSRCLSASSELPSTRPGDETEGGSSPSMSARSSKPQETSHNTYVCTPKTNGEREGREARKAWCFLWVHPKQRLLLDTVIDEAW

SEQ ID NO: 1422 - protein, 54 aa, Homo sapiens
VQDLLNPKRLHTTLMYAPQRLMGRGRAGKPGKLGVFSGYTPSSVSFWIQLLMRL

SEQ ID NO: 1423 - protein, 76 aa, Homo sapiens
  variant (1)...(76): Xaa = Any amino acid
TQTDQREMGPHRAXCVNAMEGKXLAQDVRAKGYLECSALSNRGVQQVFECVVRTAVNQARRRNRRRLFSINECKIF

SEQ ID NO: 1424 - protein, 138 aa, Homo sapiens; identical to SEQ ID NO: 778
  variant (1)...(138): Xaa = Any amino acid

SEQ ID NO: 1425 - protein, 60 aa, Homo sapiens; identical to SEQ ID NO: 779
  variant (1)...(60): Xaa = Any amino acid

SEQ ID NO: 1426 - protein, 66 aa, Homo sapiens; identical to SEQ ID NO: 780

SEQ ID NO: 1427 - protein, 55 aa, Homo sapiens
KLYNACIMKKDLPFPYILIELHRLAVHFVIHVIRILDSIAFEICFFLGTKSQLIV

SEQ ID NO: 1428 - protein, 52 aa, Homo sapiens; identical to SEQ ID NO: 787
  variant (1)...(52): Xaa = Any amino acid

SEQ ID NO: 1429 - protein, 56 aa, Homo sapiens; identical to SEQ ID NO: 792

SEQ ID NO: 1430 - protein, 177 aa, Homo sapiens; identical to SEQ ID NO: 793
  variant (1)...(177): Xaa = Any amino acid

SEQ ID NO: 1431 - protein, 56 aa, Homo sapiens; identical to SEQ ID NO: 794

SEQ ID NO: 1432 - protein, 70 aa, Homo sapiens [sequence omitted]

SEQ ID NO: 1433 - protein, 53 aa, Homo sapiens; identical to SEQ ID NO: 796

SEQ ID NO: 1434 - protein, 146 aa, Homo sapiens [sequence omitted]

SEQ ID NO: 1435 - protein, 58 aa, Homo sapiens; identical to SEQ ID NO: 798

SEQ ID NO: 1436 - protein, 69 aa, Homo sapiens
  variant (1)...(69): Xaa = Any amino acid
EGKLSDNRSSIRWVCPCIACQRLAHHQGSGVAVLPCVVCIASLSSACLSPSXPPSPLXLYQVCHGEQEY

SEQ ID NO: 1437 - protein, 50 aa, Homo sapiens
  variant (1)...(50): Xaa = Any amino acid
LWKRAPPGAXGKDCFSLSSPIPGYSRADQQGHFHLTSCCSLMFPWDKRGN

SEQ ID NO: 1438 - protein, 59 aa, Homo sapiens
  variant (1)...(59): Xaa = Any amino acid
VLLXHPLPXGSTRYATGSRNINPRILTLSGNTECTPGMLGETRGILLTINLGSKRPYLI

SEQ ID NO: 1439 - protein, 68 aa, Homo sapiens
  variant (1)...(68): Xaa = Any amino acid
QPQQHPLGLSLYRMPEACASPRVGRSCAALRCVHSLSLLCLLKSFLXTLSLXALPGMPRGAGILILES

SEQ ID NO: 1440 - protein, 54 aa, Homo sapiens
  variant (1)...(54): Xaa = Any amino acid
LSVAIQSVLQGCWVKPGEFYSPLTLGVRGHTSSETLPARAGRSKGXFPXPLRXY

SEQ ID NO: 1441 - protein, 100 aa, Homo sapiens
  variant (1)...(100): Xaa = Any amino acid
NSPGFTQHPWSTLCIATESQDSRINIPAPRGIPGRAXRERVXKKDLSKQRRERLCTQRRAAQLRPTLGDAQASGMRYRDRPSGCCCGCHLISPLIPREHQ

SEQ ID NO: 1442 - protein, 72 aa, Homo sapiens
  variant (1)...(72): Xaa = Any amino acid
YXGAKXGGXGLLNGPPGQVKFQMRYGLLLPRLMVSRIPRVSPSIPGVHSVLPLRVRILGLIFLLPVAYLVEX

SEQ ID NO: 1443 - protein, 115 aa, Homo sapiens
  variant (1)...(115): Xaa = Any amino acid
PMWLVFXLXLARFHTLTSLSQPQETMIGLLLLGEKRTQDTHSEWLSSWTVYLHTPRVFHSLMVLSRDPETICRLSEEKATLSTSLVWPTNRLVVVPVVRSQRRRVPSQEPERANW

SEQ ID NO: 1444 - protein, 50 aa, Homo sapiens
LDGFISRSRDNLPVVRGEGHTQHILGMAHKSPRGGARCEIPEAQGSIPGA

SEQ ID NO: 1445 - protein, 114 aa, Homo sapiens
  variant (1)...(114): Xaa = Any amino acid
QFALSGSWDGTLRLWDLTTGTTTRRFVGHTKDVLSVAFSSDNRQIVSGSRDKTIKLWNTLGVCKYTVQDESHSEWVSCVRFSPNSSNPIIVSCGWDKLVKVWNLAXCKXKTNHI

SEQ ID NO: 1446 - protein, 74 aa, Homo sapiens
  variant (1)...(74): Xaa = Any amino acid
VWPSPLTTGRLSLDLEIKPSSYGIPWVCANTLSRMRATQSGCLVSASRPTAATLSSSPVAGTSWSRYGTWLXAX

SEQ ID NO: 1447 - protein, 60 aa, Homo sapiens
  variant (1)...(60): Xaa = Any amino acid
HKICSRDVHESSCCVGAXSTDFWNNWPVRKPIKAANSTMNAIESQRALLAFXMEDLRFVA

SEQ ID NO: 1448 - protein, 60 aa, Homo sapiens
  variant (1)...(60): Xaa = Any amino acid
ATNLKSSIXKANKALWLSIAFIVLFAALMGFLTGQLFQKSVDXAPTQQEDSWTSLEHILW

SEQ ID NO: 1449 - protein, 58 aa, Homo sapiens
SNIKAIRRHPCHHLTQGGRCWSWVQLGRRSRSRKQGDYGSQSVSKWAGLPGRDYSEGQ

SEQ ID NO: 1450 - protein, 146 aa, Homo sapiens
ANGSAETSALDTGFSLNLSELREYTEGLTEAKEDDDGDHSSLQSGQSVISLLSSEELKKLIEEVKVLDEATLKQLDGIHVTILHKEEGAGLGFSLAGGADLENKVITVHRVFPNGLASQEGTIQKGNEVLSSTASLSRGPRTMMPW

SEQ ID NO: 1451 - protein, 62 aa, Homo sapiens
TVITLFSRSAPPAKLNPRPAPSSLCKMVTWMPSNCFNVASSRTFTSSMSFFNSSELSREITD

SEQ ID NO: 1452 - protein, 109 aa, Homo sapiens
  variant (1)...(109): Xaa = Any amino acid
SPARPLIRSDKMKETIMNQEKLAKLQAQVRIGGKGTARRKKKVVHRTATADDKKLQFSLKKLXVNNISGIEEVNMFTNQGTVIHFNNPKVQASLAANTFTITGHAETKQ

SEQ ID NO: 1453 - protein, 81 aa, Homo sapiens
GELKFFVICCGCSMNHLLLSASSSFPTNAHLCLQFGEFFLVHDCFFHLVGANKGPRGGLGLVLKGSRVDHLRLGAHTRGRK

SEQ ID NO: 1454 - protein, 59 aa, Homo sapiens
  variant (1)...(59): Xaa = Any amino acid
TYSPLQYQRYCLPXTSLRRTEVFCHLLWLFYEPPSSFCEQFLSHQCALVPAVWRVFPGS

SEQ ID NO: 1455 - protein, 153 aa, Homo sapiens
LRDSRDCVTSFVSFDLESLSRTMRHSKRTYCPDWDDKDWDYGKWRSSSSHKRRKRSHSSAQENKRCKYNHSKMCDSHYLESRSINEKDYHSRRYIDEYRNDYTQGCEPGHRQRDHESRYQNHSSKSSGRSGRSSYKSKHRIHHSTSHRRSHGV

SEQ ID NO: 1456 - protein, 60 aa, Homo sapiens [sequence omitted]

SEQ ID NO: 1457 - protein, 98 aa, Homo sapiens
  variant (1)...(98): Xaa = Any amino acid
MRKIIIVDATLMSTEMTTLKDVNLDIAKETMKAGIRTIVASLLVEVEEVVIKANTGFTTVLHIVVHMGYEPFLPARAGAXGEFQHTXRRSRGSELGPX

SEQ ID NO: 1458 - protein, 73 aa, Homo sapiens [sequence omitted]

SEQ ID NO: 1459 - protein, 62 aa, Homo sapiens [sequence omitted]

SEQ ID NO: 1460 - protein, 89 aa, Homo sapiens
STVVNPVFAFITTSSTSTRRLATMVLIPAFMVSLAMSRFTSLSVVISVLINVASTMIIFLIYRPAFQIMAITHFRVIVFAALVLLGTAM

SEQ ID NO: 1461 - protein, 74 aa, Homo sapiens [sequence omitted]

SEQ ID NO: 1462 - protein, 66 aa, Homo sapiens; identical to SEQ ID NO: 822

SEQ ID NO: 1463 - protein, 75 aa, Homo sapiens; identical to SEQ ID NO: 823

SEQ ID NO: 1464 - protein, 59 aa, Homo sapiens; identical to SEQ ID NO: 824

SEQ ID NO: 1465 - protein, 59 aa, Homo sapiens; identical to SEQ ID NO: 825
  variant (1)...(59): Xaa = Any amino acid

SEQ ID NO: 1466 - protein, 63 aa, Homo sapiens; identical to SEQ ID NO: 826
  variant (1)...(63): Xaa = Any amino acid

SEQ ID NO: 1467 - protein, 65 aa, Homo sapiens
KSGVGIPFHMHIDYFLSFFKTCFSGFLNVPDDSLSCRTVNVNLSRGLWLDVNLIKLLCPRNSAPP

SEQ ID NO: 1468 - protein, 107 aa, Homo sapiens
KMEHSDENIQFWMACETYKKIASRWSRISRAKKLYKIYIQPQSPREINIDSSTRETIIRNIQEPTETCFEEAQKIVYMHMERDSYPRFLKSEMYQKLLKTMQSNNSF

SEQ ID NO: 1469 - protein, 74 aa, Homo sapiens
KWSTVTRIFNSGWHVKPIRKLPHGGAEFLGQRSFIRFTSSHSPLERLTLTVRQERLSSGTFRNPLKHVLKKLRK

SEQ ID NO: 1470 - protein, 63 aa, Homo sapiens
LLPLYPEILEMQEWWLGWKIMIDSVEGQAVGVFWGQSRVNTVPHYLDLLAPIPGQMLKKKNVN

SEQ ID NO: 1471 - protein, 181 aa, Homo sapiens
SRAEMLGAINQESRVSKAVEVMIQHVENLKRMYAKEHAELEELKQVLLQNERSFNPLEDDDDCQIKKRSASLNSKPSSLRRVTIASLPRNIGNAGMVAGMENNDRFSRRSSSWRILGSKQSEHRPSLPRFISTYSWADAEEEKCELKTKDDSEPSGEETVERTRKPSLSEKKNNPSKWDVS

SEQ ID NO: 1472 - protein, 109 aa, Homo sapiens
VLINRGNEGRCSLCFDPKIRQLLDLLLNRSLFSIPATIPAFPIFLGKEAIVTLRREDGLEFREAERFLIWQSSSSSRGLKDLSFCRRTCFSSSNSACSLAYILFKFSTC

SEQ ID NO: 1473 - protein, 100 aa, Homo sapiens [sequence omitted]

SEQ ID NO: 1474 - protein, 103 aa, Homo sapiens [sequence omitted]

SEQ ID NO: 1475 - protein, 58 aa, Homo sapiens [sequence omitted]

SEQ ID NO: 1476 - protein, 109 aa, Homo sapiens
HTAPALDIAWCPHNDNVIASGSEDCTVMVWEIPDGGLMLPLREPVVTLEGHTKRVGIVAWHTTAQNVLLSAGCDNVIMVWDVGTGAAMLTLGPEVHPDTIYSVDWSRDG

SEQ ID NO: 1477 - protein, 94 aa, Homo sapiens; identical to SEQ ID NO: 844
  variant (1)...(94): Xaa = Any amino acid

SEQ ID NO: 1478 - protein, 57 aa, Homo sapiens; identical to SEQ ID NO: 845

SEQ ID NO: 1479 - protein, 93 aa, Homo sapiens; identical to SEQ ID NO: 846
  variant (1)...(93): Xaa = Any amino acid

SEQ ID NO: 1480 - protein, 121 aa, Homo sapiens; identical to SEQ ID NO: 847
  variant (1)...(121): Xaa = Any amino acid

SEQ ID NO: 1481 - protein, 54 aa, Homo sapiens; identical to SEQ ID NO: 848
  variant (1)...(54): Xaa = Any amino acid

SEQ ID NO: 1482 - protein, 59 aa, Homo sapiens; identical to SEQ ID NO: 849

SEQ ID NO: 1483 - protein, 67 aa, Homo sapiens; identical to SEQ ID NO: 850
  variant (1)...(67): Xaa = Any amino acid

SEQ ID NO: 1484 - protein, 55 aa, Homo sapiens; identical to SEQ ID NO: 851
  variant (1)...(55): Xaa = Any amino acid

SEQ ID NO: 1485 - protein, 80 aa, Homo sapiens
  variant (1)...(80): Xaa = Any amino acid
QTIYNISSLKSSFKDHRQTSSPLYFSWGDKGKKRKCKLSYSHSENLWFHAILSQLKVTNLRSSDLKLKNQXPYIRMSCCH

SEQ ID NO: 1486 - protein, 76 aa, Homo sapiens
  variant (1)...(76): Xaa = Any amino acid
VLPGTLIPLCQVMHSQILGTRVWTSLGGIILPAIIELXGRLNNIIYMTYVXARLAPGKYSGCTNHCSYTXQXLKES

SEQ ID NO: 1487 - protein, 67 aa, Homo sapiens
  variant (1)...(67): Xaa = Any amino acid
EQWLVHPEYFPGAKRXSTYVMYIMLFNLXNNSIMAGRIMPPKDVHTLVPRICECITWQRGIKVPGRT

SEQ ID NO: 1488 - protein, 67 aa, Homo sapiens
KISNLKMGHNYTFTVQARCLFGNQICGEPAILLYDELGSGADASATQAARSTDVAAVVVPILFLILL

SEQ ID NO: 1489 - protein, 58 aa, Homo sapiens
RWVIITRSPSKQDAFLATRSVGSLPSCCTMSWGLVQMHLQRRLPDLRMLLLWWCPSYS

SEQ ID NO: 1490 - protein, 61 aa, Homo sapiens
DGHHHSSNIRRSGSLRCRCICTRPQLIVQQDGRLPTDLVAKKASCLDGERVIMTHLQVGNF

SEQ ID NO: 1491 - protein, 56 aa, Homo sapiens
SSIRNKMGTTTAATSVDLAACVADASAPDPSSSYSRMAGSPQIWLPKRHLAWTVNV

SEQ ID NO: 1492 - protein, 67 aa, Homo sapiens; identical to SEQ ID NO: 871
  variant (1)...(67): Xaa = Any amino acid

SEQ ID NO: 1493 - protein, 66 aa, Homo sapiens; identical to SEQ ID NO: 872
  variant (1)...(66): Xaa = Any amino acid

SEQ ID NO: 1494 - protein, 60 aa, Homo sapiens
  variant (1)...(60): Xaa = Any amino acid
TSSPAAPTSACASRPPGPSWTWGRAPRTESSQPRGSSSCSARWCLGRCCCXGNDGKNXNX

SEQ ID NO: 1495 - protein, 60 aa, Homo sapiens
  variant (1)...(60): Xaa = Any amino acid
PAVLRHLPPRAPAAPQALPGHGGGHQEPNHHSRGDHPPVLRGGAWDAAAVXETMARTXTX

SEQ ID NO: 1496 - protein, 60 aa, Homo sapiens
  variant (1)...(60): Xaa = Any amino acid
QQSCGTYLRVRQPPPRPFLDMGEGTKNRIITAEGIILLFCAVVPGTLLLXRKRWQERXLX

SEQ ID NO: 1497 - protein, 60 aa, Homo sapiens
  variant (1)...(60): Xaa = Any amino acid
XEXSFLPSFPXQQQRPRHHRAEQEDDPLGCDDSVLGALPHVQEGPGGRLAHAEVGAAGLL

SEQ ID NO: 1498 - protein, 53 aa, Homo sapiens
  variant (1)...(53): Xaa = Any amino acid
XSXRSCHRFXNSSSVPGTTAQNRRMIPSAVMIRFLVPSPMSRKGLGGGWRTRR

SEQ ID NO: 1499 - protein, 51 aa, Homo sapiens
PAYNGDVVFLFTFVYYACVFSTTLGSGRNGQTEDELYPGPAGPACSPLCSP

SEQ ID NO: 1500 - protein, 79 aa, Homo sapiens
QPTMGMLCFCSPSFTMPVSSPPRWGLGGMDRQRMSSTQGLQDLPVAHSARLSTTTPAKEDSIWQSFFQVPSYTCASAFS

SEQ ID NO: 1501 - protein, 71 aa, Homo sapiens
LGTWKKLCQMESSLAGVVVLRRAEWATGRSCRPWVELILCLSIPPRPQRGGEDTGIVNEGEQKHNIPIVGW

SEQ ID NO: 1502 - protein, 67 aa, Homo sapiens
KSRGTGIAGHLEEALPNGILLGRSGSAKASRVGYRQVLQALGRAHPLSVHSSQTPAWWRRHRHSKRR

SEQ ID NO: 1503 - protein, 71 aa, Homo sapiens [sequence omitted]

SEQ ID NO: 1504 - protein, 73 aa, Homo sapiens; identical to SEQ ID NO: 882

SEQ ID NO: 1505 - protein, 74 aa, Homo sapiens
AAREPVWAGSVCRRVYGQAAFAGVFTGRQRLQACLHAGVAPCETTGPGFQRSCSGESAVFSQVHGAEWVCNMKY

SEQ ID NO: 1506 - protein, 66 aa, Homo sapiens
LDDGLQPLSVPSVPHSTSISCCTPTQLRELVRTQPIHLSRTSETLDQWSHMVLRLHVNTPANAACR

SEQ ID NO: 1507 - protein, 98 aa, Homo sapiens
IAGTLKFNPETDYLTGTDGKKFRLEAPDADELPKGEFDPGQDTYQHPPKDSSGQHVDVSPTSQRLQLLEPFDKWDGKDLEDLQILIKVKGKCTTDHIS

SEQ ID NO: 1508 - protein, 62 aa, Homo sapiens
GSAGPPGPCHPTCQKAPGAAGAGWWGSRPHAARCCPWVGAGRCPALGQTPLWEAHLHPEPPA

SEQ ID NO: 1509 - protein, 97 aa, Homo sapiens
DVVSGTLPFDLDEDLQVLQVLAIPLVKRLQELQALAGGAHVHMLPAAVLGWVLVGVLPWVKLPFGKLICIRSLQPELLAIRARQVVGLWVELEGSRN

SEQ ID NO: 1510 - protein, 54 aa, Homo sapiens
EMWSVVHFPLTLMRICRSSRSLPSHLSKGSRSCRRWLVGLTSTCCPLLSLGGCW

SEQ ID NO: 1511 - protein, 137 aa, Homo sapiens
  variant (1)...(137): Xaa = Any amino acid
PCLXSXVTRKRPCLPSMTLMEEMLREAFRCMTQEPMKGPIAMQSGPKPLFRRMSSLVGPTQSFFMRESKTLGAVQIMNGLFHIALGGLLMIPARDLCTHLCDCVVPSLGEALCILFSGSLLAXTEKKLXEVVWSKEK

SEQ ID NO: 1512 - protein, 67 aa, Homo sapiens
  variant (1)...(67): Xaa = Any amino acid
LPXIXGHSEEAMSTLNDTHGGNAERSIQMHDTRANERPYCYAIWSKTTLQEDVFTGGPHAKLLHEGI

SEQ ID NO: 1513 - protein, 137 aa, Homo sapiens
  variant (1)...(137): Xaa = Any amino acid
HFSFDQTTXWSFFSVXARSDPENNIHNASPREGTTQSHRWVHRSLAGIIRRPPRAMWKSPFIIWTAPKVLDSLMKKLCVGPTSEDILLKSGFGPDCIAIGPFIGSCVMHLNASLSISSMSVIEGRHGLFRVTXDXRQ

SEQ ID NO: 1514 - protein, 61 aa, Homo sapiens
  variant (1)...(61): Xaa = Any amino acid
IFPLTKQLXGVFSPXLPGVIRKIIYIMPPPERVPHSHTDGCIDPLLGSSEDPPGQCGRAHS

SEQ ID NO: 1515 - protein, 87 aa, Homo sapiens
LGGPGKGLGHEPGSSEAVTEAREPAPRSWGDLALTPGLGAHLQTTSLPLSAASLCPHRWLSGQCPGPRRCDLPPCQPCCHPCPAAGR

SEQ ID NO: 1516 - protein, 113 aa, Homo sapiens [sequence omitted]

SEQ ID NO: 1517 - protein, 79 aa, Homo sapiens
LKQRNTLKDGIIMIQTLLIILFIIVPIFLLLDKDDSKAGMEEDHTYEGLDIDQTATYEDIVTLRTGEVKWSVGEHPGQE

SEQ ID NO: 1518 - protein, 51 aa, Homo sapiens; identical to SEQ ID NO: 1499

SEQ ID NO: 1519 - protein, 79 aa, Homo sapiens
QPTMGMLCFCSPSFTMPVSSPPRWGLGGMDRQRMSSTQGLQDLPVAHSARLSTTTPAKEDSIWQSFFQVPSYTCASAFL

SEQ ID NO: 1520 - protein, 71 aa, Homo sapiens; identical to SEQ ID NO: 1501

SEQ ID NO: 1521 - protein, 68 aa, Homo sapiens
EKSRGTGIAGHLEEALPNGILLGRSGSAKASRVGYRQVLQALGRAHPLSVHSSQTPAWWRRHRHSKRR

SEQ ID NO: 1522 - protein, 117 aa, Homo sapiens
KKQRRRSHKAIEMEHPLGELRQGAPETDFQDSFFEVLCGVKYSSAKRVTGKGPVKQQFLISSLSSLRIIYPKILCIYKMYTSLQFTKHSLLPNTYPCCMANEMSNPTGYMAVELHSK

SEQ ID NO: 1523 - protein, 68 aa, Homo sapiens
MQSILGYIILREDKDDIKNCCFTGPLPVTLFAEEYLTPHSTSKKLSWKSVSGAPCLNSPSGCSISIAL

SEQ ID NO: 1524 - protein, 88 aa, Homo sapiens; identical to SEQ ID NO: 995

SEQ ID NO: 1525 - protein, 55 aa, Homo sapiens; identical to SEQ ID NO: 791

SEQ ID NO: 1526 - protein, 52 aa, Homo sapiens
GQPGVLLLVQIHELLPGPQAVRVVGDCLPECRALGHGVLGPPKKQEPEPLKA

SEQ ID NO: 1527 - protein, 75 aa, Homo sapiens
LPRTTSSRRKSTRNCNLSFISMVKGSQACCFSSKYTNFSQAHRRSGWSVTASPSVGHSAMASSGRLRSKSQSLSR

SEQ ID NO: 1528 - protein, 76 aa, Homo sapiens
GLERLWLLLLRRPEDAMAECPTLGEAVTDHPDRLWAWEKFVYLDEKQHAWLPLTIEIKDRLQLRVLLRREDVVLGR

SEQ ID NO: 1529 - protein, 52 aa, Homo sapiens
ALRGSGSCFLGGPRTPWPSARHSGRQSPTTRTACGPGRSSCIWTRSSTPGCP

SEQ ID NO: 1530 - protein, 96 aa, Homo sapiens [sequence omitted]

SEQ ID NO: 1531 - protein, 54 aa, Homo sapiens [sequence omitted]

SEQ ID NO: 1532 - protein, 59 aa, Homo sapiens
VSFGGILPGGSHHLLLRTYPFTYLLSCWTSAFQGPEKMGTPMQAQDYHPEDRSCPCCFL

SEQ ID NO: 1533 - protein, 55 aa, Homo sapiens [sequence omitted]

SEQ ID NO: 1534 - protein, 66 aa, Homo sapiens
QGLMSEPQPDLEPPQHGLYMLFLLVLVFFLMGLAGFMICHVLKKKGYRCRTSRGSEPDDAQLQPRE

SEQ ID NO: 1535 - protein, 54 aa, Homo sapiens
  variant (1)...(54): Xaa = Any amino acid
TVICWFSLKNDLWCEAQISGNIRKTWSGGGSSGACITXPAPQLFPASSASCRTY

SEQ ID NO: 1536 - protein, 55 aa, Homo sapiens
  variant (1)...(55): Xaa = Any amino acid
LYVRQLAEEAGKSCGAXSVMQAPEEPPPDQVFRMFPDICASHQRSFFRENQQITV

SEQ ID NO: 1537 - protein, 61 aa, Homo sapiens
CRPPRSRRQTRSSGCFQIFVPHTRDHFSEKTNRSPSKCVAWAPHPVCVLHPSPCYSGPHHD

SEQ ID NO: 1538 - protein, 96 aa, Homo sapiens
  variant (1)...(96): Xaa = Any amino acid
VCPATGRRGWEELWSRXCDAGPRGAAARPGLPDVSRYLCLTPEIIFQRKPTDHRLSASLGRPTPSASCIHLPVTVARIMIKECGSLCLGWDALLCT

SEQ ID NO: 1539 - protein, 115 aa, Homo sapiens [sequence omitted]

SEQ ID NO: 1540 - protein, 50 aa, Homo sapiens; identical to SEQ ID NO: 1444

SEQ ID NO: 1541 - protein, 114 aa, Homo sapiens
QFALSGSWDGTLRLWDLTTGTTTRRFVGHTKDVLSVAFSSDNRQIVSGSRDKTIKLWNTLGVCKYTVQDESHSEWVSCVRFSPNSSNPIIVSRGWDKLVKVWNLANCKLKTNHI

SEQ ID NO: 1542 - protein, 74 aa, Homo sapiens
VWPSPLTTGRLSLDLEIKPSSYGIPWVCANTLSRMRATQSGCLVSASRPTAATLSSSPVAGTSWSRYGTWLTAS

SEQ ID NO: 1543 - protein, 55 aa, Homo sapiens
LYVRQLAEEAGKSCGAGSVMQAPEEPPPDQVFRMFPDTCASHQRSFFRENQQITV

SEQ ID NO: 1544 - protein, 61 aa, Homo sapiens [sequence omitted]

SEQ ID NO: 1545 - protein, 96 aa, Homo sapiens
VCPATGRRGWEELWSRLCDAGPRGAAARPGLPDVSRYLCLTPEIIFQRKPTDHRLSASLGRPTPSASCIHLPVTVARIMIKECGSLCLGWDALLCT

SEQ ID NO: 1546 - protein, 54 aa, Homo sapiens [sequence omitted]

SEQ ID NO: 1547 - protein, 52 aa, Homo sapiens
SPAESLTLSSCALSFTVPPTQDPNFFYSILFPLVNRRAQYDLFSKEPAGIWF

SEQ ID NO: 1548 - protein, 62 aa, Homo sapiens
KKLGSWVGGTVKLRAHELKVSDSAGLHRESCAHHSVQVLSLPRQHRTPAPLLTWIIEFPPKI

SEQ ID NO: 1549 - protein, 62 aa, Homo sapiens
SEVGAALKKLPRRTNRHRSDRDFVIRTRFLPAPLKTGHIVLFCLQEETRWNKRNWDLGLEGQ

SEQ ID NO: 1550 - protein, 62 aa, Homo sapiens
SLEHMNSRLVTLQDFTERAVPIIQSKCFLCPDSTELQPRYLHGSSSFHLKYDSIYFESLLPN

SEQ ID NO: 1551 - protein, 64 aa, Homo sapiens; identical to SEQ ID NO: 1057
  variant (1)...(64): Xaa = Any amino acid

SEQ ID NO: 1552 - protein, 53 aa, Homo sapiens; identical to SEQ ID NO: 1058
  variant (1)...(53): Xaa = Any amino acid

SEQ ID NO: 1553 - protein, 51 aa, Homo sapiens; identical to SEQ ID NO: 1059
  variant (1)...(51): Xaa = Any amino acid

SEQ ID NO: 1554 - protein, 64 aa, Homo sapiens; identical to SEQ ID NO: 1060
  variant (1)...(64): Xaa = Any amino acid

SEQ ID NO: 1555 - protein, 94 aa, Homo sapiens [sequence omitted]

SEQ ID NO: 1556 - protein, 61 aa, Homo sapiens [sequence omitted]

SEQ ID NO: 1557 - protein, 58 aa, Homo sapiens; identical to SEQ ID NO: 1083
  variant (1)...(58): Xaa = Any amino acid

SEQ ID NO: 1558 - protein, 139 aa, Homo sapiens; identical to SEQ ID NO: 1084
  variant (1)...(139): Xaa = Any amino acid

SEQ ID NO: 1559 - protein, 66 aa, Homo sapiens; identical to SEQ ID NO: 1085
  variant (1)...(66): Xaa = Any amino acid

SEQ ID NO: 1560 - protein, 51 aa, Homo sapiens; identical to SEQ ID NO: 1086
  variant (1)...(51): Xaa = Any amino acid

SEQ ID NO: 1561 - protein, 52 aa, Homo sapiens; identical to SEQ ID NO: 1087
  variant (1)...(52): Xaa = Any amino acid

SEQ ID NO: 1562 - protein, 125 aa, Homo sapiens; identical to SEQ ID NO: 1088
  variant (1)...(125): Xaa = Any amino acid

SEQ ID NO: 1563 - protein, 89 aa, Homo sapiens; identical to SEQ ID NO: 1089
  variant (1)...(89): Xaa = Any amino acid

SEQ ID NO: 1564 - protein, 62 aa, Homo sapiens; identical to SEQ ID NO: 1090
  variant (1)...(62): Xaa = Any amino acid

SEQ ID NO: 1565 - protein, 64 aa, Homo sapiens; identical to SEQ ID NO: 1091
  variant (1)...(64): Xaa = Any amino acid

SEQ ID NO: 1566 - protein, 131 aa, Homo sapiens
  variant (1)...(131): Xaa = Any amino acid
LEKXKXXLKNVDENIRXLXGRDPNDXRPIQARLLALSGPXGXRGRGSXLLRRGFXXSXGGPXAXQRDLEGAVXXLGGERXTRRESRQESDPXDDDVKKPXLQXSVVATXKERTRXDXIQXQNMDEKGKQRN

SEQ ID NO: 1567 - protein, 55 aa, Homo sapiens
  variant (1)...(55): Xaa = Any amino acid
GVDSXIVXEDXQXNRETLKGQSXXWAGSXGPEENHARKATRXMMMLKSXHCXLQL

SEQ ID NO: 1568 - protein, 119 aa, Homo sapiens
  variant (1)...(119): Xaa = Any amino acid
XWIXSXRVRSLXVATTEXCNXGFLTSSXSGSLSWRDSLLVXRSPPSXXTAPSRSLCXAXGPPXLXXNPRLSNXLPRPXPXPGPERASNLAWMGLXSFGSRXVSXRMFSSTFLXLXXAFS

SEQ ID NO: 1569 - protein, 53 aa, Homo sapiens
  variant (1)...(53): Xaa = Any amino acid
LPLQGLSVXLXVLXHYXRIHASVIXYHVLXLXQDQKGPAIWLGWASXHSDPAX

SEQ ID NO: 1570 - protein, 73 aa, Homo sapiens [sequence omitted]

SEQ ID NO: 1571 - protein, 56 aa, Homo sapiens [sequence omitted]

SEQ ID NO: 1572 - protein, 194 aa, Homo sapiens; identical to SEQ ID NO: 1106

SEQ ID NO: 1573 - protein, 52 aa, Homo sapiens; identical to SEQ ID NO: 1107

SEQ ID NO: 1574 - protein, 55 aa, Homo sapiens; identical to SEQ ID NO: 1014

SEQ ID NO: 1575 - protein, 66 aa, Homo sapiens; identical to SEQ ID NO: 1109

SEQ ID NO: 1576 - protein, 59 aa, Homo sapiens; identical to SEQ ID NO: 1110

SEQ ID NO: 1577 - protein, 60 aa, Homo sapiens; identical to SEQ ID NO: 1111

SEQ ID NO: 1578 - protein, 85 aa, Homo sapiens
KVSNIKVRILIQLILILTTEKTNSREQQKNKKDLLFSQPKFSSLKVSTRRGVYSSNTFHFSVNIHKLKKKTSWSHLAHTFMQCSL

SEQ ID NO: 1579 - protein, 52 aa, Homo sapiens
TPLLVDTFREENLGWEKRRSFLFFCCSLLFVFSVVNININCINILTLILETF

SEQ ID NO: 1580 - protein, 54 aa, Homo sapiens [sequence omitted]

SEQ ID NO: 1581 - protein, 87 aa, Homo sapiens
QIQCVTLVLCSRQGFLNERHRLPAYGKVSSKGIEVRDRVELWVFIVFHAKPTKSKIEFKLNKLLLQNGRGKRLRKVYENELTYLVKS

SEQ ID NO: 1582 - protein, 85 aa, Homo sapiens; identical to SEQ ID NO: 1132
  variant (1)...(85): Xaa = Any amino acid

SEQ ID NO: 1583 - protein, 56 aa, Homo sapiens; identical to SEQ ID NO: 1133

SEQ ID NO: 1584 - protein, 70 aa, Homo sapiens; identical to SEQ ID NO: 1134
  variant (1)...(70): Xaa = Any amino acid

SEQ ID NO: 1585 - protein, 82 aa, Homo sapiens; identical to SEQ ID NO: 1135
  variant (1)...(82): Xaa = Any amino acid

SEQ ID NO: 1586 - protein, 56 aa, Homo sapiens; identical to SEQ ID NO: 1136

SEQ ID NO: 1587 - protein, 52 aa, Homo sapiens
SYRPAAGRWSPRTACPCPHSPPERGSCSREGNRHTQIVAEGRSTGRVCHRRS

SEQ ID NO: 1588 - protein, 99 aa, Homo sapiens
SVAAEDLFVHYGRDGQAVEAVSEGFPQFDVVASLALIVETIDAVDAGTLVVPTEQEEVLGVLDLIGQQQADGLQGLLAPVHIVPQKEVVALGRETAILK

SEQ ID NO: 1589 - protein, 145 aa, Homo sapiens
  variant (1)...(145): Xaa = Any amino acid
LTENEIRGLCLKSREIFLSQPILXELEAPLKICGDIHGQYYDLLRLFEYGGFPPESNYLFLGDYVDRGKQSLETICLLLAYKIKYPENFFLLRGNHECASINRIYGFYDECKRRYNIKLWKTFTDCFNCLPIAAIVDEKIFCCHG

SEQ ID NO: 1590 - protein, 116 aa, Homo sapiens
  variant (1)...(116): Xaa = Any amino acid
ASPFXWSWRHPSRSAVTYTASTTTFCDYLSMAVSLPRATTSFWGTMWTGASSPWRPSACCWPIRSSTPRTSSCSVGTTSVPASTASMVSTMSARDATTSNCGKPSLTASTACPSRP

SEQ ID NO: 1591 - protein, 62 aa, Homo sapiens; identical to SEQ ID NO: 1220

SEQ ID NO: 1592 - protein, 86 aa, Homo sapiens; identical to SEQ ID NO: 1221

SEQ ID NO: 1593 - protein, 97 aa, Homo sapiens
TKPLYVALAQRKEERQAHLTNQYMQRMASVRAVPNPVINPYQPAPPSGYFMAAIPQTQNRAAYYPPSQIAQLRPSPRWTAQGARPHPFQNMPGAIRP

SEQ ID NO: 1594 - protein, 57 aa, Homo sapiens; identical to SEQ ID NO: 1149

SEQ ID NO: 1595 - protein, 78 aa, Homo sapiens; identical to SEQ ID NO: 1150

SEQ ID NO: 1596 - protein, 130 aa, Homo sapiens
  variant (1)...(130): Xaa = Any amino acid
YKLFFFFFFFFFSTKVYXXETITSCCPXWHTXSPRRVFNSXPXIIFIPKXXPXTIXWLQHXPXNEVPQXAKFYIGXTGKFKXXDGXTIGSXIMSGGXKXWXGMVPSLSXNLLLTWXGSCRILPLGNXXSX

SEQ ID NO: 1597 - protein, 73 aa, Homo sapiens
  variant (1)...(73): Xaa = Any amino acid
TSFFFFFFFFFFPPKFIXXKQSPVAVXXGTLXAPGGSLTXFLXLYSSQKXXXGQXFGYSIXPXMRSPKXLSFT

SEQ ID NO: 1598 - protein, 57 aa, Homo sapiens
  variant (1)...(57): Xaa = Any amino acid
PXYCXRXXFWDEYNXRXGVKDPPGAXSVPXRTATGDCFXXINFGGKKKKKKKKKKLV

SEQ ID NO: 1599 - protein, 69 aa, Homo sapiens
  variant (1)...(69): Xaa = Any amino acid
LVXLXXLXPIIXXXGXFPRGRILQLXLQVRRRFXLNDGTMPXQXFXPPDIXLDPMVXPSXXLNFPXSPM

SEQ ID NO: 1600 - protein, 65 aa, Homo sapiens
MLQYLNMLCQTIPLCNRLHIVFMILIKLYVETECEVKSEHKKIMHDEIAYHFIGYLLCIYTLRPL

SEQ ID NO: 1601 - protein, 64 aa, Homo sapiens
LTHLFLLKRYCPLGGEWESLLHCCSHSERTFPCTYLSTCFNLINATFCIFQTSINSAIKRCSFF

SEQ ID NO: 1602 - protein, 174 aa, Homo sapiens; identical to SEQ ID NO: 1158

SEQ ID NO: 1603 - protein, 56 aa, Homo sapiens; identical to SEQ ID NO: 794

SEQ ID NO: 1604 - protein, 52 aa, Homo sapiens; identical to SEQ ID NO: 1160

SEQ ID NO: 1605 - protein, 54 aa, Homo sapiens; identical to SEQ ID NO: 1161

SEQ ID NO: 1606 - protein, 70 aa, Homo sapiens; identical to SEQ ID NO: 1162

SEQ ID NO: 1607 - protein, 50 aa, Homo sapiens; identical to SEQ ID NO: 1163

SEQ ID NO: 1608 - protein, 143 aa, Homo sapiens; identical to SEQ ID NO: 1164

SEQ ID NO: 1609 - protein, 79 aa, Homo sapiens
  variant (1)...(79): Xaa = Any amino acid
LKQRNTLKDGIIMIXTLLIIXXXIVPIFLLLDKDDSKAGMEEDHTYEGLDIDQTATYEDIVTLRTGEVKWSVGEHPGQE

SEQ ID NO: 1610 - protein, 87 aa, Homo sapiens; identical to SEQ ID NO: 1515

SEQ ID NO: 1611 - protein, 113 aa, Homo sapiens
  variant (1)...(113): Xaa = Any amino acid
WGVRERGWAMSQAAPKQSLRPGSLHPGHGATWLSLLAWVLTYRPLHFPCPQRHYVLIGGCLVNVQALVGVIFLHASLAVILVQQQEDRHDXXXDDQQRXDHDDTILQRVPLLQ

SEQ ID NO: 1612 - protein, 115 aa, Homo sapiens; identical to SEQ ID NO: 1143

SEQ ID NO: 1613 - protein, 55 aa, Homo sapiens; identical to SEQ ID NO: 1144

SEQ ID NO: 1614 - protein, 51 aa, Homo sapiens; identical to SEQ ID NO: 1145

SEQ ID NO: 1615 - protein, 136 aa, Homo sapiens
YLKVIVALGMPGQEDEGALWTQQSAEFRSGKPMVAGTPCFLPLLSACVTHINGNNFFQLLAEVGEAGSLHREGLSSLLLPASFCFGCREWFIHTLIPSPPLVDGGLAFSIPVFWCLPLSATLNHLPWSCCVMGTCL

SEQ ID NO: 1616 - protein, 79 aa, Homo sapiens
TRPTKARSMSPQVSSQSRLTLSSGRVYIAVFNTSRSLWLWGCRGRRTRVRCGHSSPRNSVLGSQWSPAPLASSLCCLPV

SEQ ID NO: 1617 - protein, 73 aa, Homo sapiens
HTSMAITSSNSSQKWERPAACTERGFPLSCSPLRSVLAAESGSSILSFPRLPLWTGVLPFQFLCFGVFPYLLP

SEQ ID NO: 1618 - protein, 57 aa, Homo sapiens
LYLIPQGHCGSGDAGAGGRGCAVDTAVRGIPFWEANGRRHPLLPPSVVCLCDTHQWQ

SEQ ID NO: 1619 - protein, 89 aa, Homo sapiens
LLPTPRRSGRGRQPAPRGAFLSLAPRFVLFWLQRVVHPYSHSLASPCGRGSCLFNSCVLVSSLICYPESPALVLLCDGNMLVNCVTNLL

SEQ ID NO: 1620 - protein, 124 aa, Homo sapiens
KGKTPVHKGRRGNESMDEPLSAAKTERSGEQERGKPLSVQAAGLSHFCEELEEVIAIDVCHTGRQQREEARGAGDHWLPRTEFRGLLCPQRTLVLLPRHPQSHNDLEVLNTAIYTRPELRVNLD

SEQ ID NO: 1621 - protein, 123 aa, Homo sapiens
FRVADKGRHQNTGIEKARPPSTRGGEGMRVWMNHSLQPKQNEAGSKREESPSRCRLPASPTSARSWKKLLPLMCVTQADNRGRKQGVPATIGFPERNSADCCVHSAPSSSCPGIPRATMTLRY

SEQ ID NO: 1622 - protein, 117 aa, Homo sapiens; identical to SEQ ID NO: 1170

SEQ ID NO: 1623 - protein, 117 aa, Homo sapiens; identical to SEQ ID NO: 1171

SEQ ID NO: 1624 - protein, 83 aa, Homo sapiens; identical to SEQ ID NO: 1172

SEQ ID NO: 1625 - protein, 67 aa, Homo sapiens
  variant (1)...(67): Xaa = Any amino acid
LKQRNTLKDGIIMIXTLLIILFIIVPIFLLLDKDDSKAGMEEDHXYEGLDIDQTATYEDIVTLRTGE

SEQ ID NO: 1626 - protein, 52 aa, Homo sapiens
  variant (1)...(52): Xaa = Any amino acid
ITNWVTLNELIKFQAIVHATNSQRPRKLLAEKVVYVGXWIPALLLTIXDFIF

SEQ ID NO: 1627 - protein, 102 aa, Homo sapiens
  variant (1)...(102): Xaa = Any amino acid
LQVLQDAFCXXXYYIHLIINFLLRLCRLGIFXXKEKIWPLLKVCACQNFKKIPHVKVPSASAGDSVLVLLSLDWRSLFPSSLVPVLQLLFLANRCANELPTG

SEQ ID NO: 1628 - protein, 86 aa, Homo sapiens
  variant (1)...(86): Xaa = Any amino acid
ISFSDSVGWAFSXSRKKFGPCSRSVHVKTLRRFPMLRYLQPVLVILSLSFYPWIGVPSFLVHLFQSFNFCFLLTGVQMNYQLGNLE

SEQ ID NO: 1629 - protein, 62 aa, Homo sapiens
  variant (1)...(62): Xaa = Any amino acid
RYLNMGNLLKVLTCTDLEQGPNFFLXXENAQPTESEKEIYNQVNVVXXXAEGILEDLQSYXG

SEQ ID NO: 1630 - protein, 99 aa, Homo sapiens; identical to SEQ ID NO: 1180

SEQ ID NO: 1631 - protein, 57 aa, Homo sapiens; identical to SEQ ID NO: 1181

SEQ ID NO: 1632 - protein, 87 aa, Homo sapiens; identical to SEQ ID NO: 1182

SEQ ID NO: 1633 - protein, 53 aa, Homo sapiens; identical to SEQ ID NO: 1183

SEQ ID NO: 1634 - protein, 59 aa, Homo sapiens; identical to SEQ ID NO: 1184

SEQ ID NO: 1635 - protein, 98 aa, Homo sapiens; identical to SEQ ID NO: 1188
  variant (1)...(98): Xaa = Any amino acid

SEQ ID NO: 1636 - protein, 66 aa, Homo sapiens
KDGIIMIQTLLIILFIIVPIFLLLDKDDSKAGMEEDHTYEGLDIDQTATYEDIVTLRTGEVKWFCR

SEQ ID NO: 1637 - protein, 84 aa, Homo sapiens
  variant (1)...(84): Xaa = Any amino acid
PAPRSWGDLALTPGLGXSPTEPLHFPCPQRHYVLIGGCLVNVQALVGVIFLHASLAVILVQQQEDRHDDEEDDQQRLDHDDTIL

SEQ ID NO: 1638 - protein, 64 aa, Homo sapiens
  variant (1)...(64): Xaa = Any amino acid
CTQVMGRPGSHSWPGCXTYRTTSLPLSAASLCPHRWLSGQCPGPRRCDLPPCQPCCHPCPAAGR

SEQ ID NO: 1639 - protein, 59 aa, Homo sapiens; identical to SEQ ID NO: 1069

SEQ ID NO: 1640 - protein, 51 aa, Homo sapiens
EQNDNTQKFSKWDFPGRANERPYCYAIWSKTTLQEDVFTGGPRAKLLHEGI

SEQ ID NO: 1641 - protein, 82 aa, Homo sapiens
  variant (1)...(82): Xaa = Any amino acid
DFGGCPDYEWALPHCPGGSSDDSSRDLCTHLCDCVVPSLGRHYVYYFRITPGSNGEKLQEVLGQRKNDNEFIXPXCCHFWND

SEQ ID NO: 1642 - protein, 155 aa, Homo sapiens
  variant (1)...(155): Xaa = Any amino acid
DCQKSCSCSPHFVICFIFRSFESKMTTPRNSVNGTFPAEPMKGPIAMQSGPKPLFRRMSSLVGPAQSFFMRESKTLGAVQIMNGLFHIALGGLLMIPAGIYAPICVTVWYPLWGGIMYIISGSLLAATEKNSRKCWVKGKMIMNSLXXFAAISGM

SEQ ID NO: 1643 - protein, 55 aa, Homo sapiens
  variant (1)...(55): Xaa = Any amino acid
IIPEMAAXRXNEFIIIFPLTQHFLEFFSVAARSDPEIIYIMPPQRGYHTVTQMGA

SEQ ID NO: 1644 - protein, 89 aa, Homo sapiens
IPAGIIRRPPRAMWKSPFIIWTAPKVLDSLMKKLCAGPTSEDILLKSGFGPDCIAIGPFIGSAGKVPFTEFLGVVILLSKLLKIKQITK

SEQ ID NO: 1645 - protein, 62 aa, Homo sapiens
SGNNIHNASPERVPHSHTDGCIDPCWNHQKTPQGNVEEPIHNLDSPQSLRFPHEEALRGAHQ

SEQ ID NO: 1646 - protein, 64 aa, Homo sapiens; identical to SEQ ID NO: 1072

SEQ ID NO: 1647 - protein, 58 aa, Homo sapiens
CPSAITIQQLQAGLADREYGRRTRSDENMHATIFTTEHTVFCDRNCRPCWGTRYSRPH

SEQ ID NO: 1648 - protein, 71 aa, Homo sapiens
KSRPTCSHWTDVQVQSPYSSYRQGWLIGSMGEGHAQMKTCMQRFSPLNTLFSVIETVGPAGGQDIHGLTSQ

SEQ ID NO: 1649 - protein, 73 aa, Homo sapiens
GREYLVPQQGRQFLSQKTVCSVVKIVACMFSSERVLLPYSLSASPACSCCMVIALGHQSNDCKSAWIFTCRGY

SEQ ID NO: 1650 - protein, 88 aa, Homo sapiens [sequence omitted]

SEQ ID NO: 1651 - protein, 69 aa, Homo sapiens
  variant (1)...(69): Xaa = Any amino acid
LLLPDTLHRLVDFGMSGLRLHARGCNTMYSKATLGVIDQTEILSRLXNADDIHESSXGRXYQFGPCHXF

SEQ ID NO: 1652 - protein, 57 aa, Homo sapiens [sequence omitted]

SEQ ID NO: 1653 - protein, 66 aa, Homo sapiens
  variant (1)...(66): Xaa = Any amino acid
IRRKFSPVLXMLMTSMNPAXVGXISSDLAIXFNEPLHANLLYFIXXQGILKSVPQENDEGETLSXL

SEQ ID NO: 1654 - protein, 67 aa, Homo sapiens
  variant (1)...(67): Xaa = Any amino acid
KXRECLPLIIFLRNRLKYALXXDEVKKICMQRFIKXDGKVRTDXTYXCWIHGCHQHXQDGREFPSDL

SEQ ID NO: 1655 - protein, 99 aa, Homo sapiens
  variant (1)...(99): Xaa = Any amino acid
RRFACSGSLKXMARSELIXPTXAGFMDVISIXKTGENFRLIYDTKGRFAVHRITPTSMKSEPRHSKIDKAMECVWKQKLYEPVVIPVGRLFRPNEKQVA

SEQ ID NO: 1656 - protein, 115 aa, Homo sapiens; identical to SEQ ID NO: 1194
  variant (1)...(115): Xaa = Any amino acid

SEQ ID NO: 1657 - protein, 70 aa, Homo sapiens; identical to SEQ ID NO: 1195
  variant (1)...(70): Xaa = Any amino acid

SEQ ID NO: 1658 - protein, 63 aa, Homo sapiens; identical to SEQ ID NO: 1196
  variant (1)...(63): Xaa = Any amino acid

SEQ ID NO: 1659 - protein, 50 aa, Homo sapiens; identical to SEQ ID NO: 1197
  variant (1)...(50): Xaa = Any amino acid

SEQ ID NO: 1660 - protein, 92 aa, Homo sapiens; identical to SEQ ID NO: 1198
  variant (1)...(92): Xaa = Any amino acid

SEQ ID NO: 1661 - protein, 55 aa, Homo sapiens; identical to SEQ ID NO: 1199
  variant (1)...(55): Xaa = Any amino acid

SEQ ID NO: 1662 - protein, 115 aa, Homo sapiens; identical to SEQ ID NO: 1143

SEQ ID NO: 1663 - protein, 51 aa, Homo sapiens; identical to SEQ ID NO: 1201
  variant (1)...(51): Xaa = Any amino acid

SEQ ID NO: 1664 - protein, 115 aa, Homo sapiens; identical to SEQ ID NO: 1143

SEQ ID NO: 1665 - protein, 55 aa, Homo sapiens; identical to SEQ ID NO: 1144

SEQ ID NO: 1666 - protein, 51 aa, Homo sapiens; identical to SEQ ID NO: 1145

SEQ ID NO: 1667 - protein, 62 aa, Homo sapiens
  variant (1)...(62): Xaa = Any amino acid
VFLSPWVKSESGSLCLSVLVYCWSESKFLIKXVDLALTVYADIGETIWLFQTSQDLSKKTWL

SEQ ID NO: 1668 - protein, 86 aa, Homo sapiens
  variant (1)...(86): Xaa = Any amino acid
EPSQQXLSRIYSLTSNKQALRDTESQIQILPMGIKRLRLXPHLEXYLHHKYIITGSLYEADTKCYRHSQNIILGNNVIKMPNXSQQ

SEQ ID NO: 1669 - protein, 70 aa, Homo sapiens
RDNVICTPYDISTFLATTSGRHSPKLEKKEIEDFCLCKVLKICSKLIKLSLCSFLQQMIQKKKKKKKKSL

SEQ ID NO: 1670 - protein, 50 aa, Homo sapiens
IICCRKEHKDSFINLEQILRTLHRQKSSISFFSNFGECLPLVVAKNVEIS

SEQ ID NO: 1671 - protein, 115 aa, Homo sapiens
YDEDRLFFFDFSQNTRVPCLPEFADWAQEQGDAPAILFDKEFCEWMIQQIGPKLDGKIPVSRGFPIAEVFTLKPLEFGKPNTLVCFVSNLFPPMLTVNWQHHSVPVEGFGPTFVS

SEQ ID NO: 1672 - protein, 65 aa, Homo sapiens [sequence omitted]

SEQ ID NO: 1673 - protein, 77 aa, Homo sapiens
DKSRPKSFHRDGMMLPVHCQHGWEEITDKTDQSVGLAKLQGLQREHFSDRKPSGHRDFPIKFWPYLLDHPLAELFVK

SEQ ID NO: 1674 - protein, 73 aa, Homo sapiens
CCQFTVSMGGKRLLTKQTKVLGLPNSRGFSVNTSAIGNPLDTGIFPSSFGPICWIIHSQNSLSNKMAGASPCS

SEQ ID NO: 1675 - protein, 199 aa, Homo sapiens; identical to SEQ ID NO: 1216

SEQ ID NO: 1676 - protein, 76 aa, Homo sapiens; identical to SEQ ID NO: 1217

SEQ ID NO: 1677 - protein, 122 aa, Homo sapiens; identical to SEQ ID NO: 1218

SEQ ID NO: 1678 - protein, 56 aa, Homo sapiens; identical to SEQ ID NO: 1219

SEQ ID NO: 1679 - protein, 87 aa, Homo sapiens; identical to SEQ ID NO: 1348

SEQ ID NO: 1680 - protein, 55 aa, Homo sapiens; identical to SEQ ID NO: 1349

SEQ ID NO: 1681 - protein, 123 aa, Homo sapiens
IRMTEKAPEPHVEEDDDDELDSKLNYKPPPQKSLKELQEMDKDDESLIKYKKTLLGDGPVVTDPKAPNVVVTRLTLVCESAPGPITMDLTGDLEALKKETIVLKEGSEYRVKIHFKVNRDIVS

SEQ ID NO: 1682 - protein, 191 aa, Homo sapiens; identical to SEQ ID NO: 1281

SEQ ID NO: 1683 - protein, 51 aa, Homo sapiens; identical to SEQ ID NO: 1282

SEQ ID NO: 1684 - protein, 51 aa, Homo sapiens; identical to SEQ ID NO: 1283

SEQ ID NO: 1685 - protein, 55 aa, Homo sapiens; identical to SEQ ID NO: 1284

SEQ ID NO: 1686 - protein, 62 aa, Homo sapiens; identical to SEQ ID NO: 1220

SEQ ID NO: 1687 - protein, 86 aa, Homo sapiens; identical to SEQ ID NO: 1221

SEQ ID NO: 1688 - protein, 95 aa, Homo sapiens; identical to SEQ ID NO: 1222
  variant (1)...(95): Xaa = Any amino acid

SEQ ID NO: 1689 - protein, 50 aa, Homo sapiens; identical to SEQ ID NO: 1232

SEQ ID NO: 1690 - protein, 94 aa, Homo sapiens; identical to SEQ ID NO: 1233

SEQ ID NO: 1691 - protein, 53 aa, Homo sapiens; identical to SEQ ID NO: 1234
  variant (1)...(53): Xaa = Any amino acid

SEQ ID NO: 1692 - protein, 59 aa, Homo sapiens; identical to SEQ ID NO: 1184

SEQ ID NO: 1693 - protein, 91 aa, Homo sapiens; identical to SEQ ID NO: 1236

SEQ ID NO: 1694 - protein, 55 aa, Homo sapiens; identical to SEQ ID NO: 1237

SEQ ID NO: 1695 - protein, 54 aa, Homo sapiens; identical to SEQ ID NO: 1238

SEQ ID NO: 1696 - protein, 147 aa, Homo sapiens; identical to SEQ ID NO: 1239

SEQ ID NO: 1697 - protein, 135 aa, Homo sapiens; identical to SEQ ID NO: 1240

SEQ ID NO: 1698 - protein, 151 aa, Homo sapiens; identical to SEQ ID NO: 1241

SEQ ID NO: 1699 - protein, 60 aa, Homo sapiens
PGFPLWEVLFLAGQLGREWRTEKRVEITCSLELSWGTSPHSVHKSLPLEMECSFYHGKRI

SEQ ID NO: 1700 - protein, 57 aa, Homo sapiens
VGHDSEQDRPKEVQGLWSGMETSSERTHGRSRCRRYTSSRITHRMDPLEVKTCGKTV

SEQ ID NO: 1701 - protein, 50 aa, Homo sapiens [sequence omitted]

SEQ ID NO: 1702 - protein, 53 aa, Homo sapiens
KWSVHFIMGKESEWDMIQNRTGPRKCRGCGVGWRQALKGHMGDLDVEGTQVVG

SEQ ID NO: 1703 - protein, 65 aa, Homo sapiens
HPGFQVLSNTVGPLKASSFLPLPQSHPYQDKGLLTVLSIAPTVTMFASLLSPTEQLPITLSYHMS

SEQ ID NO: 1704 - protein, 64 aa, Homo sapiens [sequence omitted]

SEQ ID NO: 1705 - protein, 52 aa, Homo sapiens
AWGIHLPRISILASRSSLIQWGLSRHPLSFLYLKATLIRIKGSSLSSPLPPR

SEQ ID NO: 1706 - protein, 67 aa, Homo sapiens
QCLLPYFLQLSSFLLHCLTTCLNLQWIHPVSYPTTCVPSTSRSPMCPFRACLHPTPQPLHFLGPVLF

SEQ ID NO: 1707 - protein, 115 aa, Homo sapiens; identical to SEQ ID NO: 1143

SEQ ID NO: 1708 - protein, 55 aa, Homo sapiens; identical to SEQ ID NO: 1144

SEQ ID NO: 1709 - protein, 51 aa, Homo sapiens; identical to SEQ ID NO: 1247
  variant (1)...(51): Xaa = Any amino acid

SEQ ID NO: 1710 - protein, 58 aa, Homo sapiens
LTRGLTPREFIQFLNVRSSLVSPSRAPQSMSWFSGLCRAGYLLKRLAIKAKFNLGFPR

SEQ ID NO: 1711 - protein, 76 aa, Homo sapiens; identical to SEQ ID NO: 1337

SEQ ID NO: 1712 - protein, 63 aa, Homo sapiens
VTVQMIDSRVNTQGVHPVPKCPLFSRLTFKSPPVNVLVLWFVQGRVSVKEVGNKSQVQLGVPS

SEQ ID NO: 1713 - protein, 156 aa, Homo sapiens
RGNPKLNLAFIANLFNRYPALHKPENQDIDWGALEGETREERTFRNWMNSLGVNPRVNHLYSDLSDALVIFQLYEKIKVPVDWNRVNKPPYPKLGGNMKKLENCNYAVELGKNQAKFSLVGIGGQDLNEGNRTLTLALIWQLMRRYTLNILEEIGG

SEQ ID NO: 1714 - protein, 62 aa, Homo sapiens; identical to SEQ ID NO: 1248
  variant (1)...(62): Xaa = Any amino acid

SEQ ID NO: 1715 - protein, 86 aa, Homo sapiens; identical to SEQ ID NO: 1249
  variant (1)...(86): Xaa = Any amino acid

SEQ ID NO: 1716 - protein, 69 aa, Homo sapiens [sequence omitted]

SEQ ID NO: 1717 - protein, 102 aa, Homo sapiens; identical to SEQ ID NO: 1251

SEQ ID NO: 1718 - protein, 77 aa, Homo sapiens [sequence omitted]

SEQ ID NO: 1719 - protein, 60 aa, Homo sapiens [sequence omitted]

SEQ ID NO: 1720 - protein, 115 aa, Homo sapiens; identical to SEQ ID NO: 1143

SEQ ID NO: 1721 - protein, 55 aa, Homo sapiens; identical to SEQ ID NO: 1255
  variant (1)...(55): Xaa = Any amino acid

SEQ ID NO: 1722 - protein, 51 aa, Homo sapiens; identical to SEQ ID NO: 1256
  variant (1)...(51): Xaa = Any amino acid

SEQ ID NO: 1723 - protein, 62 aa, Homo sapiens [sequence omitted]

SEQ ID NO: 1724 - protein, 62 aa, Homo sapiens
LKLEKGRMEESQNESLATLTIQGIRFEDNGIYFCQQKCNNTSEVYQGCGTELRVMGFSTLAQ

SEQ ID NO: 1725 - protein, 60 aa, Homo sapiens [sequence omitted]

SEQ ID NO: 1726 - protein, 88 aa, Homo sapiens; identical to SEQ ID NO: 1265

SEQ ID NO: 1727 - protein, 57 aa, Homo sapiens
  variant (1)...(57): Xaa = Any amino acid
IQGQNQQQXLQSSADIKYKLQGQFLFEGLFXFXEASMRCXHLPGANFYSQLTHAXNA

SEQ ID NO: 1728 - protein, 65 aa, Homo sapiens
RDNVICTPYDISTFLATTSGRHSPKLEKKEIEDFCLCKVLKICSKLIKLSLCSFLQKKKKKKKKR

SEQ ID NO: 1729 - protein, 56 aa, Homo sapiens
LFFFFFFFFCRKEHKDSFINLEQILRTLHRQKSSISFFSNFGECLPLVVAKNVEIS

SEQ ID NO: 1730 - protein, 73 aa, Homo sapiens
  variant (1)...(73): Xaa = Any amino acid
RSVLEPDANETQQMLFLRHNSLFXELRNPVYAXPXXTFLLLLCMKMPTPXMMSPSXKPPAPVNVLLRAXSDXA

SEQ ID NO: 1731 - protein, 52 aa, Homo sapiens
  variant (1)...(52): Xaa = Any amino acid
SFQXAQEPCLCXSSXNFLAPPVHEDAHSTXDEPQHXAPSSRQCLTPGXIRLX

SEQ ID NO: 1732 - protein, 64 aa, Homo sapiens
  variant (1)...(64): Xaa = Any amino acid
HLAPGQTFNFQIGYCCQXVAXKSVSIIXLFDSXHCXSHWASNHVPXFLXXQIXKTXKKKKKKKK

SEQ ID NO: 1733 - protein, 52 aa, Homo sapiens
  variant (1)...(52): Xaa = Any amino acid
TGFLSXLKRLLCLRKSICCVSLASGSRTDLQLPNWILLPXSCXEVSFYHXAL

SEQ ID NO: 1734 - protein, 59 aa, Homo sapiens
  variant (1)...(59): Xaa = Any amino acid
PCLXSKVTRKRPCLPSMTLMEEMLXXAFRCMTQGKTAKNLVLALLILLFVLFLGVXRAK

SEQ ID NO: 1735 - protein, 54 aa, Homo sapiens
  variant (1)...(54): Xaa = Any amino acid
EFXEQNDXTQKFSKWDFPGRTNERPYCYAIWXKTTLXEDVFTGGPHXKLLXEGI

SEQ ID NO: 1736 - protein, 119 aa, Homo sapiens
  variant (1)...(119): Xaa = Any amino acid
DCQKSCSCSPHFVICFIFRSXESKMXTPRNSVNGTFPAEPMKGPIAMQSGXKPLXXRMSSLVGPXQSFFXRESXTLGAXQIXNGLFHIALGGLXMIPXGIYAPICVTVWXPLWGGIMYI

SEQ ID NO: 1737 - protein, 59 aa, Homo sapiens
  variant (1)...(59): Xaa = Any amino acid
NIHNASPERXPHSHTDGCIDPXWDHXKTPQGNVEEPIXNLXSPQSXRFPXEEALXGAHQ

SEQ ID NO: 1738 - protein, 64 aa, Homo sapiens
  variant (1)...(64): Xaa = Any amino acid
ISGCXHFALXTPKNKTNNKMRRARTRFLAVLPCVMHLNXSXSISSMSVIEGRHGLFRVTLDXRQ

SEQ ID NO: 1739 - protein, 89 aa, Homo sapiens
  variant (1)...(89): Xaa = Any amino acid
IXXGIIXRPPRAMWKSPXIIWXAPKXLDSLXKKLXVGPTSEDILXKSGFXPDCIAIGPFIGSAGKVPFTEFLGXVILLXKLLKIKQITK

SEQ ID NO: 1740 - protein, 58 aa, Homo sapiens
  variant (1)...(58): Xaa = Any amino acid
LVHFLNFPHSEFQSLLLHHVCRNLVLFSVYLHITLKTLLFENFSISQINIHFHNLPLX

SEQ ID NO: 1741 - protein, 94 aa, Homo sapiens
  variant (1)...(94): Xaa = Any amino acid
QQKQNFRFQNLLLAKFILIIPASYGYITIKTEYHRVIALFENSXILQCTSPMKQXISILKIKRKQHREVKCGVAKLWGLLEGTNLNRLFLLSLE

SEQ ID NO: 1742 - protein, 93 aa, Homo sapiens
  variant (1)...(93): Xaa = Any amino acid
VNLYFHGYSKERRNNLLRLVPSSRPHNFATPHLTSLCCFLLIFKMEIXCFIGEVHCKMXEFSNNAITLWYSVLIVIYPYEAGIMRINFANNKF

SEQ ID NO: 1743 - protein, 62 aa, Homo sapiens
VFLSPWVKSESGSLCLSVLVYCWSESKFLIKAVDLAPTVYADIGETIWLFQTSQDLSKKTWL

SEQ ID NO: 1744 - protein, 116 aa, Homo sapiens
EPCFITRSSYSNPVMFEITKLSLQCLHKLWEPSQQLLSRIYSLTSNKQALRDTESQIQILPMGIKRLRLSPHLENYLHHKYIITGSLYEADTKCYRHSQNIILGNNVIKMPNLSQQ

SEQ ID NO: 1745 - protein, 87 aa, Homo sapiens; identical to SEQ ID NO: 1515

SEQ ID NO: 1746 - protein, 113 aa, Homo sapiens [sequence omitted]

SEQ ID NO: 1747 - protein, 79 aa, Homo sapiens; identical to SEQ ID NO: 1517

SEQ ID NO: 1748 - protein, 52 aa, Homo sapiens
RTIGGCRHVLLEQLPRTTLLRSGFQRPPNFVSFNSFRPDLLFGSVTGRQVST

SEQ ID NO: 1749 - protein, 115 aa, Homo sapiens
HMPDWLFATHLKDTTQSMEAFNRTALPISGLLADADMFYSSSYQGPLYCDQDSNDHLISYLSTLFDRTSYSEALQEDRSQLRDQITLSTLWDRCNLALQGSAPITSRPANTDLEV

SEQ ID NO: 1750 - protein, 52 aa, Homo sapiens
VETCLPVTLPNKRSGRKELKDTKLGGRWNPDRSKVVLGNCSSRTCLHPPIVR

SEQ ID NO: 1751 - protein, 56 aa, Homo sapiens
NMSASANSPLIGRAVRLKASIDWVVSFKWVAKSQSGICHEGFSDRLMVCCLTSLGK

SEQ ID NO: 1752 - protein, 86 aa, Homo sapiens; identical to SEQ ID NO: 1221

SEQ ID NO: 1753 - protein, 62 aa, Homo sapiens; identical to SEQ ID NO: 1220

SEQ ID NO: 1754 - protein, 191 aa, Homo sapiens; identical to SEQ ID NO: 1281

SEQ ID NO: 1755 - protein, 51 aa, Homo sapiens; identical to SEQ ID NO: 1282

SEQ ID NO: 1756 - protein, 51 aa, Homo sapiens; identical to SEQ ID NO: 1283

SEQ ID NO: 1757 - protein, 55 aa, Homo sapiens; identical to SEQ ID NO: 1284

SEQ ID NO: 1758 - protein, 87 aa, Homo sapiens; identical to SEQ ID NO: 1515

SEQ ID NO: 1759 - protein, 113 aa, Homo sapiens [sequence omitted]

SEQ ID NO: 1760 - protein, 79 aa, Homo sapiens; identical to SEQ ID NO: 1517

SEQ ID NO: 1761 - protein, 106 aa, Homo sapiens; identical to SEQ ID NO: 1289

SEQ ID NO: 1762 - protein, 53 aa, Homo sapiens; identical to SEQ ID NO: 1290

SEQ ID NO: 1763 - protein, 55 aa, Homo sapiens; identical to SEQ ID NO: 1144

SEQ ID NO: 1764 - protein, 51 aa, Homo sapiens; identical to SEQ ID NO: 1292

SEQ ID NO: 1765 - protein, 51 aa, Homo sapiens; identical to SEQ ID NO: 1145

SEQ ID NO: 1766 - protein, 101 aa, Homo sapiens
SHLLEGGQRGQDGAADPHGVLALRRSNDLDLHCAGCQGSDLLLHPVGNARVHGGAARQHCVGVQVFADVHVTLHDGVEGSFVDATGLHAQEGRLEECLRAA

SEQ ID NO: 1767 - protein, 124 aa, Homo sapiens
VIVRLEAFAVDDGGAGLVILLLADHICWKVDSEARMEPPIHTEYLRSGGAMILIFIVLGARAVISFCILSAMPGYMVVPPDSTVLAYRSLRMSTSHFMMELKVVSWMPQDSMPRKEGWKSASGQ

SEQ ID NO: 1768 - protein, 100 aa, Homo sapiens
RCPEALFQPSFLGMESCGIHETTFNSIMKCDVDIRKDLYANTVLSGGTTMYPGIADRMQKEITALAPSTMKIKIIAPPERKYSVWIGGSILASLSTFQQM

SEQ ID NO: 1769 - protein, 115 aa, Homo sapiens; identical to SEQ ID NO: 1297

SEQ ID NO: 1770 - protein, 53 aa, Homo sapiens; identical to SEQ ID NO: 1267

SEQ ID NO: 1771 - protein, 55 aa, Homo sapiens; identical to SEQ ID NO: 1299

SEQ ID NO: 1772 - protein, 53 aa, Homo sapiens [sequence omitted]

SEQ ID NO: 1773 - protein, 54 aa, Homo sapiens
LGQELCPVPAAFISTHVHSLLRPRPPGICPGLPHPTSIRSCPRCMSSIGRIARW

SEQ ID NO: 1774 - protein, 63 aa, Homo sapiens [sequence omitted]

SEQ ID NO: 1775 - protein, 68 aa, Homo sapiens
GERPRVGTGNLRRAGNGSLRFRKLLCKLRGWLGPKGCSARRASCELSKALGSQHPKSLWLQSCVCTTH

SEQ ID NO: 1776 - protein, 72 aa, Homo sapiens
GIRSQLSLNSQSPPWASLPNDLVALGAPEVNPEILPPSTLGSDLCPSLCHKEISVKRVGTGGFRPCSKATAR

SEQ ID NO: 1777 - protein, 52 aa, Homo sapiens
VLRQILSLLIQSEPDLTFSPPSNPAYAGHASWATPDGGGMREPGADTRRSGP

SEQ ID NO: 1778 - protein, 60 aa, Homo sapiens
SHRLLGCCEPRALLSSQLARRAEQPFGPSHPRSLHRSFLNLRDPFPALLKFPVPTLGLSP

SEQ ID NO: 1779 - protein, 52 aa, Homo sapiens
NTPSVNSGLRPLPFSVSQGNFGQEGGNRWFQTVQQSHCQVSFKANFISSYSV

SEQ ID NO: 1780 - protein, 78 aa, Homo sapiens; identical to SEQ ID NO: 1307

SEQ ID NO: 1781 - protein, 134 aa, Homo sapiens [sequence omitted]

SEQ ID NO: 1782 - protein, 66 aa, Homo sapiens; identical to SEQ ID NO: 1309

SEQ ID NO: 1783 - protein, 141 aa, Homo sapiens; identical to SEQ ID NO: 1310

SEQ ID NO: 1784 - protein, 53 aa, Homo sapiens
FFFLHRIGRGGRFGRKGVAINFVTEEDKRILRDIETFYNTTVEEMPMNVADLI

SEQ ID NO: 1785 - protein, 51 aa, Homo sapiens
  variant (1)...(51): Xaa = Any amino acid
KMGSVKSFFLRNLFPSSVEMXXLDVLYHLIIYLXTKRYKCXIKSANYVKLA

SEQ ID NO: 1786 - protein, 67 aa, Homo sapiens
SPIQQQRALHPKLSSQELNKVSHIHGHLLHCSIVESLNVTKNPLVFFSNKVYSHTFPPKSTPSANSV

SEQ ID NO: 1787 - protein, 58 aa, Homo sapiens
KVSMSRRILLSSSVTKFIATPFLPNRPPLPILCKKKNQNVTSHIMYKLLNMTIHLLTT

SEQ ID NO: 1788 - protein, 61 aa, Homo sapiens; identical to SEQ ID NO: 1311

SEQ ID NO: 1789 - protein, 51 aa, Homo sapiens; identical to SEQ ID NO: 1312

SEQ ID NO: 1790 - protein, 192 aa, Homo sapiens
LLWKGSFKPSEHVKPRAPGNLTVHTNVSDTLLLTWSNPYPPDNYLYNHLTYAVNIWSENDPADFRIYNVTYLEPSLRIAASTLKSGISYRARVRAWAQCYNTTWSEWSPSTKWHNSYREPFEQHLLLGVSASCIVILAVCLLCYVSITKIKKEWWDQIPNPARSRLVAIIIQDAQGSQWEKRSRGQEPAKCP

SEQ ID NO: 1791 - protein, 75 aa, Homo sapiens [sequence omitted]

SEQ ID NO: 1792 - protein, 64 aa, Homo sapiens
RPAGGAARRAPCRSCATWCWGSTHSRWCYSTEPRPSPVPCRKSQTSGCWLRCGGRVLGRSRYRF

SEQ ID NO: 1793 - protein, 104 aa, Homo sapiens [sequence omitted]

SEQ ID NO: 1794 - protein, 71 aa, Homo sapiens
VGHVIDSEICRVVFTPNVDCIGEMIIQVIVRGIRVAPGQQQSVGDIGVNCQVSWGPGFHMLAGLEGALPQQ

SEQ ID NO: 1795 - protein, 115 aa, Homo sapiens; identical to SEQ ID NO: 1143

SEQ ID NO: 1796 - protein, 55 aa, Homo sapiens; identical to SEQ ID NO: 1144

SEQ ID NO: 1797 - protein, 51 aa, Homo sapiens; identical to SEQ ID NO: 1145

SEQ ID NO: 1798 - protein, 54 aa, Homo sapiens
PVLRQIWGWGEHFGLKAQSSLPCFFCAYHSPLASTSVRWGGDKKRSKVKKKVEN

SEQ ID NO: 1799 - protein, 56 aa, Homo sapiens
DGGGTKREVKLRRKWKIKKKMSKFLHAYISAYAEDLPVCCTLNHTFRTPQKPSLSP

SEQ ID NO: 1800 - protein, 59 aa, Homo sapiens; identical to SEQ ID NO: 1321

SEQ ID NO: 1801 - protein, 64 aa, Homo sapiens; identical to SEQ ID NO: 1322

SEQ ID NO: 1802 - protein, 57 aa, Homo sapiens; identical to SEQ ID NO: 1323

SEQ ID NO: 1803 - protein, 51 aa, Homo sapiens; identical to SEQ ID NO: 1324

SEQ ID NO: 1804 - protein, 74 aa, Homo sapiens
MDRGPKRKRYLKTNGRNLEAHDPEPRKDRSLKTWGNPKMRTLNPTSFLLFTLLTLRYFQFSCLSLSLILLRCTF

SEQ ID NO: 1805 - protein, 77 aa, Homo sapiens
GSHLGISPGLQASILPGFWVMGLQIPAVSLEIPFSLGSSIHLGRLCDRGLPSLGCRSSSYNPGLILGRWPCVTSLSS

SEQ ID NO: 1806 - protein, 85 aa, Homo sapiens
YCQSKGNRQHQKVHLKRIRLKDKQENWKYLRVRSVNNRKEVGFRVLILGFPQVFKLLSFLGSGSWASRFRPLVLRYLFRLGPLSI

SEQ ID NO: 1807 - protein, 50 aa, Homo sapiens; identical to SEQ ID NO: 1332

SEQ ID NO: 1808 - protein, 51 aa, Homo sapiens; identical to SEQ ID NO: 1333

SEQ ID NO: 1809 - protein, 92 aa, Homo sapiens [sequence omitted]

SEQ ID NO: 1810 - protein, 50 aa, Homo sapiens
GVLNFNLRGPTVPSKTETTELLGWRLEAGAEGLIPVVGKLRQPPKVEVGE

SEQ ID NO: 1811 - protein, 66 aa, Homo sapiens
VTPFPFPEIGTSYSKGERRAQRDLYRTSLAHGDWRQRVGSWRGVQSLQQILRASKSSSWTFLLIWI

SEQ ID NO: 1812 - protein, 83 aa, Homo sapiens
KSRLRETSRKSSLKPSIFVGGTGLLSSSPPSASSHHVQERSCTDLSGLSFLLWNNLFLFQEREMVSLRPWTASPARLGPQVPL

SEQ ID NO: 1813 - protein, 82 aa, Homo sapiens
SPQYLLEGLDSSPAPHPLPPVTMCKRGPVQISLGSPFSFGITCSYFRKGKWCHSGPGLLLQPGWGHRSHSSEGQCLRIKAVF

SEQ ID NO: 1814 - protein, 53 aa, Homo sapiens
IQIKRNVQEELFEALNICWRDWTPLQLPTLCLQSPCAREVLYRSLWALLSPLE

SEQ ID NO: 1815 - protein, 116 aa, Homo sapiens
  variant (1)...(116): Xaa = Any amino acid
PKEVRQLAEDFLKDYIHINIGALELSANHNILQIVDVCHDXXKDEKLIXLMEEIMSEKENKTIVFVETKRRCDELTRKMRRDGWPAMGIHXDKSQQERDWALNESKHGKAPILIXT

SEQ ID NO: 1816 - protein, 51 aa, Homo sapiens
  variant (1)...(51): Xaa = Any amino acid
SPVTLLLTLVXMDTHGRPPISPHFSGKLITSSFGFHKNNGFILLLTHDLFH

SEQ ID NO: 1817 - protein, 55 aa, Homo sapiens
  variant (1)...(55): Xaa = Any amino acid
LLXPWIPMAGHPSLLIFLVSSSHLLLVSTKTMVLFSFSLMISSIRXISFSSFXXS

SEQ ID NO: 1818 - protein, 63 aa, Homo sapiens
  variant (1)...(63): Xaa = Any amino acid
GGKMAVQISKKRKFVADGIFKAELNEFLTRELAEDGYSGVEGASYTNQDRNHYLXHQNTXCSW

SEQ ID NO: 1819 - protein, 70 aa, Homo sapiens
  variant (1)...(70): Xaa = Any amino acid
MSFLLGSWLKMATLELRVRVTPTRTEIIILXTRTXNVLGEKGRRIRELTAVVQKRFGFPEGSVELYAXKV

SEQ ID NO: 1820 - protein, 76 aa, Homo sapiens
  variant (1)...(76): Xaa = Any amino acid
TTAVSSRIRRPFSPRTXCVLVXKIMISVLVGVTRTLNSRVAIFSQLPSKKLIQFSFEDAISDKLPLLGYLHCHLAA

SEQ ID NO: 1821 - protein, 70 aa, Homo sapiens
PMWLVFSLQLARFHTLTSLSQPQETMIGLLLLGEKRTQDTHSEWLSSWTVYLHTPRVFHSLMVLSRDPKT

SEQ ID NO: 1822 - protein, 70 aa, Homo sapiens
IVFGSRDKTIKLWNTLGVCKYTVQDESHSEWVSCVRFSPNSSNPIIVSCGWDKLVKVWNLANCKLKTNHI

SEQ ID NO: 1823 - protein, 64 aa, Homo sapiens
LFLDLEIKPSSYGIPWVCANTLSRMRATQSGCLVSASRPTAATLSSSPVAGTSWSRYGTWLTAS

SEQ ID NO: 1824 - protein, 74 aa, Homo sapiens; identical to SEQ ID NO: 1505

SEQ ID NO: 1825 - protein, 66 aa, Homo sapiens
LDDGLQPLSVLSVPHSTSISCCTPTQLRELVRTQPIHLSRTSETLDQWSHMVLRLHVNTPANAACR

SEQ ID NO: 1826 - protein, 76 aa, Homo sapiens
YGDSLWKSSFPSFVSLPTMQEASLAVLFYYHYISPICNKVLYRQVRSMLSSSLSPRRLRLRYRGNSPVQSLFMLTQ

SEQ ID NO: 1827 - protein, 60 aa, Homo sapiens; identical to SEQ ID NO: 1340

SEQ ID NO: 1828 - protein, 95 aa, Homo sapiens; identical to SEQ ID NO: 1341

SEQ ID NO: 1829 - protein, 50 aa, Homo sapiens; identical to SEQ ID NO: 1342

SEQ ID NO: 1830 - protein, 62 aa, Homo sapiens
VAVSSLRHGVCSPTDIGVLRKGGVIWQKCHFACCIQGSYSTRYCELCSHQLAQKQQTALCCQ

SEQ ID NO: 1831 - protein, 94 aa, Homo sapiens
WLSPLSAMACARPLISVYSEKGESSGKNVTLPAVFKAPIRPDIVNFVHTNLRKNNRQPYAVSELAGHQTSAESWGTGRAVARIPRVRGGGTHRS

SEQ ID NO: 1832 - protein, 102 aa, Homo sapiens [sequence omitted]

SEQ ID NO: 1833 - protein, 60 aa, Homo sapiens; identical to SEQ ID NO: 1340

SEQ ID NO: 1834 - protein, 50 aa, Homo sapiens; identical to SEQ ID NO: 1345

SEQ ID NO: 1835 - protein, 76 aa, Homo sapiens; identical to SEQ ID NO: 1346

SEQ ID NO: 1836 - protein, 68 aa, Homo sapiens; identical to SEQ ID NO: 1347

SEQ ID NO: 1837 - protein, 87 aa, Homo sapiens; identical to SEQ ID NO: 1348

SEQ ID NO: 1838 - protein, 55 aa, Homo sapiens; identical to SEQ ID NO: 1349

SEQ ID NO: 1839 - protein, 120 aa, Homo sapiens; identical to SEQ ID NO: 1350

SEQ ID NO: 1840 - protein, 75 aa, Homo sapiens [sequence omitted]

SEQ ID NO: 1841 - protein, 59 aa, Homo sapiens
VFSSVTHNIKNKNPVSLAKFGLKSEMFLWSCQQAGMYLIQFNLLLFLWLSSKPLSSCNS

SEQ ID NO: 1842 - protein, 51 aa, Homo sapiens [sequence omitted]

SEQ ID NO: 1843 - protein, 74 aa, Homo sapiens [sequence omitted]

SEQ ID NO: 1844 - protein, 50 aa, Homo sapiens [sequence omitted]

SEQ ID NO: 1845 - protein, 93 aa, Homo sapiens
  variant (1)...(93): Xaa = Any amino acid
GDXVGXGAQAATMAYHGLTVPLIVMSVFWGFVGFLVPWFIPKGPNRGVIITMLVTCSVCCYLFWLIAILAQLNPLFGPQLKNETIWYLKYHWP

SEQ ID NO: 1846 - protein, 56 aa, Homo sapiens
  variant (1)...(56): Xaa = Any amino acid
TGHQHGNDNSPVRTLRDEPRHQEADEAPEHAHHNERHSEAVIRHGRRLSAXPYXVA

SEQ ID NO: 1847 - protein, 64 aa, Homo sapiens
  variant (1)...(64): Xaa = Any amino acid
FXXFFXKXRILGXFXETKADIKSYKDFXFSFTKKVIHILHYTRYDINTGKYYVHCKEKGKIETY

SEQ ID NO: 1848 - protein, 53 aa, Homo sapiens
  variant (1)...(53): Xaa = Any amino acid
AKGGFIKXNQYWANPFXPFFSFSMXILFFXYSSSSCSKLKLGKESHFXLXVFL

SEQ ID NO: 1849 - protein, 54 aa, Homo sapiens
  variant (1)...(54): Xaa = Any amino acid
NXHRKREKGXKGIGPILIXFYKTSFGLEGMTLATIIXSMFKQVPLVVALNVIXL

SEQ ID NO: 1850 - protein, 188 aa, Homo sapiens
QVLDINLAAEPKVNRGKAGVKRSAAEMYGSVTEHPSPSPLLSSSFDLDYDFQRDYYDRMYSYPARVPPPPPIARAVVPSKRQRVSGNTSRRGKSGFNSKSGQRGSSKSGKLKGDDLQAIKKELTQIKQKVDSLLENLEKIEKEQSKQAVEMKNDKSEEEQSSSSVKKDETNVKMESEGGADDSAEEGD

SEQ ID NO: 1851 - protein, 50 aa, Homo sapiens
SHLSSRSCCSAPLLTYHSSSLLLVCSVPFQFFPGFPGENPLFVLSGSAPS

SEQ ID NO: 1852 - protein, 66 aa, Homo sapiens
LIILHLYCLFALFLFNFFQVFQERIHFLFYLGQLLLNGLKVISFQLSRLGRSPLSTLRIEATFAPS

SEQ ID NO: 1853 - protein, 71 aa, Homo sapiens
SPSSAESSAPPSDSIFTLVSSFFTELLLCSSSDLSFFISTACLLCSFSIFSRFSRRESTFCFIWVSSFLMA

SEQ ID NO: 1854 - protein, 80 aa, Homo sapiens
HRGRQEAIAGGHLSLDGSSLVHTVPKKGLPLGPRNPSQPSQAEPHPGFSQRGAQEDPSCPKSEEQQETASEVRHSSVLLP

SEQ ID NO: 1855 - protein, 112 aa, Homo sapiens
  variant (1)...(112): Xaa = Any amino acid
MEAPWSTQSQRKVCLWAHETHPSPHRLNLTLGFPREVPKKTQAAPSQRSSRKQPQKSVTLQYSSLRMSTSCLVTMATKRQWQCSACGMGELHLPWVHGEETPVTXRSGESHG

SEQ ID NO: 1856 - protein, 127 aa, Homo sapiens
  variant (1)...(127): Xaa = Any amino acid
PMALPASXGHWSLLPMYPRKMELPHPTRTALPLSFGCHGHQTGSGHSKGGVLKSDGLLRLFPAAPLTWGSLGLLGHLSGKTQGEVQPVRAGMGFVGPKADLSLGLCGPRSFHLVTSDPQLSPLAFPC

SEQ ID NO: 1857 - protein, 51 aa, Homo sapiens
  variant (1)...(51): Xaa = Any amino acid
PWLSPLLXVTGVSSPCTQGRWSSPIPHALHCHCLLVAMVTKQEVDILREEY

SEQ ID NO: 1858 - protein, 53 aa, Homo sapiens
TKDYLFKKSFEVKYFVYVIHRCTYKHTHIESQYFNTSLGSCTNSLTLRKKLRN

SEQ ID NO: 1859 - protein, 57 aa, Homo sapiens
YSVKLTDNLESLSSFIFLTLQKGKEDKHSLPFYLTNRRGTQFFSRLGTVRERWGKPF

SEQ ID NO: 1860 - protein, 62 aa, Homo sapiens; identical to SEQ ID NO: 1220

SEQ ID NO: 1861 - protein, 86 aa, Homo sapiens; identical to SEQ ID NO: 1221

SEQ ID NO: 1862 - protein, 58 aa, Homo sapiens [sequence omitted]

SEQ ID NO: 1863 - protein, 109 aa, Homo sapiens; identical to SEQ ID NO: 674

SEQ ID NO: 1864 - protein, 100 aa, Homo sapiens; identical to SEQ ID NO: 675

SEQ ID NO: 1865 - protein, 103 aa, Homo sapiens [sequence omitted]

SEQ ID NO: 1866 - protein, 88 aa, Homo sapiens; identical to SEQ ID NO: 1395

SEQ ID NO: 1867 - protein, 157 aa, Homo sapiens; identical to SEQ ID NO: 1396
  variant (1)...(157): Xaa = Any amino acid

SEQ ID NO: 1868 - protein, 156 aa, Homo sapiens; identical to SEQ ID NO: 1397
  variant (1)...(156): Xaa = Any amino acid

SEQ ID NO: 1869 - protein, 75 aa, Homo sapiens; identical to SEQ ID NO: 1398
  variant (1)...(75): Xaa = Any amino acid

SEQ ID NO: 1870 - protein, 111 aa, Homo sapiens; identical to SEQ ID NO: 1399
  variant (1)...(111): Xaa = Any amino acid

SEQ ID NO: 1871 - protein, 104 aa, Homo sapiens; identical to SEQ ID NO: 1400
  variant (1)...(104): Xaa = Any amino acid

SEQ ID NO: 1872 - protein, 53 aa, Homo sapiens [sequence omitted]

SEQ ID NO: 1873 - protein, 67 aa, Homo sapiens; identical to SEQ ID NO: 1402
  variant (1)...(67): Xaa = Any amino acid

SEQ ID NO: 1874 - protein, 56 aa, Homo sapiens; identical to SEQ ID NO: 712

SEQ ID NO: 1875 - protein, 56 aa, Homo sapiens; identical to SEQ ID NO: 713

SEQ ID NO: 1876 - protein, 56 aa, Homo sapiens; identical to SEQ ID NO: 714

SEQ ID NO: 1877 - protein, 51 aa, Homo sapiens
  variant (1)...(51): Xaa = Any amino acid
TNQSLLRNCYSLNWSIKTSHGSGYGVIWCPCFSPXGHLIXEPPXEFCGRHL

SEQ ID NO: 1878 - protein, 56 aa, Homo sapiens; identical to SEQ ID NO: 729

SEQ ID NO: 1879 - protein, 50 aa, Homo sapiens; identical to SEQ ID NO: 730

SEQ ID NO: 1880 - protein, 70 aa, Homo sapiens; identical to SEQ ID NO: 731

SEQ ID NO: 1881 - protein, 53 aa, Homo sapiens; identical to SEQ ID NO: 732

SEQ ID NO: 1882 - protein, 69 aa, Homo sapiens; identical to SEQ ID NO: 1414
  variant (1)...(69): Xaa = Any amino acid

SEQ ID NO: 1883 - protein, 64 aa, Homo sapiens; identical to SEQ ID NO: 1415
  variant (1)...(64): Xaa = Any amino acid

SEQ ID NO: 1884 - protein, 92 aa, Homo sapiens; identical to SEQ ID NO: 1416
  variant (1)...(92): Xaa = Any amino acid

SEQ ID NO: 1885 - protein, 77 aa, Homo sapiens; identical to SEQ ID NO: 1417
  variant (1)...(77): Xaa = Any amino acid

SEQ ID NO: 1886 - protein, 97 aa, Homo sapiens; identical to SEQ ID NO: 725

SEQ ID NO: 1887 - protein, 56 aa, Homo sapiens; identical to SEQ ID NO: 754

SEQ ID NO: 1888 - protein, 75 aa, Homo sapiens; identical to SEQ ID NO: 1418
  variant (1)...(75): Xaa = Any amino acid

SEQ ID NO: 1889 - protein, 74 aa, Homo sapiens; identical to SEQ ID NO: 1419
  variant (1)...(74): Xaa = Any amino acid

SEQ ID NO: 1890 - protein, 66 aa, Homo sapiens; identical to SEQ ID NO: 1420
  variant (1)...(66): Xaa = Any amino acid

SEQ ID NO: 1891 - protein, 55 aa, Homo sapiens; identical to SEQ ID NO: 1427

SEQ ID NO: 1892 - protein, 52 aa, Homo sapiens; identical to SEQ ID NO: 787
  variant (1)...(52): Xaa = Any amino acid

SEQ ID NO: 1893 - protein, 115 aa, Homo sapiens; identical to SEQ ID NO: 1443
  variant (1)...(115): Xaa = Any amino acid

SEQ ID NO: 1894 - protein, 50 aa, Homo sapiens; identical to SEQ ID NO: 1444

SEQ ID NO: 1895 - protein, 114 aa, Homo sapiens; identical to SEQ ID NO: 1445
  variant (1)...(114): Xaa = Any amino acid

SEQ ID NO: 1896 - protein, 74 aa, Homo sapiens; identical to SEQ ID NO: 1446
  variant (1)...(74): Xaa = Any amino acid

SEQ ID NO: 1897 - protein, 60 aa, Homo sapiens; identical to SEQ ID NO: 1447
  variant (1)...(60): Xaa = Any amino acid

SEQ ID NO: 1898 - protein, 60 aa, Homo sapiens; identical to SEQ ID NO: 1448
  variant (1)...(60): Xaa = Any amino acid

SEQ ID NO: 1899 - protein, 58 aa, Homo sapiens; identical to SEQ ID NO: 1449

SEQ ID NO: 1900 - protein, 146 aa, Homo sapiens; identical to SEQ ID NO: 1450

SEQ ID NO: 1901 - protein, 62 aa, Homo sapiens; identical to SEQ ID NO: 1451

SEQ ID NO: 1902 - protein, 109 aa, Homo sapiens; identical to SEQ ID NO: 1452
  variant (1)...(109): Xaa = Any amino acid

SEQ ID NO: 1903 - protein, 81 aa, Homo sapiens; identical to SEQ ID NO: 1453

SEQ ID NO: 1904 - protein, 59 aa, Homo sapiens; identical to SEQ ID NO: 1454
  variant (1)...(59): Xaa = Any amino acid

SEQ ID NO: 1905 - protein, 74 aa, Homo sapiens [sequence omitted]

SEQ ID NO: 1906 - protein, 66 aa, Homo sapiens; identical to SEQ ID NO: 822

SEQ ID NO: 1907 - protein, 75 aa, Homo sapiens; identical to SEQ ID NO: 823

SEQ ID NO: 1908 - protein, 59 aa, Homo sapiens; identical to SEQ ID NO: 824

SEQ ID NO: 1909 - protein, 65 aa, Homo sapiens; identical to SEQ ID NO: 1467

SEQ ID NO: 1910 - protein, 107 aa, Homo sapiens; identical to SEQ ID NO: 1468

SEQ ID NO: 1911 - protein, 74 aa, Homo sapiens; identical to SEQ ID NO: 1469

SEQ ID NO: 1912 - protein, 63 aa, Homo sapiens; identical to SEQ ID NO: 1470

SEQ ID NO: 1913 - protein, 181 aa, Homo sapiens; identical to SEQ ID NO: 1471

SEQ ID NO: 1914 - protein, 109 aa, Homo sapiens; identical to SEQ ID NO: 1472

SEQ ID NO: 1915 - protein, 100 aa, Homo sapiens [sequence omitted]

SEQ ID NO: 1916 - protein, 103 aa, Homo sapiens [sequence omitted]

SEQ ID NO: 1917 - protein, 58 aa, Homo sapiens [sequence omitted]

SEQ ID NO: 1918 - protein, 109 aa, Homo sapiens; identical to SEQ ID NO: 1476

SEQ ID NO: 1919 - protein, 78 aa, Homo sapiens
  variant (1)...(78): Xaa = Any amino acid
RGCMPXSTLELEELKQVLLHNERSFNPLEDDDDCQIKKRPASLNSKPSSLRRVTIASLPXNIGNAGMVAGMENNDPIX

SEQ ID NO: 1920 - protein, 103 aa, Homo sapiens
  variant (1)...(103): Xaa = Any amino acid
XIGSLFSIPATIPAFPIFXGKEAIVTLRREDGLEFREAGRFLIWQSSSSSRGLKDLSLCRRTCFSSSNSSVXFGIHPLQVXYVLNHHFNCFTNPAFLIDGSQH

SEQ ID NO: 1921 - protein, 60 aa, Homo sapiens; identical to SEQ ID NO: 1494
  variant (1)...(60): Xaa = Any amino acid

SEQ ID NO: 1922 - protein, 60 aa, Homo sapiens; identical to SEQ ID NO: 1495
  variant (1)...(60): Xaa = Any amino acid

SEQ ID NO: 1923 - protein, 60 aa, Homo sapiens; identical to SEQ ID NO: 1496
  variant (1)...(60): Xaa = Any amino acid

SEQ ID NO: 1924 - protein, 60 aa, Homo sapiens; identical to SEQ ID NO: 1497
  variant (1)...(60): Xaa = Any amino acid

SEQ ID NO: 1925 - protein, 53 aa, Homo sapiens; identical to SEQ ID NO: 1498
  variant (1)...(53): Xaa = Any amino acid

SEQ ID NO: 1926 - protein, 71 aa, Homo sapiens [sequence omitted]

SEQ ID NO: 1927 - protein, 73 aa, Homo sapiens; identical to SEQ ID NO: 882

SEQ ID NO: 1928 - protein, 63 aa, Homo sapiens; identical to SEQ ID NO: 1470

SEQ ID NO: 1929 - protein, 181 aa, Homo sapiens; identical to SEQ ID NO: 1471

SEQ ID NO: 1930 - protein, 109 aa, Homo sapiens; identical to SEQ ID NO: 1472

SEQ ID NO: 1931 - protein, 74 aa, Homo sapiens; identical to SEQ ID NO: 1505

SEQ ID NO: 1932 - protein, 66 aa, Homo sapiens; identical to SEQ ID NO: 1506

SEQ ID NO: 1933 - protein, 63 aa, Homo sapiens; identical to SEQ ID NO: 1470

SEQ ID NO: 1934 - protein, 169 aa, Homo sapiens
SRAEMLGAINQESRVSKAVEVMIQHVENLKRMYAKEHAELEELKQVLLQNERSFNPLEDDDDCQIKKRSASLNSKPSSLRRVTIASLPRNIGNAGMVAGMENNDRFSRRSSSWRILGSKQSEHRPSLPRFISTYSWADAEEEKCELKTKDDSEPSGEETVERTRKPSLS

SEQ ID NO: 1935 - protein, 109 aa, Homo sapiens; identical to SEQ ID NO: 1472

SEQ ID NO: 1936 - protein, 56 aa, Homo sapiens
DKSRPKSFHRDGMMLPVHCQHGWEEITDKTDQSVGLAKLQGLQREHFSDRKPWWGD

SEQ ID NO: 1937 - protein, 79 aa, Homo sapiens
  variant (1)...(79): Xaa = Any amino acid
FRWYLCVWRGHGIWRGGQRRTQWVRLWETEMSEELGSEGRSSSRQGLXLDVEAEPDPGYSGPLHHDFLQHFLSRAHIDV

SEQ ID NO: 1938 - protein, 114 aa, Homo sapiens
  variant (1)...(114): Xaa = Any amino acid
XQSLPGRRPPFRAQLLAHLCLPKPDPLCSSLPSPPYAMAPPNTEIPSKLVSFSPYTSIPPPGFPIAEVFTLKPLEFGKPNTLVCFVSNLFPPMLTVNWQHHSIPVEGFGPTFVS

SEQ ID NO: 1939 - protein, 58 aa, Homo sapiens
  variant (1)...(58): Xaa = Any amino acid
PGSGSASTSXCSPCLEEDLPSEPSSSLISVSQSLTHCVLLCPPLHMPWPLQTQRYHLN

SEQ ID NO: 1940 - protein, 150 aa, Homo sapiens; identical to SEQ ID NO: 983
  variant (1)...(150): Xaa = Any amino acid

SEQ ID NO: 1941 - protein, 101 aa, Homo sapiens; identical to SEQ ID NO: 930

SEQ ID NO: 1942 - protein, 87 aa, Homo sapiens; identical to SEQ ID NO: 1515

SEQ ID NO: 1943 - protein, 113 aa, Homo sapiens [sequence omitted]

SEQ ID NO: 1944 - protein, 79 aa, Homo sapiens; identical to SEQ ID NO: 1517

SEQ ID NO: 1945 - protein, 54 aa, Homo sapiens; identical to SEQ ID NO: 1535
  variant (1)...(54): Xaa = Any amino acid

SEQ ID NO: 1946 - protein, 55 aa, Homo sapiens; identical to SEQ ID NO: 1536
  variant (1)...(55): Xaa = Any amino acid

SEQ ID NO: 1947 - protein, 61 aa, Homo sapiens; identical to SEQ ID NO: 1537

SEQ ID NO: 1948 - protein, 96 aa, Homo sapiens; identical to SEQ ID NO: 1538
  variant (1)...(96): Xaa = Any amino acid

SEQ ID NO: 1949 - protein, 65 aa, Homo sapiens; identical to SEQ ID NO: 1467

SEQ ID NO: 1950 - protein, 107 aa, Homo sapiens; identical to SEQ ID NO: 1468

SEQ ID NO: 1951 - protein, 74 aa, Homo sapiens; identical to SEQ ID NO: 1469

SEQ ID NO: 1952 - protein, 94 aa, Homo sapiens [sequence omitted]

SEQ ID NO: 1953 - protein, 61 aa, Homo sapiens [sequence omitted]

SEQ ID NO: 1954 - protein, 58 aa, Homo sapiens; identical to SEQ ID NO: 1083
  variant (1)...(58): Xaa = Any amino acid

SEQ ID NO: 1955 - protein, 139 aa, Homo sapiens; identical to SEQ ID NO: 1084
  variant (1)...(139): Xaa = Any amino acid

SEQ ID NO: 1956 - protein, 62 aa, Homo sapiens; identical to SEQ ID NO: 1220

SEQ ID NO: 1957 - protein, 86 aa, Homo sapiens; identical to SEQ ID NO: 1221

SEQ ID NO: 1958 - protein, 97 aa, Homo sapiens; identical to SEQ ID NO: 1593

SEQ ID NO: 1959 - protein, 57 aa, Homo sapiens; identical to SEQ ID NO: 1149

SEQ ID NO: 1960 - protein, 78 aa, Homo sapiens; identical to SEQ ID NO: 1150

SEQ ID NO: 1961 - protein, 65 aa, Homo sapiens; identical to SEQ ID NO: 1600

SEQ ID NO: 1962 - protein, 64 aa, Homo sapiens; identical to SEQ ID NO: 1601

SEQ ID NO: 1963 - protein, 79 aa, Homo sapiens; identical to SEQ ID NO: 1609
  variant (1)...(79): Xaa = Any amino acid

SEQ ID NO: 1964 - protein, 87 aa, Homo sapiens; identical to SEQ ID NO: 1515

SEQ ID NO: 1965 - protein, 113 aa, Homo sapiens; identical to SEQ ID NO: 1611
  variant (1)...(113): Xaa = Any amino acid

SEQ ID NO: 1966 - protein, 117 aa, Homo sapiens; identical to SEQ ID NO: 1170

SEQ ID NO: 1967 - protein, 117 aa, Homo sapiens; identical to SEQ ID NO: 1171

SEQ ID NO: 1968 - protein, 83 aa, Homo sapiens; identical to SEQ ID NO: 1172

SEQ ID NO: 1969 - protein, 67 aa, Homo sapiens; identical to SEQ ID NO: 1625
  variant (1)...(67): Xaa = Any amino acid

SEQ ID NO: 1970 - protein, 74 aa, Homo sapiens
IYDSLAYWNWSASKTGWLHRRTRQSRLFLCTDSETVLSGRSSGLPGPDTCPRESPEAWTVLLCFHRSGRGESPW

SEQ ID NO: 1971 - protein, 101 aa, Homo sapiens
KTIYRQFFTSLIFTDSTSYGMAYGLPPKYTILWHIGIGQPQRPAGYIVARDSPAYSSARTRRRSSAGGAQVSLGQTRAPESPQKHGQFCSVSIAQAGERVR

SEQ ID NO: 1972 - protein, 101 aa, Homo sapiens
KQSTGSSLQVSYLQIAQAMAWRMASLLNIRFFGILELVSLKDRLATSSHETVPLIPLHGLGDGPQREELRSPWARHVPQRVPRSMDSSALFPSLRQGRESV

SEQ ID NO: 1973 - protein, 74 aa, Homo sapiens
HGLSPLPERWKQSRTVHASGDSLGHVSGPGRPELLPLRTVSESVQRNKRDCLVRRCSQPVFEADQFQYAKESYI

SEQ ID NO: 1974 - protein, 64 aa, Homo sapiens
GPSPSPCRGISGTVSCDDVASRSLRLTNSNMPKNRIFRREAIRHAIACAICKYETCKELPVDCF

SEQ ID NO: 1975 - protein, 98 aa, Homo sapiens; identical to SEQ ID NO: 1188
  variant (1)...(98): Xaa = Any amino acid

SEQ ID NO: 1976 - protein, 66 aa, Homo sapiens; identical to SEQ ID NO: 1636

SEQ ID NO: 1977 - protein, 84 aa, Homo sapiens; identical to SEQ ID NO: 1637
  variant (1)...(84): Xaa = Any amino acid

SEQ ID NO: 1978 - protein, 64 aa, Homo sapiens; identical to SEQ ID NO: 1638
  variant (1)...(64): Xaa = Any amino acid

SEQ ID NO: 1979 - protein, 69 aa, Homo sapiens; identical to SEQ ID NO: 1651
  variant (1)...(69): Xaa = Any amino acid

SEQ ID NO: 1980 - protein, 57 aa, Homo sapiens [sequence omitted]

SEQ ID NO: 1981 - protein, 66 aa, Homo sapiens; identical to SEQ ID NO: 1653
  variant (1)...(66): Xaa = Any amino acid

SEQ ID NO: 1982 - protein, 67 aa, Homo sapiens; identical to SEQ ID NO: 1654
  variant (1)...(67): Xaa = Any amino acid

SEQ ID NO: 1983 - protein, 99 aa, Homo sapiens; identical to SEQ ID NO: 1655
  variant (1)...(99): Xaa = Any amino acid

SEQ ID NO: 1984 - protein, 50 aa, Homo sapiens; identical to SEQ ID NO: 1205

SEQ ID NO: 1985 - protein, 134 aa, Homo sapiens; identical to SEQ ID NO: 1206

SEQ ID NO: 1986 - protein, 67 aa, Homo sapiens; identical to SEQ ID NO: 1207

SEQ ID NO: 1987 - protein, 60 aa, Homo sapiens; identical to SEQ ID NO: 1208

SEQ ID NO: 1988 - protein, 64 aa, Homo sapiens; identical to SEQ ID NO: 1209

SEQ ID NO: 1989 - protein, 53 aa, Homo sapiens; identical to SEQ ID NO: 1210

SEQ ID NO: 1990 - protein, 62 aa, Homo sapiens; identical to SEQ ID NO: 1667
  variant (1)...(62): Xaa = Any amino acid

SEQ ID NO: 1991 - protein, 86 aa, Homo sapiens; identical to SEQ ID NO: 1668
  variant (1)...(86): Xaa = Any amino acid

SEQ ID NO: 1992 - protein, 185 aa, Homo sapiens
FDDRRGRPVGFPMRGRGGFDRMPPGRGGRPMPPSRRDYDDMSPRRGPPPPPPGRGGRGGSRARNLPLPPPPPPRGGDLMAYDRRGRPGDRYDGMVGFSADETWDSAIDTWSPSEWQMAYEPQGGSGYDYSYAGGRGSYGDLGGPIITTQVTIPKDLAGSIIGKGGQRIKQIRHESGASIKIDEPL

SEQ ID NO: 1993 - protein, 65 aa, Homo sapiens
ALVEDHLPLLPDEAAGVVAELGIFLFLHHHHLEGETSWPMTEEGDLETVTTAWLVSVLMKLGTLQ

SEQ ID NO: 1994 - protein, 112 aa, Homo sapiens
WAPCIYCRVPSFISTETNHAVVTVSRSPSSVIGHEVSPSRWWWWRKRKIPSSATTPAASSGRRGRWSSTRAHIIIISSRWRHGTPTPTRRHSVKTTSSPHGKSHWASATVIK

SEQ ID NO: 1995 - protein, 87 aa, Homo sapiens; identical to SEQ ID NO: 1348

SEQ ID NO: 1996 - protein, 55 aa, Homo sapiens; identical to SEQ ID NO: 1349

SEQ ID NO: 1997 - protein, 123 aa, Homo sapiens; identical to SEQ ID NO: 1681

SEQ ID NO: 1998 - protein, 191 aa, Homo sapiens; identical to SEQ ID NO: 1281

SEQ ID NO: 1999 - protein, 51 aa, Homo sapiens; identical to SEQ ID NO: 1282

SEQ ID NO: 2000 - protein, 51 aa, Homo sapiens; identical to SEQ ID NO: 1283

SEQ ID NO: 2001 - protein, 55 aa, Homo sapiens; identical to SEQ ID NO: 1284

SEQ ID NO: 2002 - protein, 95 aa, Homo sapiens; identical to SEQ ID NO: 1222
  variant (1)...(95): Xaa = Any amino acid

SEQ ID NO: 2003 - protein, 60 aa, Homo sapiens; identical to SEQ ID NO: 1699

SEQ ID NO: 2004 - protein, 57 aa, Homo sapiens; identical to SEQ ID NO: 1700

SEQ ID NO: 2005 - protein, 50 aa, Homo sapiens [sequence omitted]

SEQ ID NO: 2006 - protein, 53 aa, Homo sapiens; identical to SEQ ID NO: 1702

SEQ ID NO: 2007 - protein, 65 aa, Homo sapiens; identical to SEQ ID NO: 1703

SEQ ID NO: 2008 - protein, 64 aa, Homo sapiens [sequence omitted]

SEQ ID NO: 2009 - protein, 52 aa, Homo sapiens; identical to SEQ ID NO: 1705

SEQ ID NO: 2010 - protein, 67 aa, Homo sapiens; identical to SEQ ID NO: 1706

SEQ ID NO: 2011 - protein, 58 aa, Homo sapiens; identical to SEQ ID NO: 1710

SEQ ID NO: 2012 - protein, 76 aa, Homo sapiens; identical to SEQ ID NO: 1337

SEQ ID NO: 2013 - protein, 63 aa, Homo sapiens; identical to SEQ ID NO: 1712

SEQ ID NO: 2014 - protein, 156 aa, Homo sapiens; identical to SEQ ID NO: 1713

SEQ ID NO: 2015 - protein, 62 aa, Homo sapiens; identical to SEQ ID NO: 1248
  variant (1)...(62): Xaa = Any amino acid

SEQ ID NO: 2016 - protein, 86 aa, Homo sapiens; identical to SEQ ID NO: 1249
  variant (1)...(86): Xaa = Any amino acid

SEQ ID NO: 2017 - protein, 69 aa, Homo sapiens [sequence omitted]

SEQ ID NO: 2018 - protein, 102 aa, Homo sapiens; identical to SEQ ID NO: 1251

SEQ ID NO: 2019 - protein, 77 aa, Homo sapiens [sequence omitted]

SEQ ID NO: 2020 - protein, 60 aa, Homo sapiens [sequence omitted]

SEQ ID NO: 2021 - protein, 115 aa, Homo sapiens
  variant (1)...(115): Xaa = Any amino acid
PMWLVFSLQLARFHTLTSLSQPQETMIGLLLLGEKRTQDTHSEWLSSWTVYLHTPRVFHSLMVLSRDPXTICRLSEEKATLXTSLAWPTNXXVVVPVVRSQRRRVPSQEPERANW

SEQ ID NO: 2022 - protein, 50 aa, Homo sapiens
  variant (1)...(50): Xaa = Any amino acid
LDGFISRSXDNLPVVRGEGHTXHILGMAHKSXXGGARCEIPEAQGSIPGA

SEQ ID NO: 2023 - protein, 114 aa, Homo sapiens
  variant (1)...(114): Xaa = Any amino acid
QFALSGSWDGTLRLWDLTTGTTXXRFVGHAKDVXSVAFSSDNRQIVXGSRDKTIKLWNTLGVCKYTVQDESHSEWVSCVRFSPNSSNPIIVSCGWDKLVKVWNLANCKLKTNHI

SEQ ID NO: 2024 - protein, 74 aa, Homo sapiens
  variant (1)...(74): Xaa = Any amino acid
VWPSPLTTGRLSXDLEIKPSSYGIPWVCANTLSRMRATQSGCLVSASRPTAATLSSSPVAGTSWSRYGTWLTAS

SEQ ID NO: 2025 - protein, 62 aa, Homo sapiens; identical to SEQ ID NO: 1743

SEQ ID NO: 2026 - protein, 116 aa, Homo sapiens; identical to SEQ ID NO: 1744

SEQ ID NO: 2027 - protein, 87 aa, Homo sapiens; identical to SEQ ID NO: 1515

SEQ ID NO: 2028 - protein, 113 aa, Homo sapiens [sequence omitted]

SEQ ID NO: 2029 - protein, 79 aa, Homo sapiens; identical to SEQ ID NO: 1517

SEQ ID NO: 2030 - protein, 52 aa, Homo sapiens; identical to SEQ ID NO: 1748

SEQ ID NO: 2031 - protein, 115 aa, Homo sapiens; identical to SEQ ID NO: 1749

SEQ ID NO: 2032 - protein, 52 aa, Homo sapiens; identical to SEQ ID NO: 1750

SEQ ID NO: 2033 - protein, 56 aa, Homo sapiens; identical to SEQ ID NO: 1751

SEQ ID NO: 2034 - protein, 86 aa, Homo sapiens; identical to SEQ ID NO: 1221

SEQ ID NO: 2035 - protein, 62 aa, Homo sapiens; identical to SEQ ID NO: 1220

SEQ ID NO: 2036 - protein, 191 aa, Homo sapiens; identical to SEQ ID NO: 1281

SEQ ID NO: 2037 - protein, 51 aa, Homo sapiens; identical to SEQ ID NO: 1282

SEQ ID NO: 2038 - protein, 51 aa, Homo sapiens; identical to SEQ ID NO: 1283

SEQ ID NO: 2039 - protein, 55 aa, Homo sapiens; identical to SEQ ID NO: 1284

SEQ ID NO: 2040 - protein, 87 aa, Homo sapiens; identical to SEQ ID NO: 1515

SEQ ID NO: 2041 - protein, 113 aa, Homo sapiens [sequence omitted]

SEQ ID NO: 2042 - protein, 79 aa, Homo sapiens; identical to SEQ ID NO: 1517

SEQ ID NO: 2043 - protein, 106 aa, Homo sapiens; identical to SEQ ID NO: 1289

SEQ ID NO: 2044 - protein, 53 aa, Homo sapiens; identical to SEQ ID NO: 1290

SEQ ID NO: 2045 - protein, 55 aa, Homo sapiens; identical to SEQ ID NO: 1144

SEQ ID NO: 2046 - protein, 51 aa, Homo sapiens; identical to SEQ ID NO: 1292

SEQ ID NO: 2047 - protein, 51 aa, Homo sapiens; identical to SEQ ID NO: 1145

SEQ ID NO: 2048 - protein, 78 aa, Homo sapiens; identical to SEQ ID NO: 1307

SEQ ID NO: 2049 - protein, 134 aa, Homo sapiens [sequence omitted]

SEQ ID NO: 2050 - protein, 66 aa, Homo sapiens; identical to SEQ ID NO: 1309

SEQ ID NO: 2051 - protein, 141 aa, Homo sapiens; identical to SEQ ID NO: 1310

SEQ ID NO: 2052 - protein, 61 aa, Homo sapiens; identical to SEQ ID NO: 1311

SEQ ID NO: 2053 - protein, 51 aa, Homo sapiens; identical to SEQ ID NO: 1312

SEQ ID NO: 2054 - protein, 192 aa, Homo sapiens; identical to SEQ ID NO: 1790

SEQ ID NO: 2055 - protein, 75 aa, Homo sapiens [sequence omitted]

SEQ ID NO: 2056 - protein, 64 aa, Homo sapiens; identical to SEQ ID NO: 1792

SEQ ID NO: 2057 - protein, 104 aa, Homo sapiens [sequence omitted]

SEQ ID NO: 2058 - protein, 71 aa, Homo sapiens; identical to SEQ ID NO: 1794

SEQ ID NO: 2059 - protein, 115 aa, Homo sapiens; identical to SEQ ID NO: 1143

SEQ ID NO: 2060 - protein, 55 aa, Homo sapiens; identical to SEQ ID NO: 1144

SEQ ID NO: 2061 - protein, 51 aa, Homo sapiens; identical to SEQ ID NO: 1145

SEQ ID NO: 2062 - protein, 59 aa, Homo sapiens; identical to SEQ ID NO: 1321

SEQ ID NO: 2063 - protein, 64 aa, Homo sapiens; identical to SEQ ID NO: 1322

SEQ ID NO: 2064 - protein, 57 aa, Homo sapiens; identical to SEQ ID NO: 1323

SEQ ID NO: 2065 - protein, 51 aa, Homo sapiens; identical to SEQ ID NO: 1324

SEQ ID NO: 2066 - protein, 50 aa, Homo sapiens; identical to SEQ ID NO: 1332

SEQ ID NO: 2067 - protein, 51 aa, Homo sapiens; identical to SEQ ID NO: 1333

SEQ ID NO: 2068 - protein, 66 aa, Homo sapiens; identical to SEQ ID NO: 1811

SEQ ID NO: 2069 - protein, 83 aa, Homo sapiens; identical to SEQ ID NO: 1812

SEQ ID NO: 2070 - protein, 82 aa, Homo sapiens; identical to SEQ ID NO: 1813

SEQ ID NO: 2071 - protein, 53 aa, Homo sapiens; identical to SEQ ID NO: 1814

SEQ ID NO: 2072 - protein, 63 aa, Homo sapiens; identical to SEQ ID NO: 1818
  variant (1)...(63): Xaa = Any amino acid

SEQ ID NO: 2073 - protein, 70 aa, Homo sapiens; identical to SEQ ID NO: 1819
  variant (1)...(70): Xaa = Any amino acid

SEQ ID NO: 2074 - protein, 76 aa, Homo sapiens; identical to SEQ ID NO: 1820
  variant (1)...(76): Xaa = Any amino acid

SEQ ID NO: 2075 - protein, 67 aa, Homo sapiens
  variant (1)...(67): Xaa = Any amino acid
EXSSQPTVPIVGIIAGLVLLGAVITGAVVAAVMWRRNSSDRKGGSYSQAASSDSAQGSDVSLTACKV

SEQ ID NO: 2076 - protein, 70 aa, Homo sapiens; identical to SEQ ID NO: 1821

SEQ ID NO: 2077 - protein, 70 aa, Homo sapiens; identical to SEQ ID NO: 1822

SEQ ID NO: 2078 - protein, 64 aa, Homo sapiens; identical to SEQ ID NO: 1823

SEQ ID NO: 2079 - protein, 90 aa, Homo sapiens; identical to SEQ ID NO: 1334

SEQ ID NO: 2080 - protein, 52 aa, Homo sapiens; identical to SEQ ID NO: 1335

SEQ ID NO: 2081 - protein, 74 aa, Homo sapiens; identical to SEQ ID NO: 1505

SEQ ID NO: 2082 - protein, 66 aa, Homo sapiens; identical to SEQ ID NO: 1825

SEQ ID NO: 2083 - protein, 60 aa, Homo sapiens; identical to SEQ ID NO: 1340

SEQ ID NO: 2084 - protein, 95 aa, Homo sapiens; identical to SEQ ID NO: 1341

SEQ ID NO: 2085 - protein, 50 aa, Homo sapiens; identical to SEQ ID NO: 1342

SEQ ID NO: 2086 - protein, 62 aa, Homo sapiens; identical to SEQ ID NO: 1830

SEQ ID NO: 2087 - protein, 94 aa, Homo sapiens; identical to SEQ ID NO: 1831

SEQ ID NO: 2088 - protein, 76 aa, Homo sapiens; identical to SEQ ID NO: 1346

SEQ ID NO: 2089 - protein, 68 aa, Homo sapiens; identical to SEQ ID NO: 1347

SEQ ID NO: 2090 - protein, 87 aa, Homo sapiens; identical to SEQ ID NO: 1348

SEQ ID NO: 2091 - protein, 55 aa, Homo sapiens; identical to SEQ ID NO: 1349

SEQ ID NO: 2092 - protein, 120 aa, Homo sapiens; identical to SEQ ID NO: 1350

SEQ ID NO: 2093 - protein, 50 aa, Homo sapiens; identical to SEQ ID NO: 1368

SEQ ID NO: 2094 - protein, 93 aa, Homo sapiens; identical to SEQ ID NO: 1369

SEQ ID NO: 2095 - protein, 65 aa, Homo sapiens; identical to SEQ ID NO: 1370

SEQ ID NO: 2096 - protein, 73 aa, Homo sapiens; identical to SEQ ID NO: 1375

SEQ ID NO: 2097 - protein, 52 aa, Homo sapiens; identical to SEQ ID NO: 1376

SEQ ID NO: 2098 - protein, 64 aa, Homo sapiens; identical to SEQ ID NO: 1377

SEQ ID NO: 2099 - protein, 55 aa, Homo sapiens; identical to SEQ ID NO: 1378

SEQ ID NO: 2100 - protein, 87 aa, Homo sapiens; identical to SEQ ID NO: 1348

SEQ ID NO: 2101 - protein, 55 aa, Homo sapiens; identical to SEQ ID NO: 1349

SEQ ID NO: 2102 - protein, 50 aa, Homo sapiens
TLIIFVHFLQLFQGLLWWRLIIELAVQLIIVILLHMWLWGFFSHSDLFIQ

SEQ ID NO: 2103 - protein, 123 aa, Homo sapiens; identical to SEQ ID NO: 1681

SEQ ID NO: 2104 - protein, 69 aa, Homo sapiens; identical to SEQ ID NO: 1379

SEQ ID NO: 2105 - protein, 66 aa, Homo sapiens; identical to SEQ ID NO: 1380

SEQ ID NO: 2106 - protein, 58 aa, Homo sapiens [sequence omitted]

SEQ ID NO: 2107 - protein, 109 aa, Homo sapiens; identical to SEQ ID NO: 674

SEQ ID NO: 2108 - protein, 100 aa, Homo sapiens; identical to SEQ ID NO: 675

SEQ ID NO: 2109 - protein, 103 aa, Homo sapiens [sequence omitted]

SEQ ID NO: 2110 - protein, 55 aa, Homo sapiens; identical to SEQ ID NO: 1385

SEQ ID NO: 2111 - protein, 97 aa, Homo sapiens; identical to SEQ ID NO: 1386

SEQ ID NO: 2112 - protein, 55 aa, Homo sapiens; identical to SEQ ID NO: 791

SEQ ID NO: 2113 - protein, 89 aa, Homo sapiens; identical to SEQ ID NO: 677

SEQ ID NO: 2114 - protein, 89 aa, Homo sapiens; identical to SEQ ID NO: 678

SEQ ID NO: 2115 - protein, 59 aa, Homo sapiens; identical to SEQ ID NO: 679

SEQ ID NO: 2116 - protein, 71 aa, Homo sapiens; identical to SEQ ID NO: 696
  variant (1)...(71): Xaa = Any amino acid

SEQ ID NO: 2117 - protein, 97 aa, Homo sapiens; identical to SEQ ID NO: 697
  variant (1)...(97): Xaa = Any amino acid

SEQ ID NO: 2118 - protein, 52 aa, Homo sapiens; identical to SEQ ID NO: 698
  variant (1)...(52): Xaa = Any amino acid

SEQ ID NO: 2119 - protein, 70 aa, Homo sapiens; identical to SEQ ID NO: 699

SEQ ID NO: 2120 - protein, 97 aa, Homo sapiens; identical to SEQ ID NO: 700
  variant (1)...(97): Xaa = Any amino acid

SEQ ID NO: 2121 - protein, 72 aa, Homo sapiens [sequence omitted]

SEQ ID NO: 2122 - protein, 51 aa, Homo sapiens; identical to SEQ ID NO: 702

SEQ ID NO: 2123 - protein, 53 aa, Homo sapiens [sequence omitted]

SEQ ID NO: 2124 - protein, 67 aa, Homo sapiens; identical to SEQ ID NO: 1402
  variant (1)...(67): Xaa = Any amino acid

SEQ ID NO: 2125 - protein, 56 aa, Homo sapiens; identical to SEQ ID NO: 712

SEQ ID NO: 2126 - protein, 56 aa, Homo sapiens; identical to SEQ ID NO: 713

SEQ ID NO: 2127 - protein, 56 aa, Homo sapiens; identical to SEQ ID NO: 714

SEQ ID NO: 2128 - protein, 56 aa, Homo sapiens; identical to SEQ ID NO: 729

SEQ ID NO: 2129 - protein, 50 aa, Homo sapiens; identical to SEQ ID NO: 730

SEQ ID NO: 2130 - protein, 70 aa, Homo sapiens; identical to SEQ ID NO: 731

SEQ ID NO: 2131 - protein, 53 aa, Homo sapiens; identical to SEQ ID NO: 732

SEQ ID NO: 2132 - protein, 56 aa, Homo sapiens; identical to SEQ ID NO: 792

SEQ ID NO: 2133 - protein, 177 aa, Homo sapiens; identical to SEQ ID NO: 793
  variant (1)...(177): Xaa = Any amino acid

SEQ ID NO: 2134 - protein, 56 aa, Homo sapiens; identical to SEQ ID NO: 794

SEQ ID NO: 2135 - protein, 70 aa, Homo sapiens [sequence omitted]

SEQ ID NO: 2136 - protein, 53 aa, Homo sapiens; identical to SEQ ID NO: 796

SEQ ID NO: 2137 - protein, 146 aa, Homo sapiens [sequence omitted]

SEQ ID NO: 2138 - protein, 58 aa, Homo sapiens; identical to SEQ ID NO: 798

SEQ ID NO: 2139 - protein, 110 aa, Homo sapiens; identical to SEQ ID NO: 799

SEQ ID NO: 2140 - protein, 110 aa, Homo sapiens; identical to SEQ ID NO: 800

SEQ ID NO: 2141 - protein, 70 aa, Homo sapiens; identical to SEQ ID NO: 801

SEQ ID NO: 2142 - protein, 71 aa, Homo sapiens; identical to SEQ ID NO: 813

SEQ ID NO: 2143 - protein, 124 aa, Homo sapiens; identical to SEQ ID NO: 814

SEQ ID NO: 2144 - protein, 51 aa, Homo sapiens [sequence omitted]

SEQ ID NO: 2145 - protein, 51 aa, Homo sapiens
PRLIASRGSPSADQLNTNFFLLFSTWFGKSHSFQAPSVWRKYILKHPQFTF

SEQ ID NO: 2146 - protein, 66 aa, Homo sapiens; identical to SEQ ID NO: 822

SEQ ID NO: 2147 - protein, 75 aa, Homo sapiens; identical to SEQ ID NO: 823

SEQ ID NO: 2148 - protein, 59 aa, Homo sapiens; identical to SEQ ID NO: 824

SEQ ID NO: 2149 - protein, 94 aa, Homo sapiens; identical to SEQ ID NO: 844
  variant (1)...(94): Xaa = Any amino acid

SEQ ID NO: 2150 - protein, 57 aa, Homo sapiens; identical to SEQ ID NO: 845

SEQ ID NO: 2151 - protein, 93 aa, Homo sapiens; identical to SEQ ID NO: 846
  variant (1)...(93): Xaa = Any amino acid

SEQ ID NO: 2152 - protein, 121 aa, Homo sapiens; identical to SEQ ID NO: 847
  variant (1)...(121): Xaa = Any amino acid

SEQ ID NO: 2153 - protein, 54 aa, Homo sapiens; identical to SEQ ID NO: 848
  variant (1)...(54): Xaa = Any amino acid

SEQ ID NO: 2154 - protein, 59 aa, Homo sapiens; identical to SEQ ID NO: 849

SEQ ID NO: 2155 - protein, 67 aa, Homo sapiens; identical to SEQ ID NO: 850
  variant (1)...(67): Xaa = Any amino acid

SEQ ID NO: 2156 - protein, 55 aa, Homo sapiens; identical to SEQ ID NO: 851
  variant (1)...(55): Xaa = Any amino acid

SEQ ID NO: 2157 - protein, 123 aa, Homo sapiens; identical to SEQ ID NO: 860

SEQ ID NO: 2158 - protein, 71 aa, Homo sapiens; identical to SEQ ID NO: 861

SEQ ID NO: 2159 - protein, 62 aa, Homo sapiens
  variant (1)...(62): Xaa = Any amino acid
DLLGGMAPPGSSTVFLLALTIIASTWALTPTHYLTKHDXERLKASLDPPFHKVGSXVFYSIX

SEQ ID NO: 2160 - protein, 53 aa, Homo sapiens
PWDGSSDHWGPGQARPGLGQQGPGQRGRASFGGVEGYILGWCLHPGVQQDLFQ

SEQ ID NO: 2161 - protein, 83 aa, Homo sapiens [sequence omitted]

SEQ ID NO: 2162 - protein, 115 aa, Homo sapiens [sequence omitted]

SEQ ID NO: 2163 - protein, 165 aa, Homo sapiens
  variant (1)...(165): Xaa = Any amino acid
WQPSSTAISRXVVHRDIKDEXILIDLRRGCAKLIDFGSGALLHDEPYTDFDGTRVYSPPEWISRHQYHALPATVWSLGILLYDMVCGDIPFERDQEILEAELHFPSPCFPQDCCALIRRCLAPKPSSRPSLEEILLDPWMQTPAEDVPLNPSKGGPAPLAWSLLP

SEQ ID NO: 2164 - protein, 91 aa, Homo sapiens [sequence omitted]

SEQ ID NO: 2165 - protein, 66 aa, Homo sapiens [sequence omitted]

SEQ ID NO: 2166 - protein, 82 aa, Homo sapiens [sequence omitted]

SEQ ID NO: 2167 - protein, 118 aa, Homo sapiens; identical to SEQ ID NO: 883

SEQ ID NO: 2168 - protein, 66 aa, Homo sapiens; identical to SEQ ID NO: 884

SEQ ID NO: 2169 - protein, 86 aa, Homo sapiens
  variant (1)...(86): Xaa = Any amino acid
QVVAXIQHCHSRGVVHRDIKDENILIDLRRGCAKLIDFGSGALLHDEPYTDFDGTRVYSPPEWISRHQYHALPATVWSLGIXLYDM

SEQ ID NO: 2170 - protein, 60 aa, Homo sapiens
  variant (1)...(60): Xaa = Any amino acid
TYAVAVPNSLILVLVPCFMMNPTLTLMGQGCTAPQSGSLDTSTMHSRPLSGHWASXSMTW

SEQ ID NO: 2171 - protein, 51 aa, Homo sapiens
  variant (1)...(51): Xaa = Any amino acid
PCHRXGCPVTRQWPGVHGTGVERSTLGGCTPLSHQSQCRVHHEAGHQNQNQ

SEQ ID NO: 2172 - protein, 121 aa, Homo sapiens; identical to SEQ ID NO: 926
  variant (1)...(121): Xaa = Any amino acid

SEQ ID NO: 2173 - protein, 71 aa, Homo sapiens; identical to SEQ ID NO: 927
  variant (1)...(71): Xaa = Any amino acid

SEQ ID NO: 2174 - protein, 122 aa, Homo sapiens; identical to SEQ ID NO: 985

SEQ ID NO: 2175 - protein, 69 aa, Homo sapiens; identical to SEQ ID NO: 986

SEQ ID NO: 2176 - protein, 64 aa, Homo sapiens
ETTWAPPVTPVSGAPTCVLRCRNCRWKLPTSSWVPLAVCLICLTGDTCPPNTSRCLYWMKLTKC

SEQ ID NO: 2177 - protein, 179 aa, Homo sapiens
LVLAPTRELAQQIQKVVMALGDYMGASCHACIGGTNVRAEVQKLQMEAPHIIVGTPGRVFDMLNRRYLSPKYIKMFVLDEADEMLSRGFKDQIYDIFQKLNSNTQVVLLSATMPSDVLEVTKKFMRDPIRILVKKEELTLEGIRQFYINVEREEWKLDTLCDLYETLTITQAVIFINTR

SEQ ID NO: 2178 - protein, 64 aa, Homo sapiens
HFVSFIQYKHLDVFGGQVSPVKHIKHTARGTHDDVGSFHLQFLHLSTHVGAPDTGVTGGAHVVS

SEQ ID NO: 2179 - protein, 52 aa, Homo sapiens
NWRIPSRVNSSFLTRIRMGSLMNFLVTSSTSEGIVADSKTTWVLLLSFWNMS

SEQ ID NO: 2180 - protein, 64 aa, Homo sapiens
IWSLNPRLNISSASSSTNILMYLGDRYLRLSISNTRPGVPTMMWGASICSFCTSARTLVPPIQA

SEQ ID NO: 2181 - protein, 134 aa, Homo sapiens
  variant (1)...(134): Xaa = Any amino acid
VIVRLEAFAVDDGGAGLVILLLADPHLLEGGQRGQDGAADPHGVLALRRSNDLDLHXAGCQGXDLLLHPVXNARVHGGAARQHXVGVQVFADVHVTLHDGVEGSFVDATGLHAQEGRLXXCLRAAEPLIANGDD

SEQ ID NO: 2182 - protein, 129 aa, Homo sapiens
  variant (1)...(129): Xaa = Any amino acid
KHLRWTMEGPDSSYSCLLIHICWKVDSEARMEPPIHTEYLRSGGAMILIFIXLGARAXISFCILSXMPGYMVVPPDSTXLAYRSLRMSTSHFMMELKVVSWMPQDSMPRKEGXXSASGQRNRSLPMVMT

SEQ ID NO: 2183 - protein, 129 aa, Homo sapiens
  variant (1)...(129): Xaa = Any amino acid
VITIGNERFRCPEAXXQPSFLGMESCGIHETTFNSIMKCDVDIRKDLYANXVLSGGTTMYPGIXDRMQKEIXALAPSXMKIKIIAPPERKYSVWIGGSILASLSTFQQMWISKQEYDESGPSIVHRKCF

SEQ ID NO: 2184 - protein, 55 aa, Homo sapiens
RSRSLLLLSASTPCGSAAPSWPRCPPSSRCGSASRSMTSPAPPSSTANASRRTMT

SEQ ID NO: 2185 - protein, 124 aa, Homo sapiens; identical to SEQ ID NO: 814

SEQ ID NO: 2186 - protein, 71 aa, Homo sapiens [sequence omitted]

SEQ ID NO: 2187 - protein, 64 aa, Homo sapiens; identical to SEQ ID NO: 1057
  variant (1)...(64): Xaa = Any amino acid

SEQ ID NO: 2188 - protein, 53 aa, Homo sapiens; identical to SEQ ID NO: 1058
  variant (1)...(53): Xaa = Any amino acid

SEQ ID NO: 2189 - protein, 51 aa, Homo sapiens; identical to SEQ ID NO: 1059
  variant (1)...(51): Xaa = Any amino acid

SEQ ID NO: 2190 - protein, 64 aa, Homo sapiens; identical to SEQ ID NO: 1060
  variant (1)...(64): Xaa = Any amino acid

SEQ ID NO: 2191 - protein, 94 aa, Homo sapiens [sequence omitted]

SEQ ID NO: 2192 - protein, 61 aa, Homo sapiens [sequence omitted]

SEQ ID NO: 2193 - protein, 58 aa, Homo sapiens; identical to SEQ ID NO: 1083
  variant (1)...(58): Xaa = Any amino acid

SEQ ID NO: 2194 - protein, 139 aa, Homo sapiens; identical to SEQ ID NO: 1084
  variant (1)...(139): Xaa = Any amino acid

SEQ ID NO: 2195 - protein, 123 aa, Homo sapiens; identical to SEQ ID NO: 1092

SEQ ID NO: 2196 - protein, 71 aa, Homo sapiens; identical to SEQ ID NO: 813

SEQ ID NO: 2197 - protein, 71 aa, Homo sapiens; identical to SEQ ID NO: 813

SEQ ID NO: 2198 - protein, 124 aa, Homo sapiens; identical to SEQ ID NO: 814

SEQ ID NO: 2199 - protein, 85 aa, Homo sapiens; identical to SEQ ID NO: 1132
  variant (1)...(85): Xaa = Any amino acid

SEQ ID NO: 2200 - protein, 56 aa, Homo sapiens; identical to SEQ ID NO: 1133

SEQ ID NO: 2201 - protein, 70 aa, Homo sapiens; identical to SEQ ID NO: 1134
  variant (1)...(70): Xaa = Any amino acid

SEQ ID NO: 2202 - protein, 82 aa, Homo sapiens; identical to SEQ ID NO: 1135
  variant (1)...(82): Xaa = Any amino acid

SEQ ID NO: 2203 - protein, 56 aa, Homo sapiens; identical to SEQ ID NO: 1136

SEQ ID NO: 2204 - protein, 57 aa, Homo sapiens; identical to SEQ ID NO: 1149

SEQ ID NO: 2205 - protein, 78 aa, Homo sapiens; identical to SEQ ID NO: 1150

SEQ ID NO: 2206 - protein, 63 aa, Homo sapiens
YCKGPLEFLKWLHRIEIISNNCKGTENLHRDEVGFPLGALKFDNKSSTSTGQYIDFGCLRPQD

SEQ ID NO: 2207 - protein, 87 aa, Homo sapiens
TLKYFIIGGNLWRLVASNLGASDTQNLYIDQWKLMICYQISKHLMETPLHLCEDFQFLYSYLKLFQFCGATSETPMGLCNIKMWRMH

SEQ ID NO: 2208 - protein, 174 aa, Homo sapiens; identical to SEQ ID NO: 1158

SEQ ID NO: 2209 - protein, 56 aa, Homo sapiens; identical to SEQ ID NO: 794

SEQ ID NO: 2210 - protein, 52 aa, Homo sapiens; identical to SEQ ID NO: 1160

SEQ ID NO: 2211 - protein, 54 aa, Homo sapiens; identical to SEQ ID NO: 1161

SEQ ID NO: 2212 - protein, 70 aa, Homo sapiens; identical to SEQ ID NO: 1162

SEQ ID NO: 2213 - protein, 50 aa, Homo sapiens; identical to SEQ ID NO: 1163

SEQ ID NO: 2214 - protein, 143 aa, Homo sapiens; identical to SEQ ID NO: 1164

SEQ ID NO: 2215 - protein, 115 aa, Homo sapiens; identical to SEQ ID NO: 1143

SEQ ID NO: 2216 - protein, 55 aa, Homo sapiens; identical to SEQ ID NO: 1144

SEQ ID NO: 2217 - protein, 51 aa, Homo sapiens; identical to SEQ ID NO: 1145

SEQ ID NO: 2218 - protein, 117 aa, Homo sapiens; identical to SEQ ID NO: 1170

SEQ ID NO: 2219 - protein, 117 aa, Homo sapiens; identical to SEQ ID NO: 1171

SEQ ID NO: 2220 - protein, 83 aa, Homo sapiens; identical to SEQ ID NO: 1172

SEQ ID NO: 2221 - protein, 70 aa, Homo sapiens; identical to SEQ ID NO: 1195
  variant (1)...(70): Xaa = Any amino acid

SEQ ID NO: 2222 - protein, 63 aa, Homo sapiens; identical to SEQ ID NO: 1196
  variant (1)...(63): Xaa = Any amino acid

SEQ ID NO: 2223 - protein, 50 aa, Homo sapiens; identical to SEQ ID NO: 1197
  variant (1)...(50): Xaa = Any amino acid

SEQ ID NO: 2224 - protein, 92 aa, Homo sapiens; identical to SEQ ID NO: 1198
  variant (1)...(92): Xaa = Any amino acid

SEQ ID NO: 2225 - protein, 50 aa, Homo sapiens; identical to SEQ ID NO: 1205

SEQ ID NO: 2226 - protein, 134 aa, Homo sapiens; identical to SEQ ID NO: 1206

SEQ ID NO: 2227 - protein, 67 aa, Homo sapiens; identical to SEQ ID NO: 1207

SEQ ID NO: 2228 - protein, 60 aa, Homo sapiens; identical to SEQ ID NO: 1208

SEQ ID NO: 2229 - protein, 64 aa, Homo sapiens; identical to SEQ ID NO: 1209

SEQ ID NO: 2230 - protein, 53 aa, Homo sapiens; identical to SEQ ID NO: 1210

SEQ ID NO: 2231 - protein, 185 aa, Homo sapiens; identical to SEQ ID NO: 1992

SEQ ID NO: 2232 - protein, 65 aa, Homo sapiens; identical to SEQ ID NO: 1993

SEQ ID NO: 2233 - protein, 112 aa, Homo sapiens; identical to SEQ ID NO: 1994

SEQ ID NO: 2234 - protein, 199 aa, Homo sapiens; identical to SEQ ID NO: 1216

SEQ ID NO: 2235 - protein, 76 aa, Homo sapiens; identical to SEQ ID NO: 1217

SEQ ID NO: 2236 - protein, 122 aa, Homo sapiens; identical to SEQ ID NO: 1218

SEQ ID NO: 2237 - protein, 56 aa, Homo sapiens; identical to SEQ ID NO: 1219

SEQ ID NO: 2238 - protein, 50 aa, Homo sapiens
LREGSGWVRGDGEGKGGVSIFILRIGVQSTSGVSAPPCPPVGLRRTGKRT

SEQ ID NO: 2239 - protein, 50 aa, Homo sapiens
RALTESSRNSGTVSRGPALHGPGPPPSPSPRPEPRATRSAAAAAWPGTIS

SEQ ID NO: 2240 - protein, 55 aa, Homo sapiens
  variant (1)...(55): Xaa = Any amino acid
SRPPALPGSTSPVHVLILHFAFYHKIFLWPGAFGPSASSCHQRGPSGSTWRPXVQ

SEQ ID NO: 2241 - protein, 75 aa, Homo sapiens
QRAAETLELFPEGLHCMDQGHHLLLHPGQNPVPPGLQPLQHGLEPSHDLVTKALPRLLGCGILNIRDRGSVASAP

SEQ ID NO: 2242 - protein, 103 aa, Homo sapiens
DWKEDMKSSDREQQKLWNCFQRACTAWTRATTFSFTQARTPCHQVCSRCSMAWNHLMTLSQKLSPGSSVAGSSTSGTGDLLPRHRNPSLSFSSRGVSSRCCSS

SEQ ID NO: 2243 - protein, 76 aa, Homo sapiens
QGHEMVPGHAAAAADLVARGSGLGEGEGGGPGPCSAGPLETVPEFLLLSVRALHVLFPVLRSPTGGQGGADTPEVL

SEQ ID NO: 2244 - protein, 194 aa, Homo sapiens
  variant (1)...(194): Xaa = Any amino acid
LEXLAAMCFPKVLSDDMKKLKARMHQAIERFYDKMQNAESGRGQVMSSLAELEDDFKEGYLETVAAYYEEQHLELTPLLEKERDGLRCRGNRSPVPDVEDPATEEPGESFCDKVMRWFQAMLQRLQTWWHGVLAWVKEKVVALVHAVQALWKQFQSFCCSLSELFMSSFQSYGAPRGDKEELTPQKCSEPQSSK

SEQ ID NO: 2245 - protein, 87 aa, Homo sapiens; identical to SEQ ID NO: 1348

SEQ ID NO: 2246 - protein, 55 aa, Homo sapiens; identical to SEQ ID NO: 1349

SEQ ID NO: 2247 - protein, 119 aa, Homo sapiens
EKAPEPHVEEDDDDELDSKLNYKPPPQKSLKELQEMDKDDESLIKYKKTLLGDGPVVTDPKAPNVVVTRLTLVCESAPGPITMDLTGDLEALKKETIVLKEGSEYRVKIHFKVNRDIVS

SEQ ID NO: 2248 - protein, 55 aa, Homo sapiens; identical to SEQ ID NO: 1237

SEQ ID NO: 2249 - protein, 54 aa, Homo sapiens; identical to SEQ ID NO: 1238

SEQ ID NO: 2250 - protein, 147 aa, Homo sapiens; identical to SEQ ID NO: 1239

SEQ ID NO: 2251 - protein, 135 aa, Homo sapiens; identical to SEQ ID NO: 1240

SEQ ID NO: 2252 - protein, 151 aa, Homo sapiens; identical to SEQ ID NO: 1241

SEQ ID NO: 2253 - protein, 60 aa, Homo sapiens [sequence omitted]

SEQ ID NO: 2254 - protein, 70 aa, Homo sapiens
  variant (1)...(70): Xaa = Any amino acid
GIRSQLSLNSQSPPWASLPNDLVALGASEVNPEILPPSTLGSDLCPSLXHKEISVKXVGTGGFRPCSKAT

SEQ ID NO: 2255 - protein, 77 aa, Homo sapiens
GERPRVGTGNLRRAGNGSLRFRKLLYKLRGWLGPKGCSARRASCELSKALGSQHPKSLWLQSCVCTTQSKGSFCFVF

SEQ ID NO: 2256 - protein, 115 aa, Homo sapiens; identical to SEQ ID NO: 1143

SEQ ID NO: 2257 - protein, 55 aa, Homo sapiens; identical to SEQ ID NO: 1144

SEQ ID NO: 2258 - protein, 51 aa, Homo sapiens; identical to SEQ ID NO: 1247
  variant (1)...(51): Xaa = Any amino acid

SEQ ID NO: 2259 - protein, 69 aa, Homo sapiens [sequence omitted]

SEQ ID NO: 2260 - protein, 102 aa, Homo sapiens; identical to SEQ ID NO: 1251

SEQ ID NO: 2261 - protein, 77 aa, Homo sapiens [sequence omitted]

SEQ ID NO: 2262 - protein, 60 aa, Homo sapiens [sequence omitted]

SEQ ID NO: 2263 - protein, 60 aa, Homo sapiens; identical to SEQ ID NO: 1778

SEQ ID NO: 2264 - protein, 55 aa, Homo sapiens
  variant (1)...(55): Xaa = Any amino acid
GIRSQLSLNSQSPPWASLPNDLVALGAPEXNPEILPPSTLGSDLCPSLCHKEISV

SEQ ID NO: 2265 - protein, 77 aa, Homo sapiens
  variant (1)...(77): Xaa = Any amino acid
GERPRVGTGNLRRAGNGSLRFRKLLCKLRGWLGPKGCSARRASCELSKALGSQHPKSLWLQSCVCXTHSKGSFCFVF

SEQ ID NO: 2266 - protein, 115 aa, Homo sapiens; identical to SEQ ID NO: 1143

SEQ ID NO: 2267 - protein, 55 aa, Homo sapiens; identical to SEQ ID NO: 1255
  variant (1)...(55): Xaa = Any amino acid

SEQ ID NO: 2268 - protein, 51 aa, Homo sapiens; identical to SEQ ID NO: 1256
  variant (1)...(51): Xaa = Any amino acid

SEQ ID NO: 2269 - protein, 101 aa, Homo sapiens; identical to SEQ ID NO: 1766

SEQ ID NO: 2270 - protein, 124 aa, Homo sapiens; identical to SEQ ID NO: 1767

SEQ ID NO: 2271 - protein, 100 aa, Homo sapiens; identical to SEQ ID NO: 1768

SEQ ID NO: 2272 - protein, 54 aa, Homo sapiens
RRTSQTDGTQAGWVLYPRSQEGRVSCTVVNRRAAWRQWLSQKVTQSSCLERESL

SEQ ID NO: 2273 - protein, 72 aa, Homo sapiens
LRIQRCWGEKSSIDSTFQDVHFGERSRWDPQENDGEHPRQMGLKQDGCYIQEAKKGEFRALWLTGGLPGGSG

SEQ ID NO: 2274 - protein, 55 aa, Homo sapiens
VPSVWDVLRHFLEGPTCSSPRNGHPGRWSLYCFSLPSNVESGVSLGSANNGCHLQ

SEQ ID NO: 2275 - protein, 74 aa, Homo sapiens
PQCTKLSLLGFLDIAPILLESHLSGMFSVIFLRVPPAPLPEMDILEGGVYTAFLSPATLNPESAWAPQTTAAIS

SEQ ID NO: 2276 - protein, 69 aa, Homo sapiens
  variant (1)...(69): Xaa = Any amino acid
SRWMEQKINLXLVRTPFWGCPLPSAKLVPLRRGSPCTATSLTWLATLKSSCQSRRSMSSMAVLMLATSW

SEQ ID NO: 2277 - protein, 120 aa, Homo sapiens
  variant (1)...(120): Xaa = Any amino acid
YEALELRDNDKTRYMGKGVSKAVEHINKTIAPALVSKKLNVTEQEKIDKLMIEMDGTENKSXFGANAILGVSLAVCKAGAVEKGVPLYRHIADLAGNSEVILPVPAFNVINGGSHAGNKL

SEQ ID NO: 2278 - protein, 100 aa, Homo sapiens
  variant (1)...(100): Xaa = Any amino acid
QLVASMRTAIDDIERRDWQDDFRVASQVSDVAVQGDPLLNGTSFADGKGHPQNGVRTKXRFIFCSIHLDHQFVNLLLFCDVQFLANQGRRNSFIDVLNSL

SEQ ID NO: 2279 - protein, 100 aa, Homo sapiens
  variant (1)...(100): Xaa = Any amino acid
EPPLMTLNAGTGRMTSELPAKSAMWRYRGTPFSTAPALQTARDTPRMAFAPXLDLFSVPSISIISLSIFSCSVTFSFLLTRAGAIVLLMCSTAFETPFPI

SEQ ID NO: 2280 - protein, 75 aa, Homo sapiens
LDNPGSGGGCKNLQKLEGAPQENKQQALFPLAHPPKNHPSHPSVWWCPVVSIFHSFPNYGSKVLLTRIRALGITE

SEQ ID NO: 2281 - protein, 51 aa, Homo sapiens
  variant (1)...(51): Xaa = Any amino acid
GPLTQKKKKKXSLGVTTGHYLPQNKESWAEAGKQLDPIWDPRLGERVPLLK

SEQ ID NO: 2282 - protein, 57 aa, Homo sapiens
NNPGRRREEGTLGTPLPTIRDYLHFSNWTIPAQEEVARICKSWRERPRRTNSKPYFP

SEQ ID NO: 2283 - protein, 68 aa, Homo sapiens
IIQAGEERRAHLELPSPQYVIIYILVIGQSRLRRRLQESAKVGGSAPGEQTASLISPSPSPKKPSIPS

SEQ ID NO: 2284 - protein, 66 aa, Homo sapiens
  variant (1)...(66): Xaa = Any amino acid
CVTPHWXLLLXPXKLSSYALTWARVLSFQYPSSFYFSKGTLSPSLGSHIGSSCLPASAQDSLFWGR

SEQ ID NO: 2285 - protein, 59 aa, Homo sapiens
FGKEWKMDTTGHHQTLGWDGWFFGGWARGNKACCLFSWGAPSNFCRFLQPPPEPGLSNY

SEQ ID NO: 2286 - protein, 50 aa, Homo sapiens
  variant (1)...(50): Xaa = Any amino acid
DSYSDDVSPHIGXSYYXHXNLVHMLLLGQGCFPSNTPVAFILVKGPFPLA

SEQ ID NO: 2287 - protein, 87 aa, Homo sapiens
  variant (1)...(87): Xaa = Any amino acid
PRVPYWVKLLTCLSPGFFILGEVMPCCYPKAXFFFFFLGEGTLLCYPKCSYSGEKNLTSIIWEGMEDGHHRTPPDTRMGWMVFWGMG

SEQ ID NO: 2288 - protein, 88 aa, Homo sapiens
TSVEPLSRGPWVPNTKIPTAERAADHLVRIPVAFISKINSPFLRLSESWVYALKKAELLDSLTSCHRVLNVSDHKGLHTFAVCSGATY

SEQ ID NO: 2289 - protein, 53 aa, Homo sapiens
VFLYWEPKVLCLVAQRLSTFPRLNACGALSTSTCSQGPPSLSSNAQDRVDLIG

SEQ ID NO: 2290 - protein, 51 aa, Homo sapiens
FSFFQGIDPRLRQPQERGVYFGYKGNRNPDQMVSSPLSSRYFCIGNPRSSA

SEQ ID NO: 2291 - protein, 81 aa, Homo sapiens
TQDSDNLKKGEFILDIKATGILTKWSAALSAVGIFVLGTQGPLLSGSTLVYLSKAQRLWSLVHKHLLPRASLPEFKRPRQS

SEQ ID NO: 2292 - protein, 125 aa, Homo sapiens; identical to SEQ ID NO: 1301

SEQ ID NO: 2293 - protein, 59 aa, Homo sapiens; identical to SEQ ID NO: 1302

SEQ ID NO: 2294 - protein, 100 aa, Homo sapiens; identical to SEQ ID NO: 1303

SEQ ID NO: 2295 - protein, 50 aa, Homo sapiens; identical to SEQ ID NO: 1304

SEQ ID NO: 2296 - protein, 131 aa, Homo sapiens; identical to SEQ ID NO: 1305

SEQ ID NO: 2297 - protein, 53 aa, Homo sapiens; identical to SEQ ID NO: 1306

SEQ ID NO: 2298 - protein, 78 aa, Homo sapiens; identical to SEQ ID NO: 1307

SEQ ID NO: 2299 - protein, 134 aa, Homo sapiens [sequence omitted]

SEQ ID NO: 2300 - protein, 66 aa, Homo sapiens; identical to SEQ ID NO: 1309

SEQ ID NO: 2301 - protein, 141 aa, Homo sapiens; identical to SEQ ID NO: 1310

SEQ ID NO: 2302 - protein, 50 aa, Homo sapiens; identical to SEQ ID NO: 2238

SEQ ID NO: 2303 - protein, 50 aa, Homo sapiens
RALTESSRNSGTVSRGPALHGPGPPPSPSPRPEPRATRPAAAAAWPGTIS

SEQ ID NO: 2304 - protein, 75 aa, Homo sapiens; identical to SEQ ID NO: 2241

SEQ ID NO: 2305 - protein, 60 aa, Homo sapiens [sequence omitted]

SEQ ID NO: 2306 - protein, 103 aa, Homo sapiens [sequence omitted]

SEQ ID NO: 2307 - protein, 177 aa, Homo sapiens
PWLLELLAAMCFPKVLSDDMKKLKARMVMSSLAELEDDFKEGYLETVAAYYEEQHPELTPLLEKERDGLRCRGNRSPVPDVEDPATEEPGESFCDKVMRWFQAMLQRLQAWWHGVLAWVKEKVVALVHAVQALWKQFQSFCCSLSELFMSSFQSYGAPRGDKEELTPQKCSEPQSSK

SEQ ID NO: 2308 - protein, 69 aa, Homo sapiens
CRAWQSWRTTSKRATWRQWRLIMRSSTQSSLLYLKKKEMDYGAEATDPLSRMLRIPQPRSLGRAFVTRS

SEQ ID NO: 2309 - protein, 76 aa, Homo sapiens
QGHEMVPGHAAAAAGLVARGSGLGEGEGGGPGPCSAGPLETVPEFLLLSVRALHVLFPVLRSPTGGQGGADTPEVL

SEQ ID NO: 2310 - protein, 50 aa, Homo sapiens; identical to SEQ ID NO: 1332

SEQ ID NO: 2311 - protein, 51 aa, Homo sapiens; identical to SEQ ID NO: 1333

SEQ ID NO: 2312 - protein, 63 aa, Homo sapiens; identical to SEQ ID NO: 1818
  variant (1)...(63): Xaa = Any amino acid

SEQ ID NO: 2313 - protein, 70 aa, Homo sapiens; identical to SEQ ID NO: 1819
  variant (1)...(70): Xaa = Any amino acid

SEQ ID NO: 2314 - protein, 76 aa, Homo sapiens; identical to SEQ ID NO: 1820
  variant (1)...(76): Xaa = Any amino acid

SEQ ID NO: 2315 - protein, 67 aa, Homo sapiens; identical to SEQ ID NO: 2075
  variant (1)...(67): Xaa = Any amino acid

SEQ ID NO: 2316 - protein, 62 aa, Homo sapiens; identical to SEQ ID NO: 1830

SEQ ID NO: 2317 - protein, 94 aa, Homo sapiens; identical to SEQ ID NO: 1831

SEQ ID NO: 2318 - protein, 76 aa, Homo sapiens; identical to SEQ ID NO: 1346

SEQ ID NO: 2319 - protein, 68 aa, Homo sapiens; identical to SEQ ID NO: 1347

SEQ ID NO: 2320 - protein, 59 aa, Homo sapiens; identical to SEQ ID NO: 1354

SEQ ID NO: 2321 - protein, 68 aa, Homo sapiens; identical to SEQ ID NO: 1355

SEQ ID NO: 2322 - protein, 58 aa, Homo sapiens
  variant (1)...(58): Xaa = Any amino acid
SATYGXQAGVVPWLSPXTSERPTLSSSPXINPETQAALIRGQDSTIAASEQQVAXXNS

SEQ ID NO: 2323 - protein, 60 aa, Homo sapiens
  variant (1)...(60): Xaa = Any amino acid
QHQNSKWXXRILDSXDXATVNPVEFNTEVATPPFSLLXTSNETXFLIGINEEXLEGXAIY

SEQ ID NO: 2324 - protein, 67 aa, Homo sapiens
  variant (1)...(67): Xaa = Any amino acid
IDCXAFQXLFINANQEXCFIRSXQKGKWWCCNLSIKFHRVYCCXIXGIKNSXXPLAVLMLLSWNPAL

SEQ ID NO: 2325 - protein, 158 aa, Homo sapiens; identical to SEQ ID NO: 1356
  variant (1)...(158): Xaa = Any amino acid

SEQ ID NO: 2326 - protein, 68 aa, Homo sapiens; identical to SEQ ID NO: 1357
  variant (1)...(68): Xaa = Any amino acid

SEQ ID NO: 2327 - protein, 64 aa, Homo sapiens; identical to SEQ ID NO: 1358
  variant (1)...(64): Xaa = Any amino acid

SEQ ID NO: 2328 - protein, 103 aa, Homo sapiens; identical to SEQ ID NO: 1359
  variant (1)...(103): Xaa = Any amino acid

SEQ ID NO: 2329 - protein, 123 aa, Homo sapiens; identical to SEQ ID NO: 1360
  variant (1)...(123): Xaa = Any amino acid

SEQ ID NO: 2330 - protein, 68 aa, Homo sapiens; identical to SEQ ID NO: 1347

SEQ ID NO: 2331 - protein, 64 aa, Homo sapiens; identical to SEQ ID NO: 1362
  variant (1)...(64): Xaa = Any amino acid

SEQ ID NO: 2332 - protein, 104 aa, Homo sapiens; identical to SEQ ID NO: 1363
  variant (1)...(104): Xaa = Any amino acid

SEQ ID NO: 2333 - protein, 73 aa, Homo sapiens [sequence omitted]

SEQ ID NO: 2334 - protein, 66 aa, Homo sapiens [sequence omitted]

SEQ ID NO: 2335 - protein, 59 aa, Homo sapiens
ALWADLPLTYYSRSAVTSWDLPLPASIPKSSPAITVGMSTQKLSQPHQDSCEKRGYVHT

SEQ ID NO: 2336 - protein, 68 aa, Homo sapiens
  variant (1)...(68): Xaa = Any amino acid
VEDXTPIPCRSIGRSKVSSMGRSTPYLLFQICSHFVGSAPPCFNTQILSSYNSRDEYPKAQPAPSGLL

SEQ ID NO: 2337 - protein, 58 aa, Homo sapiens
AQLGSECKKLSMVREACALIQVYSTLSGDQNPLLITPLQRGDWALPLFDKPLTQVLTP

SEQ ID NO: 2338 - protein, 68 aa, Homo sapiens; identical to SEQ ID NO: 1371
  variant (1)...(68): Xaa = Any amino acid

SEQ ID NO: 2339 - protein, 143 aa, Homo sapiens; identical to SEQ ID NO: 1372
  variant (1)...(143): Xaa = Any amino acid

SEQ ID NO: 2340 - protein, 64 aa, Homo sapiens; identical to SEQ ID NO: 1373
  variant (1)...(64): Xaa = Any amino acid

SEQ ID NO: 2341 - protein, 103 aa, Homo sapiens; identical to SEQ ID NO: 1374
  variant (1)...(103): Xaa = Any amino acid

SEQ ID NO: 2342 - protein, 162 aa, Homo sapiens
  variant (1)...(162): Xaa = Any amino acid
QMHLWAGGDLGLCWNWISELLLHLFSSHPGLFRAAVPSGASTGIYEALELRDNDKTRYMGKGVSKAVEHXNKTIAPALVSKKLNVTEQEKIDKLMIEMDGTENKSKFGANAILGVSLAVCKAGAVEKGVPLYRHIADLAGNSEVILPVPAFNVINGXSHAGN

SEQ ID NO: 2343 - protein, 55 aa, Homo sapiens
RKKQLPNDKCICGREGTWDCAGTGFLNCYYIFFPLIQVSSELLCPVVLQLVSMRP

SEQ ID NO: 2344 - protein, 66 aa, Homo sapiens
  variant (1)...(66): Xaa = Any amino acid
SRWMEQKINLSLVRTPFWGCPLPSAKLVPLRRGSPCTATSLTWLATLKSSCQSRRSMSSMAXLMLA

SEQ ID NO: 2345 - protein, 98 aa, Homo sapiens
  variant (1)...(98): Xaa = Any amino acid
VASMRXAIDDIERRDWQDDFRVASQVSDVAVQGDPLLNGTSFADGKGHPQNGVRTKLRFIFCSIHLDHQFVNLLLFCDVQFLANQGRRNSFIXVLNSL

SEQ ID NO: 2346 - protein, 100 aa, Homo sapiens
  variant (1)...(100): Xaa = Any amino acid
XPPLMTLNAGTGRMTSELPAKSAMWRYRGTPFSTAPALQTARDTPRMAFAPNLDLFSVPSISIISLSIFSCSVTFSFLLTRAGAIVLXMCSTAFETPFPI

SEQ ID NO: 2347 - protein, 73 aa, Homo sapiens; identical to SEQ ID NO: 1375

SEQ ID NO: 2348 - protein, 52 aa, Homo sapiens; identical to SEQ ID NO: 1376

SEQ ID NO: 2349 - protein, 64 aa, Homo sapiens; identical to SEQ ID NO: 1377

SEQ ID NO: 2350 - protein, 55 aa, Homo sapiens; identical to SEQ ID NO: 1378

SEQ ID NO: 2351 - protein, 87 aa, Homo sapiens; identical to SEQ ID NO: 1348

SEQ ID NO: 2352 - protein, 55 aa, Homo sapiens; identical to SEQ ID NO: 1349

SEQ ID NO: 2353 - protein, 50 aa, Homo sapiens; identical to SEQ ID NO: 2102

SEQ ID NO: 2354 - protein, 123 aa, Homo sapiens; identical to SEQ ID NO: 1681

SEQ ID NO: 2355 - protein, 69 aa, Homo sapiens; identical to SEQ ID NO: 1379

SEQ ID NO: 2356 - protein, 66 aa, Homo sapiens; identical to SEQ ID NO: 1380

SEQ ID NO: 2357 - protein, 156 aa, Homo sapiens
  variant (1)...(156): Xaa = Any amino acid
QKLLKCXRLVLALALILVLESSVQGYPTQRARYQWVRCNPDSNSANCLEEKGPMFELLPGESNKIPRLRTDLFPKTRIQDLNRIFPLSEDYSGSGFGSGSGSGSGSGSGFLTEMEQDYQLVDESDAFHDNLRSLDRNLPSDSQDLGQHGLEEDFML

SEQ ID NO: 2358 - protein, 67 aa, Homo sapiens
  variant (1)...(67): Xaa = Any amino acid
RSYSNXVGLSWLLPSSWFWNPQFKVILRREPGTNGCAAIQTVILQTALKKKDQCSNYFQVNPTRSPV

SEQ ID NO: 2359 - protein, 64 aa, Homo sapiens
SSESGKIRFKSWILVFGKRSVLRRGILLDSPGSSSNIGPFSSRQFAELLSGLQRTHWYLALCVG

SEQ ID NO: 2360 - protein, 103 aa, Homo sapiens
GCHGKHHFRLLVGNPVPFPLGSHSQILIQSRSRSRSLIQSSPQKVGRYDSSPGFSSLEKGQSSDGGSCWIHLEVVRTLVLFLQGSLQNYCLDCSAPIGTWLSA

SEQ ID NO: 2361 - protein, 180 aa, Homo sapiens
GNDGAQRSFCQSCFNELNDLFKAACLPLPGYRVREITENLMATGDLDQDGRISFDEFIKIFHGLKSTDVAKTFRKAINKKEGICAIGGTSEQSSVGTQHSYSEEEKYAFVNWINKALENDPDCRHVIPMNPNTNDLFNAVGDGIVLCKMINLSVPDTIDERTINKKKLTPFTIQENLNLA

SEQ ID NO: 2362 - protein, 72 aa, Homo sapiens
MVKGVSFFLLIVLSSIVSGTDRLIILQRTMPSPTALKRSFVFGFIGMTCRQSGSFSRALFIQLTKAYFSSSE

SEQ ID NO: 2363 - protein, 94 aa, Homo sapiens
ECWVPTLDCSEVPPIAQIPSFLLIAFLKVLATSVLFRPWKILINSSKLILPSWSRSPVAIRFSVISRTLYPGKGKQAALNKSFNSLKQLWQKLL

SEQ ID NO: 2364 - protein, 50 aa, Homo sapiens
QVDHFTKDNAISNSIKEIIRVWVHWDDMPTIRIIFQGFVYPVDKGILFFL

SEQ ID NO: 2365 - protein, 70 aa, Homo sapiens
AMENLDKLIKADPSILVQITCSHQVFCNFSYSIPRQRQASSLEQVIQLIEATLAKASLSSIISSSDTDPL

SEQ ID NO: 2366 - protein, 54 aa, Homo sapiens
NPDHHPGSHLHQHPEEGGLAHREDACSRFHCIRHAWRYGPKGTRRDYEGVSFWL

SEQ ID NO: 2367 - protein, 187 aa, Homo sapiens
QMEAPHIIVGTPGRVFDMLNRRYLSPKYIKMFVLDEADEMLSRGFKDQIYDIFQKLNSNTQVVLLSATMPSDVLEVTKKFMRDPIRILVKKEELTLEGIRQFYINVEREEWKLDTLCDLYETLTITQAVIFINTRRKVDWLTEKMHARDFTVSAMHGDMDQKERDVIMREFRSGSSRVLITTDLLDL

SEQ ID NO: 2368 - protein, 71 aa, Homo sapiens [sequence omitted]

SEQ ID NO: 2369 - protein, 84 aa, Homo sapiens
RSSRSVVIKTLLEPERNSLIITSRSFWSISPCMADTVKSRACIFSVSQSTFLRVLMKMTAWVMVRVSYKSHSVSSFHSSRSTLM

SEQ ID NO: 2370 - protein, 52 aa, Homo sapiens; identical to SEQ ID NO: 2179

SEQ ID NO: 2371 - protein, 54 aa, Homo sapiens [sequence omitted]

SEQ ID NO: 2372 - protein, 161 aa, Homo sapiens
QMPSDKTIGGGDDSFNTFFSETGAGKHVPRAVFVDLEPTVIDEVRTGTYRQLFHPEQLITGKEDAANNYARGHYTIGKEIIDLVLDRIRKLADQCTGLQGFLVFHSFGGGTGSGFTSLLMERLSVDYGKKSKLEFSIYPAPQVSTGEETRVCLECRLGGGR

SEQ ID NO: 2373 - protein, 132 aa, Homo sapiens
TWNPQSLMKFALALTASSSTLSNSSQARKMLPITMPEGTTPLARRSLTSCWTEFASWLTSAPVFRASWFSTALVGELVLGSPRCSWNVSQLIMARSPSWSSPFTRRPRFPQERRPESAWSADWEGADDWGGA

SEQ ID NO: 2374 - protein, 123 aa, Homo sapiens
ETFHEQRGEPRTSSPTKAVENQEALKTGALVSQLANSVQHEVNDLLANGVVPSGIVIGSIFLACDELLRVEELAVSASANFINDCGFQVYKHCPGYMLASTRFTEEGVEGIISSPNGLVTWHL

SEQ ID NO: 2375 - protein, 57 aa, Homo sapiens
DRIITPEISSCSTPVICPLPVCTPGRLWSPLLWKPGAPGKWRTPAWTSCHNQLRDVP

SEQ ID NO: 2376 - protein, 53 aa, Homo sapiens [sequence omitted]

SEQ ID NO: 2377 - protein, 67 aa, Homo sapiens; identical to SEQ ID NO: 1402
  variant (1)...(67): Xaa = Any amino acid

SEQ ID NO: 2378 - protein, 51 aa, Homo sapiens; identical to SEQ ID NO: 1877
  variant (1)...(51): Xaa = Any amino acid

SEQ ID NO: 2379 - protein, 60 aa, Homo sapiens; identical to SEQ ID NO: 767

SEQ ID NO: 2380 - protein, 51 aa, Homo sapiens; identical to SEQ ID NO: 783
  variant (1)...(51): Xaa = Any amino acid

SEQ ID NO: 2381 - protein, 59 aa, Homo sapiens; identical to SEQ ID NO: 784
  variant (1)...(59): Xaa = Any amino acid

SEQ ID NO: 2382 - protein, 59 aa, Homo sapiens; identical to SEQ ID NO: 785
  variant (1)...(59): Xaa = Any amino acid

SEQ ID NO: 2383 - protein, 58 aa, Homo sapiens; identical to SEQ ID NO: 786
  variant (1)...(58): Xaa = Any amino acid

SEQ ID NO: 2384 - protein, 135 aa, Homo sapiens
  variant (1)...(135): Xaa = Any amino acid
XRSSPKPVLCHQSKERKPSAEMNRITTKEATSSCPPKSPLGETRQKLWRSLKMLPERGQRVRQQLKSHLATVNLSSLLDVRRSTVISGPGTGKGSQDHSGDPTSGDRGYTDPCAATSXKSPSQPQAPKXXKVPTR

SEQ ID NO: 2385 - protein, 50 aa, Homo sapiens
  variant (1)...(50): Xaa = Any amino acid
SQALGPEKAAKITQGIPPRGTEATRIPVRPHXXKAPHSPRHQXTXRSPPG

SEQ ID NO: 2386 - protein, 134 aa, Homo sapiens
  variant (1)...(134): Xaa = Any amino acid
EVLPKASPVSPIKGKEAVSRDEQNNHQGSHFLLPPKIPSWRDPPETLEEPQNAPRERPEGPAAAKKPPRHCELVVTLGCPEIHGDLRPWDRKRQPRSLRGSHLGGQRLHGSLCGHIXXKPLTAPGTKXXKGPHQ

SEQ ID NO: 2387 - protein, 84 aa, Homo sapiens
  variant (1)...(84): Xaa = Any amino acid
SWWGPXCXLVPGAVRGFXXMWPHRDPCSLCPPRWDPLSDLGCLFRSQGLRSPWISGHPRVTTSSQWRGGFLAAAGPSGLSRGAF

SEQ ID NO: 2388 - protein, 50 aa, Homo sapiens [sequence omitted]

SEQ ID NO: 2389 - protein, 86 aa, Homo sapiens
SWLPFPVPGPEITVDLRTSKSDDKFTVARWLFSCCRTLWPLSGSILRLLQSFWRVSPRGDFGGQEEVASLVVILFISADGFLSFDW

SEQ ID NO: 2390 - protein, 78 aa, Homo sapiens [sequence omitted]

SEQ ID NO: 2391 - protein, 51 aa, Homo sapiens
EPIRNNRFSNQDHCSSWRNPWIPLSLYLHYHSLGSSLLSQVANLDSIHRCR

SEQ ID NO: 2392 - protein, 50 aa, Homo sapiens [sequence omitted]

SEQ ID NO: 2393 - protein, 82 aa, Homo sapiens
AKWQIWTVSIDADEPHPGTGEVEDIEQLNQCLIQHFHLIKTSLIFLCFLFHGIHENLLTVGVSKEAYLMTSVNGKNKTKMLY

SEQ ID NO: 2394 - protein, 78 aa, Homo sapiens [sequence omitted]

SEQ ID NO: 2395 - protein, 64 aa, Homo sapiens
KFILFYNTFRFIEKLGRWYKEFPYIPYPVSPNNILHWYIMVVTIKWANIDTLVLTKVHTLFRFH

SEQ ID NO: 2396 - protein, 57 aa, Homo sapiens
NLNKVWTLVNTNVSILAHLIVTTIIYQCKMLLGETGYGIYGNSLYHLPNFSINLKVL

SEQ ID NO: 2397 - protein, 74 aa, Homo sapiens
  variant (1)...(74): Xaa = Any amino acid
KSRRTAASIGSGLKKKICSQSVLEVTSPTKLTPYAVLRRWRHQAQKRKFXISHWESKVPPSQNDNCTVAEQTPP

SEQ ID NO: 2398 - protein, 57 aa, Homo sapiens
  variant (1)...(57): Xaa = Any amino acid
LKVKKDSSKHRLRIKEKNLLTVCSGGHITNKAHALCSSEKVEAPGSKEEIXNFSLGE

SEQ ID NO: 2399 - protein, 58 aa, Homo sapiens
  variant (1)...(58): Xaa = Any amino acid
LQQTGWGPPTLGWSLFCHCAVIILGWGYLTLPMRNXKFPLLSLVPPPSQNCIGRELCW

SEQ ID NO: 2400 - protein, 59 aa, Homo sapiens
  variant (1)...(59): Xaa = Any amino acid
LQDSREXANIQLADDFAGKQRKXVKACLPARKLDTKXRFGARKQTQKAHSKRRKKPQNL

SEQ ID NO: 2401 - protein, 50 aa, Homo sapiens
DLELGNKPKRLTASGEKNPKICNLYHKAFISFRYKELLDINKKNANTPEK

SEQ ID NO: 2402 - protein, 50 aa, Homo sapiens
  variant (1)...(50): Xaa = Any amino acid
YRLQILGFFSPLAVSLLGLFPSSKSXLGVKFPGWETSFYXLPLLASKVIC

SEQ ID NO: 2403 - protein, 60 aa, Homo sapiens
LHLVHVGTPSPFQSTTSSSNQYFLESLGNVLHAFKQSPFLEIHYRVTINSATLRFHHYGS

SEQ ID NO: 2404 - protein, 75 aa, Homo sapiens; identical to SEQ ID NO: 1407

SEQ ID NO: 2405 - protein, 63 aa, Homo sapiens; identical to SEQ ID NO: 1408

SEQ ID NO: 2406 - protein, 68 aa, Homo sapiens; identical to SEQ ID NO: 1409

SEQ ID NO: 2407 - protein, 69 aa, Homo sapiens; identical to SEQ ID NO: 1436
  variant (1)...(69): Xaa = Any amino acid

SEQ ID NO: 2408 - protein, 50 aa, Homo sapiens; identical to SEQ ID NO: 1437
  variant (1)...(50): Xaa = Any amino acid

SEQ ID NO: 2409 - protein, 59 aa, Homo sapiens; identical to SEQ ID NO: 1438
  variant (1)...(59): Xaa = Any amino acid

SEQ ID NO: 2410 - protein, 68 aa, Homo sapiens; identical to SEQ ID NO: 1439
  variant (1)...(68): Xaa = Any amino acid

SEQ ID NO: 2411 - protein, 54 aa, Homo sapiens; identical to SEQ ID NO: 1440
  variant (1)...(54): Xaa = Any amino acid

SEQ ID NO: 2412 - protein, 100 aa, Homo sapiens; identical to SEQ ID NO: 1441
  variant (1)...(100): Xaa = Any amino acid

SEQ ID NO: 2413 - protein, 72 aa, Homo sapiens; identical to SEQ ID NO: 1442
  variant (1)...(72): Xaa = Any amino acid

SEQ ID NO: 2414 - protein, 72 aa, Homo sapiens
PHFTIKKLRLKRIKEFFRGETALPYRRIPSNKCECSLSRRWHLIPLSWSLTSLSDWLLMNKMGKRKNSNSTV

SEQ ID NO: 2415 - protein, 76 aa, Homo sapiens
ELLWFFSRPAPSLKCKAVPLMGFWHSVSRPPFSSEGLSGEQRKNQPVSKLARLRDWGPLPPVKDADFTALQYSRVK

SEQ ID NO: 2416 - protein, 52 aa, Homo sapiens
VPPSGEGAFTFITWDPSVRKSCFSSKKLFNPFKPQFLNCEMGLIPVSNQGSS

SEQ ID NO: 2417 - protein, 79 aa, Homo sapiens
RSHLTLLYCSAVKSASFTGGKGPQSLRRASLETGWFFLCSPESPSDEKGGLETECQKPIKGTALHFREGAGLEKNQRSS

SEQ ID NO: 2418 - protein, 61 aa, Homo sapiens; identical to SEQ ID NO: 817

SEQ ID NO: 2419 - protein, 61 aa, Homo sapiens; identical to SEQ ID NO: 829

SEQ ID NO: 2420 - protein, 103 aa, Homo sapiens; identical to SEQ ID NO: 830

SEQ ID NO: 2421 - protein, 63 aa, Homo sapiens; identical to SEQ ID NO: 809
  variant (1)...(63): Xaa = Any amino acid

SEQ ID NO: 2422 - protein, 52 aa, Homo sapiens
  variant (1)...(52): Xaa = Any amino acid
CSRAAAXXXXKMLTTSPXIPAVVRPVLFLEVPVTLSVTTLLCWAPRPLSSLT

SEQ ID NO: 2423 - protein, 90 aa, Homo sapiens
  variant (1)...(90): Xaa = Any amino acid
GRXXXLTLTRTVTRCSSGRKSSWFPSGPGVMQQSSSXYXXXDVDHQPXDSRSGKACSVPGSSCNIECHHFTVLGPQAIVKPHMSSFQNXL

SEQ ID NO: 2424 - protein, 56 aa, Homo sapiens
  variant (1)...(56): Xaa = Any amino acid
SGDTQCYRNFQEQNRPYHCGNXGAGGQHLXXXXCCCSAALRQGPKETRRTFCHWNI

SEQ ID NO: 2425 - protein, 91 aa, Homo sapiens
  variant (1)...(91): Xaa = Any amino acid
LQXILETTHVRLDNGLGAQHSKVVTLNVTGTSRNRTGLTTAGIXGLVVNIXXXVXAAALLHYARARRKPGGLSATGTSSHSPSECQXXXSS

SEQ ID NO: 2426 - protein, 78 aa, Homo sapiens
  variant (1)...(78): Xaa = Any amino acid
SPLRNPGDVLGPGVGAPCHWIRKPASQGFNWETGDSPAGPCILVRLRMRTCETKASRYGLGQXKSSTSMLLLPKGNFA

SEQ ID NO: 2427 - protein, 64 aa, Homo sapiens
  variant (1)...(64): Xaa = Any amino acid
SGRFXLPQTISTGLCFTCPHSQSDQNAGPCWTVTCFPVKALTGRFSNPVARCSHSRAQHISWIP

SEQ ID NO: 2428 - protein, 51 aa, Homo sapiens
  variant (1)...(51): Xaa = Any amino acid
AKFPLGRSSIEVEDLXCPRPYLLAFVSHVLILSLTRMQGPAGLSPVSQLKP

SEQ ID NO: 2429 - protein, 79 aa, Homo sapiens
  variant (1)...(79): Xaa = Any amino acid
IXHWQGSLGAILGSCVNEQMNAQDRILAVTMMLEVTYPTVLLSFSPNPPLLPGKKPSSLCLITFSTQHLQGTYSAVGQC

SEQ ID NO: 2430 - protein, 67 aa, Homo sapiens [sequence omitted]

SEQ ID NO: 2431 - protein, 70 aa, Homo sapiens [sequence omitted]

SEQ ID NO: 2432 - protein, 56 aa, Homo sapiens
  variant (1)...(56): Xaa = Any amino acid
LHICSDDKCLQPCPLQGCTGLHTGSCLRCLVSSLKGWGSGVSPVYLGKXLTLGXMK

SEQ ID NO: 2433 - protein, 50 aa, Homo sapiens
KSGLGGNAFLLLHVYFSCISVVMTNASSLVLCKAALGCIQAPVSGVWFPP

SEQ ID NO: 2434 - protein, 58 aa, Homo sapiens
  variant (1)...(58): Xaa = Any amino acid
FHXSKCQXLAQIDRADSAAPTFQGGNQTPETGACMQPSAALQRTRLEAFVITTDMQLK

SEQ ID NO: 2435 - protein, 78 aa, Homo sapiens
YLPASLSFTAGISSSADRERWVFFPILVPVASLYQENVTFPVPPATEQSRISFCPSVTCPPGARISKLTLEMGIPRWI

SEQ ID NO: 2436 - protein, 50 aa, Homo sapiens
RTKTDPALLSGWGYRKCHILLVQRGHRNQYGKENPAFPVSRAGDPSCERE

SEQ ID NO: 2437 - protein, 117 aa, Homo sapiens
SSHLLSYIHLGIPISNVSLEIRAPGGQVTEGQKLILLCSVAGGTGNVTFSWYREATGTSMGKKTQRSLSAELEIPAVKESDAGKYYCRADNGHVPIQSKVVNIPVRRPDGYRRDLMT

SEQ ID NO: 2438 - protein, 54 aa, Homo sapiens [sequence omitted]

SEQ ID NO: 2439 - protein, 58 aa, Homo sapiens [sequence omitted]

SEQ ID NO: 2440 - protein, 70 aa, Homo sapiens
  variant (1)...(70): Xaa = Any amino acid
VRGEGGXTGLGISAVWEMRSISHHHHLCYXHVSACQRATLSLPQVGGFIXQSVFFMYRSFHSSTLXLXSL

SEQ ID NO: 2441 - protein, 111 aa, Homo sapiens
  variant (1)...(111): Xaa = Any amino acid
FGERVVXQGLGYRQCGKCEAFLIIIISATXMFLHVSERHCPCLRLEVLSXKVFFSCIVRSIHPLXXLXAFERLGCSQAAVLRDLKRDLVSLGAESIYLGTLFQERPCLHFH

SEQ ID NO: 2442 - protein, 53 aa, Homo sapiens
  variant (1)...(53): Xaa = Any amino acid
DNASCVCSGRSSKWNACCTXPXRVXAMRPXDHTWGTNHXLXHXALESPLDRVP

SEQ ID NO: 2443 - protein, 138 aa, Homo sapiens
  variant (1)...(138): Xaa = Any amino acid
SGRGWXHRAWDIGSVGNAKHFSSSSSLLQXCFCMSASDTVPASGWRFYXPKCFFHVSFVPFIHSXPXQPLKGLVAPRLLFSGTLKGTWLVLGQRVSTWALSSKKDLVSIFIRTMLLVCVLEDLLNGMLVALXPXEWXP

SEQ ID NO: 2444 - protein, 101 aa, Homo sapiens
  variant (1)...(101): Xaa = Any amino acid
GXVXKXMIGPPSVVXRSHGXHSXGXSATSIPFRRSSRTHTRSIVLMKMETRSFLEESAQVDTLCPKTNQVPFKVPENSSLGATKPFKGXQXXEWMNGTNDT

SEQ ID NO: 2445 - protein, 61 aa, Homo sapiens
  variant (1)...(61): Xaa = Any amino acid
MERTIHEKNTLXDKTSNLRQGQCRSLTCRNMXVAEMMMMRNASHFPHCRYPKPCXTTLSPN

SEQ ID NO: 2446 - protein, 196 aa, Homo sapiens
DNVHSPILSTWIRVTVRIPVSHPVLTFRAPRAHTVVGDLLELHCESLRGSPPILYRFYHEDVTLGNSSAPSGGGASFNLSLTAEHSGNYSCDADNGLGAQHSHGVSLRVTVPVSRPVLTLRAPGAQAVVGDPLELHCESLRGSFPILYWFYHEDDTLGNISAHSGGGASFNLSLTTEHSGNYSCEADNGLGPSTVK

SEQ ID NO: 2447 - protein, 114 aa, Homo sapiens [sequence omitted]

SEQ ID NO: 2448 - protein, 67 aa, Homo sapiens
AVPQGDILMIKSVQDRGRASQGLTVKLQQVPHHSVGPGSPEGEDRVRYRNSHGDSNPRAEDGAVNVI

SEQ ID NO: 2449 - protein, 65 aa, Homo sapiens
QSAGYIIGTKGLFQFLVNPLQQAPPDDVLIDALSGQSLAAHGKDIPLELRQLLFAAWLELAQHKR

SEQ ID NO: 2450 - protein, 50 aa, Homo sapiens
KDAETPASDEPPLRQPAVRFEFLQHAPPDSLQPLGSLVTVEGRRQTLVSQ

SEQ ID NO: 2451 - protein, 85 aa, Homo sapiens
MPSVVRAWLPTARTSPSNSGSSFLQPGSSWLSTKGKKMQRPQPRMNLLCANPLSDLNFFSTRPLTLSSLWAAWSQLRAVVRHWSA

SEQ ID NO: 2452 - protein, 116 aa, Homo sapiens
LADQCLTTALNCDQAAQRLERVRGRVLKKFKSDSGLAQRRFIRGWGLCIFLPFVLSQLEPGCKKELPEFEGDVLAVGSQALTTEGIYEDVIRGCLLQRIDQELKKTLGANDVSCTL

SEQ ID NO: 2453 - protein, 54 aa, Homo sapiens
PGCPEAGESQGARAEEIQIGQRVGAEEVHPRLGSLHLFTFCAEPTRARLQKGAA

SEQ ID NO: 2454 - protein, 50 aa, Homo sapiens
ISKSIVFEFVCSSLSLLVIVVFCFLFCFQCKCDVIFLFSLDQSWTGNCIV

SEQ ID NO: 2455 - protein, 53 aa, Homo sapiens
PLDGWGFTRETDTPGSILKTLSGFPGQQSSLILSSASEANLTSMCSSSSELVR

SEQ ID NO: 2456 - protein, 81 aa, Homo sapiens [sequence omitted]

SEQ ID NO: 2457 - protein, 50 aa, Homo sapiens
LCCQAVFRYWPQSVYVEQTGWYVAKVDSSLPHRWCNVRASAGVVCQSSSL

SEQ ID NO: 2458 - protein, 193 aa, Homo sapiens
  variant (1)...(193): Xaa = Any amino acid
PVAGPVNEVLIHSXQYLMEVTHDLRLRLKNYMMPAKGKKTDKQPLQKPSHCTIYVAKNYPPWQHTTLSVLRKHFEANNGKLPDNKVIASELSSMPELKKYMKKVMPFVAMIKENLEKMGPRILDLQLEFDEKAVLMENIVYLTNSLELEHIEVKFASEAEDKIREDCCPGKPLNVFRIEPGVSVSLVNPQPSN

SEQ ID NO: 2459 - protein, 58 aa, Homo sapiens
CQLKGRRLTNNPCRSPHIAPSMWQRTIHLGNIPPCLFYVNTLRPITENCLTTKSLLVN

SEQ ID NO: 2460 - protein, 109 aa, Homo sapiens
  variant (1)...(109): Xaa = Any amino acid
NGVAAKVASFSFFQNAQMHQFLNIHVKFENCTFGEIKFYIQLAIVQLCCSFSIKAKVFNMRKCDTFDTVWGGSGWAALGGTGPXTRLCPPRIHAGRREAEVSNXTSHQA

SEQ ID NO: 2461 - protein, 51 aa, Homo sapiens
  variant (1)...(51): Xaa = Any amino acid
PLGERXGLIPLPPSCQHGFWVDTALXKVQYHQELPIHSHPTLYQMYHIFSC

SEQ ID NO: 2462 - protein, 51 aa, Homo sapiens
LYIKFNLTECTVFKFHVYIKELMHLSILKERKRSYFSCHPILEKSLIFKLF

SEQ ID NO: 2463 - protein, 67 aa, Homo sapiens
  variant (1)...(67): Xaa = Any amino acid
EXWFDTSASLLPAWILGGHSLVXGPVPPRAAHPLPPHTVSNVSHFLMLNTLALIENEQQSWTIASCI

SEQ ID NO: 2464 - protein, 82 aa, Homo sapiens
  variant (1)...(82): Xaa = Any amino acid
ADSQNTFXIPEIRKINDKISVSQATNRCKIMKGVVGCAKFGKVVTASEKEAVRLNSWWLPSVTSRGSLQHRPRARRNTVAPM

SEQ ID NO: 2465 - protein, 65 aa, Homo sapiens
FLAFLSALLPSQEPGDAKHPECDGTRWGQGPHLPAEVRPGLLVPGQSPEPLCLVEQAPVCRIPTV

SEQ ID NO: 2466 - protein, 81 aa, Homo sapiens
HLCRKCVEFSVFFLCDFWPFYQHFSPPRSLGMPNIQNVMGQDGGRGLTSLQRSGQVSLSLDNLLSLSAWWSRHLCAEFPLW

SEQ ID NO: 2467 - protein, 79 aa, Homo sapiens
PQWEFCTQVPAPPSREAQEIVQGQGDLAGPLQGGEAPAPILSHHILDVWHPQAPGRGEVLIKRPKITQKEDRKLHALPT

SEQ ID NO: 2468 - protein, 50 aa, Homo sapiens
VLPYSYEHGACVEDSLWKLQKEATKSSASQPLSQMQSPLYQTWHIQPLLS

SEQ ID NO: 2469 - protein, 59 aa, Homo sapiens
HSGNSAHRCLLHQAERLRRLSRDKETWPDLCREVRPLPPSCPITFWMFGIPRLLGGEKC

SEQ ID NO: 2470 - protein, 107 aa, Homo sapiens
  variant (1)...(107): Xaa = Any amino acid
KGQKSHRKKTENSTHFLHRCYRIPTSTGPVLKTPSGSYRRKPPRVQPHSLFLRCSHHFTKLGTSNHSFHNFTPVCGLADRYFVIDLSNFRDXKCVLRICSALRDSVF

SEQ ID NO: 2471 - protein, 57 aa, Homo sapiens
GPCPHLVPSHSGCLASPGSWEGRSADKKAKNHTERRQKTPRTSYIGATVFLRARGLC

SEQ ID NO: 2472 - protein, 64 aa, Homo sapiens
  variant (1)...(64): Xaa = Any amino acid
RLPLEVTEGSHQEFSLTASFSDAVTTLPNLAHPTTPFIILHLFVAWLTDILSLIFLISGIXNVF

SEQ ID NO: 2473 - protein, 60 aa, Homo sapiens; identical to SEQ ID NO: 1146

SEQ ID NO: 2474 - protein, 74 aa, Homo sapiens; identical to SEQ ID NO: 1147

SEQ ID NO: 2475 - protein, 74 aa, Homo sapiens [sequence omitted]

SEQ ID NO: 2476 - protein, 60 aa, Homo sapiens
LLWPCPETTPNSWLVMRGGEYSAGLQMGRKREAAEALAQQCQAEGGRGDWGLSSAYRRNP

SEQ ID NO: 2477 - protein, 126 aa, Homo sapiens
SITTAWGPEGAITCCCLMEGPAWDTSQIIITGSQDGMVRVWKTEDVKMSVPGRPAGEEPLAQPPSPRGHKWEKNLALSRELDVSIALTGKPSKTSPAVTALAVSRNHTKLLVGDERGRIFCWSADG

SEQ ID NO: 2478 - protein, 97 aa, Homo sapiens
GGFFCRQSSGPSHLCHPQPGTVVPEPLLPLSSYPSADQQNILPLSSPTRSLVWFLDTARAVTAGLVLLGFPVKAMLTSSSRLKARFFSHLWPLGLGG

SEQ ID NO: 2479 - protein, 75 aa, Homo sapiens
GVSSVGRAQAPVTSATLSLALLCQSLCCLSLPTHLQTSRIFSPSHHQPGVWCGFWTRPEQSLRGWFCWASLSKQC

SEQ ID NO: 2480 - protein, 52 aa, Homo sapiens
RPALDSRPGSSPTCGLLGLEAEPGAPLLLAVQEQTSSHPQSSKPGPCRLDSR

SEQ ID NO: 2481 - protein, 153 aa, Homo sapiens
AELRPQSPLPPSAWHCCARASAASLFLPICRPAEYSPPLITNQEFGVVSGHGQSSHCGAGFAGLPCQSNANVQLSTQGQVLLPLVASWAWRLSQGLLSCWPSRNRHLHILSLPNPDHAVLTPGDDDLACVPCWALHQAATGYGSFWAPGCGDA

SEQ ID NO: 2482 - protein, 63 aa, Homo sapiens; identical to SEQ ID NO: 2206

SEQ ID NO: 2483 - protein, 87 aa, Homo sapiens; identical to SEQ ID NO: 2207

SEQ ID NO: 2484 - protein, 65 aa, Homo sapiens; identical to SEQ ID NO: 1600

SEQ ID NO: 2485 - protein, 64 aa, Homo sapiens; identical to SEQ ID NO: 1601

SEQ ID NO: 2486 - protein, 74 aa, Homo sapiens; identical to SEQ ID NO: 1970

SEQ ID NO: 2487 - protein, 101 aa, Homo sapiens; identical to SEQ ID NO: 1971

SEQ ID NO: 2488 - protein, 101 aa, Homo sapiens; identical to SEQ ID NO: 1972

SEQ ID NO: 2489 - protein, 74 aa, Homo sapiens; identical to SEQ ID NO: 1973

SEQ ID NO: 2490 - protein, 64 aa, Homo sapiens; identical to SEQ ID NO: 1974

SEQ ID NO: 2491 - protein, 136 aa, Homo sapiens; identical to SEQ ID NO: 1615

SEQ ID NO: 2492 - protein, 79 aa, Homo sapiens; identical to SEQ ID NO: 1616

SEQ ID NO: 2493 - protein, 73 aa, Homo sapiens; identical to SEQ ID NO: 1617

SEQ ID NO: 2494 - protein, 57 aa, Homo sapiens; identical to SEQ ID NO: 1618

SEQ ID NO: 2495 - protein, 89 aa, Homo sapiens; identical to SEQ ID NO: 1619

SEQ ID NO: 2496 - protein, 124 aa, Homo sapiens; identical to SEQ ID NO: 1620

SEQ ID NO: 2497 - protein, 123 aa, Homo sapiens; identical to SEQ ID NO: 1621

SEQ ID NO: 2498 - protein, 58 aa, Homo sapiens; identical to SEQ ID NO: 1647

SEQ ID NO: 2499 - protein, 71 aa, Homo sapiens; identical to SEQ ID NO: 1648

SEQ ID NO: 2500 - protein, 73 aa, Homo sapiens; identical to SEQ ID NO: 1649

SEQ ID NO: 2501 - protein, 88 aa, Homo sapiens [sequence omitted]

SEQ ID NO: 2502 - protein, 59 aa, Homo sapiens
SEVCSSGLSSPLLEQHKTNLIFYASGDICSANGKSGFNQPLPFLKTFCCTHRILSCTYL

SEQ ID NO: 2503 - protein, 171 aa, Homo sapiens
LLDSIWHQPIFNLLSIGQSLYAKAKELDRVKEIQEQLFHIKKLLKTCRFANSALKEFVGQVPGHLTDELHLFSLEDLVRIKKGLLAPLLKDILKASLAHVAGCELCQGKGFICEFCQNTTVIFPFQTATCRRCSACRACFHKQCFQSSECPRCARITARRKLLESVASAAT

SEQ ID NO: 2504 - protein, 100 aa, Homo sapiens
  variant (1)...(100): Xaa = Any amino acid
KLPLHMWLAVSCVKERALFVNFARIRLSSSHFRQQHVEDVQRAGLAFTNSASSPPSAPGVRGSQRGENFWKVWPLQQHDAPEYXEKDCSTCLMITPIXVY

SEQ ID NO: 2505 - protein, 55 aa, Homo sapiens
  variant (1)...(55): Xaa = Any amino acid
KMFSVQGLLSQTVLPVLRVPPVCEDHSEEKTSGKCGLCSNMMPLSTXKKTVQHAL

SEQ ID NO: 2506 - protein, 72 aa, Homo sapiens [sequence omitted]

SEQ ID NO: 2507 - protein, 58 aa, Homo sapiens
  variant (1)...(58): Xaa = Any amino acid
XQIGVIIRHVEQSFXQYSGASCCCRGHTFQKFSPRCDPRTPGALGGLEALFVKASPAR

SEQ ID NO: 2508 - protein, 53 aa, Homo sapiens
CTVSKPTGLQQLLDMEELLLNFLHSVQLLGFRIQALADAQQIENGLVPYAVEQ

SEQ ID NO: 2509 - protein, 52 aa, Homo sapiens; identical to SEQ ID NO: 1748

SEQ ID NO: 2510 - protein, 115 aa, Homo sapiens; identical to SEQ ID NO: 1749

SEQ ID NO: 2511 - protein, 52 aa, Homo sapiens; identical to SEQ ID NO: 1750

SEQ ID NO: 2512 - protein, 56 aa, Homo sapiens; identical to SEQ ID NO: 1751

SEQ ID NO: 2513 - protein, 57 aa, Homo sapiens
  variant (1)...(57): Xaa = Any amino acid
ATFINTDILELFTFLLFIFEFSVXYLVLIHCCIXNCTLISSSIKSIXLQFXGIIINL

SEQ ID NO: 2514 - protein, 75 aa, Homo sapiens
  variant (1)...(75): Xaa = Any amino acid
LIPPPVXHVYSRLADKALFGGPASVGSQKPNYCGLQRISRSFTKQTSLHPDCXFAXSGSQXMSXGAGSFWLLEKP

SEQ ID NO: 2515 - protein, 64 aa, Homo sapiens; identical to SEQ ID NO: 1325
  variant (1)...(64): Xaa = Any amino acid

SEQ ID NO: 2516 - protein, 100 aa, Homo sapiens; identical to SEQ ID NO: 1326

SEQ ID NO: 2517 - protein, 52 aa, Homo sapiens; identical to SEQ ID NO: 1327

SEQ ID NO: 2518 - protein, 50 aa, Homo sapiens; identical to SEQ ID NO: 1332

SEQ ID NO: 2519 - protein, 51 aa, Homo sapiens; identical to SEQ ID NO: 1333

SEQ ID NO: 2520 - protein, 87 aa, Homo sapiens; identical to SEQ ID NO: 1348

SEQ ID NO: 2521 - protein, 55 aa, Homo sapiens; identical to SEQ ID NO: 1349

SEQ ID NO: 2522 - protein, 120 aa, Homo sapiens; identical to SEQ ID NO: 1350

SEQ ID NO: 2523 - protein, 75 aa, Homo sapiens [sequence omitted]

SEQ ID NO: 2524 - protein, 59 aa, Homo sapiens; identical to SEQ ID NO: 1841

SEQ ID NO: 2525 - protein, 51 aa, Homo sapiens [sequence omitted]

SEQ ID NO: 2526 - protein, 72 aa, Homo sapiens
QMQKNKNKNTTQNATCKWWSMYLYITSPHTYIHSKQYYIIFLCEHTMSFWKNIQKLVTVANFRGESLIRVGR

SEQ ID NO: 2527 - protein, 52 aa, Homo sapiens
KDFSPFCKVGSTYLQKECISVLCVNIPLISKRFHEKIFEELHKHPLLCRQRW

SEQ ID NO: 2528 - protein, 75 aa, Homo sapiens
LLLPVFVCSSRRTLYVHIEKLYSIVLSVCMYVGMLCINTYSTIYMWHFVLCFCFCFFAFAIFICCSFKLCSVELE

SEQ ID NO: 2529 - protein, 93 aa, Homo sapiens
GFVPSHHLCLHSKGCLCNSSKIFSWNLLEINGIFTHNTEIHSFCKYVLPTLQKGLKSFHLPTLIKDSPLKLATVTSFCMFFQKDIVCSHRKII

SEQ ID NO: 2530 - protein, 53 aa, Homo sapiens
FFFLHRIGRGGRFGRKGVAINFVTEEDKRILRDIETFYNTTVEEMPMNVTDLI

SEQ ID NO: 2531 - protein, 58 aa, Homo sapiens; identical to SEQ ID NO: 1787

SEQ ID NO: 2532 - protein, 67 aa, Homo sapiens
  variant (1)...(67): Xaa = Any amino acid
XPIXQQRALHRKLSSQELNKVSHIHGHLLHCSIVESLNVTKNPLVFFSNKVYSHTFPPKSTPSANSV

SEQ ID NO: 2533 - DNA, 175 bp, Homo sapiens
  unsure (13): n=A,T,C or G
  unsure (15): n=A,T,C or G
  unsure (18): n=A,T,C or G
  unsure (19): n=A,T,C or G
cctcgggaggagntnttnngattcagattacagtgtgataaggaagacataggcttttgtcctgcctcgccatcggagctctcatgggccccaggaagtccagggacagctcccttatacctggcccacgtccttctcagcctgccctcgacaacagtgaccaacagacaggcag

SEQ ID NO: 2534 - DNA, 393 bp, Homo sapiens
  unsure (53): n=A,T,C or G
ccaaggccccagtgaaagcagctaccacccctacccggaagagttctagcagngaggattcctccagtgacgaggaagaggagcaaaaaaaacccatgaaaaataaaccaggtccctacagttcagtccccccgccttctgctcccccaccaaagaagtctctgggaacccagcctcccaagaaggctgtggagaagcagcagcctgtggaaagcagtgaagacagcagtgatgagtctgattcaagttctgaagaagagaagaaacccccaactaaggcagtagtctctaaagcaaccactaaaccacctccagcaaagaaagcaacagagagctcttcagacagctcagactctgacagctctgaggatgatgaagctccttctaagccag

SEQ ID NO: 2535 - DNA, 284 bp, Homo sapiens
  unsure (18): n=A,T,C or G
  unsure (23): n=A,T,C or G
  unsure (34): n=A,T,C or G
  unsure (41): n=A,T,C or G
  unsure (54): n=A,T,C or G
  unsure (84): n=A,T,C or G
  unsure (85): n=A,T,C or G
  unsure (89): n=A,T,C or G
  unsure (100): n=A,T,C or G
  unsure (183): n=A,T,C or G
ccgggcacgtaaggaagncgtgntggcccctaancctttgnttcatgctacagnactgaggggtatgtgtccccaatgcacacnnaccngcacacaactnaatgagcttcctgggaaacactattcccccacctccaccttaagtggctgccccagttttccaaccactggaatcagtccctnacctgctgcctctagtctccaccccaaaagttcagtcgtctctgtcttggagggcactgtcgggcccctcatgttgaagctcaacactcctcaatgagcag

SEQ ID NO: 2536 - DNA, 239 bp, Homo sapiens
  unsure (21): n=A,T,C or G
  unsure (22): n=A,T,C or G
  unsure (37): n=A,T,C or G
  unsure (67): n=A,T,C or G
  unsure (111): n=A,T,C or G
  unsure (113): n=A,T,C or G
  unsure (120): n=A,T,C or G
  unsure (123): n=A,T,C or G
  unsure (218): n=A,T,C or G
  unsure (236): n=A,T,C or G
cccagaagttaagtggaaagnngccccattatctatngagtcagagaagaaatccagactccccaangggtctccactgataccacaggggtcagaggtgaggcgctgctntnaatacanccntctctgacaccaccctggtggaggggggctttgggacacttctttacagcttggtaacagtagacatctaggctctctactcagtcttcgctggnggaggtgggatagggccntag

SEQ ID NO: 2537 - DNA, 297 bp, Homo sapiens
  unsure (15): n=A,T,C or G
aaaaataatccattntctagcttcatgtatcaggaatagccctacattaatggtaccaggagcctgggcctctgttgctgaaaggtcctggaccttttacctctaaaatttcatgatacttattttaacatgaaaagcctttattgaattgtgcattctttaatccccaccccttttgcctttcagcattaaactgaagaaaagatgtccctgtacgatgacctaggagtggagaccagtgactcaaaaacagaaggctggtccaaaaacttcaaacttctgcagtctcagcttcag

SEQ ID NO: 2538 - DNA, 283 bp, Homo sapiens
  unsure (52): n=A,T,C or G
cctgcccacacgttttgtttgagcgctcggaagtgaaggatcgccacctggnggctaagagactgactgaacatgtgcaagataaaagcaagctgcctatcctcatcttcccagaaggaacctgcatcaataatacatcggtgatgatgttcaaaaagggaagttttgaaattggagccacagtttaccctgttgctatcaagtatgaccctcaatttggcgatgccttctggaacagcagcaaatacgggatggtgacgtacctgctgcgaatgatgaccag

SEQ ID NO: 2539 - DNA, 390 bp, Homo sapiens
  unsure (13): n=A,T,C or G
  unsure (14): n=A,T,C or G
ctgtgtggatctnnagcccagctacagcagaatacattttaccagcaaacctaaggatgacaaacactatccacatctgaaaactaccacaccatatcagggatcataaattatgcatatctatgaattttccaacaaattcctacttcctgattggattggttttgccgctgatgttaaggcagccagcttcttagttcaaaaagaattctgagtttttcaaacactagtctagaggtggacattgtcaggggttctggaatgggaccaggggaccttttggtgcagtgggtgcctgtaactcattagacgtactgaggcagcacttctgcagggtgcataccctgattgttgtcatttgtaacaggtcacttccttttcactcagttt

SEQ ID NO: 2540 - DNA, 271 bp, Homo sapiens
  unsure (15): n=A,T,C or G
ggggaactggctgtnagccacagcagccccacacagacagtggtctctgaacttcaggaaagccatggacagaaaaaaaaataaaattcttttccatcattctattttcaaagaggtcttggcgttttcctacatcttttgtttagaggggaaaaaaaggtttcatttgctgccatttcagaaaggttatgctatcctgttttttccaagcagttgtgagtcaggaactgcctgggcagtgtgcatcaactttgtggccgaaccattacag

SEQ ID NO: 2541 - DNA, 297 bp, Homo sapiens
  unsure (92): n=A,T,C or G
  unsure (94): n=A,T,C or G
  unsure (95): n=A,T,C or G
ctcgcatgtgcaggtcaagtgtacagtagtgaaaacaacatgcaatgtcttcactgcagaatcataatacagctaggacattggtgttcttncnntcccaccccaaattaaaaactaattgctaaaaaaaattgcattgccaaacggcactggagtgaaagcttggcggtactctacgataaatgctcagtttccagtgcatgaaataaaactatagcaaatgggaggctttggtggcatccaaagaagaaaaaggcaaaccagggggaaagagctgcagtctaaagtttgatcttt

SEQ ID NO: 2542 - DNA, 273 bp, Homo sapiens
  unsure (20): n=A,T,C or G
  unsure (51): n=A,T,C or G
atgccccaagttgttcaacnaaggttcccatttgtcaactgttacctcgtncccaattgctttaattttttccaaagcatcaagaaaccatttttcggctgttttccattctccattctgaaatgcaaccacgccgacctcatgcataacaaaagggtcttccggtgcaatgctcagagcttggctgaagaacctttcagctagttttgagttattggtcaaaccatattctaatccaatatacagcataggcaaatgacaccctttcatcag

SEQ ID NO: 2543 - DNA, 256 bp, Homo sapiens
  unsure (34): n=A,T,C or G
  unsure (38): n=A,T,C or G
  unsure (192): n=A,T,C or G
  unsure (209): n=A,T,C or G
  unsure (225): n=A,T,C or G
  unsure (226): n=A,T,C or G
  unsure (229): n=A,T,C or G
aatgtagtatcgttgtgcctgaaatgaccattcngggntgtttagaatccagaatcatcaaaagccatgtggtatgaggaagtaataaatatcctcttgaatcttcttaccctattttgcacaaatggatggctgcatgaacagctcttgtaaattgctctgagtccacaccaatagaaacctgcactcatnctatagctgcagagggnttgttggcttaaggcnnctntatcatctcagcattaatttccctttt

SEQ ID NO: 2544 - DNA, 271 bp, Homo sapiens
gatcggtcagacccttcaccagattgtggaagggcagacgaactcctcgcaggatctcagctatgactcctccagtctggcagttgtaccctaactcctcctgtattgcggcaccaatcttgggatccccaactcccaagagtactttcttctttttggacggcaggtgggtctccaagagcaggcggaggtcctcatgaacaacccctcaggggaaagaacacagttcccactaacaggctgaaggacgatcaactctaacatccctcag

SEQ ID NO: 2545 - DNA, 236 bp, Homo sapiens
ggtgtaaccacctctcgcaaggccacggcttctccaactttccccaaaacatctgagcggtttcagaaactatcacttcctccagagagcacgtggctgcccgatgagtaaacagcagctttcccgggcctgcctccaggcggtaagtccacgagtctccaggctgcccgcaactccaagactcatccttatccatcactcatttgcatacacgtctgaaggccctagggagtcag

SEQ ID NO: 2546 - DNA, 324 bp, Homo sapiens
  unsure (145): n=A,T,C or G
  unsure (272): n=A,T,C or G
tctgtgccaaactagatatttcagatgaattgaggaaaaaaatctggacctgctttgaattctccataattcagtgtcctgaacttatgatggacagacatctggaccagttattaatgtgtgccatttatgtgatggcaaaggncacaaaagaagataagtccttccagaacattatgcgttgttataggactcagccgcaggcccggagccaggtgtatagaagtgttttgataaaagggaaaagaaaaagaagaaattctggcagcagngatagcagaagccatcagaattctccaacagaactaaacaaagatagaacca

SEQ ID NO: 2547 - DNA, 328 bp, Homo sapiens
  unsure (34): n=A,T,C or G
ctttacaacctccagccctatagtctaaggatanggggccctgggagacaccgagggaccaaggaaagaggccccctgtagaaagcaagcagaaattccttgtagacccactgaccagagttgctcgctgtccttgaccccaccgagaggggtgcaaccctgactcagcatcacctcctatctgtcatagcggggagagctttccccaaaggccagcaggggaaaacccaaccttacttggaggagccagggaagtatctcgcagatcccgcaaaaaggcacccacgtctacagctcggcgggctggaggtctgcgggccaagccagg

SEQ ID NO: 2548 - DNA, 158 bp, Homo sapiens
aaaccctggaccagtggtctcacatggtgctacgcctgcatgtaaacacgcctgcaaacgctgcctgccggtaaacacgcctgcaaacgctgcctgcccgtaaacacgcctgcaaacgctgcctgcccacacaggttcacgtgcagctcaaggaaagg

SEQ ID NO: 2549 - DNA, 191 bp, Homo sapiens
ggggccaccctgacctacacataccgccactgctagcctcacaagcccctggttactgcagatgaagctgggatggaggctctgaccccaccaccggccacccatctgtcacccttggacagcgcccacacccttctagcacctcctgacagcagtgagaagatctgcaccgtccagttggtgggtaacag

SEQ ID NO: 2550 - DNA, 413 bp, Homo sapiens
  unsure (66): n=A,T,C or G
gttttctcttcatgtaagtccttggaattaaagtgctaagaacatcaccttagaatcaattcctgncaaattttttgttctccccttctgccatcttaaatgtaagctgaaactggtctactgtgtctctagggttaagccaaaagacaaaaaaattttactacttttgagattgccccaatgtacaggattatataattctaacgcttaaatcatgtgaaagggttgctgctgtcagccttgcccactgtgacttcaaacccaaggaggaactcttgatcaagatgcccaaccctgtgatcagaacctccaaatactgccatgagaaactagagggcaggtcttcataaaagccctttgaacccccttcctgccctgtgttaggagatagggatattggcccctcactgcag

SEQ ID NO: 2551 - DNA, 286 bp, Homo sapiens
  unsure (34): n=A,T,C or G
  unsure (203): n=A,T,C or G
caagcatgagctctgtgttactttctggctcagncactgcctccaggcagccctcctgttaaccacagtgcacgaaactctcccttcttggcttcttggatatagcacccatcctgcttgagtcccatctgtctgggatgttctccgtcattttcttgagggtcccacctgctcctctccccgaaatggacatcctggaaggnggagtctatactgcttttctctccccagcaacgttgaatccggagtcagcctgggctccgcaaacaatggctgccatctccag

SEQ ID NO: 2552 - DNA, 139 bp, Homo sapiens
  unsure (64): n=A,T,C or G
  unsure (67): n=A,T,C or G
tatcaccatcccctcagtgcccagaattccagaggggaagtgataccgttttagagttaaaatnccnggcctcacgcgtgtaatcccagcactttgggaggccggatcacttgaagtcaggagcgtcagaccagcctgg

SEQ ID NO: 2553 - DNA, 303 bp, Homo sapiens
cctctaacctatgcaggtctccccattatgcatatagaaaatgctagtatgttttgttcacttcatatgtaacaggtgcccttatgttgtgctgtatcctgtgctttttctgtgggaccattccattcaggagcaaagagcaccatgattccaatcttgtgtgtgtttactaacccttccctgaggtttgcgtatgttggatattgtggtgttttagatcactgagtgtacagaagagagaaattcaaacaaaatattgctgttcttcagttttgtttgtggaatttgaaattactcaaattt

SEQ ID NO: 2554 - DNA, 274 bp, Homo sapiens
gcttcgcagccttgcttgttttctctgaacagcaacagaacagtgttcacagcgattcaaagggtggcattgggttggacgttctgggtacaagccaacctagtcccacgttgtacgtgaatgtttaatgtgctctcaaaacatggaaaataagtttagtgcacatagctaaatcacaaaacatccaatttctctgtttcctcaggaagtcattactgcgccaccacatcacatgaccttaacatgatcaatgtatttctctgccttgacattt

SEQ ID NO: 2555 - DNA, 152 bp, Homo sapiens
  unsure (67): n=A,T,C or G
  unsure (128): n=A,T,C or G
  unsure (133): n=A,T,C or G
gggcttcgcagccttgcttgttttctctgaacagcaacagaacagtgttcacagcgattcaaagggnggcattgggttggacgttctgggtacaagccaacctagtcccacgttgtacgtgaatgttnaatgngctctcaaaacatggaaaa

SEQ ID NO: 2556 - DNA, 439 bp, Homo sapiens
  unsure (65): n=A,T,C or G
cggccgcagtgtgctggaattcgcccttagcgtggtcgcggccgaggtaaatagaaccatgtttnccatttctgtaggtaaaaggacaaagaagaattacaaacactttgggtctttcccgaattctctcccctttctctggtcaactccacccaccttcactctcaaaggaaaggcacagggggaaggaagtgagtgagggggctcagaagagtctgtgtggctcctaccaccccaaacatattctggtttcccgaagataagaggcaaggcttgctctgatctttcccagttctcagagtccagcaggccgctgtgctggacacatacatggatccaccaacatacatcagtccttctgtgttctctcctgcatggtagaggctggaagcctaagagctatattcctcagaatttcctgccagccaggatttgcttt

SEQ ID NO: 2557 - DNA, 244 bp, Homo sapiens
  unsure (217): n=A,T,C or G
tacgcctgtctccttccacctccacgtatggtgacatcactttgatagcttgacgtcagccactgggggactatttacatcatggatatgggcaaaagacaccaatctgagcttttgtccttttcttttttttggagtgcctgcacacccgtgagcctttccaacctcgtaacctattattttcctgacgagatagttttttacagatgagaaagtngaggcacagagaattgaagggacttgg

SEQ ID NO: 2558 - DNA, 241 bp, Homo sapiens
  unsure (32): n=A,T,C or G
  unsure (33): n=A,T,C or G
  unsure (34): n=A,T,C or G
ccagggctctccccatgagagaatcagagggnnngcaggacgtggtctatggtgagccaacgacacagtgagaaggagcaggaagttgctgtttctcctctgaccagcccacactccaaaggaaacagacgccatcctacacctatcagccctgcctgccaggagaacagaacacactcctggtctggatggggctgctgcttgagtgcagagggctgcggtaggccctttgcaggagtca

SEQ ID NO: 2559 - DNA, 533 bp, Homo sapiens
cctcccacggtgaagctcctaatgctcctggtataaaaaattttgctagcttagtaaaacgaattggaaaacttgactatgatctggaacagataagcaagaaggaacacataagtaagctgctttgctgccaggaaaataaaaacgaagtagctactatcaggtctcctaactaccctagtctgtaaaggaaaaataaaagtctttataaaattaaaataaaaatgtaattgcctatatccttattgccttaacctattttatttttctatatttcctacagatataagtattattcatagttccaagcaatgaacataatgtattttctccaaataggaattgtttatattcataattattccgctctcttgctaaacacatagttccacttaggttttttcttcttgctacttgttttataaaaaatactatatttttgaagcaaaaaaaaaatttacaccagcagcattaggagccctggaaggaggctttgggagccaaggcccatttgggatgcatgcaggactggg

SEQ ID NO: 2560 - DNA, 494 bp, Homo sapiens
  unsure (451): n=A,T,C or G
  unsure (468): n=A,T,C or G
ctgggcttcctttgtcgagtaggggttcagaaagctgtgaaacactcatttcccgcatcaggacttacttcggtcctggatgaagagtactgaagatacatgcctaaaatattcctaacaccaggatttgtgcatgtgtttccttccccaagaaagctataaacagcaaaaattctgctgtaagcttccctgtgtcctctctccctctcttccttccccctcccctaaaactaaaaggaatgttaaaagaccctttttctgtgaccagcggaccttatctatgctcccaattccaattccttgtgaacatactttgtaaagtcctgtaaaatcctgtctcttttgccatgctgctgcaaggtcataaagtagataaaattagataaaacctaagttgcaattctgtttttcctcaaaatctaagacatgtcacaaaataatttactggccnttgtttctctctctggnaacatcttcccaccaccatgtatttc

SEQ ID NO: 2561 - DNA, 282 bp, Homo sapiens
  unsure (9): n=A,T,C or G
ctgcagagncctctgtttgcgagcccactcagtcactgcacaggtgcttagccgagaggcggcacagtcggggttggcacctgcacccataccagccctgcctcctgttcgctgtgtggcctgagtggctggacctcactgtatctcctggtgggattgctcagaggtctcagcaaggcttggtgtggttaggatgagttattagagcagtgctgagctgtggcaagcacccgacatcagccactgcttgtgatatactgagcacctcctctagagagaaat

SEQ ID NO: 2562 - DNA, 167 bp, Homo sapiens
  unsure (6): n=A,T,C or G
  unsure (117): n=A,T,C or G
  unsure (138): n=A,T,C or G
gccatntctggggatgtaaaaaggttgtggaaaatagaatgcccagacccgtctacaaaaggtttttagagttgaaatatgaaatgtgatgtgggtatggaaattgactgttacttnctttacagatctacagacagncaatgtggatgagaactaatcgctgatcg

SEQ ID NO: 2563 - DNA, 285 bp, Homo sapiens
  unsure (12): n=A,T,C or G
ctgagacccctnccctgtgagcccttctatccccacaagttgtcaggacaatcccttgtggttagggggaggggcggggagagagctctatttctcagccagtgccaagctaccctccctcctgggctgtgatttcatttgtgcaatgggggtgtgcaggagtcactagcttctcggggcctgtcccgcacatacacgcacttatgcgacatccagacatttgctacattttccaaagggcttggcctctcccctccagccttcaaaagggagggcaggacacat

SEQ ID NO: 2564 - DNA, 382 bp, Homo sapiens
ctgcagaccgtccctcaccaacccagagaacctgccttactttgcccagggacttcctccccatgtgaacatggggaacttcgggccctgcctggagtccttgaccgctctctgtgggccccacccactctgtcctgggaaatgaagaagcatcttccttaggtctgccctgcttgcaaatccactagcaccgaccccaccacctggttccggctctgcaccctttggggtgtggatgtcgagaggcaccacggcctcacccaggcatctgctttactctggaccataggaaacaagaccgtttggaggtttcatcaggattttgggtttttcacatttcacgctaaggagtagtggccctgacttccggtcggctggccag

SEQ ID NO: 2565 - DNA, 230 bp, Homo sapiens
cctcagtttacccatctgtaaaatgggtaagcatagccactggtgggatattttgggatgtcaaggggtggaggcagagcacaagtcacaccagaaactgctttttatacattttgtataaggacaactctggaaacaagcctatttcctccagccagtttcactgaatgctgcaccacatgctacaccagttcagcgtgagaattttctaataaatcttttctgatact

SEQ ID NO: 2566 - DNA, 293 bp, Homo sapiens
  unsure (11): n=A,T,C or G
  unsure (12): n=A,T,C or G
aaaagtcttannattgtgaaaacataaacaacaaacctggttgccacattctgttgaagtttgaatccccttggaaattcccatgattgtttggaccagattccattgtagacatatcttgtccatttggcatcattcctggtggttgttctaccatgctttgctgtcctgaagcttctctttgggcaatccaagcttgggccaatgcacccaatcaatctggcttggatcctgttggtgcttggaatgactgcatccattggtgctggttcaagggccactgctgcaagggc

SEQ ID NO: 2567 - DNA, 293 bp, Homo sapiens
aaaatctctggtatttaaggtcaacaggaagaaattgtcctgaaaccttccatccagctttaccaggccctaaccactctcgccaggcggcagcaggctcctgcccagccccaatccagcctcacagttatgatggagctgcagaaacacgagcccttttcaagggggcatttggagtggaaagccctgggaaggtaacgctcacactccaaggccacactcctccatctggacaaacacacaagcacccccaattgtattggaagtactgtcaagagctcaaaatgcccacc

SEQ ID NO: 2568 - DNA, 309 bp, Homo sapiens
  unsure (12): n=A,T,C or G
ctgctgctgccnttgaccatcctgaactctgggggagaggaggagtcagcctggcttgcagacggccgacccagaacatggctgtctgtggtcatttccttccttcacacccagtgggatgggcacagagcccagccttggtctcaccagctcccccaccctcctctgcatcagcatccagctcacacagctctccagaagagtttgatcttagctgcagccttggggtacatcactctacacccagtctcttccctgcgcttctttcaaccaacagaagcaaacatcaaaagcacccacacctactgg

SEQ ID NO: 2569 - DNA, 295 bp, Homo sapiens
  unsure (176): n=A,T,C or G
cctatgaggagtatgttttatctgttgggaatttagatgagcggatatttcttggagaggatgctgaggaggaaattgggactctctcaaggtgtctgaacgctggttcaggaacagagactgctgaaagggtgcagatgaaaaacatcttacagcagcattttgacaagtccaangcacttagaatctcccaccactaactggtgttaggtacattaaggagaatagcccttgtgtgactccagtttctacagctacgcatagcttgagtccgtcttcacaccatgctgacagg

SEQ ID NO: 2570 - DNA, 290 bp, Homo sapiens
cctttctactcaggctaatgacaaacacaataaaggcagatatgctagtttaacataattggctgattttatacagcacttatatcttttagtccacaagtatattattaaatgatagagaacatctaatacaaccatttctacagaactaggaaataaatttctaagaaagaaagattttacagaccccatcttttatacccaccccaacagtctaactctaaagaggataaagccaatgactttcctcacaagagctcacgactaacgtcggcttttgctatcaaaaa

SEQ ID NO: 2571 - DNA, 301 bp, Homo sapiens
ctgttaggtatgttaacctgtaattaaaaggctgtggcaacttcagttccatgacgacctccgactttaacacagtctcgaggaaatttgtccaattgttcatatgccagccgcccatcttctcccagagacaagagggtttctgagccacatttctgatttcttcagtatcagattgacacaatgtcaccagcattttaatgctttcagtagcctcaagggattttcagagcccagcaagcttgcttttcttggagcttggaggtttgtcttttgttagtgcttcacagtaatagaagca

SEQ ID NO: 2572 - DNA, 292 bp, Homo sapiens
  unsure (11): n=A,T,C or G
  unsure (233): n=A,T,C or G
  unsure (260): n=A,T,C or G
  unsure (266): n=A,T,C or G
  unsure (268): n=A,T,C or G
  unsure (271): n=A,T,C or G
aaatgaacacnttccagacaatgtaagacagtcaaaagacaaactcaaatccctgagaatggctgggaagggaagatggtggtaaaaattccaaatgagtgaaacttacaaagggcagtctcccctgcctgggctctgtcctagacagaagtgacagtgatgacttttggtgatgttctccccagtgcagaagacttgctttcagaaattagacaacctcagtgggcgaagtntttctcctgcctgcgtaagctgcagcnctgtcnanaanagcttgaaccagagccagcag

SEQ ID NO: 2573 - DNA, 307 bp, Homo sapiens
  unsure (58): n=A,T,C or G
  unsure (214): n=A,T,C or G
ctgcctctgtaacctaggccgagcatattgctgaggaacggggggtacaaggtgccanaggattgggtctggtggacaagaaacaagacttgtggtcacaattggcctctggccttggagaaagctgtaaatcttatctgaagcagagactataaagaagtttctccctgctgtcaagggtacattgttgacaagcaaatggtgtttcggttantaacggttctaagtgcaatgagttgtgttgaagcctccgtctcccatccttgcctgtagcccgtagtcacttgtgcagtgaggacatcttttt

SEQ ID NO: 2574 - DNA, 103 bp, Homo sapiens
  unsure (89): n=A,T,C or G
ctgttaattgcagttactctgcggaatttccacttctgctttgtacagttccttgtgtgaatttttacatcatgtattacttttgtagntggggaaaaagcaa

SEQ ID NO: 2575 - DNA, 306 bp, Homo sapiens
gagcttgaagaacagattgagggctgtacgcagcaccaggatcatgtgcacaggctgcaggtttgagtgggtgaaataggctgccatctcacagatgcgcttctgctgttctagagtctctttgggcagcttcttcctttctgtctccacggacaaacccacaatgtactcacggcaaatggtgatgagctgctgggcctctgcaatctcttgtttattgccacaacaagaagtggcacactgagaaggatggaacggaatttttccacagcctcctcaaatttgccaactgtggtgagctggtag

SEQ ID NO: 2576 - DNA, 311 bp, Homo sapiens
acttaatgtgtattttgcattgtgatatttaatcaagacattaacatgagtagaaggttgttgatttaagacaagtttgagatccactaaaattaattgttgtatgtttgtccttctggtggctgtggaagcttcatattttctttggacatcattagacgtcttagctcttgaagtacaactttaatgctatatgaattttgccattttgctaacactggtatgctccgggcatccaccatcccactggaattatttattccgttcatattaatttttgttacaaatctaactgacggaggagcttctgg

SEQ ID NO: 2577 - DNA, 263 bp, Homo sapiens
  unsure (13): n=A,T,C or G
aaaatgttcttantgctgtgttataagctttggtggatgtcactcctttaatcctcacaacaccctgtcgggtagtcatattttgcaagtatggaagctgaggcagggcaacatgaagtaacttacataactcatacagtaatttgtgcagttgggagatgttcagccttagtccctggctaattgcctgttcttttccagcctgattttttttcccacaggaagagcccacatgtagccctgaggtttccttcccaggacag

SEQ ID NO: 2578 - DNA, 217 bp, Homo sapiens
ctgcagattttcccacatgtcagagcgagacctgcaggagctgagcatccaggtggaggaggagaggcgagccagggagtggctactagatgctcctgagctccccgagggccatctggaggactggctggagaagagagccaagcggctgagctcagccccaagtagcagggctgaacccatcagaaccactgtcttccagtaccccgtgggctgg

SEQ ID NO: 2579 - DNA, 467 bp, Homo sapiens
ctggtacacggcagggtcagggttctggatatcaggtaaaacagtcaattgtgtcccagatccaaaggtcagttgccttgcagaaccagaagactccatgtcacccacgaggcagtagtacacagcagtgtcgctcagggaaacccggggcaggctcagagtgctggactttctgtcggcagggataaacagggaggccacttcgtttgtaacttttgtcttgtatccttgaataataaatcgtggtccttggctgggaaactgttggtaccacgtgatataatcatttgtagcaatgttgttgtggctacaggttatgttcacttcttgtccttcatatgagtccatggagatgggctgggtggtcttagcaaggctcaaagtactcagggtcaggaacacgatcactctcccacttgcctcatattctaggtgcaaactaggacccaggttctaggctcttttgc

SEQ ID NO: 2580 - DNA, 221 bp, Homo sapiens
ccatcttctggtgggtccacacagtcttctccatgtgtatccttccttcagtttcccttatagggacaccagtgatgtcagattagggatcgaacccaacaacctcatttgaagttactcacctgtttgaaaaccctatgtccaaatacagttatagtgtaaggaactaggacttagggcttacaaatatggagtggggcatcatccagaccataccattt

SEQ ID NO: 2581 - DNA, 231 bp, Homo sapiens
ctgggcctgcccggggaagtccttgcaggtgggaggccatacagagacccactgtgtgccactgagcgtcccactgctgctgggcaactggaggactgcagggggcgccaggtgactctctccttttatatcacagcagctcctgtgctgaccttcaagttacgttttggaactgtaatactaaaggaagaaataaactactaatttgtataatattctgcattgaaattc

SEQ ID NO: 2582 - DNA, 485 bp, Homo sapiens
gaatgaaccaactgcaacaaggaggtcacctgtgtgcactgctcatcgctcaggttggctctctcttgggtcaaactaggtgattcacttctgtctgccgccatgatgccagccatggtcacagcaccaataatcccaatgagcttgtacttgaatacggtgctagagagctgctttcttatcaccaagtgcatgtcatcctggatgtggctgctggcttcattctgtttgctaaatgccagtgtgctgagaacatagaagagttttcgtatttgctgaggggatatgttatccagataatctaaaatgccctttacaaagacagcattcatcatcatagcagatggatttaacactaccaactctagaagggacatctaaaggcagtatcaacttcagcttcattcccactgcagatatgggtcactaaggcaccaaccactttctgctggcagtacgtgtcaaaaaacttaaatgcatatttg

SEQ ID NO: 2583 - DNA, 247 bp, Homo sapiens
cctggaaggtgtgcaggagtttggtagaggagtgatctaggtgaggggaatggaaggtgcagagaccagagctgagagggcctgaggcactttccagagcgtggggaggggcctccaccaaggcgagaagggctgcaggtccagatcaccagcgtttgtagacagtagtgtggcgcttggagtttacctgagggccagtggagctccagggacctatcaggacggggacctgtggggactgggaagg

SEQ ID NO: 2584 - DNA, 234 bp, Homo sapiens
ccaggatggtctcaaactcctgacctcaagtgatccatctcagctcccaaagggctggggttataggtgtgagccactgcgcccagccagctattggtattgcctatctttttgacagacttccttgtggttttgatttgtatttccctgaagattaataattttgagaatcttcttgtgcttattggctgctaacttatctttttcagagaaatgtctgttcagatcctttgg

SEQ ID NO: 2585 - DNA, 237 bp, Homo sapiens
gcgtgggatggggattggggtgagatggatgggagccagctggagctcgtcttccctaacatagcctgggagaccaccccttgccacttgggccacttccgcctaccccacttttcattttgttccaaaatagttgcagatcctgacagaatcaaaactctctgcctcaaacacacatcctggcatcgcactgttagcatttaacttcttgttaggattcagggaaggaacagttgg

SEQ ID NO: 2586 - DNA, 138 bp, Homo sapiens
  unsure (36): n=A,T,C or G
ccatgttgaacaatacatgtaggttctttttccacncaatgtaagaacatgatatactgtacgttggaaagcatttaccttatttatatacctgaatgttcctactacacaaataaacatatattaaattctaaaaaa

SEQ ID NO: 2587 - DNA, 320 bp, Homo sapiens
ctgccacttcaggcacttacagtggtcacccaggattcaggagatgcatattataagtaactcagttctgtaagagctaggagttagttcacactgcttgggctctcactaagtaagcctgtgcaatgcaggcaggaagggggaaaatgcttacaaaaaagaaatgagtagattcttgccttaggaaagtcaacgggatacaattcctgatggaagagcagttgctattctaagagctaattaacaagaaacaatgctgcaaaaaacttgggagacaggacggcagaacacacccagatggcctgtgggaaattcccagg

SEQ ID NO: 2588 - DNA, 247 bp, Homo sapiens
ccttcccagtccccacaggtccccgtcctgataggtccctggagctccactggccctcaggtaaactccaagcgccacactactgtctacaaacgctggtgatctggacctgcagcccttctcgccttggtggaggcccctccccacgctctggaaagtgcctcaggccctctccgctctggtctctgcaccttccattcccctcacctagatcactcctctaccaaactcctgcacaccttccagg

SEQ ID NO: 2589 - DNA, 145 bp, Homo sapiens
  unsure (91): n=A,T,C or G
aaattgtgttttatttatccgtagaatttatatttatttcattcctttcatctcactgaaaactgtctgcaggccctttgatttggattanatgtgtgaagtactgtcttttgccaaaaacctcaaattacctgttcttttcaac

SEQ ID NO: 2590 - DNA, 174 bp, Homo sapiens
cctttccttgagctgcacgtgaacctgtgtgggcaggcagcgtttgcaggcgtgtttacgggcaggcagcgtttgcaggcgtgtttactggcaggcagcgtttgtaggcgtgtttacatgcaggcgtagcaccatgtgagaccactggtccagggtttcagaggtcctgctcag

SEQ ID NO: 2591 - DNA, 189 bp, Homo sapiens
ctgctggtggatcagatatacgagaacgccatgattgctgctggacttgttgacgaccctagggccatggtgggccgcttgaatgagctgcttgtcaaggccctggagcgacactgacagccggggggccagaaggactgacaccacagatgacagccccacctccttgagctttatttacctaaattt

SEQ ID NO: 2592 - DNA, 235 bp, Homo sapiens
ccggcttgcttgttctctctttcctagcccaggagtcgggtccttgggtctaaagcacagggccaagttctcaaggatcaacatcccagacagctcccatggtctggggcttggagctggtatgaagggtgaaccaggttccatcctggactgtttatggttggagggcctgggcccctggcaccaggacctcagctccctctcctagtaagagctgggatcacccacaggccag

SEQ ID NO: 2593 - DNA, 131 bp, Homo sapiens
atgaggacaccctcggcacgggaacccattcacttagcgtttgctccagtagctttccctctgctaccaatgcagataaacgcggcttgttttactcaggcaagagaatgtgaatagtgccaagaaaatcc

SEQ ID NO: 2594 - DNA, 271 bp, Homo sapiens
  unsure (5): n=A,T,C or G
  unsure (237): n=A,T,C or G
ctggnggccagtggagccaggatgaggctgaggccatgagtaatggatggaaccatgcaggcaggtctggggcacaacatcccctgcaggagggtgggcagcagtggctggaagtttctcttgattttgggatggacaacagaaaaaaacaaaaagccagtcacagggacccagagagaaggaagggagatgtgggcaggagacagacacagagcatgtgtatgggcaaggaagacncagggagactatgtgtgagcttcagaactgcaga

SEQ ID NO: 2595 - DNA, 136 bp, Homo sapiens
  unsure (99): n=A,T,C or G
aggcagttcctaccatgtacccctctcaggctgcctgcctgacaaggtcagcatcatttgctctcctgaatttatgaggtttatttatttttctctttnctactcctattaaagaacctcgtcccagtgaaaaaaa

SEQ ID NO: 2596 - DNA, 101 bp, Homo sapiens
aaactaaaagccttaattaaagtggtgcaattttgtataacttagcatcagtagttcaataaatttggattgccatgcaagggcttgcattataaaaaaaa

SEQ ID NO: 2597 - DNA, 101 bp, Homo sapiens
  unsure (77): n=A,T,C or G
  unsure (86): n=A,T,C or G
tggcttcatttcaggtttagttgatttctccaccaaatgcatgtcatgtattctcaataggctgtattcccagcagncaataaatnaacacccgtaaaaac

SEQ ID NO: 2598 - DNA, 109 bp, Homo sapiens
tgtttgctgatgggcagggacacccctgcagggtctcgggctctgagcccaggacattccctgccccttgctcaccttggctgtgggctgtgaacattccgggaccctg

SEQ ID NO: 2599 - DNA, 239 bp, Homo sapiens
ctggcctgtgggtgatcccagctcttactaggagagggagctgaggtcctggtgccaggggcccaggccctccaaccataaacagtccaggatggaacctggttcacccttcataccagctccaagccccagaccatgggagctgtctgggatgttgatccttgagaacttggccctgtgctttagacccaaggacccgactcctgggctaggaaagagagaacaagcaagccggggct

SEQ ID NO: 2600 - DNA, 96 bp, Homo sapiens
gagactccatctgccctgggcaggttcctgagccttgggggaccagttcaccctacatcccaggcttctgttgtcccttgcctgcctgtaaggaat

SEQ ID NO: 2601 - DNA, 506 bp, Homo sapiens
cctgaggagactgctcactgcaggaatgaaccaactgcaacaaggaggtcacctgtgtgcactgctcatcgctcaggttggctctctcttgggtcaaactaggtgattcacttctgtctgccgccatgatgccagccatggtcacagcaccaataatcccaatgagcttgtacttgaatacggtgctagagagctgctttcttatcaccaagtgcatgtcatcctggatgtggctgctggcttcattctgtttgctaaatgccagtgtgctgagaacatagaagagttttcgtatttgctgaggggatatgttatccagataatctaaaatgccctttacaaagacagcattcatcatcatagcagatggatttaacactaccaactctagaaggacatctaaggcagtatcaacttcagcttcattcccactgcagatatgggtcactaaggcaccaaccacttcctgctggcagtacgtgtcaaaaaacttaaatgcatatttg

SEQ ID NO: 2602 - DNA, 105 bp, Homo sapiens
ctgcggccactgcagcagccatgaagggcagtgggtagaggagtgcaggcaccctgaccagcagagattgctgcagaaataaagtctgcttggctcttgggaaaa

SEQ ID NO: 2603 - DNA, 190 bp, Homo sapiens
aaatttcaattaccatacattagtctattctaataatcttccaataatgcaaacttttactcaggatcttggtagaatatcaggaaaaccatttcctggtataatgattctctgtaatagagaaatcctatacatcgtgtagggtgaagggtagtttttatgtaatagttcactttgagctgtctagcag

SEQ ID NO: 2604 - DNA, 256 bp, Homo sapiens
ctgagagactctaaatccagtgacaagtctgtctgcctattcaccgattttgattctcaaacaaatgtgtcacaaagtaaggattctgatgtgtatatcacagacaaaactgtgctagacatgaggtctatggacttcaagagcaacagtgctgtggcctggagcaacaaatctgactttgcatgtgcaaacgccttcaacaacagcattattccagaagacaccttcttccccagcccagaaagttcctgtgatg

SEQ ID NO: 2605 - DNA, 349 bp, Homo sapiens
ctgcagatcctgcggaacgtcacccaccacgtttccgtgaccaagcagctcccaacctcagaagccgtggtgtctgctgtgagcgaggcgggggcgtctggaataacagaggcgcaagcacgtgccatcgtgaacagcgccttgaagctgtattcccaagataagaccgggatggtggactttgctctggaatctggtggtggcagcatcttgagtactcgctgttctgaaacttacgaaaccaaaacggcgctgatgaagtctgtttgggatcccgctgtggtacttctcgcagtccccgcgcgtggtcatccagcctgacatttaccccggtaactgctgggcattt

SEQ ID NO: 2606 - DNA, 463 bp, Homo sapiens
aaaacctgaactactgctggcaatagtctataaactgggctcaaacttttattgattttctgtgtctggttataaaaataggaagggtccaaggcaacaattttagaaaataaaaccagaaatcagttgggatattccagcccaaagactgccacctaatagactgttccccagtttttcaccattactaaagtgaatgcaaaactttcgtatcactgtattcttacctaaggcttcccactgcctataggataaagtataagccccattcagggagcatttacctactttcccagtcttatgacctgcaattccaagagtatcatcctcacagatactctttgctaacacctctccctttatctgctatgcagactcctctaaatcctaacactgctcaaaagttacctcttgtgtgaaatatccctggcttctctcctgtctcactgtgtcctctccttta

SEQ ID NO: 2607 - DNA, 218 bp, Homo sapiens
ccaacttccacctcaacgacctggaggcgccgcacgaggacgacgctgagggggagggggagtgggactgagcgtccgcagaggtgaccgaaaagccgtatgatgatgttcccgatttctctgttggtcggagtcggccagttgcctgaagtagggaagctgagtgtgtcgctccctggtccactgtttctcctataaatgtaaatgggtcaaaaaaa

SEQ ID NO: 2608 - DNA, 359 bp, Homo sapiens
  unsure (11): n=A,T,C or G
  unsure (12): n=A,T,C or G
ccacgggaagnnatgataactgcgcggcattctttgagggacccccattcaagttcaagttcacaattggcgaccacagccgctttgtcaactgtgtgcgattctctcctgatgggaacagatttgccacagccagtgctgacggccagatatacatctatgacgggaagactggggagaaggtgcgcgcgctgggcggaagcaaggcccacgacggtgggatttacgcaattagttggagtcccgacagcacccatttgctttctgcttctggggacaaaacttccaagatttgggacgtcagcgtgaactccgtggtcagcacatttcccatgggctccacggttctggaccagcag

SEQ ID NO: 2609 - DNA, 227 bp, Homo sapiens
  unsure (18): n=A,T,C or G
  unsure (39): n=A,T,C or G
  unsure (173): n=A,T,C or G
  unsure (182): n=A,T,C or G
cctctcctcctgctcgcnaagcctctccttttgcccacngttcaggagactgatgcactgattgttttccacctgagcctggagctctcctgccactctctccagctccttcctcaggtcttgcagctccacctcagaggacactgctggggcatccgggggcagtggctcanccatctggnttttgagtctggacaagctcctctccagctcctctacccgatgcg

SEQ ID NO: 2610 - DNA, 318 bp, Homo sapiens
  unsure (9): n=A,T,C or G
ctggctcanggaaagcacacggggagcgctcggtgctgcgagctgaaatagccgctgttttcacagaacgcccttttcacttgcaagagcgctggggaagctagttattcagtgttgggtatttggtagacgtctgattaaaaatgaatgatgtaagcctgtcacttcaaagaaaacaacacgactatttgctgccaatgatgccatctgagactttaagcaaaaatcagaattttggaaaacttacacttgccactgtgagcttgaaagagttctgatgctccaagccctccctgagagatcacaaatgcagatttt

SEQ ID NO: 2611 - DNA, 421 bp, Homo sapiens
ccaccaacagtcagaggccaaggaagctgttggctgaaaaggtggtctatgttggcgtctggatccctgccctcctgctgactattcccgacttcatctttgccaacgtcagtgaggcagatgacagatatatctgtgaccgcttctaccccaatgacttgtgggtggttgtgttccagtttcagcacatcatggttggccttatcctgcctggtattgtcatcctgtcctgctattgcattatcatctccaagctgtcacactccaagggccaccagaagcgcaaggccctcaagaccacagtcatcctcatcctggctttcttcgcctgttggctgccttactacattgggatcagcatcgactccttcatcctcctggaaatcatcaagcaagggtgtgagtttgagaacactgtgca

SEQ ID NO: 2612 - DNA, 323 bp, Homo sapiens
  unsure (10): n=A,T,C or G
  unsure (12): n=A,T,C or G
aaaggaaaantnttttgacatttacatgtcaagacagtagaatcccctacgtaagagatcaatggcttgtttttcccatgaagttcagggactttgaaattaaatgttcccctttgttccttttcctctcgaaagaaacaagaataacttcccatttgtttgctattaatgatggtgaacctgtattgggtatacaaggtgcttcctgttgcactgacaagataattattctcaagttgttcaccatcttttttccaagtcacatttactgcattcaaatccccagatgttgtgaactggcatgtgagatttacattagaagg

SEQ ID NO: 2613 - DNA, 269 bp, Homo sapiens
ctgagctgcggctggagagccctttacagtgcttctgtcctgccacgcacagccagtactccccacctctcacatcctgcccacctccgcccagcctcctggacagatgtcctagagccacagaggagagatgcccagcgtctcatcagcgtttccctcgtcctcccaggggagcctgtggtgcaggctggtgggatgctgcctgatggggagtgtagccccttgagaaagtattgagaccctaataaccccacaccctcaggaggcag

SEQ ID NO: 2614 - DNA, 533 bp, Homo sapiens
gtgaatgttttactttccaaagtgctctcctctgcaccagcagtaataaatacaatgccataatcccttaggtttgcctagtgcttttgcaattttcaaagcacttccataagcattccttccacctccttgataggcatttatggaaagcctgctacatgtcaatcatactgttaggcacaggggacctaaagacacataaaaggatggcattctgcctcataaattgcaaaacctaatgaaagtgactgcttggtaaacaaattattattatattataaaatgctataaaagagccatattgaaagtgccctgttggagacagggcaaatgccacaaaaatgatgtaaatttacatggaggaaaagtagaatctgcctggtttgtaggcagcagaagacatttttcatcagtgggcaggtgttctttaccttttgtagaaatgggagtcaagtctcaaataggaggctccacaaaatctcatgccaggtctctgataccttattcacagaagttctttgaagtatttattg

SEQ ID NO: 2615 - DNA, 441 bp, Homo sapiens
ccaaggcatcatggtgcgtggtccccttgagagacttgccgttgatggaaagaacctcattgcccttctgaatagtcccttcctgggaggccagcccatttggaaacactctgtgaaccgtaatcaccttgttttctagatctgctcctcctgccaagctgaacccaagaccagcaccttcctccttgtgtaagatggtgacatggatgccgtctaattgctttaatgttgcttcatccagaaccttcacctcctcgatgagttttttaattcttctgagctcagcagggagataacggactgaccagactgaagggaactgtggtccccatcatcgtcttccttggcttccgtgagaccctctgtatattctctcagccctgaaaggttgagcgagaaccctgtgtccaaggcagatgtttcaagcagaaccatttgcag

SEQ ID NO: 2616 - DNA, 302 bp, Homo sapiens
  unsure (88): n=A,T,C or G
  unsure (291): n=A,T,C or G
ctggaccacagccgcagcgtcatgagcagattaaacccggccactttcaggaggaggattcggaacccaatcactgacaggttttganagtttaggttcgtatctgtttcaaagcttttctcgaccagcttgacatcacaggaactttctgggctggggaagaaggtgtcttctggaataatgctgttgttgaaggcgtttgcacatgcaaagtcagatttgttgctccaggccacagcactgttgctcttgaagtccatagacctcatgtctagcacaagttttgtctgngatatacacat

SEQ ID NO: 2617 - DNA, 369 bp, Homo sapiens
cctgtggctgaccacagataccagccagcagtggggaaccaaacgctgtatctgtttgtgctcttatcaatcaactcaacatccacatttccttcaggccccagaaactgacgatttttataatcttcttcgatctcaaaacagactttagaagcataagaggaaactatttgattctcttctgagcaaatgtctcctgaatcttgtccctctgaagattcctgctcttctgatacactggaggttgggatccccatgttacaaaaagatgaaaaacatcaagaatcagttgatgaagatgaagacgatgttattgaaaactagagctgcactgtcccgtagagtagccgctacccggatatgctattt

SEQ ID NO: 2618 - DNA, 341 bp, Homo sapiens
cctggttcacccttgaaagaaaggatggctaggggtaaacaagacgagcaagtccctggaatgcagggagccaagaagggcagccgaggataaggctctgcctccccaccggcgagggtttcctttccttctggtcattaaaactgcacagcccccggggagatgttgaacatggcagggtcgaatcgctggcctcggaagggagaaccttcagcatcccaccccttcttcagcatctcatggactttcagctcatggctctgtggcttgccctgcagcttctggtggtaagtcaaaggtaagcctgtccaacaccgcctgttcctcctcatccacggtgg

SEQ ID NO: 2619 - DNA, 354 bp, Homo sapiens
ccatagtcattattctaactgatatgtctataaagttgcacccccagtccgttgagccttggtatttgttgtaaattctcctttcacagcgattgttaaatctattcgtgccctgagatgtatggctttatgctgaagattggctggatgcgtcctctgatgtgtgttgtaggaatttaatgtggttgtctcctgcttttattatactgtgacttgttaggaaaccctgggcctcatttggctctcccttgggagaggttgagggtgcacctttatgaacatggaaaggtttatcacagcaagttaacccccgcttgctcctcccctctataccaagctcttctggtttttcac

SEQ ID NO: 2620 - DNA, 211 bp, Homo sapiens
  unsure (50): n=A,T,C or G
  unsure (88): n=A,T,C or G
  unsure (120): n=A,T,C or G
  unsure (130): n=A,T,C or G
  unsure (133): n=A,T,C or G
ccagaggtcccggcccgtggatgcttctgtggatgaacccctcccagacnccccaggcccttttggaggaggactgtgtgcagctcangctcccggctccagccagccaccctcacgctnctatgctgtnaanacgtcctcagggtccaagctcaagtctttttgccccctactactctgtgccaggcatcattctaagtgcttgtttgtt

SEQ ID NO: 2621 - DNA, 358 bp, Homo sapiens
  unsure (25): n=A,T,C or G
ctgacagttctccatggcaactcantcctccagcagacccctgcatacataaaggtgcaaaccaacaagatggtgatgctgtcctgcgaggctaaaatctccctcagtaacatgcgcatctactggctgagacagcgccaggcaccgagcagtgacagtcaccacgagttcctggccctctgggattccgcaaaagggactatccacggtgaagaggtggaacaggagaagatagctgtgtttcgggatgcaagccggttcattctcaatctcacaagcgtgaagccggaagacagtggcatctacttctgcatgatcgtcgggagccccgagctgaccttcggggaagggaactcag

SEQ ID NO: 2622 - DNA, 352 bp, Homo sapiens
ccaggcacaccagtgtggccttttgggtgtgggagatctctgcttctgatggctcaaacacagcgacctcgggtgggaacacgtttttcaggtcctctgtgaccgtgagcctggtgcccggcccgaagtactgctcgtaccccgcgctggcacagaagtacacagatgtttgggagggagcagccgactccaaccccagcaggaaattctgtttttttaatctggagacattgtagccatcagggacctctcctttggcagttgtaccctcaccaactgagtaatgaatcagcctcagccccatgcctgggtcttgtcgataccagtacatgtattcatggttcatatcctg

SEQ ID NO: 2623 - DNA, 395 bp, Homo sapiens
ctgtcagcgtccagttgggaggagtgtgcagaatgatgggggaggtacttgaacagcctgacgtcgggcagggggagatacccggcgaagagcggcatcacttccatgtggaccctgtgagtggcccgagcagccactggcatggagatgacaccgcagcttttcccacacactgcccagttgctactgttgtcgacaacttcatacataagctttgtcgaaaaatgctcatcagattcagtcagtgcttcatctttatccacctccaagaggtctgagagccccgtgatcaaaacctccagggagcagagggagcctgttctgcaatactccattcccgaagggggaaagatctcagccttcacgttgtataatgtaaaaaaattttccacctt

SEQ ID NO: 2624 - DNA, 284 bp, Homo sapiens
ccatactctagccaaatgttaggacaaatgtaatccttcacggctttctcaaagaggtcatacacgtgctctctgtccaggccatcctgggccatgctgatctcgtcatgcagccactccagccagagctcttcagtcaagggaaagatttcactcatcttctggcgggccatcctcaccttggtaagctccccttccagcctgagcagtctgatcaagtccacatggcagttgtagtcatagacgttgatagacaactgctcctccagtctctcaatctccag

SEQ ID NO: 2625 - DNA, 326 bp, Homo sapiens
ccactgcatgaccagggctggcaagaagctgtgtaacagagggctgcctttagtttgtggcaggcgtcatcgttccatttgcctgcatctttgtttctcttgatatagatctccacgcagtcctccttgttcttcttgttgttgggctcaccatctccccagttctctgcttcttcagtaagagatttgttggttcccacccaccgtccatattcctcctatcttccggattcctatccaagtagtaagaacgactgaaaggcagagtcttctccagaaactcaatttccgccctgttttgtatggcaactaaatctgtgtaattg

SEQ ID NO: 2626 - DNA, 376 bp, Homo sapiens
aaatatcagtaatagttcattaagtaacatagtagctaagaacatggactatattttcacagcacagttcagcttaggcacacctttagtttggattattggcattctcttacgtaggaattatatcattgtagatatgtaattatggtaataagcaattttcataaccatgctcactcagactatatcatttgaaactaccatgtttccatttttgacaattcatgttcacaaaacaacaggaacaatttcctatttggtataaagagcaaaatttccaactttgccccaaaatgccatgggtggcatattgccatatgattatatcatatatttaatcatgtatgggaaagattttggattttttttcttattt

SEQ ID NO: 2627 - DNA, 266 bp, Homo sapiens
ttgacaacgacaacagtttgcaggtaaatgctcttgtctttcagtcttcctaatttctctaatattgccaaattttctttttcaattccttcatcctccaactttttcccactaatgggctctgctttcatctcgtagtgatctaagtcttctatatcctgtggagggggctggtgaaggagttttcagtcccgggcaccctgggctgtgctgaaagcctctgcgtcacactgccgtgagttagctgggaaagagagctcccactg

SEQ ID NO: 2628 - DNA, 179 bp, Homo sapiens
  unsure (25): n=A,T,C or G
  unsure (51): n=A,T,C or G
  unsure (115): n=A,T,C or G
  unsure (168): n=A,T,C or G
cctgaaggacccagggccctctggntggatgcgtttgcctatcaggacccnccaattacttacagacctgtttagggctaggcttggcctctttcttgagctcatctggaggggngtggcaacactcattcttcatccttattctccctggctgtgggcaacactggncctcagtgtca

SEQ ID NO: 2629 - DNA, 160 bp, Homo sapiens
  unsure (10): n=A,T,C or G
atgagaccgngacttgccagccccacagagccccgcccttgtccatcactggcatctggactccagcctgggttggggcaaagagggaaatgagatcatgtcctaaccctgatcctcttgtcccacagatatccagaaccctgaccctgccgtgtaccag

SEQ ID NO: 2630 - DNA, 338 bp, Homo sapiens
  unsure (25): n=A,T,C or G
aaaagctaagcttaccagaaagcanagagatttaatatgtcaacttgtccacaataatgccaagatgaaaaatgacaatgagtcttaattattttgagtcaaatatttcagttcaagaaaatacaactacaggatttcctacaccacacaccaatgggattcatattcattatgcaaactatggtgacagacactcagggctgtaaagtaatttgccttgagtgtttcagtgactttcaccaagtttttggatcctggagtaatcagtgcaaacaagccataaagcttcagtagcaaattactgtctcacagaaagacattttcaacttctgctccag

SEQ ID NO: 2631 - DNA, 167 bp, Homo sapiens
aaagcagccgcaaacatggtttccacaactgcattcctgaagcgcatacccagagttacttcttgtaacagcactttcttccagatgactgagatgcgtctgctggtgataagatcagattaacctatttcaacttgatagctagattctgacacactgaagaaaaa

SEQ ID NO: 2632 - DNA, 201 bp, Homo sapiens
  unsure (12): n=A,T,C or G
  unsure (50): n=A,T,C or G
  unsure (124): n=A,T,C or G
  unsure (145): n=A,T,C or G
  unsure (148): n=A,T,C or G
  unsure (195): n=A,T,C or G
ctggcgagcagnatctcttctgggaactgagatgccatttcaggaagaanccactttctttagtttgcatgtaacttacgagagtgtctctcaggctccactgagggcggaagcgctcctcggnttgggtttgggggttctttanttncaagattatcatttcgtgcagctctagcaggaaggcgtctaggccantctgat

SEQ ID NO: 2633 - DNA, 265 bp, Homo sapiens
ctgagcagcttttctccccccatatctgcgtgcacttcccagagcatcttgcatccaaacctgtaacctttcggcaaggacggtaacttggctgcatttgcctgtcatgcgcaactggagccagcaaccagcacatccatcagcaccccagtggaggagttcatggaagagttccctctttgtttctgcttcatttttctttcttttcttttctcctaaagcttttatttaacagtgcaaaaggatcgtttttttttgctttttt

SEQ ID NO: 2634 - DNA, 349 bp, Homo sapiens
ctgagatctgcaagattgtaagacagcctgtgctccctcgctccttcctctgcattgcccctcttctccctctccaaacagagggaactctcctacccccaaggaggtgaaagctgctaccacctctgtgcccccccggcaatgccaccaactggatcctacccgaatttatgattaagattgctgaagagctgccaaacactgctgccaccccctctgttcccttattgctgcttgtcactgcctgacattcacggcagaggcaaggctgctgcagcctcccctggctgtgcacattccctcctgctccccagagactgcctccgccatcccacagatgatggatctt

SEQ ID NO: 2635 - DNA, 283 bp, Homo sapiens
aaatttggattcaaagtacttagattttctggaatcccattctacaatcttctggtcgaaagtataaaaccaggttagttgtttgtagttctcaggcaggctctcagagatgttcagagtcacgttgctgccggagaccacggtcatatgtaccaagtgaccttgaatgctggtcaccaggagtgacagaggcagcagtagcaatcccagagccagacacgaatcccaacctctggagcacatgcttccttccagaacttcccagcaacgcaggagacagttg

SEQ ID NO: 2636 - DNA, 307 bp, Homo sapiens
cctgtcatgaataatcaccgttctcctttcgtctcgctcccctcgtacttctcgcctgtctgattctctaagttcatttcttggtggtggaggctcatttcttctggagtcactgaaatttttgggatatctttcgaagcttggatcttcccttcgtgcagtaggtcgtgcttttttcccctcactttgaccaacaaagcggtcccgcctttcaaaagatgaagactgtactgctgaactctcaggaaacctgcccctctctcggtgatcaaagtcattaaatctgttctgttggcgagagtagtcg

SEQ ID NO: 2637 - DNA, 177 bp, Homo sapiens
gaatacctttttcccctcagtttagtatattgactttgtactgtaaatttttctgcttttcttggataatctcaggattttcatgaggatagggggaactcaactttatttatgagacaaaatttccatacaaagctcaatctcctttatacacccacagacataatattagttttt

SEQ ID NO: 2638 - DNA, 233 bp, Homo sapiens
  unsure (12): n=A,T,C or G
  unsure (23): n=A,T,C or G
ctgaagagccangagcccaggcnggactttgccttctttgacaaccagccccaggccccttggggtacttgatggccccctcaagacctttggaatccagccaagtgatgcacccaaatgatccacctttcgcccactgggataaatgactcaggaaagaagagcctcggcagggcgctctgcactccacccaggaggaaggataccgtgtgtcctgctgcagtcctcaggga

SEQ ID NO: 2639 - DNA, 455 bp, Homo sapiens
  unsure (337): n=A,T,C or G
ctgttaacacattattgattaaataagtatatgcctaaatctggaagaacaaacgaaattatcatgacttctcggtaacactgtgaaaggaaatatcctttttcattttacattctgcactgtaaaaaattcaaaccagcaatgtttaatagctttcacatttgttaaccataaacacaaatttatcaaggtttaatagccaccacccatggcatggtgaatatgtccctggagtctacagaaccagatttgaattttatctctaggccacatgcaagtcacatgatctctgaatcttgctttcctagtccacaaatctaagtgagataggtacggngtctaagccaatgcctagcatgcagattatttcagtacatgtaaccctcccttcaatttacatgaatatgagacatattgctaaagatcaagtaccaactgggtatgactacagagag

SEQ ID NO: 2640 - DNA, 184 bp, Homo sapiens
  unsure (53): n=A,T,C or G
  unsure (85): n=A,T,C or G
  unsure (92): n=A,T,C or G
  unsure (93): n=A,T,C or G
  unsure (97): n=A,T,C or G
  unsure (107): n=A,T,C or G
ctggaccacagccgcagcgacatgagcagattaaacccggccactttcacgangaggattcggaacccaatcactgacaggtttngaaagtnnaggntcgtatctgnttcaaagcttttctcgaccagcttgacatcacaggaactttctgggctggggaagaaggtgtcttctggaataatgc

SEQ ID NO: 2641 - DNA, 172 bp, Homo sapiens
ccaggtagcggtccagactgatgaaggccaggatgaggacactgctgtagaggttgactgtgtagatgacatggactgccttgcataggaagttcccaaagtaccagtttgccacggcatcaactgcccagaagggaagcgtgatgacaaagaggaggtcggccactgacag

SEQ ID NO: 2642 - DNA, 230 bp, Homo sapiens
aaacagcatcttgctacagatttccaatccaataaataccaggaatgaaggacttttgccccaaagaagtatttcacatgaattctgaactttggatatggaaacttatagaaaaactgaagaccctgagacacatgcaagtaagagtcttctggcaaaaatacaatttaattttccagtttctctcctcccaaaaactccagaagatacctttagtaggcacagagttt

SEQ ID NO: 2643 - DNA, 389 bp, Homo sapiens
  unsure (171): n=A,T,C or G
  unsure (280): n=A,T,C or G
  unsure (357): n=A,T,C or G
  unsure (377): n=A,T,C or G
  unsure (382): n=A,T,C or G
ctggaccacagccgcagcgtcatgagcagattaaacccggccactttcaggaggaggattcggaacccaatcactgacaggttttgaaagtttaggttcgtatctgtttcaaagcttttctcgaccagcttgacatcacaggaactttctgggctggggaagaaggtgtcntctggaataatgctgttgttgaaggcgtttgcacatgcaaagtcagatttgttgctccaggccacagcactgttgctcttgaagtccatagacctcatgtctagcacanttttgtctgtgatatacacatcagaatccttactttgtgacacatttgtttgagaatcaaaatcggtgaatacgcanacagacttgtcactggattnacagnctctcaa

SEQ ID NO: 2644 - DNA, 186 bp, Homo sapiens
  unsure (8): n=A,T,C or G
  unsure (11): n=A,T,C or G
  unsure (23): n=A,T,C or G
  unsure (25): n=A,T,C or G
  unsure (50): n=A,T,C or G
  unsure (51): n=A,T,C or G
  unsure (83): n=A,T,C or G
  unsure (99): n=A,T,C or G
  unsure (109): n=A,T,C or G
  unsure (129): n=A,T,C or G
  unsure (132): n=A,T,C or G
  unsure (138): n=A,T,C or G
  unsure (170): n=A,T,C or G
  unsure (182): n=A,T,C or G
ctgacagnccnccatggcaactngnggcctccagcagacccctgcatacnnaaaggcgcaaaccaacaagatggtgatgctgncctgcgaggctaaaanctccctcagnaacatgcgcatctactggcnganacagcnccaggcaccgagcagggacagtcaccacgagnccctggccctcnggga

SEQ ID NO: 2645 - DNA, 263 bp, Homo sapiens
cctgagcctgcctctctgccttctcagcagagcggccggccgctgtgaccactgctctcaggagagtgggggatgagaggccagaggtgatgcaggctcagaccccggcttcaggagctcggggtggggtcgtgggaccgtgcgcgatagcatcagcccacaggggcaggcagaggcggtgtggagatgccacggggaagccacctgcccacgggggtccacgggagtccaggctacaggcagaaagccttgaactcaggcca

SEQ ID NO: 2646 - DNA, 254 bp, Homo sapiens
  unsure (10): n=A,T,C or G
  unsure (44): n=A,T,C or G
  unsure (45): n=A,T,C or G
  unsure (48): n=A,T,C or G
  unsure (82): n=A,T,C or G
  unsure (84): n=A,T,C or G
ccagtgtcangagggcaatgggctctggaaccccttgctgaagnntgncctcaatggccgttgcacccagcagcatcatgtngntctcaacctcctcatagatgctagccagcctgtcctcccggctgtcctgggccaggctggcctggaggcgtcgctcagcccactcctcgtagtactcttcatccagatccttgtaagccagcaccagggtcctcagcccttcccctgcgtactcattaaggtggtccatg

SEQ ID NO: 2647 - DNA, 195 bp, Homo sapiens
  unsure (23): n=A,T,C or G
  unsure (87): n=A,T,C or G
  unsure (113): n=A,T,C or G
ctggatcccagggaaatatcagncttgggcaactgcagtgaccaggggcaccggctgcccacagggaacacattcctttgctggggntcagcgcctctcctggggctggaagngccaaagcctggggcaaagctgtgtttcagccacactgaacccaattacacacagcgggagaacgcagtaaacagctttccc

SEQ ID NO: 2648 - DNA, 323 bp, Homo sapiens
  unsure (51): n=A,T,C or G
aaacttgacaatcattacactaaaacagatttgataatcttattcacagtngttattgtttacagaccatttaattaatatttcctctgtttattcctcctctccctcccattgcatggctcacacctctctgtctgttaaactgacgaccacggacaccttgtctcaatgttgtctgaagtcttactcgtctgaaaggctttggttgactactactagtatctacagatgagctggaaggaggatcctggctggtggaggggagatctgactcatcagatgcttgaaccggctcttcttcctgctggctatcgatttctagg

SEQ ID NO: 2649 - DNA, 441 bp, Homo sapiens
  unsure (327): n=A,T,C or G
  unsure (339): n=A,T,C or G
  unsure (367): n=A,T,C or G
  unsure (374): n=A,T,C or G
  unsure (390): n=A,T,C or G
  unsure (426): n=A,T,C or G
ccaaggcatcatggtgcgtgggccccttgagagacttgccgttgatggaaagaacctcattgcccttctgaatagtcccttcctgggaggccagcccatttggaaacactctgtgaaccgtaatcaccttgttttctagatctgctcctcctgccaagctgaacccaagaccagcaccttcctccttgtgtaagatggtgacatggatgccgtctaattgctttaatgttgcttcatccagaacctttacctcctcgatgagtttttttaattcttctgagctcagcagggagataacggactgaccagactgaagggaactgtggnccccatcatcgncttccttggcttccgtgagaccctctgnatattcnctcagctctgaaaggntgagcgagaaccctgtgtccaaggcagatgtttcancagaaccatttgcag

SEQ ID NO: 2650 - DNA, 432 bp, Homo sapiens
  unsure (24): n=A,T,C or G
  unsure (326): n=A,T,C or G
  unsure (396): n=A,T,C or G
aaaaacgaaacaaagttatggggntaatctcctacacaattcatttacttcatttgaatgttagagctactcatgattatttgtgtttctaatttatagtttaagtttatttgtaaaaagttaaaagagagtgggtctctgtgcctctcactgatgttcactctggcatcctttagcatttttcttttttcatttcataattgtaggtcattagcatgcatatcgagtttgcccttacgtggtgggagttcaaacacacaaagacccattctttgcacaaaactgttctcgctggtttggaataggctcccgtgcttttttaatgntattgcagcatggatgttcattacagaattcagataaaatttgctaatgctctgctatgatgtttgatcncatcttaatcacagggagctcttccatagctcaata

SEQ ID NO: 2651 - DNA, 245 bp, Homo sapiens
ccttgcacgtggcagtgtctatcctgtcagatttgggaggtcagctattaattagatcagctattaatcagactgttctcctaacactttaacttcatggatgtaccttccttcctttcctaatgccaactctgtttcccgggtaggtgtttcactgcctgaatgaaatcctagatctctgtcacagtttttgttcgctggtcagtcagaacctaggcccactggatgagcgtggagccgcccag

SEQ ID NO: 2652 - DNA, 191 bp, Homo sapiens
  unsure (22): n=A,T,C or G
ccatagatttgccttgtggtgntggatcaggtactgtgtctgctcataagtacttgtgtcatccagaatgttttgttttttaagaaaattgaattacttgtttcctgaaatattctgaggttaatatgttagttttcatagaacattgagaggcccctgccactttcaataaaggcctgacttggaaaaaa

SEQ ID NO: 2653 - DNA, 420 bp, Homo sapiens
  unsure (24): n=A,T,C or G
  unsure (49): n=A,T,C or G
  unsure (50): n=A,T,C or G
  unsure (159): n=A,T,C or G
  unsure (292): n=A,T,C or G
  unsure (370): n=A,T,C or G
aaatcttgaaacaaatcaagaaancttttgttaaccaaaccagaaaagnnccagcttactgggagacttctcaaatttgtcatttttccatgaattcagtttgtgctgtttaagaccttcctggtccacgaattcagtttgtgctgtttaagacctggntatttcccatgagccacacatgcttccaatctttcttgaagtagtgcacatgttccttcccagagctagtttctatttgcccatctcagttaagtccatatacatagaattgcattcattgacaccattccgnactttataaatgtataccaacttcaccatcctcagggcaatgttacatccctcttccagaattaaacattccggaggntgtctcccacacactcacacacacacaagccttgggacacaacgatcaaa

SEQ ID NO: 2654 - DNA, 226 bp, Homo sapiens
ccaagtaaactgtactgccaatagaattctggaattgtgagaaattgtatcattgaagttcagtaggatgtgtggcttaaaaatttatcaggaccacaaaaaagaaaacaaaaatatttggtactgaggttcattgccagggcaggaggtatttccagaaaatactcatgcctgtgttctgttccttgctttcccaaatactgcatgtgactttcctaagcggcag

SEQ ID NO: 2655 - DNA, 310 bp, Homo sapiens
  unsure (24): n=A,T,C or G
aaaaaaataataaaacgaacaaanctttacttgttgccacatcagataacacggaaaaagccttgaaattactccagatgtgcaccctccccttccctcagtgcctgagtctttttcttccagatcgaagtatttcagcccttttggggcgccgtttgcgaaacacagccccttttgagggacttcctcctcttgaaaagactcaccagttctcccttcctaggtgtttctgttcatgagaaattgtcagaatcaactggcacgttccagggtcttcctaaaggatggaaacctgtttggcttgcttttt

SEQ ID NO: 2656 - DNA, 389 bp, Homo sapiens
ctggaccacagccgcagcgtcatgagcagattaaacccggccactttcaggaggaggattcggaacccaatcactgacaggttttgaaagtttaggttcgtatctgtttcaaagcttttctcgaccagcttgacatcacaggaactttctgggctggggaagaaggtgtcttctggaataatgctgttgttgaaggcgtttgcacatgcaaagtcagatttgttgctccaggccacagcactgttgctcttgaagtccatagacctcatgtctagcacagttttgtctgtgatatacacatcagaatccttactttgtgacacatttgtttgagaatcaaaatcggtgaataggcagacagacttgtcactggatttagagtctctcag

SEQ ID NO: 2657 - DNA, 308 bp, Homo sapiens
  unsure (21): n=A,T,C or G
  unsure (24): n=A,T,C or G
  unsure (34): n=A,T,C or G
  unsure (48): n=A,T,C or G
  unsure (49): n=A,T,C or G
  unsure (51): n=A,T,C or G
  unsure (52): n=A,T,C or G
  unsure (54): n=A,T,C or G
  unsure (57): n=A,T,C or G
  unsure (78): n=A,T,C or G
  unsure (113): n=A,T,C or G
  unsure (125): n=A,T,C or G
  unsure (137): n=A,T,C or G
  unsure (241): n=A,T,C or G
ctgagagactctaaatccagnganaagtctgtcngcctattcaccganncnnanacncaaacaaatgtgtcacaaagnaaggattctgatgtgtatatcacagacaaaactgngctagacatgangactatggactncaagagcaacagtgctgtggcctggagcaacaaatctgactttgcatgtgcaaacgccttcaacaacagcattattccagaagacaccttcttccccagcccanaaagtgcctgtgatgtcaagctggtccgagaaaagctttgaaacagatacgaacctaaactttcaaa

SEQ ID NO: 2658 - DNA, 123 bp, Homo sapiens
  unsure (10): n=A,T,C or G
  unsure (54): n=A,T,C or G
  unsure (81): n=A,T,C or G
  unsure (84): n=A,T,C or G
aaaacctgcngactaaacagtaaggaatttatatttgtgaaaaatgccacccgncctagtgatttctgatgtaaataatgntgnttatatagtatgtattaaattttcctacattgtaaaaaa

SEQ ID NO: 2659 - DNA, 306 bp, Homo sapiens
ctgctgcacccagagctcctttgggtctgcacatagctctgcctgagagcgcttgcggggcaagaacaggatagctgggatggagcagcctaagcttggttcctgcttccggtagctgcggacaaccttggcgggaatcttcctttggctgtacttgaggcaacagtcctgagcccctccatcactgccttgggtcctggggatgccaaaggccagaaccaggataaggaggctcagagccagtgactgagccatgtctgtggtagagggtgagtcagaggccagagctgagggtgaggtgggcag

SEQ ID NO: 2660 - DNA, 240 bp, Homo sapiens
  unsure (51): n=A,T,C or G
  unsure (54): n=A,T,C or G
  unsure (72): n=A,T,C or G
  unsure (154): n=A,T,C or G
  unsure (174): n=A,T,C or G
  unsure (187): n=A,T,C or G
  unsure (210): n=A,T,C or G
cctgaaggacccagggccctctggggggatgcgtaagcctatcaggacccncanttacttacagacctgttnagggctaggcttggcctctttcttgagctcatctggaggggtgtggcaacactcattcttcatccttattctccctggctgngggcaacactggtcctcacngtcaccagatggncctcctctgggcccatgaccccncagcagccaaggctggccctgccagataaa

SEQ ID NO: 2661 - DNA, 280 bp, Homo sapiens
  unsure (17): n=A,T,C or G
  unsure (107): n=A,T,C or G
  unsure (167): n=A,T,C or G
  unsure (217): n=A,T,C or G
  unsure (238): n=A,T,C or G
  unsure (258): n=A,T,C or G
ctggaccacagcctttncgtcatgagcagattaaacccggccactttcaggaggaggattcagaacccaatcactgacaggttttgaaagtttaggttcgtatctgnttcaaagcttttctcgaccagcttgacatcacaggaactttctgggctggggaagaaggngtcttctggaataatgctgttgttgaaggcgtttgcacatgcaaagtcangatttgttgctccaggccacngcactgtttgctcttgaagnccatagacctcatgtctagcac

SEQ ID NO: 2662 - DNA, 192 bp, Homo sapiens
  unsure (189): n=A,T,C or G
aaagcttcttgtttttattaaaaacaagcacatattaacagccacatgtgaatgccaaatgattaaaacaaaaaacaaaaacaagagccatctacactgcagctagggaaagcaaacttcttggcttaagagaagtgagggatgtgtgtacgtgtgtgtgtgtgtgtgtgtgtgtgtgtgtgtgtgtgngtg

SEQ ID NO: 2663 - DNA, 504 bp, Homo sapiens
  unsure (15): n=A,T,C or G
  unsure (266): n=A,T,C or G
  unsure (394): n=A,T,C or G
  unsure (404): n=A,T,C or G
  unsure (440): n=A,T,C or G
ccaggccacctcctnaggagttagatcacttatccgtctctccctggcccacccttctctgtcacatggcttctttgctgaccgtgatacacaccacacttgtcttctctacctggaagttgtattccccatacccacatggctcacttcttcacttcattcaagtctctgctcagatattaacctcttcagagagcccttccttcacacactgtcttgcatagcagcctctcctacaagttgtcttctttctccttaacttttgngatggttaattttaggtgtcagcttgacttggattaaagaatacctagagaactggaaaggcattatttggtagtgtgtctgtgagggtatttccagaagagattgatatatgactgattgggctaanaggaaccatncgccctcaacgtgcagttggcttggaaacaaaaacngaagaaaggcaaattggtcttactctcttggagctggaataaccccttccattcctggcccttg

SEQ ID NO: 2664 - DNA, 389 bp, Homo sapiens
ctggagggtcagccaccaagctgggagctgagccagaacaggagtgatgtctctgcccttcctctagcctcttgtcacatgtggtgcacaaacctcaacctgacagctttcagacagcattcttgcacttcttagcaacagagagagacatgagtaagacccagattgctatttttattgttatttttaacatgaatctaaagtttatggttccagggactttttatttgacccaacaacacagtatcccaggatatggaggcaaggggaacaaagagcatgagtctttttccaagaaaactggtgagttaagtaagattagagtgagtgtgctctgttgctgtgatgttgtcagccacagcttcctgccgtagagaatgatagagcag

SEQ ID NO: 2665 - DNA, 492 bp, Homo sapiens
  unsure (388): n=A,T,C or G
  unsure (443): n=A,T,C or G
  unsure (450): n=A,T,C or G
  unsure (488): n=A,T,C or G
ctgcagtcaacagtttaaagaagtcatggcccaaatccagtgtgcacccctccccattcacagagcctttttcacaattccatttccagttcatctatggcagtccagccagctcctgggcagcttgagagggcaaacccaaaacctcatgacagccagagcctgtctttcagcattcagtccgcctggccggctccagtttccccatggggctgcgggacagaggaccattacaactagatcaaggagcccagaaaacctccagtagtggacaacaggttttcaccatagcctacgttaacccatttttgagccaagcttcaaccctcagccttgaaaaacaagtctttaatttaatttttgttttttgctaaatccaaagaaaaangggctgccgggccaggcgcggtggctcaccgcctgtaatcccagcactttggcanggccgangcaggtggatcacctgacgtcagtagtttgagaccagnctgg

SEQ ID NO: 2666 - DNA, 337 bp, Homo sapiens
  unsure (14): n=A,T,C or G
  unsure (15): n=A,T,C or G
ctgcataatgctcnnacatctgtagatagagccgctctagttccattgtgtattgtttggtgttgaacagagggctagatattctttgcttccagactttgccacgaactttcttcaggtattctagatcagttcccagcttcacagctatgtcttcatattcttgtctgtttttagcaataagctcaagacaacctaagcaagtgagctgggatgctgcaactcgagaagcaagagtctctcctggcatagtcaccatgggggtccctgcccagaggacatccatccctgtggtgtgcccattacagagtggagtgtccaagcagacatcagccag

SEQ ID NO: 2667 - DNA, 405 bp, Homo sapiens
  unsure (11): n=A,T,C or G
  unsure (12): n=A,T,C or G
aaaagtcgcannttctgacaatcaacaaataaactctaatgagaatcataaagcttgttcccagagaaccatgatacagggtgggacagtacgcaaataatgggctcctgttgtcagacttcatggtgattacgcttgtgctttctccagtatctttcttcctattgtactcctgaagcactcagaatgataaagataaatttctgatcattcctacaaagagtgcaggcaaagttaagatttaactgtgattgctggttgtttcatctcgaattcaaaatcctggatttccgaaacaatggagcttgatgtcacatttggctatcttgcctttgtctcctcttctggaaagaacaaatcatcttcctgaaaattacaggagacacttagtatgacaaaataagg

SEQ ID NO: 2668 - DNA, 332 bp, Homo sapiens
  unsure (6): n=A,T,C or G
  unsure (14): n=A,T,C or G
cgcggncgtaaggnttgaggatttttggtccgcacgctcctgctcctgactcaccgctgttcgctctcgccgaggaacaagtcggtcaggaagcccgcgcgcaacagccatggcttttaaggataccggaaaaacacccgtggagccggaggtggcaattcaccgaattccaatcaccctaacaagccgcaacgtaaaatccttggaaaaggtgtgtgctgacttgataagaggcgcaaaagaaaagaatctcaaagtgaaaggaccagttcgaatgcctaccaagactttgagaatcactacaagaaaaactccttgtggtgaagggtcta

SEQ ID NO: 2669 - DNA, 302 bp, Homo sapiens
  unsure (15): n=A,T,C or G
  unsure (16): n=A,T,C or G
  unsure (52): n=A,T,C or G
ccacctcaccctttnntctggcctcttactcaccctctaccacagacatggntcagtcactggctctgagcctccttatcctggttctggcctttggcatccccaggacccaaggcagtgatggaggggctcaggactgttgcctcaagtacagccaaaggaagattcccgccaaggttgtccgcagctaccggaagcaggaaccaagcttaggctgctccatcccagctatcctgttcttgccccgcaagcgctctcaggcagagctatgtgcagacccaaaggagctctgggtgcagcag

SEQ ID NO: 2670 - DNA, 398 bp, Homo sapiens
  unsure (15): n=A,T,C or G
ccactctgtctgcangatgttttagtggaatgttgtagccaaagttagatctgaagttggaagcttcttctcttgctatgtctgctaaagaacgagcatctgccaacaaacctgctactgccattccaacatgccgatcaacattaaaaagtcttttgttggaaccttcttcataaagtttagaaaggactaatttttctaccccaaagacaacaccatctttgcatctgattccaatagctgtactactattttccacagccttcatagcatattcaacttgaaaaactcttccgtcaggagagaatgtagaggctgacaggtcatacccagtgccgattgagctcatcgtgctaaacccaaagggacgcgtagggattccaggcccggagcgcttc

SEQ ID NO: 2671 - DNA, 352 bp, Homo sapiens
  unsure (331): n=A,T,C or G
cctgtgaggtgcagagtgcccagaactggactcaggatgcccagggccactctgcctctgcctgcattctgccgtgtgccctcgggcgagtcactgcctctccctagccctcagtttccctatctcgaacatggaactcattcctgcctgtctcctttgcaggctcatagggaagacctgctgagggaccagccaagagggctgcaaaagtgagggcttgtcattactagacggttcaccagcctctcttggtttccttccttggaagagaatgtctgatctaaatgtggagaaactgtagtctcaggacctagggatgttctggccctcncccctgccctgggatgtccac

SEQ ID NO: 2672 - DNA, 423 bp, Homo sapiens
ctagaacctgggtcctagtttgcacctagaatatgaggtactttgagccttgctaagaccacccagcccatctccatggactcatatgaaggacaagaagtgaacataacctgtagccacaacaacattgctacaaatgattatatcacgtggtaccaacagtttcccagccaaggaccacgatttattattcaaggatacaagacaaaagttacaaacgaagtggcctccctgtttatccctgccgacagaaagtccagcactctgagcctgccccgggtttccctgagcgacactgctgtgtactactgcctcgtgggtgacatggagtcttctggttctgcaaggcaactgacctttggatctgggacacaattgactgttttacctgatatccagaaccctgaccctgccgtgtaccag

SEQ ID NO: 2673 - DNA, 188 bp, Homo sapiens
  unsure (68): n=A,T,C or G
  unsure (153): n=A,T,C or G
  unsure (166): n=A,T,C or G
ttggtgagggtacaactgccaaaggagaggtccctgatggctacaatgtctccagattaaaaaaacanaatttcctgctggggttggagtcggctgctccctcccaaacatctgtgtacttctgtgccagcgcggggtacgagcagtacttcnggccgggcaccangctcacggtcacagaggacctg

SEQ ID NO: 2674 - DNA, 242 bp, Homo sapiens
ccaacatggtgaaaccccatctactaaaaataccaaaaaaattagccaggcgtggtggcaggcgcctgtagtcccacctactctggaggctgttgcagaattgcttgaacccgggaggcggaggttgcagtgaaccaagatcgcgccactgcactccagcctggcgacagagcaagactccatctcaaaaaaaaaaaaaagacttgaatagctacagaaagtcccttacctctgatcaaagg

SEQ ID NO: 2675 - DNA, 376 bp, Homo sapiens
gttttggtggcggtacagacacttttaactcacagtaaaagcaaaagcaacagctcaagcagcctccttggagaaaacctgaaaattcaacttgttcaagagaaggtcttgtacgtgcctaagttctagagcctcctgacgtgagcatggctgagagtgaggaccgctccctgaggatcgttctggtagggaaaactggaagtgggaaaagtgcaacagcgaacaccatccttggagaggaaatctttgattctagaattgctgcccaagctgttaccaagaactgtcaaaaagcatcccgggaatggcaggggagagaccttcttgttgtggacactccagggctctttgacaccaaggagagcctggacaccac

SEQ ID NO: 2676 - DNA, 284 bp, Homo sapiens
ctgtccggaaccaggaagggcaggaaagccatggaggcctttcaggcatctgggcagggtagggaggggccgtaaggtgctcacctgtcacacgaggtccccgagcgccgaggaagatggtggcgggcagcgggcggcagcagtggcgtgatctccgaagcccacagtacactcatccataaagtaggaaacactacaccctccagtgctgttagtagtgctttctactttatgggtgactgcactgtctgtctgcccgtcggcgtgtactcttcaggctgccc

SEQ ID NO: 2677 - DNA, 284 bp, Homo sapiens
  unsure (106): n=A,T,C or G
  unsure (260): n=A,T,C or G
cagaggacccctccatcctgcagttcctgccatgagcctcgggctcctgtgctgtggggccttttctctcctgtgggcaggtccagtgaatgctggtgtcactcanaccccaaaattccgggtcctgaagacaggacagagcatgacactgctgtgtgcccaggatatgaaccatgaatacatgtactggtatcgacaagacccaggcatggggctgaggctgattcattactcagttggtgagggtacaactgccaaangagaggtccctgatggctacaatg

SEQ ID NO: 2678 - DNA, 252 bp, Homo sapiens
cctggagccttcccctgcctcttccgacctgcatctcagcagccaccctacccagtgaccaggagtccttaggctacctggatgcaagtcttgcgggggtgacgggccacccccttccttcttctcccatccaatcccactggttcctggatcccaggccctcagctctgccctaaaggaactctgagcaatccatgatgagtgtgtgctacacacatcctttctctcttccaaataagggacttccccttt

SEQ ID NO: 2679 - DNA, 269 bp, Homo sapiens
ccaatttcttaacccccttcagcgtccgtttgtttgcacagtgaaatggaaacattaatacttaccttgccaggctggtgcgaggatgagatggggttgtgtatgagaagtcagcacagagctggcaggtggtgccatgcaggtgtcagcagagttaagggattgttgatgtagtagacgtggtccgctccactacaccttgccagaccacctgcagggcacctcagctccaattcacagacgcgcctacagcttcctgcaccaagcag

SEQ ID NO: 2680 - DNA, 322 bp, Homo sapiens
  unsure (207): n=A,T,C or G
  unsure (269): n=A,T,C or G
tgctcatcttcagcagacggaaaccaagcgtgatgacccctactgagggcctggatacgggagagatgagtaatagcacatcctcactcaagcggcagagactcggatcagagagggcggcttcccatgttgctcaggctaatctcaaactcctggacgtgagcaagatcttcccaattgctgagattgcagaggaaagctccccanaggtagtaccggtggaactcttgtgcgtgccttctcctgcctctcaaggggacctgcatacnaagcctttggggactgacgatgacttctggggccccacggggcctgtggctac

SEQ ID NO: 2681 - DNA, 151 bp, Homo sapiens
  unsure (138): n=A,T,C or G
ggcagccatcaccagccacagttaagccaagccccccaacatgtattccatcgtgctggtagaagagtctttgctgttgctcccgaaagccgtgctctccagcctggctgccagggagggtgggcctcttggttccangctcttgaaatag

SEQ ID NO: 2682 - DNA, 254 bp, Homo sapiens
  unsure (162): n=A,T,C or G
ctgagagactctaaatccagtgacaagtctgtctgcctattcaccgattttgattctcaaacaaatgtgtcacaaagtaaggattctgatgtgtatatcacagacaaaactgtgctagacatgaggtctatggacttcaagagcaacagtgctgtggcctgnagcaacaaatctgactttgcatgtgcaaacgccttcaacaacagcattattccagaagacaccttcttccccagcccagaaagttcctgtga

SEQ ID NO: 2683 - DNA, 252 bp, Homo sapiens
  unsure (251): n=A,T,C or G
cctttctcccagggtcttattgaagtttgggttttggcataagagatctaagggttgccctaggaggcagaggatggttccctgatcttaaaggctctcaacctctcctctctcctcccttcccccacagtgtgccacagctgtgtggagctggatccagccaccgtggctggcatcattgtcactgatgtcattgccactctgctccttgctttgggagtcttctgctttgctggacatgagactggaang

SEQ ID NO: 2684 - DNA, 356 bp, Homo sapiens
ctgatacctgatcaacttcgacatttgggcaatgccatcaaacaggttactatgaaaaaggattatcaacagcaaaagatggagaaggtgttgagtcttccaaaacccaccattattctcagtgcctaccagcgaaagtgcattcagtccatcctgaaagaggagggtgaacatataagggaaatggtgaagcaaatcaatgatatccgcaatcatgtaaacttctgacaccaccaggagctgactcacacctgaactgaacaccattgaaggcttaaacccatattgtaaaacaggtagaattatctaatttataaaaaggtgttttgatgacctttggtgtggttcatcttttt

SEQ ID NO: 2685 - DNA, 375 bp, Homo sapiens
aaaaactaatgtccattgtttttcccaatctgaatatgtttccatacatgtatgtatttgcaatttctattttccaatatgtaaaaagttggtagacaatgaagtagtgtgcaaatttttaggagagaaaacaatccctactggtttactaccaaactctcacagttatatagaatctattagcactataaactaactcaaaatgcaggcttcagaaaaactgcttcaatagcctccctatcaatctgtcgccttctatgaagtcttcacctgctattattccacaggctgagaattacttctgaaagaaatggtcaattttttcaacagcttggtatgttgacagcttagcaacggtacttcaatcacctcttt

SEQ ID NO: 2686 - DNA, 309 bp, Homo sapiens
agtggatccaaagcacctgataaaagttaataatctcttgttaggaaagctgtccattaataaggccagtcttcagcaaaactaaaaccattttgttcgtttagctttcctagtctgacaacgcaatactgttgaaccacagtcaaatataatgacaacattggatggatagatcagtaccattggttacagctgttaaacaggttcgttcttggcgccacataaaaacaagccaataacatcgaataaatcatggcttttttttctttatcacaattcactaagtgatgttaattatggtccttgtca

SEQ ID NO: 2687 - DNA, 320 bp, Homo sapiens
ctgcaggaactcaagggcaacatccgtgtattctgccgggtccgccctgtcctgccgggggagcccactccaccccctggcctcctcctgtttccctctggccctggtgggccctctgatcctccaacccgccttagcctctcccggtctgacgagcggcgtgggaccctgagtggggcaccagctcccccaactcgccatgatttttcctttgaccgggtattcccaccaggaagtggacaggatgaagtgtttgaagagattgccatgcttgtccagtcagccctggatggctatccagtatgcatctttgcctatgg

SEQ ID NO: 2688 - DNA, 171 bp, Homo sapiens
  unsure (1): n=A,T,C or G
  unsure (28): n=A,T,C or G
  unsure (39): n=A,T,C or G
  unsure (153): n=A,T,C or G
naaactcaacagtagtatttaccatggngtcaaattaancatttatcttgagttcacaaactgagttcactaattttgtctccgtttttcaaatttctagcatttatagactactataacaaccatactcttttaggctaagtgttggaaaanagtaatagatttctggct

SEQ ID NO: 2689 - DNA, 610 bp, Homo sapiens
aaaaaatgggaaattttaatattaagtatgtccatgattgaaagaatcattccagaaatggcagcaaagaggctcaatgaattcattatcatttttcctttgaccaaacacttcctggagtttttctccgttgctgccaggagtgatccggaaataatatacataatgcctccccagagagggtaccacacagtcacacagatgggtgcatagatccctgctgggatcatcagaagaccccccagggcaatgtggaagagcccattcataatctggacagcccccaaagtcttagattccctcatgaagaagctttgcgtggggcccaccagtgaagacatcctcctgaagagtggttttggaccagattgcatagcaatagggcctttcattggctctgccgggaaagtcccatttactgaatttctgggtgttgtcattttgctctcaaaactcctaaaaataaaacaaataacaaaatgaggagagcaagaacaagatttttggcagtcttaccttgtgtcatgcatctgaatgcttctctcagcatttcctccatgagtgtcattgagggtagacatggcctcttccgagtgaccttggatctgag

SEQ ID NO: 2690 - DNA, 357 bp, Homo sapiens
  unsure (5): n=A,T,C or G
  unsure (10): n=A,T,C or G
  unsure (12): n=A,T,C or G
  unsure (44): n=A,T,C or G
  unsure (47): n=A,T,C or G
  unsure (53): n=A,T,C or G
  unsure (69): n=A,T,C or G
  unsure (109): n=A,T,C or G
  unsure (117): n=A,T,C or G
  unsure (147): n=A,T,C or G
  unsure (180): n=A,T,C or G
  unsure (181): n=A,T,C or G
  unsure (212): n=A,T,C or G
  unsure (219): n=A,T,C or G
  unsure (298): n=A,T,C or G
  unsure (302): n=A,T,C or G
  unsure (348): n=A,T,C or G
  unsure (353): n=A,T,C or G
aaagngcctnangggtcccctgaaactaattttctatttctggnatnccctgnattcattatatgaganggtgacatgattagaggaattcttttttagtatgaaaatngtcccttntcttcttcactacttgcctccttgctggcnttgaattaacacagggacaaaatttggttaatnntttatttctaactctcccaacaaacccctgntgcccantatttgtttggtggcctttaaccacctgagggaaaaaatgagcttattcaagctgccaatatttatctatgggctgtancacntacactgaattgtactgtgccagggatattgagatgctctgggggngaatngtat

SEQ ID NO: 2691 - DNA, 320 bp, Homo sapiens
ctggagtagttggttgtgaatattaaaacctagtactattttccctcagtaacatgtaattgctacattttttataagaaggtatggttagaaaaaaatgtgaaagatcacttaaaccaaagccagttacaaggagtaatctctcctgttggtttaccttcacctcagaactacaagaatattacaatacatagtgaatagttgtctgtgacatttctaccagttgtttcagtagcatattggtcttggcatttcttggcactgtggttctgctgtattatttgtgatgtcttattgtttgtgagcttttgttttttttt

SEQ ID NO: 2692 - DNA, 357 bp, Homo sapiens
  unsure (342): n=A,T,C or G
  unsure (345): n=A,T,C or G
  unsure (351): n=A,T,C or G
  unsure (353): n=A,T,C or G
ctgctgccacatggggttggagcctccaacagcatcatccctgagtagacctggtccactgagtcccacaggtcggctctctgcagcctttccctgcaggtcaccaccctctacaggcaatggcaaggacgcgacatcacaggtagacagcccacatcctctcatccttccggtctcctggactggagttgtcccggtgccctggagacccagtcactgccgcctctcccctgcctggactcagcaggggaaagactggaggccctgctcctgccctttggctctgccagcacccccgaccagccctatatctcctcctccaccttcaagatcatccctganaanacctcnancccc

SEQ ID NO: 2693 - DNA, 197 bp, Homo sapiens
ctgtatccactttagcacaaagaaaaacaaggatgctaaatacgtatatactttatcaagcagtgatgtttcacaaagaatttcttaatgcctcttacactgaaggacaccataattcaatttatacaactggttaatagattcaagggaataaatcccaccttaggaaaatagtaccaatcgtgtcatttaagtgg

SEQ ID NO: 2694 - DNA, 223 bp, Homo sapiens
ctgagggtacagctctgagaattggcgctggaaacagttcttggactgtgatagccacaacagatgctgtttctgggatcccaggaccagggctctggaagatgccactgcagtggtagtgcccgctgtctgccttttgtaccacggtgatggagaattccctgttaggcccggggggacccagagctgagccgtctcggtagaaggtcacctgagtcagtgg

SEQ ID NO: 2695 - DNA, 484 bp, Homo sapiens
ctgccaggatgaccaccagcatgccacaggctgggcatattcaacaggacccagtcaccacaaacgtagtctgagaccactaagagaaacccaatatgcatacattgcaggcccaaaccttcctgctttcctgtagtggtgtacttttgacaggaggaaaaccacgtcaggcttagagatagcacacaaatagggaatgacaggaacagggccagaggtgacaaaccactggagatgagtcagaggccacgccgctggactggtctttgtggacttgggagtgcctactgatcaaaaaccccaaaacccacatgccacccgcttccccgcagccaggaacacaattgtttgtgactgtaatagcatttgtatccaataaatagtcttaaccataatggtggacttattttgcctcagagaccaaatgtgctgaattatggatgggagtgagcctcacctgcttccactcattgacacaaaaaat

SEQ ID NO: 2696 - DNA, 196 bp, Homo sapiens
  unsure (25): n=A,T,C or G
  unsure (71): n=A,T,C or G
  unsure (89): n=A,T,C or G
  unsure (98): n=A,T,C or G
  unsure (109): n=A,T,C or G
  unsure (125): n=A,T,C or G
  unsure (138): n=A,T,C or G
  unsure (151): n=A,T,C or G
  unsure (159): n=A,T,C or G
  unsure (189): n=A,T,C or G
  unsure (191): n=A,T,C or G
ctgctggctggctgggcccccgtanctggactggtttgacaaacccatgcctcctaacatttggctaccgnaagcaccaccgcttgctnctgctgtanaattcaagaanaattctacatatctgnggtgcatatttgntttgtcttttganatagctgncacaaacatcttcatgaattgccgaactcnanatctg

SEQ ID NO: 2697 - DNA, 342 bp, Homo sapiens
  unsure (46): n=A,T,C or G
  unsure (329): n=A,T,C or G
  unsure (340): n=A,T,C or G
aaatggatttcccaggcttcttcggcaaccaccttatctggccttncatctgcgtcttttaattgtatatatgggtttttcctaattctattcaaatcctcatgtaatccatctaataggaaagctaaccgttcttgacagtcttgctgctgatatccagagaactgaggtgcaaaacgtcctacctgtgtcttaaaggctcttggggtgacgtagctaaactttccagaccacatttgcttgatcagttcggcataagatttagctatttcacctctcattcctaagggattgtcaaaattcagttcttcttgatacttatcattgangaaatactcanta

SEQ ID NO: 2698 - DNA, 447 bp, Homo sapiens
  unsure (264): n=A,T,C or G
  unsure (392): n=A,T,C or G
  unsure (432): n=A,T,C or G
  unsure (442): n=A,T,C or G
aaattcatgagcatggagtgcctttttacttatttgcgttgtctctattttttttcagcagttttgtagttcttgttgtagagatattttacctccttgatttaatgtattactaggtacatatttttttgtttgtagctattgtaaatagaaccatgttctttttttctcagcttgaatattattggtgcacagaaatgctactcatttgtgtatgttgattttgtatggtgagactttgctgaagtcattatttaggcttanaaatcttttggtgaaatctttttcggtgaagtttcccaggtagagaattatatcaccagtgaagataatttgacttcctctttttctatttgaatacattttattgctttatcttgttaaattgctgnggctacgactttcaggactatgttgaatagaagtgtttanagtggatacncttgt

SEQ ID NO: 2699 - DNA, 356 bp, Homo sapiens
  unsure (226): n=A,T,C or G
aaaaattggcttttttaggattctttttctccccctcccatcttagtcttaccttgagggaacagtcatatgagaaggaactttgtcacatctaagctgtggtgtcttccccatgtgtgtgtacaacactggtgactccaggaaccattttcacctattaccagtgttccctggggactcctcttaatgtttccaaatgggaaggacagttgatttccaacatgangttttttgttttttatccagaaatattttcagcaaaactttccaactgagtggagtctgattaaggatttatttgaaaatggtgggattcattggcccataggtacattggaaaatgtatatctcttcaa

SEQ ID NO: 2700 - DNA, 225 bp, Homo sapiens
ccatacgtcgtcataccttagacaaacggagaacgggatggcaggtccatgctagagcgcttctctggaaaggcagcttggctaacaaagtctgacgccctcagacggtgatggaagctggagacccccaagtgagatgatggcaggttccagccagtttactacagtccccagggaagggcagactgccatgatgagaagactccagattattatcatgcccag

SEQ ID NO: 2701 - DNA, 180 bp, Homo sapiens
ctgtttgatagctctactgagatgaagaaagaaagagaatacctgctcagctccagagacacgtaaagggacagagattgggggacagaaggaagtgcattaattccttccacgacccctgaagagcagcggtgggtctgagcatcctatctccaggaagcaggccagcaggcaagccag

SEQ ID NO: 2702 - DNA, 411 bp, Homo sapiens
  unsure (49): n=A,T,C or G
  unsure (205): n=A,T,C or G
  unsure (232): n=A,T,C or G
  unsure (233): n=A,T,C or G
  unsure (254): n=A,T,C or G
  unsure (256): n=A,T,C or G
  unsure (259): n=A,T,C or G
  unsure (264): n=A,T,C or G
  unsure (372): n=A,T,C or G
  unsure (373): n=A,T,C or G
  unsure (404): n=A,T,C or G
aaagtgcacatgtcacctaacgacaacgactgagatgactggaattganagaagacgcagtctccttccaggaagctcactcgattctggaaatctgggggctctggataggaactccatctttcccccaaaacttaagcacagtttcatgcacgtgatttctttagcttgatggataacatggtgtcccggcgtggaaacagtntggggaattcagtccgagtcaccccannaaaacaaccccttctcatgtnanatnaaccnagacagggccattagatccagcaactagagcactgtcaagggcatgagcaaaagcacaggcagccgccatcccaggtaaatccccaggacaggaacaaatccccctgnngacaacttccaaggggggaagagagatgacnaaggtct

SEQ ID NO: 2703 - DNA, 423 bp, Homo sapiens
  unsure (142): n=A,T,C or G
  unsure (149): n=A,T,C or G
  unsure (181): n=A,T,C or G
  unsure (213): n=A,T,C or G
  unsure (220): n=A,T,C or G
  unsure (272): n=A,T,C or G
  unsure (316): n=A,T,C or G
  unsure (330): n=A,T,C or G
  unsure (352): n=A,T,C or G
  unsure (354): n=A,T,C or G
  unsure (369): n=A,T,C or G
  unsure (388): n=A,T,C or G
  unsure (411): n=A,T,C or G
  unsure (421): n=A,T,C or G
  unsure (422): n=A,T,C or G
gtgatttaacaaatcaattgatgagccttacctaacaactcttgttctcatggtggtatttgtaggccacttatgctgaacagatttctgtaaacacccataaatatatctcaatgtcctgccaaaataacacaatcatctnaacacanaaagcaagtgaaaacactgatctcctagcagncaaaagcttaatttacccaaatataccacagntcaatanaactggccttttacccaaaaaagtattttgccacaggtaatgaggcatttancaaggggtaaggaaaactttatccactaagtttatcatcaattnattcagttaacctnctgacatttactttcagatatngngaacgaaccagaccntgcccgggccggacgctcnaatggtaaagttctgcacatatncatcacactnnc

SEQ ID NO: 2704 - DNA, 280 bp, Homo sapiens
  unsure (176): n=A,T,C or G
  unsure (210): n=A,T,C or G
  unsure (237): n=A,T,C or G
  unsure (243): n=A,T,C or G
  unsure (253): n=A,T,C or G
  unsure (274): n=A,T,C or G
ccagcatcaggagccccgcgttgccggctctggtcatcgcctttctttttgtggcctgaaacgatgtcatcaattcgcagtagcagaactgccgtctccactgctgtcttataagtctgcagcttcacagccaatggctcccatatgcccaagtttccttcatgtccacccaaagnacccgtctcaccatttacaccccaggtctcacangttctccttgggtgtgcttgcccgaanggaggnaagtaatacngatggtgctggccccacattntctgga

SEQ ID NO: 2705 - DNA, 146 bp, Homo sapiens
ctgattgtggtggctgaaagtctgtgtgataagcttctctgccatcccttcttctcctccaatgaaaaagtctgttttgcgtcgaaggaagctgaagaaggtgttcacaagctcctgcacgccgccctcgtgctgctgagccatgg

SEQ ID NO: 2706 - DNA, 336 bp, Homo sapiens
  unsure (154): n=A,T,C or G
  unsure (166): n=A,T,C or G
  unsure (196): n=A,T,C or G
  unsure (204): n=A,T,C or G
  unsure (249): n=A,T,C or G
  unsure (287): n=A,T,C or G
  unsure (316): n=A,T,C or G
  unsure (332): n=A,T,C or G
  unsure (336): n=A,T,C or G
cacatagcgttcccctagggctctttccccggggagaatgtaggatacaggcccagcctcctggcctttctccatcagggactcagttgtctgggcccccccgtcactttatctgctagggtcccagaagtccagggtccccagctctgtcctnctcagggggcgntgaggtctccacagtctcctgatcccctanaacccaanagtccaggtacctcttcccttcctttctcctctagggcccaccanctctgagcagatcatgaagacaggggcccttttgcttnagggtttcatccatgatcgagcaggggcnaatgggggggggaggntccn

SEQ ID NO: 2707 - DNA, 347 bp, Homo sapiens
ccttgctgcgggggcactgctgctctactgctggctctcgagaaaagcagggagaaagcctgcctctgaccccgccaggagcccttcagactcggactcccaagagcccacctatcacaatgtaccagcctgggaagagctgcaaccagtgtacactaatgcaaatcctagaggagaaaatgtggtttactcagaagtacggatcatccaagagaaaaagaaacatgcagtggcctctgaccccaggcatctcaggaacaagggttcccctatcatctactctgaagttaaggtggcgtcaaccccggtttccggatccctgttcttggcttcctcagctcctcaca

SEQ ID NO: 2708 - DNA, 221 bp, Homo sapiens
  unsure (156): n=A,T,C or G
  unsure (214): n=A,T,C or G
ctggtgctcccgagcttgggagagggcagcctgggcattcagagcgggattatctttatccacgtctgagtcgagttcctgacaagccacgcagtagattttccgctgtttgtcttggaggaggatcgtcccgcagtccgcacacgtctcgcccancatgcggtaaccgcgcagcagatagtcgcccatgagccgggagatgcgatcttgccgnatcccgt

SEQ ID NO: 2709 - DNA, 113 bp, Homo sapiens
ccactcgtgctgtacactggctaagaaactttatactcttctccagcttcttaatgatttcctgtgcctggttgtcatcttcacacagaggtgttaaagactctaatagtttt

SEQ ID NO: 2710 - DNA, 200 bp, Homo sapiens
ggcattaatactaacacagaatacttccttgaacattctgcaaaagtaggtgcagagacagaattacttcttcatttccagattaccagtatctataggactattttgagaaaagctgggaggcggagcacctcccctccccaatgtcattttctttgtcaaagcagaagagtcgaaggggtttaggtggaggagggcag

SEQ ID NO: 2711 - DNA, 254 bp, Homo sapiens
cttgaaaccttggaggaacccatgctacaatcaattgctaactaaaagcaattgtacatgtatttaacattttaccagtttctgcttctaaatttaatatagtaattccaaccaaaaaaatagtatctctgtaacattttatctatgtccactgcaagctgcagagtctctgttgccaagatttcttgacacatttaatgttttacctaaaattgtggtcagattgagcaatatcattatcctaaattatgttt

SEQ ID NO: 2712 - DNA, 243 bp, Homo sapiens
  unsure (14): n=A,T,C or G
  unsure (15): n=A,T,C or G
  unsure (173): n=A,T,C or G
  unsure (227): n=A,T,C or G
  unsure (237): n=A,T,C or G
ctgtagcttctgtnngacttccactgctcaggcgtcaggctcagatagctgctggccgcgtacttgttgttgctttgtttggagggtgtggtggtctccactcccgccttgacggggctgctatctgccttccaggccactgtcacggctcccgggtagaagtcacttatganacacaccagtgtggccttgttggcttgaagctcctcacaggagggcgggaacanagtgaccgangggggc

SEQ ID NO: 2713 - DNA, 344 bp, Homo sapiens
ggtgcaaagcacaagaagtcagtctaaactgcagtgaaaacacaaagattttagaaagggtttcctgaagatagatagatagatagatagttaaaccttggaaggttaccttctcttcccagttctactgaggaacatcagaaactcagcccataagccctacccagcatggtaggtctttctcatagatgagaaactcctaggttttctctccagatatgagttgagtagttagttgagtaaaaggagggggcaaaggttctgaaggcccagagagctgcccacctcacaagcccctgggctccagaaccagccagttctcagtgaccatctgcacatcctgg

SEQ ID NO: 2714 - DNA, 368 bp, Homo sapiens
aaaccattaaagtaaaatccataattttctacagagtacaacacaagttcacacaaaaaagacattttcttttgcaaatcaaaacaggaaagaaaggaaaagctcaaacaagataaaggaaaagcatttctacggctgaatcacgactgagttgattgaatcccgttgttgctgcagaacagactgtgcgtttggtcatagtggcaatttttttttctcttcacattgtgaaatcactttacattgttttctagtagaaaaggcaaaaaactgtacaaaacccctagtgttaaatacaacgtttgtaccaataaaaaactcacacaggtttgtctccaaaatgtaaagtttcttttttttttcttttt

SEQ ID NO: 2715 - DNA, 356 bp, Homo sapiens
  unsure (13): n=A,T,C or G
atgagggtccccnctcagctcctggggctcctgctgctctggctcccaggtgccaaatgtgacatccagatgacccaatctccttccaccctgtctgcatctgtcggagatacagttacaataagttgtcgggcctctcagaatatagatcggtggttggcctggcatcaacagaaaccaggcaaagcccctaatgtcctaatttatgcgacttccagtttagaagaaggggtctcattaagatttactggcagtggatctgggacacaattcaatttaaccatcaccagtctgcagcctgacgattcagcaacttattattgtcaacattattctgcatctcttcgcagttttgg

SEQ ID NO: 2716 - DNA, 396 bp, Homo sapiens
  unsure (16): n=A,T,C or G
  unsure (363): n=A,T,C or G
ccaacaatttttttanaagtagcatcccaagcagcgtgcctaaacattacattgcatatggaaataaaagaatcaaacgtctaatgccttattatttctgatttcctttttcattttaagtggtgtggagattccagcactcccaggacagtggagtcagcagtaagccctgggacaggtggcaagggtgggtcccttgacctttgcacgcctcctcaggaaccccctttcccgggtgagcccctctctgaagagactgtccttgggcctcctctggaagcagcacccccagaggacagggctcctcctgcttgcctcagggctgcctgacttgaatggcgttggacctcggggattactggnagataatatgctctggtctcgcctggcggtgag

SEQ ID NO: 2717 - DNA, 352 bp, Homo sapiens
  unsure (158): n=A,T,C or G
  unsure (169): n=A,T,C or G
  unsure (342): n=A,T,C or G
  unsure (347): n=A,T,C or G
  unsure (352): n=A,T,C or G
ccttaggacaatgggggctgtggcatgcgtcaggttacctgccttgatatgggatcgtgacaggcccctccctatgtgcaggagacaagcagcccaaggaacaggagaaaaacccagtgttggtgtccccagagtttgtggatgaagctctgtgcgcntgcgaaggagnaccttagcaacttggcccacatggacatcgacaaggacctggaggccccgctgtacctcacccccgagggctggtccctcttcctccagcgctactaccaagtggtccacgaaggggcagaactcaggcacctcgacactcaggtccagcgctgtgaggacatcctgcagcanacctnggccn

SEQ ID NO: 2718 - DNA, 484 bp, Homo sapiens
  unsure (335): n=A,T,C or G
  unsure (466): n=A,T,C or G
ctgagtaaatggattactgcagtttagacctggtgaatcaagaaggtggcattcagtagtgagacttttattatcaaatagttctgactgagaaattttagtttccccttcttctaagatgctattttgtgaagctgtatttttttcagggctactcatcaaaacatcctgtgatgtaattgaagaattcagttccattccttccacaacatctgaaattccttcttttttgttagtattaatatcatctgctactccaccagcaagaagaggcaaactcattctctcactggataaacaatccaccttcaagtctgtcttatttacaacatggntttcttcaattaaatctggtaatccaggacactgagcatcttctatgctgctcctgctttcaggaatactcaaaaacaaagtcttcttcacatgttcacttttcgtattctgaggaccggcattttctggnggatgtagtttgttgtgg

SEQ ID NO: 2719 - DNA, 244 bp, Homo sapiens
  unsure (1): n=A,T,C or G
  unsure (15): n=A,T,C or G
  unsure (17): n=A,T,C or G
  unsure (53): n=A,T,C or G
  unsure (54): n=A,T,C or G
nctgtgcgtgctgtncngaaagcctcccgccctccctgcagctccccgccctnngtggcccagggctttgttgaagtggaactccccacttccaacctggtatggctccttctgcgaagggaagctgatcccagcctcctgagctgaatccttcaaaggcacagcaggcagaatgagggccacaggcaggagtggtgtgggcacactgcttaggagtcaacatcttcatcattgggctttcttt

SEQ ID NO: 2720 - DNA, 287 bp, Homo sapiens
  unsure (11): n=A,T,C or G
  unsure (13): n=A,T,C or G
ccatgtccccntntttgaagccagagaatcgctcagatatccctgagggccggtcgttatcaaaagagatgattaggacaggggcctggcctggcttctggtaataccagtgtacattgttactcccaatattgtttcccccacaggtaatcttggccgtctttcctggggccactgacactgagggtgtctgagtcaacacataggaggtcacagagtctgtgcagtgagagaggaggccgaggaggagaacggtccaggccatggctgaggcaccaccagtgctg

SEQ ID NO: 2721 - DNA, 523 bp, Homo sapiens
  unsure (15): n=A,T,C or G
  unsure (502): n=A,T,C or G
ctgagtttccttccnagactcctcctacccccaggtgtgcccccttagcctccggaggcgggggctgggcctgtatctcagaagggaggggcacagctacacactcaccaaaggcccccctgcacattgtatctctgatcttgggctgtctgcactgtcacaggtgcacacactcgctcatgctcacactgcccctgctgagatcttccctgggcctctgccctggcctgcttcccagcacacacttctttggcctaagggcttctctctcaggacctctaatttgaccacaaccaacctgggcttcagccacatcagtgggcactggagctggggtgcacatggggcctgctcaccatgcccacacatctccagccagccagggccctgcccagcttcaatttacagacctgactctcctcaccttcccccctgctgtccagagctgaacatagacttgcacttggatgtcacctggagtgtcacatgggagtgttatggnagcatcataccaaggacctgc

SEQ ID NO: 2722 - DNA, 284 bp, Homo sapiens
ctgggcagactgtcgggaatccataggtgagctggggacccatgtacccatggctgctggggctggggcagggaaggtggcggtgaggagaaggaagggccagcctggaagaccacgcccactccatctcgggagcaagtcttggaagggcagcagttaagggagagaccttcgtgctgagtgtccaccctggggcttccaacaagggcaggaagtgctctcactactcctaaaaagtgctgggaagcaaaatggatatatcagggagaaaagctgaaaagcac

SEQ ID NO: 2723 - DNA, 423 bp, Homo sapiens
ctggtggaggaggaagaacctatgaatctctaaggctctggaaccatctgcccgcccaccatgcccttgggacctggttctcttctaacccctggcaatagcccccattcctgggtctttagagatcctgtgggcaagtagttggaaccagagaacagcctgcctgctttgacagttatcccagggagcgtgagaaaatccctgggtctagaatgggaactggagaggaccctgagaggagacgggctgggcggcgacccccacagggctctcgagaacagattctcccctccagtatgggccctggctgtggcccccattcctcaggactgcacagaggaggactggctccggctccgtcgggctcacccttaaccactattcctggctctgcaaaccccagactttgcacacagccccagg

SEQ ID NO: 2724 - DNA, 301 bp, Homo sapiens
  unsure (14): n=A,T,C or G
aaaggaagtctttntgaaggaatgaaagttgagcaggaatcttcgtctgatgataaccttgaagactttgatgtagaggaagaagatgaagaagccctaatagaacagagaagaatccaaaggcaggcaattgttcagaaatataaataccttgctgaagatagcaacatgtctgtgccatctgaaccaagcagcccccagagcagtacgagaacacgatcaccatctccagatgacattctggagcgagtagctgctgatgttaaagagtatgaacgggaaaatgttgatacatttgagg

SEQ ID NO: 2725 - DNA, 149 bp, Homo sapiens
cgaacttccgcttggtgaacgtcacctgccgattcctttggtccaggatgcgggagatctggatttttttcctccccatcgtcccaggctgagtggaatgatctttgtctgctcggcctgggccctgggacgctgggcgcacggacccg

SEQ ID NO: 2726 - DNA, 591 bp, Homo sapiens
ctgatggggtggtgccatgaagaaaaagagacgcttcaacagtattgataggttgatgagttgataacattctccagggcatgacttgatcagatgagccactatggtgacatggtgtgcacacagttcagcagtcccatatcgagcaaggaagcaccatgcatccatagctaacaaagaggtgatcatattagcactaagtacagcattcagcagagcagcatccagttcagcaaacagtgagggatgaaaggaagtaataaatgtacacagatgaacacaaacatgctgatacaaggtgacagccacctcagctttccccttactctttaatccctgtaaatgaacaggtagagagagttcaccagaacactgctcaaaactgtagaaaacggctttgagtagagatatcctggttgtccgtttctgagacctggctgtctgtgcaccacagggtttgcacttccttagctgagatggcagcttatccatgacaacaaccagaagaagacattgtggaaaccgcagttcacatggcaggtctaatttactgtccaaaaccacctgcatgaaaggctgaaatgtgagcag

SEQ ID NO: 2727 - DNA, 420 bp, Homo sapiens
ctgagaaccatgggttaagacccaaatagaaagtttaataaaatgttaaaataaacacctagccaaaccctgcattcagtattccagcaaagctatggtcatgctatcatcaatcctgcctgtccaacgtctcatgacatttctccctcttctgttaataacacaaacagattcaatacaaactgccaaaataccatttttagccacgagggctgagccctgtgctctttgccaatagcagcaataaagctgggcagaagctaagcccaggactgcatggaatattggctatctgtggtagtagcacaaaataagatgtataactgaatagtctatcattttgacaaatctggacttcaaaaaggatgctgggttttttttctcttaaaaagatttattatcaaaaagtttgctcccttt

SEQ ID NO: 2728 - DNA, 298 bp, Homo sapiens
  unsure (15): n=A,T,C or G
ccgatgagttacagnctgttagtaacatgaggggacattttggtgagaaatgggacttaactccttccagtgtccttagaacattttaattcatcccaactgtctttttttccctaccattcagtgattactgtcaaggctgcttagaatccaaacttggatttttgactctggcaaagcttttagaaatactgcaagaaaatgatgtgtacccaaacgtgagcataggaggcttctgttgacgtactccaacagaagaactgtgtttcaagttcaatcccacctgttttgtggtcag

SEQ ID NO: 2729 - DNA, 476 bp, Homo sapiens
ccatagctgtcacttcctgttgcatcgtgtaagcaggtacataatgtctgatggtcctcctttctgtgatcttaagattggttggtgggtccaggggtggtcagcctaatccctccattatgcagtccctgggtgccttattcttgatctgtaaaatgtgactagattaagcacaggggtctctactccacagggatcttatgtgaatgaaatggtataacagattagaaagcactttgttttaaggagcccatagcaatcagaccaattctggacttctgctatagagtcagatctgaagggcacaccttttcctctaaggtccacagctttttttcactgttgactttctaaccatcatcattttgggggtttggcttttagctgcagtgttgtggtataaatggcacgagtgattggaccaagtggcccaccagcatcttgcccctcagatcgaaaagtggaggtaattttgt

SEQ ID NO: 2730 - DNA, 196 bp, Homo sapiens
  unsure (18): n=A,T,C or G
  unsure (28): n=A,T,C or G
  unsure (36): n=A,T,C or G
  unsure (134): n=A,T,C or G
ggtccaggctgtgttggnctatatcctncatactgntgaccttgtccctgtgggtagttaggatactgaggacctggaccaccctgtgaaggaccgtagccctgctgctgtcctgggtaaccttgctgccctgngtactgctgctgctggggtggatatcccatgttgtggaggtggtccctggtatgcatcttgc

SEQ ID NO: 2731 - DNA, 284 bp, Homo sapiens
ctgtggtagagtgctgatcttagcatgcttcgatgtggcatacttgttcttgacagtcatgtgctttgtaagtccttgatttaccatgactacattcttagccaggtgctgcataactggaagaagagattcttcagtatatgacaggtaatgttgtagagttggtgtccattcaccattatccagaattttcagtgctaagcaaaaagctcctgctgcaatttgagaaggaggaaagtgcaccatgtcatagtccaacatagttagttccatcaggtatttgg

SEQ ID NO: 2732 - DNA, 115 bp, Homo sapiens
aaaaacatcaaacatactcaaaaacaggcaagctggaaagataaacaacatgacaggattcccagtttaagtcaaattcctcaataaaacaataaatgcccacgtgtttaactgg

SEQ ID NO: 2733 - DNA, 144 bp, Homo sapiens
  unsure (12): n=A,T,C or G
gccgccgtggantccaaaatttcgggagctgtgaccctttcctcatgtaaaacgagtagtcttggacggtgagcggacagttgccttcaacttttgggaagagctgccggttcggtggaaaagctgtggctgggaatcaggagg

SEQ ID NO: 2734 - DNA, 202 bp, Homo sapiens
  unsure (17): n=A,T,C or G
  unsure (19): n=A,T,C or G
ctcaactgtggttgatntntctgtgcccggaaagtttggcatcattcgtccaggctgtgccctggaaagtactacagccatcctccaacagaagtacggactgctcccctcacatgcgtcctacctgtgaaactctgggaagcaggaaggcccaagacctggtgctggatactatgtgtctgtccactgacgactgtcaagg

SEQ ID NO: 2735 - DNA, 356 bp, Homo sapiens
ccactcttcaggaggatgtcttcactggtgggccccacgcaaagcttcttcatgagggaatctaagactttgggggctgtccagattatgaatgggctcttccacattgccctggagggtcttctgatgatcccagcagggatctatgcacccatctgtgtgactgtgtggtaccctctctggggaggcattatgtatattatttccggatcactcctggcagcaacggagaaaaactccaggaagtgtttggtcaaaggaaaaatgataatgaattcattgagcctctttgctgccatttctggaatgattctttcaatcatggacatacttaatattaaaatttcccatttttt

SEQ ID NO: 2736 - DNA, 332 bp, Homo sapiens
aaagaactaatttgtaaattatgacacaaaattttattaacaaggaaatatccattaattgactactacagtaaaaactttataatgcttgtatcacgaagaaagaccttccttttccttatatattaattgaactacataggcttgctgtacattttgttattcatgttataagaattctagattccattgcttttgaaatatgtttctttttaggaactaaaagtcaacttatagtttgatttctgttttatttgtactgtgtttctgattttgtgggtttctaaataaaaagatcaaacccaccactttcaatatactgttttctattt

SEQ ID NO: 2737 - DNA, 354 bp, Homo sapiens
ctggctggcaagatcacgggcatgctgctggagattgacaactcagagctgttgctcatgctggagtctccaggatccctccatgccaagatagacgaggcagtggccgtgctgcaggcacaccaggctatggagcagccgaaggcgtacatgcactgaaaccagaaaaggaaatcctcgcttccatggctgccaaaaggacagtgtttctggctctcagccctaaggccctgcaaactctaacttatttcccaattagtctgtatctatacttgggctctgtatgtgaatgaaggttggtcacccatccagcctattaccttttgctttgtgtattaaaagtgctgcaaaatc

SEQ ID NO: 2738 - DNA, 119 bp, Homo sapiens
  unsure (16): n=A,T,C or G
ctgtatgctctggganccctcaaccaccttggggagctcaccacgtctggtcgaaagatggcagagctgccggtggaccccatgctgtccaaaatgatcttagcctctgagaagtacag

SEQ ID NO: 2739 - DNA, 438 bp, Homo sapiens
  unsure (424): n=A,T,C or G
cttctacaggcccaagggtcgagaggaggagagtgatcaaatccgggagaagttcgctgttcctgagagcgatcatttgacctacctgaatgtttacctgcagtggaagaacaataattactccaccatctggtgtaacgatcatttcatccatgctaaggccatgcggaaggtccgggaggtgcgagctcaactcaaggacatcatggtgcagcagcggatgagcctggcctcgtgtggcactgactgggacatcgtcaggaagtgcatctgtgctgcctatttccaccaagcagccaagctcaagggaatcggggagtacgtgaacatccgcacagggatgccctgtcacttgcaccccaccagctccctttttggaatgggctacaccccagattacatagtgtatcacgagttggtcatnaccaccaaggagta

SEQ ID NO: 2740 - DNA, 332 bp, Homo sapiens
aaaggtccactttcatgaattgttttaagtcctcactttattttcttcaataattaaagatcatatgcatatttattggtaaaatacagtttgggtagtcaataaactcaccctggagttcccaaatgacattaaattcaaatctattcaggaaagaatctgggaatacaaccttcccatattcagaggttcaactatgctagattaaggtctactagaagcatctctagtaacccaagtaaaatgctatcacaaacaccaatttctaataagtttattacaagaacataaattgatctgtgcatatgatctttaatttatatcccagattt

SEQ ID NO: 2741 - DNA, 492 bp, Homo sapiens
ccacaagatatgttctagagacgtccatgagtcctcttgctgtgtgggagcggcatccacagacttctggaataattggcctgtgaggaagctcatcaaagctgcaaacagtacaatgaatgcaatagagagccagagggccttattagcctttctgatggaggacttgagatttgttgcccaggaagctattgtgtcataaactgaagagacatcccactttgatggattatttttcttttcagaaagacttggcttccttgtcctttctactgtttcttctccagatggctctgagtcatctttagtttttagttcacatttttcttcttcagcatctgcccaggaataggtgctaataaatcgaggtaatgagggacggtgttcactctgctttgaccccaaaatacgccaactgcttgaccttctactgaatcgatcattattttccatcccagccaccattcctgcatttccaatatttctgggtaa

SEQ ID NO: 2742 - DNA, 495 bp, Homo sapiens
  unsure (15): n=A,T,C or G
  unsure (465): n=A,T,C or G
ctgcgtttctgtggnctctaaccgaagggcaatgcagccctcgccataggattcgtcgctgtcagaggacttgatgctgatgaggatgtgctggtctagcaggtactcagggtcagagataatgggcttcagctttggaagagtctcaccaaacttcaccaccagctccccctcacttccttcttcattttctccttcctgactcttgacaaaactctccaagcagctcgagtggaactccaggtagaatttggtctgggacttggtcttcaatgtggcatagcacctgagaaactcaatctgtccttggctgtcaacagtcccgggaccgttcttggagacaaactgggaagtgactcctgcctcaaatgtggcaaagacagggctgtggtcactcgtcatgatgtcgctggtactgccataagactgacacaccacgtgcaccaggggataagacttccagangactcggtcacaccaggaaggcaagttgta

SEQ ID NO: 2743 - DNA, 275 bp, Homo sapiens
  unsure (14): n=A,T,C or G
  unsure (28): n=A,T,C or G
  unsure (236): n=A,T,C or G
ctggagggaagaantcttttgttgcctntgagtccctgcctccccttctgatggggtcctggctgtgaggctgtcaagctgcttctgcaacttgtaccttcgggcggctaacagaggtagctggatctgcgggtccaccaggccctgcagctccatgtagacttgagccgtgtcactgagtggagcctgggcccagccggagggagctgctgcgcctgggggtaacaggcccacanccccacagtagcccagggtgcccaggggctccaagaagg

SEQ ID NO: 2744 - DNA, 257 bp, Homo sapiens
  unsure (158): n=A,T,C or G
ctttcatactcacggcagcaagatggaaacgtgctgtgaatctgctccatgacctccgtgagatccgtgctggtgtcgtgcggtggggccagcaggtcctctcccgctgcctggtggaactgtgggccggaggcatctggatcaagcgagtagctcantgcagaatgctgaggagaagcccatggggaaacaccattgattcgggaatcagattcaggctgctccatcagacctgcccgggcgagcgctcggagccc

SEQ ID NO: 2745 - DNA, 288 bp, Homo sapiens
ctgctgggaggctctggccccactagtccctcatggccctactgaactggctgggaggctgctggaatggcccttggtccacagctctccacaggcaagaggtcaactgctgcttgaaagaggtagacaaaagttaggttgatggcgaaatgtctctgggttacccagtcttctggagcagcaagctgagctttaatgggctaagcattagggtgttacagaaaatttcaaatgcagccatctcccttggggcagatctacctagttcatgacagtatgtgcggctgg

SEQ ID NO: 2746 - DNA, 175 bp, Homo sapiens
  unsure (14): n=A,T,C or G
aaaaattgattcanaaaaacttgacacctgtcatgtaggccacaaaatagtagcgaactatactaagtggtatagcccactgtggagtgtggtcttttactcttccaaatagcccaagttggcaaaggttacttaaaaacctgccccccaaaaagctaacttttggtagattttt

SEQ ID NO: 2747 - DNA, 448 bp, Homo sapiens
aaataaaaagaaaacctctaaattggtaattgaattacctccctgtagctttatagtttgtgacatttcttgaccttgctagttctttcattagatctgcgcaagatctagtcatctggttaaggattttaagcagatgcaactataaacccaagaaactgtattactattactgttggtcatactaaacctgtctatttcctgaagtatatgacccacaaggatgtggaataactaggagaaactgtttttgtacactgtacatccttagtatttttacacgtatatgatagggatgaacatgattttccttcgtacagacagcttaaataaagcactatgtcaatctgctacttctctgtttattgttgttggatgtggttctataatccccccaaattaaatcttctttaatgaaaacatgatttttaatagccccagacctcgc

SEQ ID NO: 2748 - DNA, 145 bp, Homo sapiens
  unsure (88): n=A,T,C or G
  unsure (107): n=A,T,C or G
  unsure (126): n=A,T,C or G
cagtatgagggggagaagggtgggttctcatggatcgaagtgaccttcaagaaccccctggtatgggttcacgcatcccctgaacacntggtggtgactcggaaccnaagaagctctgcgtacaanttggaaggagaccctattc

SEQ ID NO: 2749 - DNA, 274 bp, Homo sapiens
ccagtgacacttttgcctgaatttttgtcatacatgtggaaagaatgaaatatgcagccatgtggaggataaacaagacaaagtctaatttcattaaacattagagcatctcagaggagacccccagtgagtacctcctctctgtaggcaagtagactggttgagtgttcagctctaagcagagagggtagctcctccctacagccggtcgtcctgtggtcttcccatttctcaggagagagggtagcttctccctgcagctagtcgtcctgtc

SEQ ID NO: 2750 - DNA, 405 bp, Homo sapiens
  unsure (342): n=A,T,C or G
  unsure (360): n=A,T,C or G
  unsure (364): n=A,T,C or G
  unsure (372): n=A,T,C or G
taatattaagtatgtccatgattgaaagaatcattccagaaatggcagcaaagaggctcaatgaattcattatcatttttcctttgaccaaacacttcctggagtttttctccgttgctgccaggagtgatccggaaataatatacataatgcctccccagagagggtaccacacagtcacacagatgggtgcatagatccctgctgggatcatcagaagaccccccagggcaatgtggaagagcccattcataatctggacagcccccaaagtcttagattccctcatgaagaagctttgcgtggggcccaccagtgaagacatcctcctgaagagtggcnttggaccacattgcattncaanagggcctntcattggctctgccgggaaagtcccattttact

SEQ ID NO: 2751 - DNA, 448 bp, Homo sapiens
ttttgtgtaccttgatgggcatgtttctagagtcagaactatatcacactgtgtcagggggagaattgcaaaaaaagaaaaaaaaccctacacaatattcacacaggggcagcttctttgacacttgagtgtctccctgagctaaaggaagcctcacttcaaaaacacctgagtcctgtcacaaaatcagctatacccagggaacacccagcactttcacggttttgtctgattctttatttacatatgcataattctatagtgttaatctgcatgatcacagtaagcacactgaaaacagcacctcagagtgagggctagatttggggtcgggtgtccagcctgtaccctcctgtcaccttctgtggtgcccccgtgccctgctcctcagcttgtcactagggagtcagcctgcggctccgctcctgacccatggagcgtcaatcag

SEQ ID NO: 2752 - DNA, 331 bp, Homo sapiens
  unsure (14): n=A,T,C or G
ccagtgatcattgnaaatgttagccatacagacttttaatgcaagtagtgctagtctcaacagacttgagagcttcccactccaactgccccgttgggatgccaattgtagactctttctgtaacacatctctgcagctctcatcattccttgggattgatacacatgtgccagccactgccaagctggaacagaggttgagttggacatgactgttttttgtagttcttcaagtacagcgtctgggagtggcttttgtgactccaggagtggtttacactgaacttgtctcaaaagtaagataacggctggctgatcagggttacttttt

SEQ ID NO: 2753 - DNA, 233 bp, Homo sapiens
  unsure (1): n=A,T,C or G
ngagctctaggagggaccacattggaaattccatccacccactcatccacccatctgatcattcaatcatctgtttatccaatcattcatccattcatccatccacccacccattttctgggctccaattttctgctaggccctggaaacaaaacacacaaaacccccaaacaaacaaaaaaacaaaagagtaaaagcctcatagaaaaaaagctgtttagtgaccagcctgg

SEQ ID NO: 2754 - DNA, 434 bp, Homo sapiens
  unsure (412): n=A,T,C or G
ctgcccctcctgggccgcttggtgagaggtttggtttgatacctctgcctccctcctgccagcatggattctgggtggacacagcctcgtggaaggtccagtaccaccaagagctgctcatccactcccaccccacactgtatcaaatgtatcacattttctcatgttgaacactttagccttaattgaaaatgagcaacaaagctggacaattgctagttgtatataaaatttaatctcaccgaatgtacagttttcaaatttcacgtgtatattaaggaactgatgcatctgagcattctgaaagaaagaaaaagaagctactttagctgccaccccattctagaaaagtctcttattttcaagctgttctaaatagcttcgtctcagtttccccaaaaggggtacccangcccctcctctgtgtgccccag

SEQ ID NO: 2755 - DNA, 293 bp, Homo sapiens
  unsure (36): n=A,T,C or G
  unsure (288): n=A,T,C or G
actccctcagtgactccaaatcccgctttcccttgnactgatccacctggccgagacacgggcacgcggctgagtgagtccactgaggtgttctgaatcacttaagccttcctgcaacccctgcttgcccgggtcagagctcccagatgtcttagcggtggtgcaaagtctgcatgttcatatttagacgggaatgtagagaggataactgaatgcctcggctttggtgagagaactgtacaggcccctcttccctccacggggttacacatcacagaagtctggggnagagg

SEQ ID NO: 2756 - DNA, 344 bp, Homo sapiens
gggaagtcagttcgttctctcctctcctctcttcttgtttgaacatggtgcggactaaagcagacagtgttccaggcacttacagaaaagtggtggctgctcgagcccccagaaaggtgcttggttcttccacctctgccactaattcgacatcagtttcatcgaggaaagagcatgtcctttgcaacctgatcacacaaatgatgaaaaagaatagaactttctcattcatctttgaataacgtctccttgtttaccctggtattctagaatgtaaatttacataaatgtgtttgttccaattagctttgttgaacaggcatttaattaaaaaatttaggttt

SEQ ID NO: 2757 - DNA, 105 bp, Homo sapiens
  unsure (13): n=A,T,C or G
  unsure (50): n=A,T,C or G
  unsure (82): n=A,T,C or G
  unsure (85): n=A,T,C or G
  unsure (100): n=A,T,C or G
ctggaactgcacntagtcccagctctcctcggccgcggtctcctcggggntggtgccgtacttttggatggttttctctacnacntcccgcaagcttccntccag

SEQ ID NO: 2758 - DNA, 492 bp, Homo sapiens
  unsure (413): n=A,T,C or G
cctagcattttgttagggaccatgggagatgtgaaggaagttatctcacacatgatatgtcttcaaggagctaaaaatgccagtggataaaagcaaaacacatggaaaaacaaagtacaaataataatccgtgtatattgtcaaaaggaacattttatcaaaaggtaggattgtagctaaggttggcttgccttcttccctcttttattcaacaaacatttaatgaaggcccactatgtgccaagcacttggtacatgatggtgaataaaacaaacaaggtttctgccctcatttacagcctggtaggggagacagaaatgaacaagtaaaagtagcatatatataaactgcaataaatgcaatgaggggaaaagacaagatgtggtgacagacacagaagtagactgctcanggactgaagggcccgggaattgtcaagacttgaggaagaaggacaccacctgagtcaagagtggtgggggtggagagct

SEQ ID NO: 2759 - DNA, 209 bp, Homo sapiens
  unsure (1): n=A,T,C or G
natcggtggttggcctggcatcaacagaaaccaggcaaagcccctaatgtcctaatttatgcgacttccagtttagaagaaggggtctcattaagatttactggcagtggatctgggacacaattcaatttaaccatcaccagtctgcagcctgacgattcagcaacttattattgtcaacattattctgcatctcttcgcagttttgg

SEQ ID NO: 2760 - DNA, 231 bp, Homo sapiens
  unsure (39): n=A,T,C or G
  unsure (57): n=A,T,C or G
  unsure (58): n=A,T,C or G
  unsure (61): n=A,T,C or G
  unsure (96): n=A,T,C or G
  unsure (186): n=A,T,C or G
  unsure (189): n=A,T,C or G
  unsure (213): n=A,T,C or G
cattatcatttttcctttgaccaaacacttcctggagtntttctccgttgctgccannagngatccggaaataatatacatactgcctccccaganagggtaccacacatgcacacagatgggtgcatagatccctgctgggatcatcaagaagaccccccagggcaatgtggaagagcccattcntantctggacagcccccaaagccttanattccctcatgaagaagc

SEQ ID NO: 2761 - DNA, 408 bp, Homo sapiens
  unsure (12): n=A,T,C or G
ctgtctcatatntccagcaccgggcaacgttacgaatggtgtaaccaccgcctcccagcatcagcataggcaggttaaagctcttgacaaattccacacacttggcgtgtcctttgatagttagattgaagcaacctaaccgatccccagatagggagtctgagccacactgtaagaccaccgcactaggctggaacatctccattactttggacatgacctaaaatgatacatcctggtcaccaccaacctcaagaaagcaatacgaggtttggagtggaaaggctgggtgcaacactttcccacccactcctacctttccactctccctcatgctatgtgggagagaaaagggagtgctaggctggagcccttgcttgcccacttgggatttcaattttccaattt

SEQ ID NO: 2762 - DNA, 277 bp, Homo sapiens
  unsure (248): n=A,T,C or G
ggtgcctcagccatggcctggaccgttctcctcctcggcctcctctctcactgcacagactctgtgacctcctatgtgttgactcagacaccctcagtgtcagtggccccaggaaagacggccaagattacctgtgggggaaacaatattgggagtaacaatgtacactggtattaccagaagccaggccaggcccctgtcctaatcatctcttttgataacgaccggccctcagggatatctgaacnattctctggcttcaattctggggacatgg

SEQ ID NO: 2763 - DNA, 370 bp, Homo sapiens
  unsure (330): n=A,T,C or G
  unsure (346): n=A,T,C or G
caagtcacagtttccagcgtgctgctcagccctccgagtgtgtgtgctcatccttttcatagaagtcccatcggccatggagagggttgggctgcagagctgtgattgccagaggcccttccttgagaactgtggggaaggaggccctgggggtttcttctgtaggcagagctcaggccccagtcacctctgccaccctcagcctggcactgttgtgccagagcctctgctgcctctctcttcctacccatctgcagaccagcagaatattctccccctctcatcaccaaccaggagtttggtgtggtttctggacaccggccagagcantcactgcggggctggntttgctgggcttccctgtcaaagc

SEQ ID NO: 2764 - DNA, 198 bp, Homo sapiens
  unsure (24): n=A,T,C or G
  unsure (34): n=A,T,C or G
  unsure (104): n=A,T,C or G
  unsure (146): n=A,T,C or G
  unsure (152): n=A,T,C or G
  unsure (154): n=A,T,C or G
  unsure (161): n=A,T,C or G
  unsure (170): n=A,T,C or G
  unsure (184): n=A,T,C or G
  unsure (186): n=A,T,C or G
  unsure (191): n=A,T,C or G
gatgaagccttcctggcccgtggncagggactgngccttccaccactcgccgctctgctccaggatgcggagctgttcccccttctcaaagcccagatctccgncgtgagagggctcatagctgtgcagagcgataaccaggttgncttgcngnggggaanccggcggantggagccttcgaangnaaccnggggggg

SEQ ID NO: 2765 - DNA, 411 bp, Homo sapiens
acattatggagcagcgtccctgaactgcaggaggagaacctgcaggactcctgggtaggattgcacttttgcaataatggaaatgggagcaatgtttcagcctaagtttctatttataatggtgacaaaaaaatactgctggattcccattatgggtctcgatagagtgccaaagagttctcattgtgacagcccaactcactcagaaacaccatgagacacttttgggtgtcccttctgaagacagacactgaaagcattgaagagaaaaacagctctcagtctgaataaaattgtattacgaggttaaaagcatctgaaagagaaattcagactacatataatattagccaagtcgaccagaaaatactcccctgagaaagtttctctctaaatacccaaaatgcacag

SEQ ID NO: 2766 - DNA, 458 bp, Homo sapiens
tatgttgggagccatcaatcaggaaagccgggttagtaaagcagttgaagtgatgattcagcacgtagaaaacttgaagaggatgtatgccaaagagcacgctgaattagaagaactgaaacaggttcttctgcagaatgaaaggtctttcaatcctcttgaagatgatgatgactgccaaattaaaaaacgttcagcttctctaaactccaagccatcttctctacgaagagtgactattgcctctttacccagaaatattggaaatgcaggaatggtggctgggatggaaaataatgatcgattcagtagaaggtcaagcagttggcgtattttggggtcaaagcagagtgaacaccgtccctcattacctcgatttattagcacctattcctgggcagatgctgaagaagaaaaatgtgaactaaaaactaaagatgactcagagccatctggag

SEQ ID NO: 2767 - DNA, 372 bp, Homo sapiens
  unsure (1): n=A,T,C or G
ntcacgtggaccttggtcaatgttggaggtagattcagacatcaaaggctctccagttttagtggatacctgaggatcttgagactgtacattattctgaaatgatgaaggtctaggcaacagcatgtcttcagtaagaccagaataatcctcttcaataaagagtccaggaatagaagggaaaatccagtatcgtctatacatgcggtcgcgacccaagggaaagatattggtacaggctatggcactttggattttttctaagagctctttctcttttcgttggtgttcctgttttaatgcttcttcctcatcagcagtaagaggctctcttgttacacagttgatctgttcttgccttgtaaattcttt

SEQ ID NO: 2768 - DNA, 375 bp, Homo sapiens
  unsure (1): n=A,T,C or G
  unsure (342): n=A,T,C or G
nactggcagaagaggctgggaagagctgtggagccggctctgtgatgcaggcccccgaggagccgccgccagaccaggtcttccggatgtttccagatatttgtgcctcacaccagagatcatttttcagagaaaaccaacagatcaccgtctaagtgcgtcgcttgggcgccccaccccgtctgcgtcctgcatccatctccctgttacagtggcccgcatcatgattaaagaatgtggatccctctgtctggggtgggatgccttactttgcacttaatttaataagggcattctcggaggagtagacgtttaatacgaagtggcggcatagccctgccnagatgtcggtgatggcctggatgctgtaaccac

SEQ ID NO: 2769 - DNA, 290 bp, Homo sapiens
ccatgtccccttaattgaagccagagaatcgctcagatatccctgagggccggtcgttatcaaaagagatgattaggacaggggcctggcctggcttctggtaataccagtgtacattgttactcccaatattgtttcccccacaggtaatcttggccgtctttcctggggccactgacactgagggtgtctgagtcaacacataggaggtcacagagtctgtgcagtgagagaggaggccgaggaggagaacggtccaggccatggctgaggcaccaccagtgctgctt

SEQ ID NO: 2770 - DNA, 504 bp, Homo sapiens
aaaagcccagattctactcataaaaatatgaatggagaaaagcaagtagtgtctgtgcaacacagtgcagtatattgtacagaatatttttaaggccatggcagtctataaattaaaactgatattcattaaaagaacttactgttgactacactctgagtgctcaacacatttggaaatgcagtctacataagtgctgcttaacaaaagaaacaaaatcacacacagtgtgaggcaacacataagcaggtgtaccatagagttttatctactacagtggtctatatgaataataatttacaaatgaaccagtattaatatgtccctttatgtatacggaagtcgctaaactacaaaacatgtccatttgaagtttttagacatctctgtatcatagaagcaaacaaacagcatcagttcctcagttctctgtgtgactgattattaaacaacctgtagacattgagcatgattacattagataaagcaggcaggtctagagtt

SEQ ID NO: 2771 - DNA, 189 bp, Homo sapiens
ttatcttcatttgagttaacagcacacaggtaagagtcagagacatttctaggtctttgtaggtgtgcacgtgtgacatgtcttatcaatgcagacccaccatgtgtgcaggggtggcctgggccccgctggttgggtgtccagctccttgcttttccctctttctgttttccccctgcgtccttccag

SEQ ID NO: 2772 - DNA, 272 bp, Homo sapiens
  unsure (196): n=A,T,C or G
  unsure (212): n=A,T,C or G
  unsure (229): n=A,T,C or G
  unsure (245): n=A,T,C or G
tgaagccagagaatcgctcagatatccctgagggccggtcgttatcaaaagagatgattaggacaggggcctggcctggcttctggtaataccagtgtacattgtgactcccaatattgtttcccccacaggtaatcttggccgtctttcctggggccactgacactgagggtgtctgagtcaacacataggaggncacagagtctgtgcantgagtgaggaggccgangaggagaacggtccangccatggctgaggcaccaccagtgctg

SEQ ID NO: 2773 - DNA, 299 bp, Homo sapiens
  unsure (1): n=A,T,C or G
  unsure (42): n=A,T,C or G
  unsure (45): n=A,T,C or G
  unsure (59): n=A,T,C or G
  unsure (90): n=A,T,C or G
  unsure (121): n=A,T,C or G
  unsure (173): n=A,T,C or G
  unsure (176): n=A,T,C or G
  unsure (192): n=A,T,C or G
  unsure (203): n=A,T,C or G
  unsure (205): n=A,T,C or G
  unsure (230): n=A,T,C or G
  unsure (237): n=A,T,C or G
  unsure (238): n=A,T,C or G
  unsure (242): n=A,T,C or G
  unsure (252): n=A,T,C or G
  unsure (269): n=A,T,C or G
  unsure (270): n=A,T,C or G
  unsure (291): n=A,T,C or G
nagccctaaattttttccagtattggtcaacactgagggtanaanggttgggtgaacanaatattaacaaggtaaatgatctctaatcangaaggaaatgatcatcccagatgctgaattntccttgctataatactacatcctatcttctccaaaaatcacttttgaaaaangcncaccccctagattagnacttgcatacnanacttgaggacctgcccgggcggccnctctaannggcnaattctgcanatattcatcacactggnngccgctcgagcatgcatctanagggccca

SEQ ID NO: 2774 - DNA, 203 bp, Homo sapiens
  unsure (199): n=A,T,C or G
tcacgctggaccttctgcactaacatgtgatttcttatgattgaaggatcgtgcaagattctcttggtgtaatgcttagtctgagagctgacagatttcacaagcttatcttttttactactaaagtcatacatgctaattgtagaatatttggggtaaaaaaagaaaaaaattacattaataacatggtctttccagncttt

SEQ ID NO: 2775 - DNA, 368 bp, Homo sapiens
atgggtctcagtacagcggctccagggtggagactccggtgtcctacgtcggggaggacgacgaggaggacgatgacttcaacgagaatgacgaggacgactgacgtcctccccacttcagattcggcttcaggaaaacgtttagcgaaaagaaacttttttttaatgtgggttttctgtttccttttggcctactcccaagaagatattggtaagctattgaatttagatatgcacctctgataagcaaggattgtttcccgtaggattaggacgtgctgtggatgtgtgttttgataccagtgtgctgatgcagagcgtttatttacttgttaggattttgtgttttcatttgctatttttcttta

SEQ ID NO: 2776 - DNA, 271 bp, Homo sapiens
  unsure (36): n=A,T,C or G
  unsure (233): n=A,T,C or G
tcacgtggaccttggtcaatgttggaggtagattcngacatcaaaggctctccagttttagtggatacctgaggatcttgagactgtacattattctgaaatgatgaaggtctaggcaacagcatgtcttcagtaagaccagaataatcctcttcaataaagagtccaggaatagaagggaaaatccagtatcgtctatacatgcggtcgcgacccaagggaaagatattggnacaggctatggcactttggattttttctaagagctctt

SEQ ID NO: 2777 - DNA, 398 bp, Homo sapiens
agctagcaaaccctcccttgccacctatgattctagaagggattcctcggtcacatcaactaaagtagctaagctactgtaatgatttgaaagtttgttatgagagaattatgctttgtcaagccaactataaggcagctttctacaacagttctgcaaaatgtttccaccacattgagcaaagctgacactagacactagctacacgtgggaataggaagatgggccagactcagagccgccgcaaaggatgaagtccactcagatttgaggcaatcctggggcaaagcactgagcaaagcaacttctctggtaatctcctcctcagccattctctacccaggatttcagaacacagaacagaagaaactgcaaaagccctgcaggatatatcacag

SEQ ID NO: 2778 - DNA, 214 bp, Homo sapiens
tttcttagaacatgtggaagaaggaaaaagacaaaaaaggaaatctggattctgaggaccacgtctcacccagggtgacatcaggaatggtgctagcctctgcaacacgacacccagtctgaagagctctatacaggtactaagactagcaggggacaccaagactctgcacaaccagattgcttgtgcagagggccacaataaaatataaaac

SEQ ID NO: 2779 - DNA, 215 bp, Homo sapiens
  unsure (66): n=A,T,C or G
  unsure (149): n=A,T,C or G
  unsure (169): n=A,T,C or G
  unsure (215): n=A,T,C or G
cttcagaatatttgtaaatctacttctagatgtactacacatgatctgcttttaaactggatttgngtctatggaataaacttaagtcccaaagatagatttcagtgattccctcaatttgagcccttaggatttaggtgtttttttgntttgttttgttttgttttgntttttttttttgagcaaatgaacttatgatttggatttctgagcan

SEQ ID NO: 2780 - DNA, 445 bp, Homo sapiens
  unsure (368): n=A,T,C or G
ctgaagaactgagacaggaggtggcactgctctgacaccatcctttgaaggtgacagagcatctcagggcttgggggacgccagccggactttgagaggagacagaagaggtgcttgcagaggtatttcacaaagatcagggtctcggcccaaaagttgacttctgctttttcaaacaggtagtcttcttccacctaaatcagatgaaaaagccgaaagtcagtcttacagggaatggtgacaagccccagtccagaccaagcagtaccctgccagatgcaagaggggtttcccttcccccacctgacagagggtgcactcttgcctgtcaacatccatgtacacacaccacttgcagccttgaaggncaccttctattttcactcactgtatttctccaccagagaggaattttttccccagacttaacatgaccttggataaa

SEQ ID NO: 2781 - DNA, 270 bp, Homo sapiens
  unsure (64): n=A,T,C or G
  unsure (149): n=A,T,C or G
  unsure (185): n=A,T,C or G
  unsure (188): n=A,T,C or G
  unsure (190): n=A,T,C or G
  unsure (209): n=A,T,C or G
  unsure (225): n=A,T,C or G
  unsure (227): n=A,T,C or G
  unsure (234): n=A,T,C or G
  unsure (265): n=A,T,C or G
  unsure (266): n=A,T,C or G
cccatcctcagcacgtggattcgagtcaccgtgagaattccggtatctcaccctgtcctcaccntcagggctcccagggcccacactgtggggggggacctgctggagcttcactgtgagtccctgaaaggctctcccccgatcctgtnccgattttatcatgaggatgtcaccctggggaacanctnancccccctctggaggaggancctccttcaacctctntntgactgnagaacattctggaaactactcctgtgatgcnnacaa

SEQ ID NO: 2782 - DNA, 310 bp, Homo sapiens
  unsure (36): n=A,T,C or G
tgctcagtctgggcctaaggaagcagcactggtggngcctcagccatggcctggaccgttctcctcctcggcctcctctctcactgcacagactctgtgacctcctatgtgttgactcagacaccctcagtgtcagtggccccaggaaagacggccaagattacctgtgggggaaacaatattgggagtaacaatgtacactggtattaccagaagccaggccaggcccctgtcctaatcatctcttttgataacgaccggccctcagggatatctgagcgattctctggcttcaattctggggacatgg

SEQ ID NO: 2783 - DNA, 478 bp, Homo sapiens
  unsure (11): n=A,T,C or G
  unsure (49): n=A,T,C or G
ccaaatctttntttttttcttggagctgtaagatcttttcttctactgntccctcacaaacaaatctgtgtatgacaacatctttctgctgccctactcggtaaattcggtcacaagcttgatcttcaagtgatggattccagtgcatgtccaaaagaaagaggtgatttcctccagtcaggtttagaccaacacctccggccaagagagagattagcattacctgagggcctctggagtggttaaatgcctctaccaagtccattctctgcttgggattgacagagccatcgatggtggcataagtcagtccatgcttcttcaggtgcaatgctacaactttcagcatgttggtccactgagagacaatgacactcttttgggatgctgaatttctttgaattgcctccaattctgccaacagagatgaaatcttggtgctctctcgcatgccttcaaaaagctccatcttgaagaa

SEQ ID NO: 2784 - DNA, 337 bp, Homo sapiens
  unsure (19): n=A,T,C or G
cgaggtccaaaccaggtcntcaggcatcccaggatttccaggcatcagatggagggtgagggctgcccagaaaatgtcagtgtgtgtcaacatttactgcaggttcagagctccctccggggtccctgagtacatcatgtgctcctgagagttttaagggaaagccaagtaaagacgtgatgatgttctaaacccaagcaattaataaacgccacggaaatcagtcattcacttaccaagtatttctctgctttctgccatgtcacgggcccatgatcccctggagattgagggaaataagatcacaggagctcccagtctgagtgagaaaaggcag

SEQ ID NO: 2785 - DNA, 295 bp, Homo sapiens
tttgaggaacaagaggtggacatggaagcgttcctcacactgactgacggtgacttgaaggagctgggaattaagacagatgggtccaggcagcagattctggcagcgatttctgaactgaacgcaggcaagggacgcgagagacaaattttacaggaaaccattcacaactttcactcttcctttgagagcagtgccagcaacaccagggcccctggcaacagcccctgtgcgtgatcctccttcccgcagccaccagcgtgagctctctgaatcccgggaccccttcacgtgg

SEQ ID NO: 2786 - DNA, 179 bp, Homo sapiens
gtgttggcaatcgttttcgtaagagtcagaaaaattaggccggtttcacaatatagagtgtcctttctggtcaacagtattgcttcaggacagaagagcatttcacagatctttcctgtaacttctagaaaagtcatccagccagatttaggctcaagcttctttacaaagccattttc

SEQ ID NO: 2787 - DNA, 238 bp, Homo sapiens
  unsure (34): n=A,T,C or G
  unsure (157): n=A,T,C or G
  unsure (171): n=A,T,C or G
gcccaagcacagccctgactaggatgacagcagnacaaaagaccacctttctcccctgagaggagcttctgctactctgcatcactgatgacactcagcagggtgatgcacagcagtctgcctcccctatgggactcccttctaccaagcacatganctctctaacagggngggggctacccccagacctgctcctacactgatattgaagaacctggagaggatccttcagttctgg

SEQ ID NO: 2788 - DNA, 333 bp, Homo sapiens
  unsure (257): n=A,T,C or G
  unsure (273): n=A,T,C or G
  unsure (298): n=A,T,C or G
  unsure (311): n=A,T,C or G
  unsure (332): n=A,T,C or G
caagtatgtccatgattgaaagaatcattccagaaatggcagcaaagaggctcaatgaattcattatcatttttcctttgaccaaacacttcctggagtttttctccgttgctgccaggagtgatccggaaataatatacataatgcctccccagagagggtaccacacagtcacacagatgggtgcatagatccctgctgggatcatcagaagaccccccagggcaatgtggaagaccccattcataatctggacngcccccaaagtcttanattccctcatgaagaagctttgcgnggggcccaccagngaagacatcctcctgaagagng

SEQ ID NO: 2789 - DNA, 449 bp, Homo sapiens
cgaggtctgagctcctctggttcttctctagacctgctccctctctgaaatgcaaggccgtgcctttaatgggcttttggcattctgtctccagacctcccttctcatctgaagggctctcaggagaacagagaaaaaaccagcctgtctccaaactggcccgtctcagggactgggggcctttacccccagtgaaagatgcagactttacagcgctgcagtacagtagagtcaagtgactccttcagatagttggatgggtctctcgatcattcctgataataacattttgcctatgttaagtgctttccacctatcatgttaccttctaactactcccttggttggatacaggtattagccccatttcacaattaagaaattgaggcttaaaaggattaaagagttttttagaggagaaacagctcttccttacagaaggatcccaa

SEQ ID NO: 2790 - DNA, 219 bp, Homo sapiens
  unsure (215): n=A,T,C or G
tacagggtcgaagccggcgatgaggccgactattactgtcaagtgtgggatcgtaataatgaccatgtcgtcttcggcggagggaccaaactggccgtcctaggtcagcccaaggctgccccctcggtcactctgttcccgccctcctctgaggagcttcaagccaacaaggccacactggtgtgtctcataagtgacttctacccgggagccgngaca

SEQ ID NO: 2791 - DNA, 374 bp, Homo sapiens
ccaccctgaccatttacagggtcgaagccggcgatgaggccgactattactgtcaagtgtgggatcgtaataatgaccatgtcgtcttcggcggagggaccaaactggccgtcctaggtcagcccaaggctgccccctcggtcactctgttcccgccctcctctgaggagcttcaagccaacaaggccacactggtgtgtctcataagtgacttctacccgggagccgtgacagtggcctggaaggcagatagcagccccgtcaaggcgggagtggagaccaccacaccctccaaacaaagcaacaacaagtacgcggccagcagctatctgagcctgacgcctgagcaagtggaagtcccacagaagctacag

SEQ ID NO: 2792 - DNA, 316 bp, Homo sapiens
  unsure (13): n=A,T,C or G
aaaaagtgaggtntttcttaaaagtttagtatacaaacaaaatgaaggtaccttcacattttactacagatgtgcagatagttttcttggtgcacagagataaggcagaattaagtcagaataaacgttctaaaactgacctccggaagaactagtcttagtcatttctttgcagagtatgtgaaccaagattcgggtttggtctttggtgttagcactgtgtcaaggatcagatagaaagtacaaatggaggggcccctttctgaggccaggccccactgttggggcatgtggggtgaccaaaggccaataccag

SEQ ID NO: 2793 - DNA, 429 bp, Homo sapiens
aaaaaagttaaatggagatcttctgggaaaccaagccatgaatgcgagtttgtactaacctagccctctggaggccacatctgtagcaatcagaataggagcttttccatgtttgaattcatttagaacccagtcacgctcttgttgactcttgtcaccatggatacccatggcaggccacccatctctcctcatttttctggtaagctcatcacatcttcttttggtttccacaaaaacaatggttttattctccttctcactcatgatctcttccattagacgaataagtttttcatccttttctacgtcatgacacacatccacaatctgaagaatgttgtggtttgcactcagttcaagtgcaccaatgtttatatgaatatagtctttcaggaaatcttcagcaagctgtcttacttcttttgg

SEQ ID NO: 2794 - DNA, 216 bp, Homo sapiens
  unsure (1): n=A,T,C or G
ntcaagaagctaagaagaaagaatctgttagaaatgctgaagcaaagattacaaaacttacagaacagcttcaagcgactgaaaaaattcttaatgttaacagaatgtttttgaagaagcttcaggaacaaattcacagagttcaacagcgtgttacaattaagaaagctttgactctaaaatatggagaagagcttgctcgggcaaaggcagtgg

SEQ ID NO: 2795 - DNA, 44 bp, Homo sapiens
  unsure (44): n=A,T,C or G
tcaagtccagtgtgtctgcctgtgactcctgcctgggggcccan

SEQ ID NO: 2796 - DNA, 347 bp, Homo sapiens
  unsure (13): n=A,T,C or G
ccaccatttcccntgcatcgtctctcctacgtaatcagtccctgatgaactctcttcccataaaaatccctgtgtcctaaagtcatggcgtgctctatttcatggtcatttgtagagcacagcagcactgtgcctgtcaggaaaagtgtgtgctaactgcaataagcatgatgactgccatcacggttttgttattctctgtccacctccatggtctctaaatcagacaatctttaatctgaaaaggcagtgtccttattcctccaggaaactggatagaaacgctcctcatctaatgaagtcagccctgtcatcttactgattctttcccagaccacagtgaaagg

SEQ ID NO: 2797 - DNA, 155 bp, Homo sapiens
  unsure (53): n=A,T,C or G
  unsure (83): n=A,T,C or G
  unsure (113): n=A,T,C or G
  unsure (116): n=A,T,C or G
  unsure (122): n=A,T,C or G
  unsure (132): n=A,T,C or G
  unsure (139): n=A,T,C or G
  unsure (140): n=A,T,C or G
ccatgaggaccagccgcctgtccagctcatgaatacgctcattcttcatctcnatgacaaagtgtaagctctccagctcctgntcccagaactggctggggctcccataatcntgnatatgnttcttatagnttgggcnnagaatggactcctcc

SEQ ID NO: 2798 - DNA, 294 bp, Homo sapiens
  unsure (267): n=A,T,C or G
aaagctatctgacgctaatgacttgtacaatctggtttgcaaactctgagagacagtatcaaataagcactgtcaaagactactcccagctaatctttactgccatttttctttgaaattgtctttgggactggctatgttctcactgtagcttccgtttatcccacagcacaaaccctaaagtccatgtgcagtctccatgttcaagtataaaagtctgtttcaggacaaccctgggttgctgtagtgtttctctctctgtagtgnctacttggtgtcatgcccttggacagg

SEQ ID NO: 2799 - DNA, 311 bp, Homo sapiens
aaatccaagtctcttgaggaccagagaagcactgctacctttttctttattcaacacagataccacagaatcagcagggtgagaaacaattgcacaaaagactccagctatgtaacctgctacaaatgttacaaccagttagtgatcaggtgagggttctttgaacctggttctatcagtcgaattaatccttcatgatgggccactttgtccttccagctcttggtcttattagttgccatctccagcttctttttaacttcctcgtactgctcaagtgcttgcttccgttctaactcaagctgctccag

SEQ ID NO: 2800 - DNA, 373 bp, Homo sapiens; identical to SEQ ID NO: 142

SEQ ID NO: 2801 - DNA, 287 bp, Homo sapiens
aaaattcccaaaaggattatacaaggcagccaaaaattcacaatctgaaaaatgatcaaacacattattaacccgtccatgtgacttggcagtgaggtggcgctgaatgatttggtgcagcatctctctgcattcatttaacagcctggataacacattccggtcaaaggtataatccacctgatggaaactgaccacggtcatagcaagctgatgaactttcttcttaaatttctccatcaatgctagctcatcttgattaaactgattatccctataaagaatgg

SEQ ID NO: 2802 - DNA, 424 bp, Homo sapiens
gcgttgtgaggggtgtcagctcagtgcatcccaggcagctcttagtgtggagcagtgaactgtgtgtggttccttctacttggggatcatgcagagagcttcgcgtctgaagagagagctgcacatgttagccacagagccacccccaggcatcacatgttggcaagataaagaccaaatggatgacctgcgagctcaaatattaggtggagccaacacaccttatgagaaaggtgtttttaagctagaagttatcattcctgagaggtacccatttgaacctcctcagatccgatttctcactccaatttatcatccaaacattgattctgctggaaggatttgtctggatgttctcaaattgccaccaaaaggtgcttggagaccatccctcaacatcgcaactgtgttgacctctattcag

SEQ ID NO: 2803 - DNA, 493 bp, Homo sapiens
ccagtgtaaaaaactctctccgggtcagggatatactcagtactgagctcatgcttgggcaccagtccctgcacattgttgtagaacttcacaatgcagccatagtccttgaccctgatgatgaagccatgtgtctgcagaccaggcttggcatcggcatagcaggtaatgacaggtagtttggactcaatcagggtttttttcagggtcatcatcagcttcttggcttcagggtcacaaagcaaaacccggcacttgacctcatccccgatgtggtacttcttctctggattcttcatcaggatgtcagccaggtgcatgggaggtaccaggcccctcatctgctcgcccaccttcaccagcatcccatatgactttatggttagcactgtgccctttaccactgccccaggttcgatgtcatgatatctaaggtactgagcttcaataatagacgttcgtagagagagcaaggccagttcatccatttggc

SEQ ID NO: 2804 - DNA, 398 bp, Homo sapiens
ccatgtaagagtagggtggccgctcagacacagagttctgccaggacgctgatggtctcgaaggctcctcaaccttaacctgtcgctgctccaggtgacaattctccttttcctccatctcttgcttgatgctgcgggagcccagtccatcagaactcatctttcgaagccactggatgttggataggctattgttgatagtgcagcctgctgcctcaccatctgcacaggtctcccgtttctgctcgcaaagggctccaggtggtctaggaagattcacatccctagctgcaggttttggtcccaaggtctccagggtcacttctgtccttttggcatcatagctggtttggatttgaggccggagtcctggaggctgagttggggctcccccacag

SEQ ID NO: 2805 - DNA, 250 bp, Homo sapiens
  unsure (1): n=A,T,C or G
  unsure (30): n=A,T,C or G
  unsure (92): n=A,T,C or G
  unsure (130): n=A,T,C or G
  unsure (150): n=A,T,C or G
  unsure (171): n=A,T,C or G
  unsure (182): n=A,T,C or G
  unsure (195): n=A,T,C or G
  unsure (206): n=A,T,C or G
  unsure (208): n=A,T,C or G
  unsure (211): n=A,T,C or G
  unsure (223): n=A,T,C or G
  unsure (229): n=A,T,C or G
  unsure (242): n=A,T,C or G
  unsure (244): n=A,T,C or G
  unsure (246): n=A,T,C or G
ntcgaggtccaccctgaccatcaacagggncgaagccggcgatgaggccgactattactgtcaagtgtgggatcgtaataatgaccatgtcntcttcggcggagggaccaaactggccgtcctaggtcancccaaggctgccccctcggncactctgttcccgccctcctntgaggagcttnaagccaacaaggncacactggtgngnatnataactgacttntacccnggagccgatgacncngncctg

SEQ ID NO: 2806 - DNA, 615 bp, Homo sapiens
  unsure (615): n=A,T,C or G
ccagtacacccatgaatttgatggagatgagcagttctacgtggacctggggaggaaggagactgtctggtgtttgcctgttctcagacaatttagatttgacccgcaatttgcactgacaaacatcgctgtcctaaaacataacttgaacagtctgattaaacgctccaactctaccgctgctaccaatgtgctgtttcctcaccacagaggttcctgaggtcacagtgttttccaagtctcccgtgacactgggtcagcccaacatcctcatctgtcttgtggacaacatctttcctcctgtggtcaacatcacatggctgagcaatgggccctcagtcacagaaggtgtttctgagaccagcttcctctccaagagtgatcattccttcttcaagatcagttacctcaccctcctcccttctgctgaggagagttatgactgcaaggtggagcactggggactggacaagcctcttctgaaacactgggagcctgagattccagcccctatgtcagagctcacagagactgtggtctgcgccctggggttgtctgtggggccctcgtggggcattgtgggtggggcactgtcttcatcatccgaggacctcn

SEQ ID NO: 2807 - DNA, 456 bp, Homo sapiens
ccatcttgaacttggaagggactatgtccagaataagtgggctcatggaactaactggttctaaagcctcaagatagggggcaatcagatttgaggctgagagaggtaaaccaagattttctttgaaggtacgggctttaagaaagcaaaagtggctgagcgtgttggctcacacctgtaatgccaaggcaggaggatcacttgagcctaggatttcgagggcagcctgggcaaccgcgagacctcgtctctgcaaaaaattaaatattagttgggcacggtggcatgtgcctgtagtcccagctacttgggaagctggggttgggaggatggctcgaacctgggaggtcaaggctgcagtgagctgtcatccttgccactgcactgtagcttgggcaacagagcaagagtctgtcttggaaagagcaaaagtaagttgctgtttgtatttccagg

SEQ ID NO: 2808 - DNA, 308 bp, Homo sapiens
aaatcacaacattctggtcgatataacagatagaaattcctgatctagacagcagaattctgttgtgttaagagagaatacacaattatagctaaactctaattctcactttatataaatttatttacactcacctaactacattattctaacaaaacactgggacaacttgtaaaagtacttatgcatatgtgcaggacaggaagagaaaataaagaatcagatttattggggtggttaagtgagatcatggatgaactgtttacttctattcagcagtagcctttgtggtcccaggcttccggtgg

SEQ ID NO: 2809 - DNA, 101 bp, Homo sapiens
ccaagggaataagcaagaggagacatttcctccctgccccagcactctgtcccaatccgagaagttccgaggctttcccggggcagtctgtgtcacgctgg

SEQ ID NO: 2810 - DNA, 436 bp, Homo sapiens
aaaaggcttccttttctgttaagttctgagacttaataaatgagataaaaacagtttcttacacctaagaaactgggttatgaaagctgtgcctaggatgttggggagagcacactgggagaaggcattcttgctggtaccttgagttcaggaatctacgttgaggcttcctcatccaccatgatcacagccccaggggatgctgggcttgttagcattcaagctctgggacctgattggcctctctgtctcctctaagtaaggacaactgatggggacagtctcccactctctgaggcttcgatgttccacgcatggctttcctcttccagaaactcccctccctggctctcccatgcagccctagtcagcagcagctcacaggtccgtggacagcgagtctgggatctgtttgccttcttcagccgatttgctg

SEQ ID NO: 2811 - DNA, 472 bp, Homo sapiens
ccactcccctttcttcttaggcagattctgccccatgtaagcaaaatgcctcagatcctggcaaagcagcgttgggggtacctcttcttcccaaagtcctggtcagttccccagaaaggaccagtcatggctgtgccagggtgactgccctcccccaggtcagccctgtcgacaaaggcaggggcttggttgtcatttccaccaagtgggaagacagtattaatagatggagaaccctctgcagtgggaagatttcagcaatgggcaagctggatagagccgtggttaggatggagttgtttgcttgttgcacttggagctctttatgaagcaagggctctgcctcccagcctgagacccagaccctggtttggacccagtagaactcttgtgggccctgggttggtgtctctgagcaaatccccaaagcaggagagtccctagcaccgtgagctctgtcagaacctcccag

SEQ ID NO: 2812 - DNA, 347 bp, Homo sapiens
ctgaatctgtctttcattcgaccccctgaaaaccctgctttgctgttaatcaccatcactgccaccaacttctcagagggtgatgtcacccatttcatctgccaggctgctgtgcccaaggtttgtaaagatcagagttcagaggtggcctggggactccaggagaaaaggccactaagtggaggaggtgggtgggagacagtgtgagatgggattgagtcatctggagatcagcacttggggagttacaggaaaagggtgtggagccactgagtatagaggggctgcctgagccctacctactgccatactgtgctctgttaaactcctgtgttcagagtctccag

SEQ ID NO: 2813 - DNA, 264 bp, Homo sapiens
  unsure (1): n=A,T,C or G
  unsure (97): n=A,T,C or G
  unsure (174): n=A,T,C or G
  unsure (236): n=A,T,C or G
  unsure (249): n=A,T,C or G
  unsure (254): n=A,T,C or G
  unsure (263): n=A,T,C or G
ncgaggtccaccctgaccatcaacagggtcgaagccggcgatgaggccgactattactgtcaagtgtgggatcgtaataatgaccatgtcgtcttcngcggagggaccaaactggccgtcctaggtcagcccaaggctgccccctcggtcactctgttcccgccctcctctgangagcttcaagccaacaaggccacactggtgtgtctcataagtgacttctacccgggagccgngacagcggcctgnaaggnagatagcant

SEQ ID NO: 2814 - DNA, 218 bp, Homo sapiens
  unsure (9): n=A,T,C or G
  unsure (12): n=A,T,C or G
  unsure (18): n=A,T,C or G
  unsure (23): n=A,T,C or G
  unsure (27): n=A,T,C or G
  unsure (30): n=A,T,C or G
  unsure (40): n=A,T,C or G
  unsure (46): n=A,T,C or G
  unsure (47): n=A,T,C or G
  unsure (51): n=A,T,C or G
  unsure (54): n=A,T,C or G
  unsure (57): n=A,T,C or G
  unsure (75): n=A,T,C or G
  unsure (79): n=A,T,C or G
  unsure (81): n=A,T,C or G
  unsure (83): n=A,T,C or G
  unsure (84): n=A,T,C or G
  unsure (85): n=A,T,C or G
  unsure (87): n=A,T,C or G
  unsure (89): n=A,T,C or G
  unsure (90): n=A,T,C or G
  unsure (100): n=A,T,C or G
  unsure (105): n=A,T,C or G
  unsure (107): n=A,T,C or G
  unsure (108): n=A,T,C or G
  unsure (110): n=A,T,C or G
  unsure (115): n=A,T,C or G
  unsure (119): n=A,T,C or G
  unsure (120): n=A,T,C or G
  unsure (129): n=A,T,C or G
  unsure (137): n=A,T,C or G
  unsure (139): n=A,T,C or G
  unsure (155): n=A,T,C or G
  unsure (160): n=A,T,C or G
  unsure (164): n=A,T,C or G
  unsure (170): n=A,T,C or G
  unsure (171): n=A,T,C or G
  unsure (184): n=A,T,C or G
  unsure (192): n=A,T,C or G
  unsure (195): n=A,T,C or G
  unsure (201): n=A,T,C or G
  unsure (205): n=A,T,C or G
ctgctccangcnctgcancatcntcanacncagggcttgnaacttnntggncantgngattatttctctttcttnctcntntnnnantnnttcaacaaanctgtncnncnccggnattnnaaacttaangtactgancnacttcatgggggactnccacncccnagtcannttccatcacgaanatcctggngancgactnacanggaccatgcagga

SEQ ID NO: 2815 - DNA, 385 bp, Homo sapiens
  unsure (334): n=A,T,C or G
  unsure (337): n=A,T,C or G
  unsure (371): n=A,T,C or G
caagcctcatcaataactgtatccaaaaggagacgctgcttggggtgtacccagagaaaacaccaagctttcctggcttcccggtcctccctctccccattagtctttggggtgcatacataagtgttgtgtgaagtctcttggggtttagaagatcttgcactcattgatggagaagagcctccttctgtttcgtctcctggcctggttgacggcagttcggacggcgcactcaaacacctgctgtactccccgattgctaagggctgagcactccaggtagcccttggctctgacatcctgggccagtttcttcccttccatggcattgacncangaggccctgaggggccccatctccccctggtcangtctgggtggaccc

SEQ ID NO: 2816 - DNA, 367 bp, Homo sapiens
ccaaaactgcgaagagatgcagaataatgttgacaataataagttgctgaatcgtcaggctgcagactggtgatggttaaattgaattgtgtcccagatccactgccagtaaatcttaatgagaccccttcttctaaactggaagtcgcataaattaggacattaggggctttgcctggtttctgttgatgccaggccaaccaccgatctatattctgagaggcccgacaacttattgtaactgtatctccgacagatgcagacagggtggaaggagattgggtcatctggatgtcacatttggcacctgggagccagagcagcaggagccccaggagctgagcggggaccctcatgtccatgctgt

SEQ ID NO: 2817 - DNA, 373 bp, Homo sapiens
  unsure (29): n=A,T,C or G
  unsure (67): n=A,T,C or G
  unsure (297): n=A,T,C or G
  unsure (310): n=A,T,C or G
  unsure (341): n=A,T,C or G
  unsure (363): n=A,T,C or G
  unsure (370): n=A,T,C or G
tcgaggtctggacttctttaagcgactcnttcaactgtgtcacgtgtcctttcagtagtatctgctnccgtatggactgctctaactgccgcttgagaagtgctttactgcggctcgagaacccatccggcttcttcttctgtgtggcggcgacagcacagagagaccactctaactctcctatacgctgcgatgaacgttgcaggcggccggccagatccttggactcttcttcaaagtatctgagagaatgtttcatgtgatacaggtccgtatttagtttctttttctctatgntcaatctctgganttgaccctctagctccctttcagctttctgnttctcattgtctgctttctttncttcttncag

SEQ ID NO: 2818 - DNA, 226 bp, Homo sapiens
  unsure (22): n=A,T,C or G
  unsure (23): n=A,T,C or G
  unsure (24): n=A,T,C or G
  unsure (147): n=A,T,C or G
  unsure (164): n=A,T,C or G
  unsure (187): n=A,T,C or G
cctgtcctcttaggactcaaannnagaccctggactgattttccagtccccaccgtcctgcgggacagccagcgtatgctaatgttgcaaacccatgataatgtatgtggaatatcctgccattggggttttacattaaaaccccanaatggctgcagaggggngaacaggccccaatatttggggngctgtgatacccctcttctacccacaaggagccctctcg

SEQ ID NO: 2819 - DNA, 436 bp, Homo sapiens
  unsure (14): n=A,T,C or G
  unsure (20): n=A,T,C or G
  unsure (278): n=A,T,C or G
  unsure (392): n=A,T,C or G
cctaaaaaagcggnctcggngggaatgcatttctcttgctccacgtctattttagttgcatatctgtagtgatgacaaatgcctccagccttgtcctctgcaaggctgcactgggctgcatacaggctcctgtctcaggtgtctggtttcctccttgaaaggttggggcagcagagtcagccctgtctatctgggcaaggccctgacacttggaagcatgaaaagccatggttcaggtggagtgagcttccaatgcccttggaaggattttatttcanggccgtggggcttaaaagtcatcactgtacaatccactgggagcaaagatcaagataacatgtgatggatatcataaaagcggaacagaacatcccattgctcagagatggganaacaactctgaatggagagggctcaggttatatacattcaccct

SEQ ID NO: 2820 - DNA, 294 bp, Homo sapiens
ctgaatctgtcgtgactttcctgagatctacccggggcttggctgtctgttctgggcactggctccgagttcccctcctgggatttgcaggagggcagtactgaacctgcattcttctccttgtaaatgtaggccgggtgcccctgttctccgggtttggaacaatacgaggttggtgctgatgggatttacttgcgtacgtgctcttcacaaaaacaccgtggatgctgaagttagagcacgtcgccacagagcttgacatcaatgttagagtgtctcttactccccgcccag

SEQ ID NO: 2821 - DNA, 277 bp, Homo sapiens
ctggtggtatctgagttgacttgacagaacactgtcttgaagacaatggcttactccaggagacccacaggtatgaccttctaggaagctccagttcgatgggcccaattcttacaaacatgtggttaatgccatggacagaagaaggcagcaggtggcagaatggggtgcatgaaggtttctgaaaattaacactgcttgtgtttttaactcaatattttccatgaaaatgcaacaacatgtataatatttttaattaaataaaaatctgtggtgg

SEQ ID NO: 2822 - DNA, 246 bp, Homo sapiens
  unsure (50): n=A,T,C or G
  unsure (133): n=A,T,C or G
  unsure (149): n=A,T,C or G
  unsure (207): n=A,T,C or G
  unsure (223): n=A,T,C or G
  unsure (224): n=A,T,C or G
  unsure (246): n=A,T,C or G
aaaacgaccaccacagatttttatttaattaaaaatattatacatgttgntgcattttcatggaaaaaatttgagttaaaaacacaagcagtgttaatttcaaaaacccttctgccccccattctgcccctgntggctttttttggccnatgggcatttaccacctggtttggaaagaaattgggcccatcgaactgggaactttcnaaaaaggcattacttnngggcttcctggaagtaaggccn

SEQ ID NO: 2823 - DNA, 341 bp, Homo sapiens
  unsure (9): n=A,T,C or G
  unsure (27): n=A,T,C or G
  unsure (40): n=A,T,C or G
  unsure (45): n=A,T,C or G
  unsure (49): n=A,T,C or G
  unsure (131): n=A,T,C or G
  unsure (162): n=A,T,C or G
  unsure (170): n=A,T,C or G
  unsure (190): n=A,T,C or G
  unsure (209): n=A,T,C or G
  unsure (213): n=A,T,C or G
ttttttgantcaatttcctttaatgantacttgttacagnaaaanaggnataaagtcctgttcccaagtccaaaccactttttaacttaaatcttgagtttttctgaattactcaatttgaagtaattctntttatatctgaaaaatggttttattgaaacntttgaaantaaaaaatatgcattgcaanaagcatatgacaaacattntganagtacaaaattagttgtaaaaaataacataatttaccagtaaacccactcatataaaaatgtgcaaagccttttgatataaaaagttttgtcaccaagcacctatttttataacttaacttcccatgg

SEQ ID NO: 2824 - DNA, 521 bp, Homo sapiens
cttacaccctttttcatcttgacattaaaagttctggctaactttggaatccattagagaaaaatccttgtcaccagattcattacaattcaaatcgaagagttgtgaactgttatcccattgaaaagaccgagccttgtatgtatgttatggatacataaaatgcacgcaagccattatctctccatgggaagctaagttataaaaataggtgcttggtgtacaaaactttttatatcaaaaggctttgcacatttctatatgagtgggtttactggtaaattatgttattttttacaactaattttgtactctcagaatgtttgtcatatgcttcttgcaatgcatattttttaatctcaaacgtttcaataaaaccatttttcagatataaagagaattacttcaaattgagtaattcagaaaaactcagaattaagttaaaaagtgggttggacttgggaacaggactttatcctcttttactggaacaagactcattaaaggaaatggataaaaaa

SEQ ID NO: 2825 - DNA, 152 bp, Homo sapiens
  unsure (11): n=A,T,C or G
  unsure (16): n=A,T,C or G
  unsure (103): n=A,T,C or G
tcacatattanacacnataatttttattatggaaattaatctttacatacaaaatcagctacgtaattttacttacaaaacaataaaaactggtctttactgnggcaacaaaagaagcattttgacaaatgaaaaaaattaatgcaaacaaa

SEQ ID NO: 2826 - DNA, 285 bp, Homo sapiens
  unsure (283): n=A,T,C or G
ctgtctcatcagccctcccctccatttattcctatttttctgtagttaagaatactgtaaaaatgtgactattccttaatatcagaaaagaatgcacaggctgagtcttccggtcaaaagttaaatactgatggaatcaagtattttgtatgaagttctcatttgttatctctaacgctattttgtgttttgcatatagtattatagtatgtgtatatcactttttgtatagagtaagcaattgaataatttgttaataaaaataataccacattgactgatnaa

SEQ ID NO: 2827 - DNA, 456 bp, Homo sapiens
  unsure (31): n=A,T,C or G
  unsure (49): n=A,T,C or G
  unsure (88): n=A,T,C or G
  unsure (191): n=A,T,C or G
  unsure (193): n=A,T,C or G
  unsure (220): n=A,T,C or G
  unsure (248): n=A,T,C or G
  unsure (253): n=A,T,C or G
  unsure (257): n=A,T,C or G
  unsure (264): n=A,T,C or G
  unsure (290): n=A,T,C or G
  unsure (313): n=A,T,C or G
  unsure (321): n=A,T,C or G
  unsure (328): n=A,T,C or G
  unsure (330): n=A,T,C or G
  unsure (357): n=A,T,C or G
  unsure (399): n=A,T,C or G
  unsure (418): n=A,T,C or G
  unsure (452): n=A,T,C or G
  unsure (456): n=A,T,C or G
tttttccagttttatgatttatttaacttgnggaacaaaaataaaccanattaaccacaaccatgccttactttatcaaatgtataanaagtaaatatgaatcttatatgacaaaatgtttcattcattataacaaatttccaataatcctgtcaattatatttctaaattttcccccaaattctaagcanantatgtaaattggaagttaacttatgcncccttaactatcttaacaagctttgagngcaanaaantgaaaanttcaaatctgaccaaaaagttgatgntggaaaaaaaaattcttcaatcncttgcctntaaacanangatgtaaaatggaagttaacttatgcncccttaactatcttaacaagcttttagtgccaaaaaatgaanagtcaatctgaccaaaagntgatgttggataaaaaaatctctgcttcccactntaan

SEQ ID NO: 2828 - DNA, 317 bp, Homo sapiens
  unsure (316): n=A,T,C or G
gaacaagaggcttaaaaccgggctttcacccaacctgctccctctgatcctccatcagggccagatcttccacgtctccatctcagtacacaatcatttaatatttccctgtcttacccctattcaagcaactagaggccagaaaatgggcaaattatcactaacaggtctttgactcaggttccagtagttcattctaatgcctagattcttttgtggttgttgctggcccaatgagtccctagtcacattccctgccagagggagttcttcttttgtgagagacactgtaaaccgacacaagagaacaagaatna

SEQ ID NO: 2829 - DNA, 120 bp, Homo sapiens
  unsure (32): n=A,T,C or G
  unsure (75): n=A,T,C or G
  unsure (96): n=A,T,C or G
caggcataacacagaggcaatcagattccaanaataggggttgcactccagggagacaccatctggctggaccangaaagggccatgctctgtgangagcccatctaaagagctgcagcc

SEQ ID NO: 2830 - DNA, 260 bp, Homo sapiens
  unsure (35): n=A,T,C or G
  unsure (71): n=A,T,C or G
  unsure (140): n=A,T,C or G
  unsure (143): n=A,T,C or G
  unsure (192): n=A,T,C or G
  unsure (229): n=A,T,C or G
ttttttttttttttttttttttttttactttaaanatttttatttctccaaatttgttatttatcaggagngactgaaataaaaaatacaattgagtcccatcatcatcatcatggaaatggctttaaaaaaaaactggncanatgaatattattgcttcccattttcaaccagtaaatagttgccactganaaactgacagccaggagtctgtcaaaaaatgctcaanatatgttatataatacaacatgcctgttcac

SEQ ID NO: 2831 - DNA, 368 bp, Homo sapiens
  unsure (183): n=A,T,C or G
  unsure (274): n=A,T,C or G
  unsure (362): n=A,T,C or G
ctttatctgtggaaacttcagactctcccctattactttaatttcagtgagacattattaaatataagtgggcttacacatttgttttgctttactgacaaataatacacaacttggaggctttttttcctttctattcttcctctaaatgttcaacacttttctgattttgtgatttgaggntgtttaatagcttcctgaggctccattgagaccgtatatacgtgacacttaacagtctagccttcctcggtacatatagatatatgatggnggctttgcctgtagtaaattcatgccaaaacataggctttcagtgcctattacatatggctttcagctctctctactgagggatgtangagttt

SEQ ID NO: 2832 - DNA, 111 bp, Homo sapiens
  unsure (76): n=A,T,C or G
  unsure (78): n=A,T,C or G
  unsure (83): n=A,T,C or G
  unsure (99): n=A,T,C or G
  unsure (100): n=A,T,C or G
  unsure (105): n=A,T,C or G
cctagacactctcatgctttcaatgtggaatacgtagcctaatatgcatagaagcatgaatggcaaacttgaagancnatatnataactatttttctanntattngaagca

SEQ ID NO: 2833 - DNA, 347 bp, Homo sapiens
aaatcctcatagtcaaaaaattctccagatggacttttaatttgtaagatttgaactgtgacttgtatacatctgtttagaatcaattatatttgaaaagctgcctgtgttttaacagtcaagtgtgctaaagtttgtcaatttaagctgcttttgatttcagctaccaagatcacaggtgcactctacacataacactgacagacccataacattacatacatcttagtgaattctatcacatggtaaaatgaacagctttctttgtaactcataaaattctcttaggacatttttataaagtcacctgtttatagttctatcttttcagattccatttcttttta

SEQ ID NO: 2834 - DNA, 278 bp, Homo sapiens
  unsure (192): n=A,T,C or G
  unsure (232): n=A,T,C or G
  unsure (236): n=A,T,C or G
cctactatgtgccaaggaggggtaaggcagctagctctcacagacacaccccacagtgaaaatcacacacacacacacacaccccggcatctgtgctcactcacaggcagactgctcactttcttgcacctttcttgccatcacctcggcacacccacattcctccaataggcttgggaaccagcatggaangggcaagtgtcataaaaaaaaccccctacctaccctactnccanacttcatgccaaaaggttaactccacttcccttctggttgcc

SEQ ID NO: 2835 - DNA, 143 bp, Homo sapiens
  unsure (59): n=A,T,C or G
  unsure (99): n=A,T,C or G
  unsure (131): n=A,T,C or G
atgccttctggtgaatttgcacgtatatgccgagatctcagccatattggagatgctgntgtaatttcctgtgcaaaagacggagtgaaattttctgcnagtggagaacttggaaatggaaacattaaatngtcacagacaag

SEQ ID NO: 2836 - DNA, 226 bp, Homo sapiens
ccatttttttagttttattgttaaatggtatttttctatgtttaattataatagatctggctttttctggatagcataaagatcactgaactatatatatataagaaacaagagttctattttagcacaaaggcattttatattatttattgaatccataagtttgttttcgtcaaaaacattccatattatttctgctcctttttatttgtatagtttgttattt

SEQ ID NO: 2837 - DNA, 379 bp, Homo sapiens
ttttaactatatatcatattcatttattatcaatccacaggaaaatctgattgctacatgagctcataaaagcttttttcacctttacaaaattaaaaaaaaaaatgtgccacaaggatgtaataacaactgctgataaacaagaaaaggaatcttaaaattataaatttgctgtagaaaagataaaaaacaattatattttatttagaattttaccttgaataaaatattcccctgtataaaaaataaaaaagcttgctctggttagaattagagtatttttgtcttcaaatctgggaatttgcataatatttccatgatactttttcctttgtaccgcgtggcattcaagcatagcagattagaagggatttttttt

SEQ ID NO: 2838 - DNA, 506 bp, Homo sapiens
  unsure (317): n=A,T,C or G
aaaaaaaaaagttacagaaatactataacatatgtacataaattgcataaagcataagtatacagttcaataaacttaactttaactgaacaatggccctgtagccagcacctgtaagaaacagagcagtaccagcgctctaaaagcacctccttgtcactttattactcccagaacaacaactatcctgacttctaatatcattcactagctttgcctggttttgtcttttatgtagatagaatcaatcagtatgtattcttttgtgcctggcttctttctctcagccttacatttgtgagattcctctgtattgngctgattgtggatcttttcattctcattgcagaataatgttctattgtgggacttattacaatttgtccatcctattgttgatgggcacttgagaactttccattttggcgctattacaaatagtgcaactatgaatgtactgcatgttaccatcttacttgagcctttaatggacttatctcttcaaa

SEQ ID NO: 2839 - DNA, 469 bp, Homo sapiens
aaaaaaaaaagttacagaaatactataacatatgtacataaattgcataaagcataagtatacagttcaataaacttaactttaactgaacaatggccctgtagccagcacctgtaagaaacagagcagtaccagcgcgctaaaagcacctccttgtcactttattactcccagaacaacaactatcctgacttctaatatcattcactagctttgcctggttttgtcttttatgcagatagaatcaatcagtatgtattcttttgtgcctggcttctttctctcagccttacatttgtgagattcctctgtattgtgctgattgtggatcttttcattctcattgcagaataatgttctattgtgggacttattacaatttgttcatcctattgttgatgggcacttgagaactttccattttggcgctattacaaatagtgcaactatgaatgtactgcatgttacc

SEQ ID NO: 2840 - DNA, 483 bp, Homo sapiens
aaatgtaagtattttaatgagtaaatagaattaaccttttttacaaatgaaatgataggcatctatgtaaagtgggaaaaatatgtttcgtaaatatttgcatctttaatattgttagtaagtagtaaacaggtgttttgctgattgaaaggaagttatcttggtaaattgagactcaaagtgaaatacaaaaatgaaaatatttataataggactcgacttggagaaattgctattcttcctgttgtccaaaccataaatctgaggataacctgggcttttctctttcctcttctcctaaccagtttttcaccaagtcctgtgccatttcacctcctaacgtctgtcagctatccttttgcctttacctcaccactattaccctagagaagactttcattatttctcatctggattaccagctcgatctctaatctgcttcagttcatccttcttgctacttctaggctaaacatcaaaaac

SEQ ID NO: 2841 - DNA, 395 bp, Homo sapiens
  unsure (157): n=A,T,C or G
  unsure (331): n=A,T,C or G
  unsure (348): n=A,T,C or G
aaagattctgaaaaacacaatttttaacgcttatgtagtccgccatcaaaacatcaatgtactgaagattttaagcagcatgaggcaccatcacgtttttgtttcttccccctcatttccccgcccctaccagatctgtttttgatgtttagcctanaagtagcaagaaggatgaactgaagcagattagagatcgagctggtaatccagatgagaaataatgaaagtcttctctagggtaatagtggtgaggtaaaggcaaaaggatagctgacagacgttaggaggtgaaatggcacaggacttggtgaaaaactggttaggagaagangaaagagaaaagcccangttatcctcagatttatggtttggacaacaggaagaatagcaatttc

SEQ ID NO: 2842 - DNA, 428 bp, Homo sapiens
  unsure (182): n=A,T,C or G
  unsure (375): n=A,T,C or G
  unsure (425): n=A,T,C or G
aaacattaaacaacaagtatataatcaaaataatcctgtattacttataactgaataactattttcaaagaaactttcctccctgatgaataagaatgcaaactccaagtgtatatagggtgctgtgagtgaagaagcttgagtttgccccatcagcttctgcaaggttatttttacatagnctcatgcttatttgtatggggaagttctttttcctggaaaagatttaactaagcacaaaactaaaatccagagcagggataagggaagaatgcaggtgttcttagtggaaatatcagcatcagggaatctttctcttaaacactggaactggtagagttgaagaacttctttttctcaatacttccatcattntttgtatccattcagcttgagggtccacacacacaattgacttgttcttnttc

SEQ ID NO: 2843 - DNA, 212 bp, Homo sapiens
aaacattaaacaacaagtatataatcaaaataatcctgtattacttataactgaataactattttcaaagaaactttcctccctgatgaataagaatgcaaactccaagtgtatatagggtgctgtgagtgaagaagcttgagtttgccccatcagcttctgcaaggttatttttacatagtctcatgcttatttgtatggggaagttcttt

SEQ ID NO: 2844 - DNA, 366 bp, Homo sapiens
  unsure (161): n=A,T,C or G
  unsure (256): n=A,T,C or G
tttttttttgttgtcccagatttattgaaaataatacagcactacagaaaaaattcaaacaggtccccgaggcgttttgaaattcatcccaactgtaggctgagtgacctgaaggttggacagactgccgaagtccaaaagcttcagcatttccttagtgncaggatctacttcaataatctcctgatccaaggctgagacctcaggaacataattgtctctcctttctctctcctcctcctgcagcttgatgganatacctcttactgggcctctctgaattcgcttcatcagatgcggtgacataacctgctatcttgttgcggagctttttgctggggataatggcgatctcctcgcacacgc

SEQ ID NO: 2845 - DNA, 337 bp, Homo sapiens
  unsure (117): n=A,T,C or G
  unsure (166): n=A,T,C or G
  unsure (186): n=A,T,C or G
ttttttttttgttgtcccagatttattgaaaataatacagcactacagaaaaaattcaaacaggtccccgaggcgttttgaaattcatcccaactgtaggctgagtgacctgaaggntggacagactgccgaagtccaaaaagcttcagcatttccttagtgtcanggatctacttcaataatctnctgatccaaggctgaaaacctcgggaaccataaatgggcttctcctttcttttttcctcctcctgcagctttgatgggagaataccctctttactggggcctcttcttgaaattcgctttcatcagaatgcggtgacataaccctgctatc

SEQ ID NO: 2846 - DNA, 263 bp, Homo sapiens
atttgaactcttcaatctcttgcactcaaagcttgttaagatagttaagcgtgcataagttaacttccaatttacatactctgcttagaatttgggggaaaatttagaaatataattgacaggattattggaaatttgttataatgaatgaaacattttgtcatataagattcatatttacttcttatacatttgataaagtaaggcatggttgtggttaatctggtttatttttgttccacaaggttaaataaatcataaaa

SEQ ID NO: 2847 - DNA, 163 bp, Homo sapiens
ccttcagcaatctatattaccagcgctggatcctttgacagagagtggtccctaaacttaaatttcaagacggtataggcttgatctgtcttgcttattgttgccccctgcgcctagcacaattctgacacacaattggaacttactaaaaatttttttttac

SEQ ID NO: 2848 - DNA, 139 bp, Homo sapiens
  unsure (20): n=A,T,C or G
ctgtttgcccttaggccagnacacagaattaaagtgggggagatggcagacgctttctgggacctgcccaagatatgtattctctgacactcttatttggtcataaaacaataaatggtgtcaatttcaaaaaaaaaaa

SEQ ID NO: 2849 - DNA, 106 bp, Homo sapiens
aaaactcttctaactgccatagcaccagcctccacaaaatacttcagacacatatcatcaattccaccagtggttagaataacattggcaccagcttttttttttt

SEQ ID NO: 2850 - DNA, 271 bp, Homo sapiens
  unsure (27): n=A,T,C or G
  unsure (61): n=A,T,C or G
  unsure (107): n=A,T,C or G
  unsure (121): n=A,T,C or G
  unsure (125): n=A,T,C or G
  unsure (142): n=A,T,C or G
  unsure (149): n=A,T,C or G
  unsure (163): n=A,T,C or G
  unsure (172): n=A,T,C or G
  unsure (194): n=A,T,C or G
  unsure (196): n=A,T,C or G
  unsure (220): n=A,T,C or G
tttattgatataccacattacatacanaaacattcatgtaaagctttttggattataacanataatttacataactgaggaataaaaccagctttactcctacccanaaaataaatttctncctncctccctggccaaaggnaaacaanatcctgagctaacnttgtaaacnaatattgtgcatttatacaaangnttttaaagacataaaaataaaatntatagacctgcccccagcttcaactactaatcatggaccacttccgcttca

SEQ ID NO: 2851 - DNA, 226 bp, Homo sapiens
  unsure (51): n=A,T,C or G
  unsure (53): n=A,T,C or G
  unsure (62): n=A,T,C or G
  unsure (76): n=A,T,C or G
  unsure (113): n=A,T,C or G
  unsure (138): n=A,T,C or G
  unsure (141): n=A,T,C or G
  unsure (167): n=A,T,C or G
  unsure (169): n=A,T,C or G
  unsure (172): n=A,T,C or G
  unsure (205): n=A,T,C or G
  unsure (212): n=A,T,C or G
  unsure (219): n=A,T,C or G
  unsure (226): n=A,T,C or G
ttttttttttttttttttttcgtttttcttcatgttatttattttccaatnanaaatgacanattcattatcaaanacatcatttaccattttctcctttgtacttcttattngcatacttcttatctcgcccattanagnaaaagcatcttaagtataccttaaangncanatttatcttggtatgccccacagcaacttactnatagtanatacttnaatattn

SEQ ID NO: 2852 - DNA, 153 bp, Homo sapiens
cctagaagtatcacacatgacttgaagttgggcaacttcagtgttttaattaaattcagacagaaagcaatccccaagatatcctgtaaaatccaagcccacctgtcttcatttcgaaacacagcccaaacaacagctactgctatgcacagt

SEQ ID NO: 2853 - DNA, 401 bp, Homo sapiens
  unsure (1): n=A,T,C or G
nccaatgggtttaagtctcatctcattcgtctgattggaaatctgtgttacaagaataaagataaccaagacaaggtaaatgagctggatggtatcccgttgatcctggacaactgcaacatcagtgacagtaacccctttctgacccagtgggtgatatatgccatccgaaaccttaccgaagacaacagccaaaaccaagatttgattgcaaagatggaggaacaggggctggcggatgcatccctacttaaaaaagtgggttttgaagttgaaaagaaaggcgaaaagctgatcctgaaatctactagagacacccctaagccatgaatgaactacatccaaatacctgaatttttggaatctgtttcatggatttttcatcttctaccgtatgtgaa

SEQ ID NO: 2854 - DNA, 154 bp, Homo sapiens
ctgttatggatacagtctatacaaaatgagatcctttcataagcttgaagattggggtttcacgctcatgtgtgagatgtccctctctcaaaccttactatgaagtcagcaccactgggcacattacttgtctgacatgaaggggaaaaaagaa

SEQ ID NO: 2855 - DNA, 164 bp, Homo sapiens
  unsure (164): n=A,T,C or G
aaagaattgggtgaccacgtgaccaacttgcgcaagatgggagcgcccgaatctggcttggcggaatatctctttgacaagcacaccctgggagacagtgataatgaaagctaagcctcgggctaatttccccatagccgtggggtgacttccctggcaccaan

SEQ ID NO: 2856 - DNA, 339 bp, Homo sapiens
ctggtatttgggtgaatgttgttgctctgtgcctgttgaatgtccatgctacaagaagttatgagccttgttctaagtacagatgaaccttgtatttgtgtaatctcccaagggagagctatggtttacattcaattttttggtctttctgctatgaaacgtgtttattttgcctctgtcaatgtgtttgcaaccttaagtaaggaaagggaaaaaaaaaatagccctctgaactctgatcttttgccgcttctgtagattttgattgtgaagttgggagtgaggacattcaaaagcccatggtgaatgcatatgcctttagaatattgtgcctgtttt

SEQ ID NO: 2857 - DNA, 174 bp, Homo sapiens
ctggcctccagatccacatcaccactcttccactcgattgttcccagatcctccctgcctggcctgctcagaggttccctgttggtaacctggctttatcaaattctcatccctttcccacacccacttctctcctatcaccttcccccaagattacctgaacagggtccatgg

SEQ ID NO: 2858 - DNA, 359 bp, Homo sapiens
  unsure (303): n=A,T,C or G
  unsure (357): n=A,T,C or G
ctgtggaacacaaggggagtctcagcatctggtccttgatttggttttttcattgtttccttggcccctgtatccagatattggacttactgctatacttgtgatactgggtagcccagactttgaaggtgctttgtgaggtttggactcatgctgagaaacccacaggaaagcactgtccaggtaggattagaggcttcccacttaaaactatttctgagaaatcttaggttttatcactgctatggtttcccatatttacttgggactgttctgactttctttttccagcccttagcttgngttagaaaagtggacatgtaagtgaacaatgcattacttctaccttaggtttanga

SEQ ID NO: 2859 - DNA, 374 bp, Homo sapiens
  unsure (373): n=A,T,C or G
aaattttaatattctacatgaaaacttacattgggaaatatgcagacaagtgattatattccaaattttacccttattttaatatctaaaatattgggtatgatgcaaattatactatagaatatttatctgaaatatgacttactggggtattctgttaatactatatataaatattcagaatttttttcaaaagtagaaaaattcccctctaaaagtacagccagatagattttcatccatattgaggaacttagctttttcaacaagcttcagaatctgaagtctgtagaatctaaaatacagaaatatccagaaatcagacaataaattgaaagtttagacatcatgagtattaaatagctttacctcnc

SEQ ID NO: 2860 - DNA, 308 bp, Homo sapiens
aaaaatcctattatgtaaaccttaacataagagggtagttaagataatactacaagtttcagggcgtttccacagacttctagaccttatgtacacacagactatcagactctagatatgcggcctgcttacccttaagggggtgcactgggagcccgatcatgggcgccccctagtggggttaccatcgctcctccattcaaaaagactcgcttctctaagaagtcggtgtcaggtgagtaagcgttctacctgacggctaagccagggatgaagagaggccaacattcttcttaggatgagtcctg

SEQ ID NO: 2861 - DNA, 454 bp, Homo sapiens
  unsure (453): n=A,T,C or G
gtgcccagcaagcccattgaccacagcaccatcacttcctgggtatcacctgattttgatacagcagcaggaagcttgttcccagcctaccagaaacaccaaaactgggcgagacactcaagtcgaaaacctaccacctccaagtttccacatctaacttttgagagtccgcaatcttccagttcagagacattggggatccccttaatccgagagtgccccagtgaatcagaaaaggatgtttccagaagacccttagttccagtgctcagtccccaaagctgtgggaacatgtcagtgcaggcacttcagagcttaccttatgtgttcattccacctgatatccagaccccagagtcatcgtctgtgaaggaagaactcattccccaagatcagaaggaaaacagccttctaagctgcactcttcacactggcactcctaataacccaganc

SEQ ID NO: 2862 - DNA, 194 bp, Homo sapiens
aaaagtttttatttacctaaaaacataaatttatcaaacatatcaatttgctttacagagcaatttacataaaaattcatgatgtataccaacgacagcatagcattatctacctcagtttgtgaagcatcctttcctacagatctcagcaaaacgcagagccagtaggggaaattcaagctttcatttggggg

SEQ ID NO: 2863 - DNA, 233 bp, Homo sapiens
  unsure (158): n=A,T,C or G
ttgaggaacgggaacaaagattatgatagctttccgaccaccaccaacttcaatttccttagctgccgtaatattcagctccctgagctgagccttgaggtccgagttcatctccagctccagaagagcctgggagatgccggactcgaactcgtccngcttctcgccattgggcttcacgatcttggcgctcgaactgaacatggctttctcctgggagaacttgccgagcg

SEQ ID NO: 2864 - DNA, 243 bp, Homo sapiens
  unsure (137): n=A,T,C or G
  unsure (195): n=A,T,C or G
  unsure (211): n=A,T,C or G
  unsure (217): n=A,T,C or G
  unsure (241): n=A,T,C or G
ctggtgtgggaagtttcttgctcgcctccaaatccccagtgcctgtcacataggggctgacttgaaccaggtgctaattatagacccccgttgggtgaatgagccctggtcagaaaacactgccttcctccatgcanatgggccctggaggctgcatccctggggtacctgactttgaggtgccaccgggcagancccatcactggtgcangagcanagggaggggatccagggtacctgnga

SEQ ID NO: 2865 - DNA, 403 bp, Homo sapiens
aaaaaatataaattatatgaaaatacaagttggaaaatagtcaaacacaatataacatctttttcatccctatacttctcagcttaaaaaaaaagtattcttaaaaaaaaaagttcaataactgaggcagtattcctgataattttattttaatatatatattttatatatgtatatgtatacatatatttatggttccttgaaacttctttggaatgtaggtaagagttcaacaaatttatatagaccccaacagagtaagcggcatgcacagcatgactagaagagagatggtgtatttctcaccatgaaggttaggcaggttaatgctgtaaaacccagagtgttcatctccaaagtgaggaaaagcacatctgatctttgaatgctacctccaatcccc

SEQ ID NO: 2866 - DNA, 236 bp, Homo sapiens
  unsure (148): n=A,T,C or G
  unsure (181): n=A,T,C or G
  unsure (199): n=A,T,C or G
aaactttttatttgcatattaaaaaaattgtgcattccaataattaaaatcatttgaacaaaaaaaaaaaaatggcactctgattaaactgcattacagcctgcaggacaccttgggccagcttgattttactctagatttcactgtncgtcccaccccacttcttccaccccacttcttncttcaccaacatgcaagntctttccttccctgccagccagatagatagacagatg

SEQ ID NO: 2867 - DNA, 328 bp, Homo sapiens
aaattacaaagtaataaaaagctttgctctttaattaaaaaaaaaaaggaaaaaggggaaacagaggtaaataaattaggaaaacacacacacggagaaaacaaacaaaaataaaataaaataaaaacaaaaaggtgttaactaggaaggatgggttaatccaaaacccagccctgactccaggctcctcctcagaaaggtggaaccagggagaggggggaccccaggtgactgtcaggaccagggaagtaatttataactcagagccagatgccttctggaagcagtctccatggattctgccctaaaaccaggaatggaagatgga

SEQ ID NO: 2868 - DNA, 430 bp, Homo sapiens
  unsure (405): n=A,T,C or G
  unsure (422): n=A,T,C or G
aaaaattatacatattgtacattttcaaaacctgcacatgagtaaaaccatggcaatattgtcctaaagctacctaactgtgactatggaaattgctactttgcattcagtgttgtgggatttgcacgggcagtactcattttccctcatacttcggattgaccacagttgttacggcactcttataaataggattttcacccgtgtcccatttggcattcattttctccttttcaaatttagcaaactcccttctgtcatgaattatcattaaaagcttccatatcagcagtaatgcaaggccaataagaacaattccagcaaccacaccagctacaattggaatgatgtctggaccagtgggacactctggattctccacaacatgaaccatgacctcgttgntcccattcctgaatacngtaaaata

SEQ ID NO: 2869 - DNA, 405 bp, Homo sapiens
ccatcttatctctgtcttcaagcattcctcagctttctctttccagaacaggattatgaaccgacaccatacagaggtatttgtaagaaagaaggtggatgccggaatcctttcttcaaacagaagcttaccagtaagtgcagactaatacaacaggcggtaaagagaagaacagagaaagcatcctgccccagccctgccccagagctaaacgtcattctagagaatgaaaaattccatctccacccagtgggttctcagaattccagagagattggaactacagcaaaggtatgaacaggtgtcacggggacacagaagaaagagcagttactcttccggaaggttggagaagattttgtgaaggtggggatgtttgatttgaaccttgaagaacaagcagag

SEQ ID NO: 2870 - DNA, 403 bp, Homo sapiens
cctggagcctgcctcccgggctgagggctcagctctggcctccggctggatgccgtctagagtcctatgtgctcataggtctttttctttcagtaaacagtataaaacattactattttcctttgattgtaaacttcaacagaaaataacatacttaaagaattttgctacaaagagtactatgatttttattgcctcaccacctttagaacatttccacttcacaagtttctgatttgcttcactttcttacttggcgatggcgccctggcagcatcatccacacataccagtgcgtatggagaaatgggctgtaggcccttcctgcgtggtccatggctctgccttcatggaacaggctgagtcatgtctctgctcaagctcaaaccatctactctcaagt

SEQ ID NO: 2871 - DNA, 451 bp, Homo sapiens
aaataactttcttaaccctgcccattaagatcacagtaaacatacaataatttttattatggaaattaatctttacatacaaaatcagctacgtaattttacttacaaaacaataaaaactgttctttactgtggcaacaaaagaagcattttgacaaatgaaaaaaattaatgcaaacaaattaaaacaatgcttttctttttacttgcttcactgtctcttctatttattttctatgatcatttgacacaaacatggattactttgatatctactgaaacataaatgataaggttcttaaaggttgaattaaaagtctgggtgttcaatattttagaagctgaataaacaaaacgaaattggggtttgtgattacagaggatttatcattttttccctttgcccatatgaaaatatataatagaaaattacccacgggaaaacattttt

SEQ ID NO: 2872 - DNA, 265 bp, Homo sapiens
  unsure (180): n=A,T,C or G
  unsure (257): n=A,T,C or G
aaacttgatccaacctctttgcatcttacaaagttaaacagctaaaagaagtaaaataagaaggcaatgcttgtggaatgtacagtgcatattggcggcgcacgcctcattacgattcgcctgcttgcttctcctgttcaatcgtttctttggaaggcaggtggatttttctcttgcgtntctgtcttcttcagtttcgacttatcgaatttctcgatctcagccatatctgggtttgtcaagacatggttgcggangaaaagcg

SEQ ID NO: 2873 - DNA, 436 bp, Homo sapiens
cctcagaggaattcgggaatgacacgtcttctgatcccatgagacagaacaaagaacaggaagcttggttcctgttgttcctggcaacagaatttgaatatctaggataggatgatcacctccagtccttcggacttaaacctgcctacctgagtcaaacacctaaggataacatcatttccagcatgtggttcaaataatattttccaatccacttcaggccaaaacatgctaaagataacacaccagcacattgactctctctttgataactaagcaaatggaattatggttgacagagagtttatgatccggaagacaaccacttctctccttttagaaagcagcaggattgacttattgagaaataatgcagtgtgttggttacatgtgtaagtctctggagttggatgggcccatcctgatacaagtttga

SEQ ID NO: 2874 - DNA, 328 bp, Homo sapiens
aaattatttgctgtttctggctcagatttcaaccttttttccccctttttaagacaaaaataagtgtgactttctggtcagggtgattgtagaggaagggtcatgatactgaaataggacttggttaaaataaagagttgagagtaagagactaaagacatatgccaaatgtttgtaataaaattaaagagaaaatataaatatatacaaaatccaaaatgtcaggataatgaaatcaaagcatttttagtattatcactttgggtactttagtagaattgcactcgtttatgattttgaagtttgttttacaaataacatccaattt

SEQ ID NO: 2875 - DNA, 294 bp, Homo sapiens
  unsure (191): n=A,T,C or G
  unsure (212): n=A,T,C or G
  unsure (279): n=A,T,C or G
  unsure (293): n=A,T,C or G
cctctccaacttccgaagcttcaccttcttgagcttcttgcctggtcggccttcctcacccctcattaactccctgtgattccaatagctctgcttgaacaggtcgtaatcctggatctccacatcctcactctcccaagaagcctgatcgtaaggtaagtcccgccacttgatcaagtagtggacgtggnccttcttgtccacactgtggntgaggattcggtggatcatcatccactcgggttttatcccatagcgatagaagcgttcctccatctntgcaaatttagggnc

SEQ ID NO: 2876 - DNA, 334 bp, Homo sapiens
aaaaagcaacccccatgtatgcctatatgtgtattgtatactttttttacataattggagtcatactgtaaacagttttataagtagatctttttcattgcaaaattgccacattttcttatggcattaaaaattttacaaaaacataattttaatggctatattatattccatttaatggatgcaactcagtttatttaaccattcccatgttgttaactatttaggttgtttctaattttcattattataaagttgcagaaatttggtgtacataaaactgtctccatataattgattattaggatatattcccatgaaggattcttttttt

SEQ ID NO: 2877 - DNA, 408 bp, Homo sapiens
aaaagccctttccaaaggtttcaactgtaaaatacttctttttacaatgtatcaacatatttttatttaaggggaattaacaattgccagggaaaccagccaacccaagtttattatatcattaaccttatcataaattcaaacctaagttgctggaccctggtgtgaggacataaatcttccaaagttttgcctatcctaagagctgcatttttctactgctctttaccttgcattttagctaatttaggagttttgagaatgtattggatacgctccagtacataaggagttgccgcatattatatcagactgctttgagaaatctcatccctagtctattgcagttgtttctattagcttactgattaactcagtcctgacacaccttttgggaaatgctgattt

SEQ ID NO: 2878 - DNA, 426 bp, Homo sapiens
  unsure (151): n=A,T,C or G
  unsure (322): n=A,T,C or G
  unsure (339): n=A,T,C or G
  unsure (346): n=A,T,C or G
  unsure (425): n=A,T,C or G
ctgggataattctgcctttgctttccatatggatgctccaattcatcagtatggggacactcatgaatcacagagctatgttcctgataattctgggtctgcaagaggatctgggagtaaataacaatcaattttcttaaagatatgctanaaagtagttagtacttccaatttctcatccaaatcccaaaaagggccagccctgagaagcttacctgaaatatttctttccttctctcatggaagtccataaaagccacccctcctccttatcctttcaactgggcaactatagagtgagggagattctaattgtattagncactttccctcactagntagatgntgacttttcctctaaaactccattttcagattccccctcacagccagcagaaagatgactaccttgcttgactatggtng

SEQ ID NO: 2879 - DNA, 443 bp, Homo sapiens
  unsure (23): n=A,T,C or G
  unsure (94): n=A,T,C or G
  unsure (120): n=A,T,C or G
  unsure (145): n=A,T,C or G
  unsure (169): n=A,T,C or G
  unsure (260): n=A,T,C or G
  unsure (314): n=A,T,C or G
  unsure (362): n=A,T,C or G
  unsure (365): n=A,T,C or G
  unsure (380): n=A,T,C or G
  unsure (428): n=A,T,C or G
tttttttttttttttttttttgncaagttaaccaattttaatggaaccaagtaattacacaataaaattttatattcatccacaaaaaaacatnttgcaacctttggaaattgtagaaanaaaaccgtggggagcatatccttgnggagcatctctggttgtaactagngattagcattttggtcttttgacttcaaccccatcagcttccatcttcttcctcttctcaatgattgcactaatcttcttccactggcgancaagctctgctttgtcattggtttccttgaagcgcctggttttccgcccttcanacattttgataccatactggaatgcagccttgggcaaagcttctttgntgntcatatactcgctgnattcttcctgggtatcaaagtcccaacggcctaaaggccccttcttgntaccctgggccattt

SEQ ID NO: 2880 - DNA, 383 bp, Homo sapiens
cacagtgcttgatatttcagagtcagtcattggttatacatgtgtagttccaaagcacataagctagaagaagaaatatttctaggagcactaccatctgttttcaacatgaaatgccacacacatagaactccaacatcaatttcattgcacagactgactgtagttaattttgtcacagaatctatggactgaatctaatgcttccaaaaatgttgtttgtttgcaaatatcaaacattgttatgcaagaaattattaattacaaaatgaagatttataccattgtggtttaagctgtactgaactaaatctgtggaatgcattgtgaactgtaaaagcaaagtatcaataaagcttatagacgcaaaaaaaaaaaaaaaa

SEQ ID NO: 2881 - DNA, 326 bp, Homo sapiens
  unsure (89): n=A,T,C or G
  unsure (92): n=A,T,C or G
  unsure (136): n=A,T,C or G
  unsure (144): n=A,T,C or G
  unsure (153): n=A,T,C or G
  unsure (161): n=A,T,C or G
  unsure (168): n=A,T,C or G
  unsure (172): n=A,T,C or G
  unsure (202): n=A,T,C or G
  unsure (206): n=A,T,C or G
  unsure (278): n=A,T,C or G
  unsure (287): n=A,T,C or G
  unsure (301): n=A,T,C or G
  unsure (322): n=A,T,C or G
ctggactgctgtacatcaaggacagattaactggaaaacatatgttccttatgtgtgattgagagccattcacaaaagacttcctttgngtncagcctatacttttccatatggtataccttgaaaaaaattagcncaccatgnttattcttntacctttnataaaanacanagcctgtttactcatttagaagatacaganaatnggtctaaaattgaacatcctagattcacactcccaactcacttaaggagattcgatggtgaggaaaatgatntgacaaagnccaacaatgatctncggaatcacattttccaacanacca

SEQ ID NO: 2882 - DNA, 460 bp, Homo sapiens
aaacctggtacaagttaaacaacatctttctcatacccacatgattaagtatgtattctgacaggatataaagaagatgaaacacaagctggtgggtctcagaattagaaactctaatgcaggaccagatcccaaaagctatgttttctatcacttttgtgacatttaggaaacatttaccttgcataaaatataaaagcttttccttttaattatactgtttgtacaaaaaatcactattgagggaaaggtccaccatggctgtatttatctataattcactgtagtatatataaagttcacttggaagttggaaatgtggaaactataatgaataaacaagctgagctgtaattgtgaattttttactgctaatttagaatgtccaactcactcctacagatattacaacttacaatacatgacacacacaaaaaacatgtcaaactttgctgtagag

SEQ ID NO: 2883 - DNA, 502 bp, Homo sapiens
aaaaataaagaaaaaaataccacgactctttgctaatggcttttaagatttgcagacacagctaaatactcatctaacaaagtatccaggctatccaactatattgccatgaattcataagacagtaacacacatttataatataaaagtagtcaaaaaaataaaaagaaacagccacaggtaatttagggctaaaatgagtcctaataagggttacatgagaaataacatataagaccccaaataaattttagatacaaaattaaatgatgtggctttgttcaaacatacctaaaattcaaaatcaagttaaatacctaggctggcttttttatatcaccagctttcattagggctttaatcgctcttgccctcatctcaagttctagcagctccagttgctgtgcagaaggttgaacatcttctggtggaggaacagccagggtggctgctttgggttcgtttgggctagactctgccagtcctagaatctcattccact

SEQ ID NO: 2884 - DNA, 302 bp, Homo sapiens
ccattagctcctgtagctagttcctgtcttttccaaaacctgttttttttttggctttttggtagatgctgtggctctcttatggcctccaataaacataagtgaggcagagttggtttctattgtttgcaaccaacgaacttaatggattctgtattagaaagaactggtatatttctttaagcaaagactaggactctatggggctcaacaaactctgtaatcgcctttccactcccctggacaaaataaatatattgtctactgctgaaacgcaaattatccccaaaccaagtagcttt

SEQ ID NO: 2885 - DNA, 271 bp, Homo sapiens
  unsure (164): n=A,T,C or G
  unsure (172): n=A,T,C or G
  unsure (221): n=A,T,C or G
  unsure (231): n=A,T,C or G
  unsure (237): n=A,T,C or G
ccatcatgtttaagttgaggaaaactcagttcttaaattatctgggaagggtctggattctctatttttgagattgactttatcacaatatgattcttacatctttataccatttacaattgtgttttagatctacagagttagaaattcgaaaactattccangactaatncttaatcgggcattatttatacaagaggtcaaggaacatttactaaccncaatactgcncttgtnaatgaattataaacgctccttctggaatatattt

SEQ ID NO: 2886 - DNA, 308 bp, Homo sapiens
  unsure (76): n=A,T,C or G
aaagatcagatttatttggagaaaacaaaaaacccacaacccaaaggatgggattttacatcaagacatctcccangtaataagtctacagattacaaatcattttcatagaagatatttttgtacaaattttacatgtattcaggagcgggacattaatcaatccctgtttctattttaataggggggacaaggtaggggagagggaaaaacagttttggatataactatttggaaggagagtagacatgaagagggcaaaccctagcttttcattatctacaatcaatagtttgtttttctttttt

SEQ ID NO: 2887 - DNA, 148 bp, Homo sapiens
  unsure (80): n=A,T,C or G
  unsure (113): n=A,T,C or G
  unsure (122): n=A,T,C or G
aaaatgttagtaacaccaggttcaaatccttttccaatgaaaactcctggtgtcaggtgataaagaatgatgttttgaanagcatttttgtcccgtatcagaatttctttttnttcactagncattcccttaaaagcatcattggttg

SEQ ID NO: 2888 - DNA, 196 bp, Homo sapiens
  unsure (23): n=A,T,C or G
  unsure (24): n=A,T,C or G
  unsure (31): n=A,T,C or G
  unsure (32): n=A,T,C or G
  unsure (38): n=A,T,C or G
  unsure (49): n=A,T,C or G
  unsure (64): n=A,T,C or G
  unsure (127): n=A,T,C or G
  unsure (133): n=A,T,C or G
  unsure (134): n=A,T,C or G
  unsure (137): n=A,T,C or G
  unsure (187): n=A,T,C or G
ccatggatgtgccccaatacagnncacattnnttgganaaatgtgtttncagatcatttaatgnaatctttgaagtatctttgactctaactttgacttggtggtggaccttccttggtttttatancacctnncanatatcctttagaattacatgtattttagcataaggaaatcgaaaaagtanaacatactg

SEQ ID NO: 2889 - DNA, 303 bp, Homo sapiens
  unsure (158): n=A,T,C or G
cgagccttgtatgtatgttatggatacataaaatgcacgcaagccattatctctccatgggaagctaagttataaaaataggtgcttggtgtacaaaactttttatatcaaaaggctttgcacatttctatatgagtgggtttactggtaaattatgntattttttacaactaattttgtactctcagaatgtttgtcatatgcttcttgcaatgcatattttttaatctcaaacgtttcaataaaaccatttttcagatataaagagaattacttcaaattgagtaattcagaaaaactcaa

SEQ ID NO: 2890 - DNA, 317 bp, Homo sapiens
  unsure (315): n=A,T,C or G
agtccaccttggcacaaaagccttgtggtatagaaaaacaaatttgtttttatgtcctcttctccctttccatctttcagcatagacttaactcccttaagcccagacatctgttgagacctgacccctagtcattggttaccagtgtgtcaggcaatctggactttccagtgatgccactgagatggcacctgtcaaaagagcagtggttccatttctagattgtggatcttcagataaattctgccattttcatttcacttcctgaaagtcagggtcggcttgtgaaaagttgttaaacaacatgctaaatgnga

SEQ ID NO: 2891 - DNA, 364 bp, Homo sapiens
  unsure (1): n=A,T,C or G
  unsure (5): n=A,T,C or G
nggcnggtaaatatagcaaagcagtgtcttcttgcacagcaaagtgaagaaagtttctacagagaaatagaagttttacatttgtaaaatctttttcacattctaatcatctagcttaagatccaatgccaggagttttcagcttccttatttactatgtatttcttgtgcgcatgatggttaatacagaaattatgttgatgcattactagttatccttctagttaaaggaaagggtaaaacatgtattgttcttgtagaacaaacccctgatttagtctataacaaaatggacataattgggctcaaaagatggagttttgattgggaccacctgtgtacacacaacagtgacttccactcg

SEQ ID NO: 2892 - DNA, 359 bp, Homo sapiens
cctgttctctctttacatcttcagacttaaattctgtagaaggtaacagctttgtattaagacagaagcttagtggtcacaaacaaaaaataacactgaaatacaattcggaaattaatgatactgtgtgtctcaaagaatacctgaactatacattcactaataatttggcaatgagattccatgctgttcaacttttgtcttttatacccacacgtagaaaaaaaattcatgatttaccccaaggttattattaaatatcattttgtgatatgaactttagtaatagaaattaataacatttcccataccaacagaaagtaagttgctagaataaaggaatcatttttcccatcagg

SEQ ID NO: 2893 - DNA, 362 bp, Homo sapiens
  unsure (318): n=A,T,C or G
ctgaggcaacagaataaatgcagaggcattacaatgaatcccacttaatataaagaactatacagaccaacacttctctacaaaatttttttttcctcattgccagttaaatacagagttttactttcatagcttaacaatgaagggtcatacactgaagccaatacatatacctagcatttcagtctaagcttgtgcacgtacatagctgaagtcaattacaaggtttggcctagaaatgctaggggaacttctttgtagtttttacaggtattaaacttcatcttgcacactgaagtcatcatacatacagggcanaatcagagcttttatatttgcgtttattcttcatttaacttttt

SEQ ID NO: 2894 - DNA, 385 bp, Homo sapiens
  unsure (383): n=A,T,C or G
aaagaatttattaagcctgttataccacacagtatgttttatacactgacatacaactccctaataagataaagcaaagacaaaaaagtttatcttattagaaacaagatacaccaccacttattgtcttcaaacattattgcactttaactttcttaatttgacaaagcattcaagaaacatctgcggactagttttaacagacaaataacacctgtaagcagacatgactgtcctaaattgtttattaagtatgaattttacaaactttacttatattagcggtaacggtggagctggagagtattgcgccttctccaagctgcccggcgagagccaccaatagtgtggtggaacttgtggccctttccaaggccaccggntc

SEQ ID NO: 2895 - DNA, 338 bp, Homo sapiens
  unsure (7): n=A,T,C or G
  unsure (22): n=A,T,C or G
  unsure (26): n=A,T,C or G
  unsure (35): n=A,T,C or G
  unsure (43): n=A,T,C or G
  unsure (157): n=A,T,C or G
  unsure (166): n=A,T,C or G
  unsure (181): n=A,T,C or G
  unsure (195): n=A,T,C or G
  unsure (209): n=A,T,C or G
  unsure (259): n=A,T,C or G
  unsure (297): n=A,T,C or G
  unsure (302): n=A,T,C or G
  unsure (304): n=A,T,C or G
  unsure (311): n=A,T,C or G
  unsure (320): n=A,T,C or G
ctgtcangtggcccaataacgnaatnggactccgnccccttgncagtgccactggctgttcctggctctagttcccaggggagcctcaaactggggcctagcccagaaagccaccggctagcatcacatagcttctccagctcaaatagcccaaggngtggcatgnctgcccgacctccanagaataaccggcantcaccgtgcccagncaacacatgctcgtgctatggggagaagcctctgctgggtgacccaccanccaaccctgggcgcaattttaattttagataaaatgcntcaangntcaaacngccacaggnaaacccctgatgtaacac

SEQ ID NO: 2896 - DNA, 241 bp, Homo sapiens
agagcccagaggtaacagaacagcttcaggttatcgaaataacaatgttaaggaaactcttatctcagtcatgcataaatatgcagtgatatggcagaagacaccagagcagatgcagagagccattttgtgaatggattggattatttaataacattaccttactgtggaggaaggattgtaaaaaaaaatgcctttgagacagtttcttagctttttaattgttgtttctttctagtgg

SEQ ID NO: 2897 - DNA, 156 bp, Homo sapiens
  unsure (4): n=A,T,C or G
  unsure (28): n=A,T,C or G
  unsure (29): n=A,T,C or G
  unsure (45): n=A,T,C or G
aaancattcctttctttaattttgtaannctttactgtggaatanctcaaaatgtcagttctgttttaagtaacagaattgataactgagcaaggaaacgtaatttggattataaaattcttgctttaataaaaattccttaaacagtgaaaaaaa

SEQ ID NO: 2898 - DNA, 50 bp, Homo sapiens
ataaagtaaggcatggttgtggttaatctggtttatttttgttccacaag

SEQ ID NO: 2899 - DNA, 267 bp, Homo sapiens
aaactctagatcagaattgttgacttgcattcagaacataaatgcacaaaatctgtacatgtctcccatcagaaagattcattggcatgccacaggggattctcctccttcatcctgtaaaggtcaacaataaaaaccaaattatggggctgcttttgtcacactagcatagagaatgtgttgaaatttaactttgtaagcttgtatgtggttgttgatctttttttttccttacagacacccataataaaatatcatattaaaatt

SEQ ID NO: 2900 - DNA, 262 bp, Homo sapiens
cctttttcttgggatgattttctagtcttaaggtttggggacattataaacttgagtacatttgttgtacacagttgatattccaaattgtatggatgggagggagaggtgtcttaagctgtaggcttttctttgtactgcatttatagagatttagctttaatattttttagagatgtaaaacattctgctttcttagtcttacctagtctgaaacatttttattcaataaagattttaattaaaatttgaacttttcaaa

SEQ ID NO: 2901 - DNA, 427 bp, Homo sapiens
ctgtagctttttcattcagaaactggagaccatcttttcactgagttgttattccttcctcttcccttagcttagggatatgttgaaaaaggcttttcaacaagtattttattttttacaagttgctatgaaattaaaatttatatatatatcttaagtgtttataaagcactcaaaattgtagcttacatgtatatgacttctgaaaataaaaatcacacttctaacataatctttctgctctgcaaaaatattctacatacatgcatatgatcaaaacaatcttttcatgtttggggtatttcttacacatagtaaaagaaaagtcaacaattgtatcagtacttcccctgttaagataactgagtgccacctagtgttcaatttctgcaactactaagcttacaaattcaatactgctattaaa

SEQ ID NO: 2902 - DNA, 432 bp, Homo sapiens
aaaaatacttacacagcttaaaaaaacaaaaacattaaagtcgtagagaccaattattaagcgtataggaacatgatattcatgtatcattaaaacgtagagaccaattattaagcgtataggaacatgatattcatgtatcattaaaataaggattctttcaagatctgtttcctatctcagtctaaatcaggggtctggagttgtggccttaaaaaactagcctcaaacggctccatgcatgcataatagctttatatgtgttccctttgttggtccagttacctgatttataattcttccttacctgaatgactttagaaaacacattaatattgccttaggaattaaatcaattaaacactgatgatcagctacatttatcgtgtaatttaatctgcttttttgtatattagcttttacatatagaag

SEQ ID NO: 2903 - DNA, 243 bp, Homo sapiens
ctggtgaagaggatacagcagaaaaagatgagttgtagacactgatctgctagtgctgtaatattgtaaatactggactcaggaacttttgttaggaaaaaattgaaagaacttaagtctcgaatgtaattggaatcttcacctcagagtggagttgaaactgctatagcctaagcggctgtttactgcttttcattagcagctgctcacatgtctttgggtgggggggagaagaagaattgg

SEQ ID NO: 2904 - DNA, 415 bp, Homo sapiens
  unsure (411): n=A,T,C or G
cggggactaactgcaacggagagactcaagatgattccctttttacccatgttttctctactattgctgcttattgttaaccctataaacgccaacaatcattatgacaagatcttggctcatagtcgtatcaggggtcgggaccaaggcccaaatgtctgtgcccttcaacagattttgggcaccaaaaagaaatacttcagcacttgtaagaactggtataaaaagtccatctgtggacagaaaacgactgtgttatatgaatgttgccctggttatatgagaatggaaggaatgaaaggctgcccagcagttttgcccattgaccatgtttatggcactctgggcatcgtgggagccaccacaacgcagcgctattctgacgcctcaaaactgagggaggagatcganggaa

SEQ ID NO: 2905 - DNA, 199 bp, Homo sapiens
ccatggagaagggcaggcatatggagtatgaatgcccctacttggtatatgtgcccgtggtcgccttccgcttggagcccaaggatgggaaaggtgtgtttgcagtggatggggaattgatggttagcgaggccgtgcagggccaggtgcacccaaactacttctggatggtcagtggttgcgtggagcccccgcccag

SEQ ID NO: 2906 - DNA, 327 bp, Homo sapiens
ctttttggttgttatttggctatacagttttatgctttaaaacaaatgataaagttaatttccaattcaatagtgaaatattaacaatctaactatagccagatcaaagacacctgaacacagaaaacctttatttgctggtgctgccattgcacaggctgtacaatgaaatagatttgaaaagctgattgattttcccgcacataaattctggatgtcaatttccaaccaaactccaatccagctatgtggcatgaagagttacaggagggagggaggaaaatagccctatgttagtcatgtttgcatacagaggatcaaagtagg

SEQ ID NO: 2907 - DNA, 414 bp, Homo sapiens
cctggatatggtgaacagagaaactgcacatgaaagggaaatgcaaacggcaatgcagataagccaatcatgggatgagagcttgagcctgagtgacagtgattttgacaagccggagaaattatattctcctaagagaattgacttcactccagtttctccagcaccttcacccaccaggggattcggaaagatgttcgtgagcagcagtggattgccaccaagtccagttcccagtccaagacgattttcaaggagaagtcagagtccagtcaagtgcattagacccagtgttcttggtcctcttaaaagaaaaggtgaaatggagacagaaagtcagcccaagagactcttccaaggcactaccaatatgttatctccagatgccgcgcaactgtctgatctcagttcatg

SEQ ID NO: 2908 - DNA, 422 bp, Homo sapiens
ccatggatgtgccccaatacagtacacattttttggttaaatttgttttcagatcatttcatggaatctttgaagtatctttgactctaactttgacttggtggtggaccttccttggtttttataacacctaagagatatcctttagaattacatgtattttagcataaggaaattgaaaaagtaaaacatactggtttttttcaacaagaccatatgtaaattaaatagtgaaatgtgtatgagtttcagtagaactgtaccatcaacaatgtttccataaatatgcagagttctttcttttgtattgttatttacaatattgttaaattgaatgcatttgcaatttctaggattctaaagaattgagtacagaaagtagcaattttattatttgatgataatatgagaattactgtgcc

SEQ ID NO: 2909 - DNA, 352 bp, Homo sapiens
tcaagacccacggactcctggtctgagcccaataaagactgttaattcctcatgcgttgcctgcccttcctccattgttgccctggaatgtacgggacccaggggcagcagcagtccaggtgccacaggcagccctgggacataggaagctgggagcaaggaaagggtcttagtcactgcctcccgaagttgcttgaaagcactcggagaattgtgcaggtgtcatttatctatgaccaataggaagagcaaccagttactatgagtgaaagggagccagaagactgattggagggccctatcttgtgagtggggcatctgttggactttccacctggtcatatactctgca

SEQ ID NO: 2910 - DNA, 151 bp, Homo sapiens
ccatgtatgtgcatgcatatacactctacagtgctgttagaccttttggctgcagtttcatgttagggtcttacagtgtgaatgacggtgcgcaactctacatgattgacccatcaggtgtttcatacggttattggggctgtgccatcgg

SEQ ID NO: 2911 - DNA, 373 bp, Homo sapiens
  unsure (338): n=A,T,C or G
aaaagatcattctgttctttcaaggagaaataagcctaaaagaagaaaaacaaaaaaaattctgtataaaactgtaatcctttgtattcatgtttacagtgctattactataattcaaaattatgtatgtgacttagagttatataatcataatttatgtttatttcaaatatctaagtttattgcttggatttctagtgagagctgttgaatttggtgatgtcaaatgtttctagggtttttttagtttgtttttattgaaaaatttaattatttatgctataggtgatattctctttgaataaacctataatagaaaatagcagacaacataaacntctttgtaaatatcaaacctaatacatttcttgtc

SEQ ID NO: 2912 - DNA, 187 bp, Homo sapiens
aaaaaagtcataggtactgtgagttctgtataaactggtggacagtaagttagttcctttgttttaacttataagcctcaacttcaccgcagaataaagaatgtaggccaaagaaagcataatcggtcactcgtatagaacagtattgtttctataatttgaagctttctgaatggacgggttcagg

SEQ ID NO: 2913 - DNA, 309 bp, Homo sapiens
  unsure (242): n=A,T,C or G
  unsure (273): n=A,T,C or G
  unsure (296): n=A,T,C or G
ataaaaataggtgcttggtgtacaaaactttttatatcaaaaggctttgcacatttctatatgagtgggtttactggtaaattatgttattttttacaactaattttgtactctcagaatgtttgtcatatgcttcttgcaatgcatattttttaatctcaaacgtttcaataaaaccatttttcagatataaagagaattacttcaaattgagtaattcagaaaaactcaagatttaagtnaaaaagtggtttggacttgggaacaggactntatacctcttttactgtaacaantactcattaaagg

SEQ ID NO: 2914 - DNA, 270 bp, Homo sapiens
ccagagggaaggcccaagagacgtctctgaagccaccgttcctgattattcagaggcagggtccacagtgagtgactcggtggggctggaggaacccagggtgacccagagggggctctggagcgggtccctaacatctgaaaaagtcctcccagggaactcggagctggaacttccaggcagcttcgggggtgacatttgtatccggccagccgagcggggaaaggagaccttgtgtcctggcaacagggagagccgggactgggatgg

SEQ ID NO: 2915 - DNA, 288 bp, Homo sapiens
ccaattatttccaatttttattttattcttaaaacttaagcatggtaaaatgttaagctgttttcatccactgatattattctactataaaaagcccttcttgagcagatttgatgataaaaaggagaacatttctaaggtataattagagaagctgttgcatgagaaatcatgtctccatctccattttgctatgcgttatctgaggattgtttctgaaagagatctatttaggcagtgtatgtatgtgtcagcatgtaaaaagtaaagaactgaaaatagacaaac

SEQ ID NO: 2916 - DNA, 419 bp, Homo sapiens
aaattaaattaatagttacaaggtaggttggctcttaggtgaatttagccatgtcaactaatagcttttatatggtatgtaacaaatctgaattatgttatgctgtgaattattcagtgcattataagaaatcttagttaatcatgcttttgggcttcattagtcaatgtgattggccttttattttctttccataacttatctgctattattagtttcttattccttattattaatctgttagctcattatcattagcttactaacttgaaagttagattaatatcaaaataagaatagcagcactatgaagagttaataaaatgcaatttcatgttagagctagaataaaagtaattgagcagtcatttgcaaatgcttcattataacatttatgtgcttaagatttctaaggtttt

SEQ ID NO: 2917 - DNA, 269 bp, Homo sapiens
ctgcctcctgagggtgtggggttattagggtctcaatactttctcaaggggctacactccccattaggcagcatcccaccagcctgcaccacaggctcccctgggaggacgagggaaacgctgatgagacgctgggcatctctcctctgtggctctaggacatctgtccaggaggctgggcggaggtgggcaggatgtgagaggtggggagtactggctgtgcgtggcaggacagaagcactgtaaagggctctccagccgcagctcag

SEQ ID NO: 2918 - DNA, 302 bp, Homo sapiens
aaacaagtgggattaagttcttgaagcatttctttgaaaaactgtaacaggagatgtaacatgccttcaccagtgtgatcctgaatactaagtgcaatccaagcaatcgttaccgagaggtggcagtggtccagtcaaagcaaaagtggattggtcaagagcaaacgtcattgcaacagatttttgagatgctcaaggcatattccttggtaactttatggaaggacaatgaataattacatattttgttatgaaagtgttttgagaaatttgccaaagacttagaaaaacaccaaggaagg

SEQ ID NO: 2919 - DNA, 331 bp, Homo sapiens
ggaaaaacagatgttgttgacagatagagtgataggcaaattctgtgtggactttagtcccaaaaggaaactttagttcacttgcagtatgcttatccttgactgcacatgagaatgccttgtgcagagttatttggagattatgtctttttcttaaacaccatggctgtcacacttcagttcaattaaatcagaatgtctgaggagtgagacacaggcatcaacactctcaaatgattcacatgttcagccaaagttgagaaccatcgagcctgtggaagttctttctcgtggctcagaatcttaggtaggtgcttaactcttgtggtgg

SEQ ID NO: 2920 - DNA, 207 bp, Homo sapiens
cggatacaaatgtcacccccgaagctgcctggaagttccagctccgagttccctgggaggactttttcagatgttagggacccgctccagagccccctctgggtcaccctgggttcctccagccccaccgagtcactcactgtggaccctgcctctgaataatcaggaacggtggcttcagagacgtctcttgggccttccctctgg

SEQ ID NO: 2921 - DNA, 212 bp, Homo sapiens
ctgtccagtgttggtgattccagtggactgtatctctgtgaaaaacacaattttgcctttttgtaattctatttgagcaagttggaagtttaattagctttccaaccaaccaaatttctgcattcgagtcttaaccatatttaagtgttactgtggcttcaaagaagctattgattctgaagtagtgggttttgattgagttgactgttttt

SEQ ID NO: 2922 - DNA, 247 bp, Homo sapiens
ccttcccagtccccacaggtccccgtcctgataggtccctggagctccactggccctcaggtaaactccaagcgccacactactgtctacaaacgctggtgatctggacctgcagcccttctcgccttggtggaggcccctccccacgctctggaaagtgcctcaggccctctcagctctggtctctgcaccttccattcccctcacctagatcactcctctaccaaactcctgcacaccttccagg

SEQ ID NO: 2923 - DNA, 316 bp, Homo sapiens
ccaccacaccacacccctttacaacctccagccctatagtctaaggatatggggccctgggagacaccgagggaccaaggaaagaggccccctgtagaaagcaagcagaaattccttgtagacccactgaccagagttgctcgctgtccttgaccccaccgagaggggtgcaaccctgactcagcatcacctcctatctgtcatagcggggagagctttccccaaaggccagcaggggaaaacccaaccttacttggaggagccagggaagtatctcgcagatcccgcaaaaaggcacccacgtctacagctcggc

SEQ ID NO: 2924 - DNA, 316 bp, Homo sapiens; identical to SEQ ID NO: 2923

SEQ ID NO: 2925 - DNA, 269 bp, Homo sapiens
  unsure (193): n=A,T,C or G
ctgcctcctgagggtgtggggttattagggtctcaatactttctcaaggggctacactccccatcaggcagcatcccaccagcctgcaccacaggctcccctgggaggacgagggaaacgctgatgagacgctgggcatctctcctctgtggctctaggacatctgtccaggaggctgggcggaggtgggcangatgtgagaggtggggagtactggctgtgcgtggcaggacagaagcactgtaaagggctctccagccgcagctcag

SEQ ID NO: 2926 - DNA, 207 bp, Homo sapiens
ctgggaggctattcccaatgccaggatcgagctgcaggagtgggagcatgtgacctgcatgaagacagtgtctctgcgcagtgaggagaccgtgtcgggcctcaaaggctacgtggtcgccgggacctgcctcatgcagggggaggaggtcacgtgccgagggcggatcttgatcatggatgtgattgaggtggtgcccgagcctgg

SEQ ID NO: 2927 - DNA, 346 bp, Homo sapiens
  unsure (244): n=A,T,C or G
  unsure (248): n=A,T,C or G
  unsure (277): n=A,T,C or G
  unsure (290): n=A,T,C or G
  unsure (314): n=A,T,C or G
  unsure (318): n=A,T,C or G
  unsure (340): n=A,T,C or G
ccacgagaccaccccgagcgccaagcctgtatctgcagatccctctctgctcaggaaccaccacgtcctgtgttctcgccaatggagaccaagacctggggttggttctgggctcctgacagttctcttgatgttaagagtgcagctctgtcaacactcagcataccaaaagctctggagcagcttatggcacacctttccctggtgccatctcttcagacacgatgtgagctcattacaaccncatnagtaaatggagctaccatgtatattttantgaaaatacatangcacccgtgtccccatggggtctnacanggctaggctggggacactgctngggggg

SEQ ID NO: 2928 - DNA, 314 bp, Homo sapiens
ttgtcctttggacaaatctataactttcttttcctagccaattatactcaaagaactaggggattatagagaggttaggcatattttgttgggtgtcaggagatgctgaacagagggcttgtatatctgtacattgctctttctccactgtgaggtccatcctgccttaatttgggttcctgcagcctcagggcattctagggctctcttagatcctgctggactgagtcccctctagaaaagaagcaggaacaggctaaccaacagcagactgttagaagttggtggagggcactgacaggagtaccagccag

SEQ ID NO: 2929 - DNA, 269 bp, Homo sapiens
  unsure (107): n=A,T,C or G
  unsure (121): n=A,T,C or G
  unsure (138): n=A,T,C or G
  unsure (226): n=A,T,C or G
  unsure (231): n=A,T,C or G
  unsure (244): n=A,T,C or G
  unsure (261): n=A,T,C or G
  unsure (268): n=A,T,C or G
aaaagatactttggattcaattaagaagagtttttaagaaaaaagaggaaggttctggcatggggagctctgcaacccactgctgggtgccacaagcgatgcttaanaacggaagatgaanatggcaccatgtgtctntaaaccacaaatggaaccactgatttctatgtgtatttgcatttgctgtaatgtgtgggaaatctgaaggttacacagcacaactgtncacancagatggcccttnaaggggatgaggtttanagccatnc

SEQ ID NO: 2930 - DNA, 175 bp, Homo sapiens
ccctcccctgctcagaatctgataccaaagagacagggcccgggcccaggcagagagcgaccagcaggctcctcagccctctcttgccaaaaagcacaagatgttgaggtgagcagggcaggcccccggggaggggccagagttttctatgaatctatttttcttcagactgagg

SEQ ID NO: 2931 - DNA, 216 bp, Homo sapiens
  unsure (10): n=A,T,C or G
  unsure (26): n=A,T,C or G
  unsure (32): n=A,T,C or G
  unsure (64): n=A,T,C or G
  unsure (78): n=A,T,C or G
  unsure (90): n=A,T,C or G
  unsure (95): n=A,T,C or G
  unsure (112): n=A,T,C or G
  unsure (122): n=A,T,C or G
  unsure (129): n=A,T,C or G
  unsure (151): n=A,T,C or G
  unsure (178): n=A,T,C or G
ccagcccacngggtactggaagacantggttntgatgggttcagccctgctacttggggctganctcagacgcttggntctcttctccanccagncctccagatggccctcngggagctcangagcatntagtaaccactccctggctcgnctctcctcctccacctggatgctcagntcctgcaggtctcgctctgacatgtgggaaaatctgca

SEQ ID NO: 2932 - DNA, 186 bp, Homo sapiens
  unsure (6): n=A,T,C or G
  unsure (9): n=A,T,C or G
  unsure (10): n=A,T,C or G
  unsure (18): n=A,T,C or G
  unsure (21): n=A,T,C or G
  unsure (26): n=A,T,C or G
  unsure (35): n=A,T,C or G
  unsure (44): n=A,T,C or G
  unsure (47): n=A,T,C or G
  unsure (52): n=A,T,C or G
  unsure (140): n=A,T,C or G
tccganctnngtaccaanctnggagnaatcatggncatagctgnttnctgtnaatgccccacggagacttagcaggttccaggagtgagcgagggcagcggaaaggagttcttccgggggacacgaattgcctggctgantatcaagaaagacacactcttaaatttcttggttcagagcaggaaa

SEQ ID NO: 2933 - DNA, 444 bp, Homo sapiens
ccacctgagtgcaggtgacaaggacctgacagagcccatgcagggctttagatttggacacacaagagttgataacttcctcatgaactccttgcctgatctaaactcatattatgggttctgactgtttgagtaatcatcttcaaggttaaacctcttggcagttacccttttcacaaagtgcacagtgggaatcgggaatcgatagggttaattttggagcagtggcttataccattcacctctgtttttttgtgattatttcacagataatgagaccttaataacaaataggcgtaaaaaaattttcacatcgaaatgatagaaacatttgatgtaataaaacttggttggcttgatattttaaggaattgaaacctagcaatcttattggagagacaaaaattggtctccaggggctggaggtctgcgggccaagccagg

SEQ ID NO: 2934 - DNA, 236 bp, Homo sapiens
aaaactattattctagaagaaatgggcagttttgtaatttggtggtggctgagaccccatagaagttttactatgtaaataatttggagagtgaataaggagattgtgctatgaaatcctgacagcgctctttaggaggcagacttgacagtcctaggaaggttgacataaaaataccaaccttcagtaaagctctagtacaaaaaagggtaaatgtcatcattcttatttttagg

SEQ ID NO: 2935 - DNA, 347 bp, Homo sapiens
ctgaacaactgtggagacccatcctgcctcctgactctaagctgcttttaagctaattttctggctctttgcctactgtgtatgtgtgataggactgttttccttggtatgttcccagatattctctgggatatttgggttctcagggatacctgcttcttggctgggcaccatgcccttggcttaccccccagccttcagggttcaagcagtggacatacacccttacataacctggtgaaggacctgtcacactacagcagctttataaaaagatataaaaagataaagtattataccctaacaatatttgacattttacctttagcttcagttattattctttt

SEQ ID NO: 2936 - DNA, 234 bp, Homo sapiens
ctggaccagaaatgtgaacagcaggggacccaggaagttgaccagggcgatgacccaagggggcaggtactggagcagcagaaacagggactcctccttgttgtcctgtgagtacttggtagcccagaagatggcgctgatggccccaaccaccaggagcccgttgagtacgttgacccgcaggtaggagagcaggcggcaggccgtctgggcccgggtctgctgctgcatcag

SEQ ID NO: 2937 - DNA, 401 bp, Homo sapiens
  unsure (13): n=A,T,C or G
gatgatggacagngaaactggtcgatccaagggatatggatttattacattttctgactcagaatgtgccaaaaaggctttggaacaacttaatggatttgaactagcaggaagaccaatgaaagttggtcatgttactgaacgtactgatgcttcgagtgctagttcatttttggacagtgatgaactggaaaggactggaattgatttgggaacaactggtcgtcttcagttaatggcaagacttgcagagggtacaggtttgcagattccgccagcagcacagcaagctctacagatgagtggctctttggcatttggtgctgtggcagaattctcttttgttatagatttgcaaacaagactttcccagcagactgaagcttcagctttagctgcag

SEQ ID NO: 2938 - DNA, 250 bp, Homo sapiens
ctgcatcagtgacatgaaaacagaaaccagggaggtcctgaccccaacgagcacttctgacaatgagaccagagactcctcaattattgatccaggaactgagcaagatcttccttcccctgaaaatagttctgttaaagaataccgaatggaagttccatcttcgttttcagaagacatgtcaaatatcaggtcacagcatgcagaagaacagtccaacaatggtagatatgacgattgtaaagaattt

SEQ ID NO: 2939 - DNA, 338 bp, Homo sapiens
ccagcatagcagggtggagtccatgtccctggctgacagagggaaccctggaaatattacttcgcgcttgatggagaaggagaaggccagagattgcctgattcctatggggatagcctctgagaatgtggctgagcggtttggcatttcacgggagaagcaggatacctttgccctggcttcccagcagaaggcagcaagagcccagagcaagggctgtttccaagctgagattgtgcctgtgaccaccacggcccaggatgacaagggcaccaagaggagcatcactgtgacccaggatgagggtatccgccccagcaccaccatggagggcctgg

SEQ ID NO: 2940 - DNA, 352 bp, Homo sapiens
ctggcttgcctgctggcctgcttcctggagataggatgctcagacccaccgctgctcttcaggggtcgtggaaggaattaatgcacttccttctgtcccccaatctctgtccctttacgtgtctctggagctgagcaggtattctttttctttcttcatctcagtagagccataaaacagggacctctgacgcttcacattatcaggtaagaaatgtttcttgcccagcagcccccagaggatgaacagctccctccaccttttacttttatccagcatttcttagctcggttggcaaactggatatttatgcacctgcatttcacaatccatctccaccgattattcctgg

SEQ ID NO: 2941 - DNA, 196 bp, Homo sapiens
ttgagtattctatagtgtcacctaaatagcttggcgtaatcatggtcatagctgtttcctgtgtgaaattgttatccgctcacaattccacacaacatacgagccggaagcataaagtgtaaagcctggggtgcctaatgagtgagctaactcacattaattgcgttgcgctcactgcccgctttccagtcgggaa

SEQ ID NO: 2942 - DNA, 307 bp, Homo sapiens
  unsure (1): n=A,T,C or G
  unsure (7): n=A,T,C or G
  unsure (30): n=A,T,C or G
  unsure (141): n=A,T,C or G
  unsure (147): n=A,T,C or G
  unsure (149): n=A,T,C or G
  unsure (177): n=A,T,C or G
  unsure (206): n=A,T,C or G
  unsure (279): n=A,T,C or G
  unsure (297): n=A,T,C or G
nggcggncgaggtccaggcaagtggcaganccagacctgggtcttcacacacttccctcttcttgactgtactggcgcaggtgcttaagatttgggggaaggtgggtgggtatctggcctcttctttgggactcaaattgngatatntntctgagaacccacaggctccctctttanggctgaggtgagaagttctgaaagtcaancagacacatccaggcatttgggcaagaaacttcttccttccaaatcaaaggtgaaatgaaaacgattatgagnccaccgggggatgaacanaggtgaatgg

SEQ ID NO: 2943 - DNA, 357 bp, Homo sapiens
ctgacagttctccatggcaactcagtcctccagcagacccctgcatacataaaggtgcaaaccaacaagatggtgatgctgtcctgcggggctaaaatctccctcagtaacatgcgcatctactggctgagacagcgccaggcaccgagcagtgacagtcaccacgagttcctggccctctgggattccgcaaaagggactatccacggtgaagaggtggaacaggagaagatagctgtgtttcgggatgcaagccggttcattctcaatctcacaagcgtgaagccggaagacagtggcatctacttctgcatgatcgtcgggagccccgagctgaccttcgggaagggaactcag

SEQ ID NO: 2944 - DNA, 205 bp, Homo sapiens
  unsure (104): n=A,T,C or G
  unsure (160): n=A,T,C or G
  unsure (198): n=A,T,C or G
ctggcctgggtcacagtgacctgacctcaaaccagcttaaggctttaagtcctctctcagaacttggcatttccaacttcttcctttccgggtgagagaagaancggagaagggttcagtgtagccactctgggctcatagggacacttggtcactccanagtttttaatagctcccaggaggtgatattattttcantgctcag

SEQ ID NO: 2945 - DNA, 138 bp, Homo sapiens
gtgaatgctggtgtcactcagaccccaaaattccgggtcctgaagacaagggcgaattccagcacactggcggccgttactagtggatccgagctcggtaccaagcttggcgtaatcatggtcatagcttgttcctgt

SEQ ID NO: 2946 - DNA, 250 bp, Homo sapiens
  unsure (123): n=A,T,C or G
ctgctatactaatgggattctggggcaggtctcagtaattatgaaacatctactgataaaataggtattcaccaaccctaagagtagactgcgattcactagatgtgagcattctaagtaganccaacccagggaaaactatgcaaggggcccctgacagggaaagggctgcaaagcaccaggcaaggtgactctcatgcgctttccagctctgcttttgtttctctatgatcctagaacttaattatta

SEQ ID NO: 2947 - DNA, 214 bp, Homo sapiens
  unsure (126): n=A,T,C or G
ctgcacgtaggcgaccttgtagtccggcttcttgatcctcacgtttctgtgatctcttctcttgttagagccatgctgcacccgtgtccgcacagcagccacgggcacgttatagatgccctcganggaaattcctgaggtccacccttgtcatttccatggggatccggaactgcacggtgtcctcgggctgggccacaccgggccgcaccag

SEQ ID NO: 2948 - DNA, 134 bp, Homo sapiens
  unsure (129): n=A,T,C or G
cctcatcatccatgaaggctcctctgtctaccgcatcttcaagcgctggcaggcagtgaaccagcagtggaaggtcctaaattatgacaagaccaaggacataggaggagatgcaaggggagggacggnaggga

SEQ ID NO: 2949 - DNA, 233 bp, Homo sapiens
aaagggtgtaatgtgttggtcacatcacaaccagtaagaaacgcttggtaggttatccacatcttttgctgactgtttccatatacaattctggtcaccatattttccaaagctaaaatctgaggcgtgggcttgatggtttttgaaatcaggattaccccaggaagaaccaggtcctattactaattttcctgattctgaggctctgaaggcttgtctgagacacattccgg

SEQ ID NO: 2950 - DNA, 169 bp, Homo sapiens
ccatagggcgctacgacgggactcacccgtgcctggcggccgccacccaaacgggcaaggtttttattcataatcctcatacacggaaccagcatgtcagtgcatccagggtcttccagaaccccctggaatctgatgtttctcttctcaacattaaccaggcagtcag

SEQ ID NO: 2951 - DNA, 360 bp, Homo sapiens
ccatgttcccccgtttgccttcacaaaaaccttgtgaataatacaagccatatggactctgatttacagtttagaagatgagcagaggtgggtgtgagttgcccagtcatgttgctagttgttgaagaaactaggattgttctcaggtcttgggctcctggcccatagaccagtggctctgtgttctgatggggtattggggaggatttttacaaatgcagattcctgagattgttcctggaacatctccgagtgggtgtgggttgtggccctgcgtgtgtgattttgcctatcccagctccggggtaccaccaaccactttttgtctctgtgggtttacctactctggatattttgttt

SEQ ID NO: 2952 - DNA, 238 bp, Homo sapiens
ctggagacactttagaactctttccccatcctccaccatagtgcaaacttcacgcttctctgagcacctccaaggtatgcccttgaagtaaaacagaaaagggaagaaagggggctttttcttttccatttctgaccaaacagaggtctgaaatagcagtgtattatgaaattctcattccctgcaacagtcagccaccacttggaaaatggctatttttgccataaactagattttt

SEQ ID NO: 2953 - DNA, 349 bp, Homo sapiens
ccaacattggagaccacttctgtcaaatggtgatttctgaaaaggaagctatgtcaactattgagccacacagacaggttgcttggaagcgagctgtcaaaggtgttcgagaaatgtgtgatgtgtgcgacaccaccatcttcaacctgcactgggtgtgtcctcggtgtgggtttggagtatgtgtggactgctaccggatgaagagaaagaattgccaacagggtgctgcttacaagactttctcttggctaaaatgtgtgaagggcgaattccagcacactggcggccgttactagtggatccgagctcggtaccaagcttggcgtaatcatggtcatagctgttt

SEQ ID NO: 2954 - DNA, 286 bp, Homo sapiens
  unsure (1): n=A,T,C or G
  unsure (21): n=A,T,C or G
  unsure (33): n=A,T,C or G
nctgtgtcctgccctcccttntggaggctggangggagaggccaagcccttggaaaatgtagcaaatgtctggatgtcgcataagtgcgtgtatgtgcgggacaggccccgagaagctagtgacttcttgcacacccccattgcacaaatgaaatcacagcccaggagggagggtagcttggcactggctgagaaatagagctctctccccgcccctccccctaaccacaagggattgtcctgacaacttgtggggatagaagggctcacagggcaggggtctcag

SEQ ID NO: 2955 - DNA, 286 bp, Homo sapiens
  unsure (122): n=A,T,C or G
ccagagaacaagatgctcccttgctgagctcctgggagcgtggaaggagatgctaggccctggcacagtgttatgtggactgggccacgatagggtggagtgagctagtgaagaaggcaganggagactttgcttctggtctcagctatgcctgttttgtgaccttgattgagttgcttgggctttacttctgcctacaaatcaggggtaaaaatacctgttgggaggagaaatgagaacatagaggaaagcctcttggaggaaaggtgcttggaccaagtctcag

SEQ ID NO: 2956 - DNA, 125 bp, Homo sapiens
taaaagatactttggattcaattaagaagagtttttaagaaaaaagaggaaggttctggcatggggagctctgcaacccactgctgggtgccagaagcgagctgtggagcggaagattaagatgg

SEQ ID NO: 2957 - DNA, 309 bp, Homo sapiens
  unsure (128): n=A,T,C or G
  unsure (144): n=A,T,C or G
ccagtaggtgtgggtgcttttgatgtttgcttctggtggttgaaagaagcgcagggaagagactgggtgtagagtgatgtaccccaaggctgcagctaagatcaaattcttctggagagctgtgtganctggatgctgatgcanaggagggtgggggagctggtgagaccaaggctgggctctgtgcccatcccactgggtgtgaaggaaggaaatgaccacagacagccatgttctgggtcggccgtctgcaagccaggctgactcctcctctcccccagagttcaggatggtcaacggcagcagcag

SEQ ID NO: 2958 - DNA, 290 bp, Homo sapiens
  unsure (143): n=A,T,C or G
cctgtgaccaagtttacagtcatctagtttctctcacaatttcaaaatgtcagatcagaagaatctttggcgattaatccactctccattttatgcgtgagaaaaccaaggccctgatggtgtccctggtcccaagtccagtngcccttcacaatgaggcttttggctcttaccctctgaagtggggcagtggctcactgtgaggggagagggtcagatcttgttagtttgatcttaaggcactcacaaaatgccctgatttttcttgtctttgtgagaagacaaaaaac

SEQ ID NO: 2959 - DNA, 122 bp, Homo sapiens
aaacagctctaagtgtcagtactcatagtggcatattacaaagtaataaacagtgcacacttgagggcaaaccgcatattgagctatggaagagctcactgtgattaagatgacatcaaacc

SEQ ID NO: 2960 - DNA, 377 bp, Homo sapiens
  unsure (53): n=A,T,C or G
  unsure (79): n=A,T,C or G
  unsure (132): n=A,T,C or G
  unsure (169): n=A,T,C or G
  unsure (174): n=A,T,C or G
  unsure (256): n=A,T,C or G
  unsure (290): n=A,T,C or G
  unsure (343): n=A,T,C or G
  unsure (344): n=A,T,C or G
  unsure (347): n=A,T,C or G
  unsure (349): n=A,T,C or G
  unsure (369): n=A,T,C or G
ctgagattgtgtgtgtgtgtgtgtgtgtgtgtgtgtaggggaggactggctangaaagcaagcagagtgcctctgcttnttctgccaactctatctcagcactgatccagaccccaccagccaagcattttntgggacccgcacactttgctctggagctttctaatancctgnattaatccacccctgtgcttcatgcctttgccaccaggagaaccagtgcaactgaagtttccactgcctgctgctctcctgnggcatccacatcctgaataggcaggagggtgcancccacctggtgcacagggaggaggaggaacgtcccctctgatataccacatgnnagnanaccacctcttcccagaccanatctcggt

SEQ ID NO: 2961 - DNA, 401 bp, Homo sapiens
cctgaaagctgagggcataactgaccattttttggaaaccctctcctccctcctccacaccttgagtgatgaccacaccaatcactgtattttatagctttttttttcatgtaggtttttagttaaaacatctcctgcctaaaatgcattgaatattttaagataacagatatactggctggaggtttgtttaacactatctatatttaagcttatacaaaatgggcaaaatatagaatatttgtgattggaagcagtcacctggggtttctgggggtggacagttcctcgccacccagcagcaccctgggactgcggcctttcccagctttatggaagcagaatggtggaacttgtgccggaggtacactgctgaaggtgcgtggcggtggaccagccag

SEQ ID NO: 2962 - DNA, 207 bp, Homo sapiens
ccttgtcctacggccagaagccctacaagaagatgaaagggccggaggtcatggccttcatcgagcagggcaagcggatggagtgcccaccagagtgtccacccgaactgtgcgcactcatgagtgactgctggatctacaagtgggaggatcgccccgacttcctgaccgtggagcagcgcatgcgagcctgttactacagcctgg

SEQ ID NO: 2963 - DNA, 375 bp, Homo sapiens
  unsure (165): n=A,T,C or G
  unsure (242): n=A,T,C or G
  unsure (287): n=A,T,C or G
ctgagagactctaaatccagtgacaagtctgtctgcctattcaccgactttgattctcaaacaaatgtgtcacaaagtaaggattctgatgtgtatatcacagacaaaactgtgctagacatgagggtctatggacttcaagagcaacagtgctgtggcctggancaacaaatctgactttgcatgtgcaaacgccttcaacaacagcattattccagaagacaccttcttccccagcccanaaagttcctgtgatgtcaagctggtcgagaaaagctttgaaacanatacgaacctaaactttcaaaacctgtcagtgattgggttccgaatcctcctcctgaaagtggccgggtttaatctgctcatgacgct

SEQ ID NO: 2964 - DNA, 424 bp, Homo sapiens
  unsure (257): n=A,T,C or G
aaatcaatagcaaaacaggattaagataaatgtgggcataattaggtgtattgacatgcctttgatgtatcaaactgagggggaacccactaaatccagtcaagcagtttcataagatcttcacaaaatgcctctacttacggaatcatgttgattttagtcctgctgatgtgtgtaccgttagcactttggtttatcaatatttgactggctcaaatgatggatagaagggtggcctggttataggcagtaggcanaaggaggcagagggttacagtaatgtaagatcaagaccggaaaatgatagctatagaattacaagcccggtaccaccaggtaccacatcacataagaaaaaaggttctaatgttttcttaacttaacagcaaaccagtccagctacgggggcccagccagccagcag

SEQ ID NO: 2965 - DNA, 318 bp, Homo sapiens
  unsure (8): n=A,T,C or G
ctcattantcctgatggttctcgtaaaaaccccgctagaaactgcagagacctgaaattctgccatcctgaactcaagagtggagaatactgggttgaccctaaccaaggatgcaaattggatgctatcaaggtattctgtaatatggaaactggggaaacatgcataagtgccaatcctttgaatgttccacggaaacactggtggacagattctagtgctgagaagaaacacgtttggtttggagagtccatggatggtggttttcagtttagctacggcaatcctgaacttcctgaagatgtccttgatgtgcag

SEQ ID NO: 2966 - DNA, 459 bp, Homo sapiens
ctgtttcccaagcgcacagggaagccattgaaaagcatgcccgcttccggcagatgtgcaacagtttcttcgtagacctggtgtccaccatttgcttcaaggacaacgctccgcctgagaaggaagtgattgagagcctgctctctctcctcttcgtccaaaaggggcgcttaagagatgctgcccagagacactgtgaacacacaaaatctctctctccattcaatgatgttgtggataagactcctgtcatccgctcagtgatactgaaactgcttttgaagtacagctttcatgatgtaaaagattatattcaggaatatttgaccctgttaaaaaagaaagcattcataactgaagataaaactgaactgtacatgctcttcatcaactgcctggaggtaagtgaactctctcttccctgaatttcttttggaaactatctgaaccacatggttt

SEQ ID NO: 2967 - DNA, 286 bp, Homo sapiens
gtgtacatggacatcaagattgggaacaagccggctggccgcatccagatgctcctgcgttctgatgtcgtgcccatgacagcagagaatttccgctgcctgtgcactcatgaaaagggctttggctttaagggaagcagcttccaccgcatcatcccccagttcatgtgccagggcggtgatttcacaaaccacaatggcactgggggcaagtccatctatgggaagaagttcgatgatgaaaactttatcctcaagcatacgggaccaggtctactatccatgg

SEQ ID NO: 2968 - DNA, 237 bp, Homo sapiens
aaatacagaaagcacaagaataaaccaatggtaacatgtagaatctagatcgtcggggcaatttagaaggtagactttcaaaaagtctgaggcacaattacaagtgagtaaaagttcttgtgcaacctacataaacgcagcaaagaaacttaagacataaaaacatgggaaagctcactgtaaaaatattatcaaaatatttctacataagatattttgctttcatttttagatcag

SEQ ID NO: 2969 - DNA, 135 bp, Homo sapiens
  unsure (9): n=A,T,C or G
ggtccaagncgtagtggggtctgatatcaccagcataaccgagcggtataggatatattctgttaaagatggaaaaaatggaaaatctctgccatttatgttgtgtgacactatggggctatatggggcagaagg

SEQ ID NO: 2970 - DNA, 371 bp, Homo sapiens
ctgcattgtgaggggcttgctcctgcccttaggtataagcaggttcatcactccaatttgtgagtttggctactacccattcatgctcaagtgcagtagtagatgattttacaaaatatgctgtgatgcactggaaaccaaagaccaattcaggtctcaaatcgtattatctagcaacaaaacatttacagttgtgcaagaacaaggattccattttcataaccaaataacaaaataaaacattttatgtgtaagataacttacatctttggactgctggaaaatactttttaattatgaacatgttaaaaataaaaaacagcagaagccctgatattacctctttttcctcatttcttatactacctttt

SEQ ID NO: 2971 - DNA, 210 bp, Homo sapiens
ctgcctgactatggggctaaaggggtaagacccagacagacaaaaacttgctctctgccaacccgtcacccaccgctgcccagggcagcctggctgcttaggctcaaattccagctccacctgggtgggtgactttaaggggagttgcttagtgattctgcctctgtgagcctccatttcctcatgtgtaaaagctggtcacgcatgttc

SEQ ID NO: 2972 - DNA, 359 bp, Homo sapiens
aaaagcagagagcatgtgtaggttccctgtggtgggaggaaataaggtgccatcaaggaactaaagggcctggagtgtaggggaggataagatgaacagaagccagattgtgcagtatcttacaagctgtgtttaagtctttggactttggttcttagagtaatggaaaactcattggagggttttaagcaagagggtttgtgattaaatttgtgttttgaaaagatatttctagctatattgtaaacatgttcacagcagggggtaggatggaagcggggaatcagtgggaacagttaggatgcttttgcatttgtccagttgagagatgatagtggcttggcctaggatgatggtgg

SEQ ID NO: 2973 - DNA, 322 bp, Homo sapiens
aaaaagaaaaatgcaaatatagagcaaatccctaaacttgaaccatttcctagtgccttgctagacaaacataaaggggcagggttgtggggaggggaacgtttttggtggtgtgtgcagttcctactggatgagtgtgtgtttcttaatgtctcatttcaagcaggagatgttgggtctggagcaagatctgagactgagatgtcccccaagggtgacaggtcagatttatttcagtcagtgcaagtcacactccaaactaaaggctgggcagtgcgtttagtctgtggcctagaagacctcatcagcccccgagaggagg

SEQ ID NO: 2974 - DNA, 259 bp, Homo sapiens
ctgtacaaacagcgagcttcctgccttgtccaaagacgacaagatgatattaaagatgaatcttcggagttttcaagccattcaagtcagtccatcttgaagacaaagctctgatggcaccaaatcttgactcctttggacgcgatcgggcactgtatcaggagcatgcaaaacgtcgcattgcagagcgggaggccaggaggactcgtcgtagacaagccagagaacaaaccggtaagatgacagatcaccttgaagg

SEQ ID NO: 2975 - DNA, 344 bp, Homo sapiens
aaagacccaagcagtcattttgagttatatctataaaaattataaaaggatttttgaaagtataaacaaattgtcagtgaaataaatgagattttggaataaagtgagaataggagaagggatatgttgtgagcatataccttcacagttcttaatacctgttttgtaatcatgatattcagtcaaggcattatggtttttaatcttgaaacttagagaaccctttgaatatttgcttttactggtgtacagtatgagtggaatataaactgtacacataattatcatgttgatataaatcataatttcaactagatcaagacatgttaaccttttataaattt

SEQ ID NO: 2976 - DNA, 353 bp, Homo sapiens
  unsure (183): n=A,T,C or G
  unsure (244): n=A,T,C or G
  unsure (323): n=A,T,C or G
tctgaattttccctgaggagagtcagttcaaccttattacagcagcttttacaaatctatctctaaagtctccctgccgactcaagtttccactgacttgtccccctgcatgcgatgccatgaccttcacaccaacatccaaccacatgtctctcctttggaatctgtgtgccccaccaccangaacctgttaggcaaaggtggcaccatctccctctgtaaggctgcagcgggtgtctgtcancatctgacaggggccctttgcgtgctgtgtgttgaatgttgcacttgctgaatgcatgcagttcccgtgagcctgtggntgagctgaaactgacagcgctctgcaggcc

SEQ ID NO: 2977 - DNA, 157 bp, Homo sapiens
tggctgagggactcggaggtccacagcagcttagacctggagtcatctgttttggtcttagttctgacactttaatgggcttgggaccctggagcaaaagttctcctctgtgaggcaaggatttcaggagcgaggatttcaggactgaggcagcctg

SEQ ID NO: 2978 - DNA, 176 bp, Homo sapiens
cccctttctcaggcttactgtcaccagtctgtctgtgttaggggaggggggagtccgctctgtcctgaaggcccagagatggaaggacaagtggtaggccgggtgttcaggctcttccaacgccgactgcttcaactccgagcaggaccaccccaggacaattcaggggaagcttt

SEQ ID NO: 2979 - DNA, 433 bp, Homo sapiens
ccatctctctcaaagcaatgaagaaggaggtgaagattggggcctattacacaagataaacagtgtcagcatgctttaccagagagaacattttcatcaccccactactgaaagccatgtataatccgccaccacctgttttttgggggacctgggacacatgaaacacagagaggaaatttcatgggtactggatgaaataaggaaggaaatgtttttgctcacctgagtcacagggagaatgagaggtttatagagtttaataccatgttttttctggtaaagtgccatctccgaggaagccttgtaatactcaatatggtctcctgctaacttggcctctctgattcgactggaaaacttctggatctctggcaagtgattgtggatcctggctgcctctcgctggcccgtcacgatgagaggaaaaatc

SEQ ID NO: 2980 - DNA, 405 bp, Homo sapiens
gccaggcaccgcaagaccggccagaaggtggctctgaagaaggtgctgatggaaaacgagaaggaggggttccccattacagccttgcgggagatcaagatccttcagcttctaaaacacgagaatgtggtcaacttgattgagatttgtcgaaccaaagcttccccctataaccgctgcaagggtagtatatacctggtgttcgacttctgcgagcatgaccttgctgggctgctgagcaatgttttggtcaagttcacgctgtctgagatcaagagggtgatgcagatgctgcttaacggcctctactacatccacagaaacaagatcctgcatagggacatgaaggctgctaatgtgcttatcactcgtgatggggtcctgaagctggcagactttgggctg

SEQ ID NO: 2981 - DNA, 345 bp, Homo sapiens
  unsure (12): n=A,T,C or G
  unsure (286): n=A,T,C or G
taacaggtcacncagtgggaagcgcatatgctcctactgcaataacattctgggcaaaggagccgccatgatcatcgagtccctgggtctttgttatcatttgcattgttttaagtgtgttgcctgtgagtgtgacctcggaggctcttcctcaggagctgaagtcaggatcagaaaccaccaactgtactgcaacgactgctatctcagattcaaatctggacggccaaccgccatgtgatgtaagcctccatacgaaagcactgttgcagatagaagaagaggnggttgctgctcatgtagatctataaatatgtgttgtatgtcttttttgctttttttttt

SEQ ID NO: 2982 - DNA, 102 bp, Homo sapiens
  unsure (11): n=A,T,C or G
tcctccagcanacccctgcatacataaaggtgcaaaccaacaagatggtgatgctgtcctgcgaggctaaaatctccctcagtaacatgcgcatctactggc

SEQ ID NO: 2983 - DNA, 269 bp, Homo sapiens; identical to SEQ ID NO: 2613

SEQ ID NO: 2984 - DNA, 111 bp, Homo sapiens
  unsure (6): n=A,T,C or G
gtctgncaggtgtaatttttcaagtgtcaaagatcccaagtgatccctgacacccaccccttcctactcttacattcatgcgtctgtaagatagctgcctacaacaggtca

SEQ ID NO: 2985 - DNA, 286 bp, Homo sapiens
ccacgtcgatctgcttcttgcgcatgcggtacacgccctggcgcactgagccaaagttgccgcagccaagttcaatgtcagctatgaggaggttatcgcgcttcaggaagagcttcttgtccttgagctcctctgggtcgctgtaggggctctcatacacgctcgtgtccatgggcatcggccgcggtttgtctggggacgttatgcgtgctggctcaggggtgtatccatctgagttgagggtgtcgattcgtctctgaggctaaaggccacagggtcagcaagg

SEQ ID NO: 2986 - DNA, 269 bp, Homo sapiens
ctccctccttgaaggctaccccttgggaaggctggtgccccatgccccattacaggctcacacccagtctgatcaggctgagttttgtatgtatctatctgttaatgcttgttacttttaactaatcagatctttttacagtatccatttattatgtaatgcttcttagaaaagaatcttatagtacatgttaatatatgcaaccaattaaaatgtataaattagtgtaagaaattcttggattatgtgtttaagtcctgtaatgcagg

SEQ ID NO: 2987 - DNA, 240 bp, Homo sapiens
ctgcaggaacatctaaaatgaaagcaaaacgcactgaagtgagctgaagtgcatatgtcctgcttgaaatgttcacattgtggcatctgaacaggtttcactgtttgtctaacatgtttgtgggaggcatatttgttacaccattcttttccatactgtaactctggattctttccattaaaggttcgggatgagtatcggcaggactacgatgctgggagaggaggctatggaaaactg

SEQ ID NO: 2988 - DNA, 244 bp, Homo sapiens
aaaaaaagaaaagaagaaaacagaagaaaaaataaactgaaatagggctgccaattgctaccaacagagtgggtttggctattacatttatttagctctactgaacaccttacaagggcggagaagccactatgtgttacaggcaattcacagagaagccacttaccagacaagctgtctcagaaaaagaaggcttctttttatgtcattatttcaaacttttccagaactttcaattttattt

SEQ ID NO: 2989 - DNA, 331 bp, Homo sapiens
ccagaatgtatcatttcttgatctgagtctggttacagagatgtattcactttgccaatatcaatgatgttacatactcatgatttgtgtacttttctttatgtatgtgtgagcaaagagttaatagcaggtctgtaccatttttctcccagaactatgcctgcttgggaaattttaggtttgtcttatcccagcacgagtttcttgtaaatgacccaaattaagataaatttggaatattgggtaccagggacagacatccattttgtgcactgtgaaacctacaatctatgggacagtacatggggctgggagacctgggaaccgtagg

SEQ ID NO: 2990 - DNA, 163 bp, Homo sapiens
ctgactgctaagacttcctcatctctgtccacctgcactgctctgctctcaccacctgttcagctctgcaaggccagtttcaatgcctcctgctctgtgataagggtggtttcccttcaatttgtggtggcgatggagacattcttgacacaggttctagagg

SEQ ID NO: 2991 - DNA, 323 bp, Homo sapiens
cctgagctacacacagatgccagggacatgacttctctgagccctggaggacagccccaccttctgccaccagggaattgcgagtgctggacctcctcggctacccaggactggtcctcagtgtccctcacgttcacatgcagaactttctggactccatggggtgaagagcagagtggagaggagggttttagccgagagctctagctggcaggaagcacatctggcggccctgttaaaactggaactctcagcagaaaagttttggtctgtggtcagcctgtgaggcacacacgtgcgtacacatacacacacacatacag

SEQ ID NO: 2992 - DNA, 358 bp, Homo sapiens
ccaagcatcagaactacatggcctaaccaaacaggatggaaatgtgagagggtccctcccttgtggaaggggtggatgatgctttctgcccaccctatttaattaagatggaaaagggggctatagatactggctggcatctgttaattcattcagcattcaaggtaataataaaacctcataaacacaagagctttaatctcaaggcagctctaagaggcagtcagggtacatggagcataagggaagttagtcatctgtagttacataaccaggaggtaccagagtcaggacaaaagcccagatgttcttaaaaacagggctctgtgctcagatgtcttctgcactgtgtaagcag

SEQ ID NO: 2993 - DNA, 126 bp, Homo sapiens
aaaaggaaatacaaagtataggcaaaacctacaagcattttgccttcagaagaaaatgtaatgttctcctgcactagtgatcccacccacgaacacaaatgtggctccatctcccatgaaagcatc

SEQ ID NO: 2994 - DNA, 273 bp, Homo sapiens
aaataacatcacctttccatgtatagtaaactgttcatatttctacaggtactaagagtacactggaattacgtgttacatataaatggagaggtggagggaagggggaaaacttgcactaagtcgcctaagagataaactgataatgttagtaagacagctttgtattaaaaactttttatactacaagttactgcagaatcatctactgtaagttttatctccccaccagaaaactgaaatgttgatttacaatattaatgtaaaatattt

SEQ ID NO: 2995 - DNA, 218 bp, Homo sapiens
aaacacccagtactgaaacaatatccaaagacagtattgcaatgaactccttttgctgtatcatgtgcaaatgctacttagatgaggttccctctctttagctaaaaatcacaaaacattaaacaatggaaaaagccctcccctcagttcttgctaattgaggtgtccgtgatttacaaaaaaagagttccttaaacactgcaggattcttatttttt

SEQ ID NO: 2996 - DNA, 339 bp, Homo sapiens
ccaatgtgcatttttgcacatgctggaaccttccatgggggtctggactattggctggagccaggacatgagtcaggggcaccatggacctcacgtgccagggagacttgaatgtggctgtcactcttccggacgccaagggctgcaggaggctgcttttggcactacccaccccgtgtgacagaataggagccagcgactcaggactgctcacgggtcaggagggcaacgcctgaagtcagacctccctataggtcaacagggacaacctggggatctctggagcagggccctcctctctcaggcttggcccactcccccagacacctggacacgtgg

SEQ ID NO: 2997 - DNA, 110 bp, Homo sapiens
  unsure (24): n=A,T,C or G
ccctcaccaacccagagaacctgntttactttgcccagggacttcctccccatgtgaacatggggaacttcgggccctgcctggagtccttgaccgctctctgtgggccc

SEQ ID NO: 2998 - DNA, 167 bp, Homo sapiens
ctgattgactgtgcccagtacttcctggacaagatcgacgtgatcaagcaggctgactatgtgccgagcgatcaggacctgcttcgctgccgtgtcctgacttctggaatctttgagaccaagttccaggtggacaaagtcaacttccacatgtttgacgtgggtgg

SEQ ID NO: 2999 - DNA, 174 bp, Homo sapiens
  unsure (6): n=A,T,C or G
cctttncttgagctgcacgtgaacctgtgtgggcaggcagcgtttgcaggcgtgtttacgggcaggcagcgtttgcaggcgtgtttaccggcaggcagcgtttgcaggcgtgtttacatgcaggcgtagcaccatgtgagaccactggtccagggtttcagaggtcctgctcag

SEQ ID NO: 3000 - DNA, 395 bp, Homo sapiens
cctgctaaacagaagggtaaatgttttgcccttctggctttaagcagtcataggaatgtgacagacattcctcttagggagcgcctcctcctagggtttcctcatctgtctcacactgagtggatgtaatgctattttaatcctgctgtggcccccaatactagtacttgtccataccttcttgcatttttagcgtctgctctgtggggttgttaggccctggcactcccaggaactagtgctaaagctgcatctctctctcccctctagggatcgataaagtttcactgcagaaagtctccactgcggtatgctgacatctgccctgaaccttcaccctacagcattacaggctttaatcagattctgctggaaagacacaggctgatccacgt

SEQ ID NO: 3001 - DNA, 356 bp, Homo sapiens
aaacaagccatctcacaatggaagcctgtgtgtcttgaaattgctgtggttattattcactctgccctttgaagaactgcagaaattcatagggcaatgttaagtgtttgtgtctccaaaaaagatgttggagtcgttaccctcagaacctcaggtaatcatgttagttaatccattaggttagttcctaattgactatgactgtgtccttagaaaaatgggaaatttggtcacagaggcagatgtacagagggaagacgatgtgaagacacaggaagaacatcttcaagccaaggaacacacggggctaccagaagccgagatagaagcatggaacatatgttctagtaagaagt

SEQ ID NO: 3002 - DNA, 135 bp, Homo sapiens
ctggggagggcggcggacctagtgaagtcacagagagagagacaccagtagagtggactggggccacgggacatttatttgtagccatcaagtgcctgcccacctgggggagggttgagactggcccgcaggtgg

SEQ ID NO: 3003 - DNA, 264 bp, Homo sapiens
  unsure (152): n=A,T,C or G
  unsure (179): n=A,T,C or G
  unsure (181): n=A,T,C or G
  unsure (236): n=A,T,C or G
  unsure (237): n=A,T,C or G
  unsure (257): n=A,T,C or G
ctgagttcccttcccgaaggtcagctcggggctcccgacgatcatgcagaagtagatgccactgtcttccggcttcacgcttgtgagattgagaatgaactggcttgcatcccgaaacacagctatcttctcctgttccacctcttcaccgnggataggtcccttttgcggaatcccananggccaggaactcgtggtgactgtcactgctcggtgcctggcgctgtctcagccanntagatgctcatgttactganggagatt

SEQ ID NO: 3004 - DNA, 170 bp, Homo sapiens
aaaacctgttgactaaacagtaattaatttatatttgtgaaaaatgtcactgtcctagtgatttctgatgtaaataatgttgtttatatagtatgtattaaattttcctacattgtaaaactgctgtacttttgattcttgtatattaaaaagtgttactgagcattttt

SEQ ID NO: 3005 - DNA, 411 bp, Homo sapiens
  unsure (19): n=A,T,C or G
  unsure (23): n=A,T,C or G
  unsure (24): n=A,T,C or G
  unsure (27): n=A,T,C or G
  unsure (35): n=A,T,C or G
  unsure (36): n=A,T,C or G
  unsure (42): n=A,T,C or G
  unsure (61): n=A,T,C or G
  unsure (70): n=A,T,C or G
  unsure (74): n=A,T,C or G
  unsure (75): n=A,T,C or G
  unsure (77): n=A,T,C or G
  unsure (78): n=A,T,C or G
  unsure (84): n=A,T,C or G
  unsure (89): n=A,T,C or G
  unsure (91): n=A,T,C or G
  unsure (105): n=A,T,C or G
  unsure (107): n=A,T,C or G
  unsure (115): n=A,T,C or G
  unsure (122): n=A,T,C or G
  unsure (134): n=A,T,C or G
  unsure (145): n=A,T,C or G
  unsure (158): n=A,T,C or G
  unsure (162): n=A,T,C or G
  unsure (202): n=A,T,C or G
  unsure (207): n=A,T,C or G
  unsure (218): n=A,T,C or G
  unsure (224): n=A,T,C or G
  unsure (247): n=A,T,C or G
  unsure (257): n=A,T,C or G
  unsure (272): n=A,T,C or G
  unsure (308): n=A,T,C or G
  unsure (325): n=A,T,C or G
  unsure (329): n=A,T,C or G
  unsure (393): n=A,T,C or G
  unsure (408): n=A,T,C or G
  unsure (409): n=A,T,C or G
ccaattatttccaatcttnattnnatncttaaaanntaaccntggtaaagtgttaagctgnaatcatccnctgnnannattctnctatnanaagcccttcttgancngatatgangagaaanaggataacatanataaggtatanttagagaagctgntgcntgagaaatcatgtctccatctccattttgctctgcgctanctgangatcgtttctnacaganatgtatttaggcagtgtgtgtancgcagtgctntgccaaaagtactancgtgaaggtagacaaaccttgtaaatgcacttccanccaattgtggctcaagngtangtggtgaccccaaggctggtgccaatgagactggggtttgggaataagttggtgcatcatcccncctgctgcccctacnngg

SEQ ID NO: 3006 - DNA, 138 bp, Homo sapiens; identical to SEQ ID NO: 2945

SEQ ID NO: 3007 - DNA, 130 bp, Homo sapiens
  unsure (4): n=A,T,C or G
  unsure (74): n=A,T,C or G
  unsure (95): n=A,T,C or G
  unsure (124): n=A,T,C or G
ccanctcactagatgaggaaagaggaaggcattttctgcattcttgcctagttttccttataagcaccactaanttaatagctctgtctttttgntcgtttgcactatgtaatgctattaatanttttta

SEQ ID NO: 3008 - DNA, 243 bp, Homo sapiens
ctgccgcgcatgcctaaggagtatatcgcccgcctcgtctttgacccgaagcacaagactctggccttgatcaaggatgggcgggtcatcggtggcatctgcttccgcatgtttcccacccagggcttcacggagattgtcttctgtgctgtcacctcgaatgagcaggtcaagggttatgggacccacctgatgaaccacctgaaggagtatcacatcaagcacaacattctctacttcctc

SEQ ID NO: 3009 - DNA, 150 bp, Homo sapiens
  unsure (13): n=A,T,C or G
  unsure (15): n=A,T,C or G
  unsure (64): n=A,T,C or G
  unsure (95): n=A,T,C or G
  unsure (101): n=A,T,C or G
  unsure (115): n=A,T,C or G
  unsure (121): n=A,T,C or G
  unsure (131): n=A,T,C or G
  unsure (133): n=A,T,C or G
  unsure (137): n=A,T,C or G
  unsure (139): n=A,T,C or G
  unsure (145): n=A,T,C or G
  unsure (146): n=A,T,C or G
ctgaccagaagtngnttgttatatggatgggaaccctaacttagggcttgggcaggggaaaganaaagaagatgagagattatacttcatgagtnttagcnatatgggagcaggntttcanttgaattctnangggngnctctgnntgtc

SEQ ID NO: 3010 - DNA, 136 bp, Homo sapiens
  unsure (120): n=A,T,C or G
ccacctgcgggccagtctcaaccctcccccaggtgggcaggcacttgatggctacaaataaatgtcccgtggccccagtccactctactggtgtctctctctctgtgacttcactaggtncgccggcctccccaga

SEQ ID NO: 3011 - DNA, 130 bp, Homo sapiens
  unsure (14): n=A,T,C or G
gtgtggacagtggnggccgcgctgtgcctgctcgtgttgcctacatgtccctggctgttgaggcgctgcttcagcctgcacccctcccttgtctcatagatgctccttttgaccttttcaaataaaatat

SEQ ID NO: 3012 - DNA, 109 bp, Homo sapiens
  unsure (71): n=A,T,C or G
  unsure (79): n=A,T,C or G
  unsure (80): n=A,T,C or G
  unsure (99): n=A,T,C or G
tatctgtaaaatagccaggaatttcctgtttgtgatctattatgcctttttacaaaaaaaaatggctgcanattatccnntaatattaaaggaactttnctttcttgaa

SEQ ID NO: 3013 - DNA, 196 bp, Homo sapiens
  unsure (119): n=A,T,C or G
  unsure (136): n=A,T,C or G
  unsure (160): n=A,T,C or G
  unsure (166): n=A,T,C or G
  unsure (173): n=A,T,C or G
actcctggcctcaagtgatctgcctgcctcagcctctcaaagtgttgagattacaggcgtgagccaccgctccctgcccaacacatataccatctgaaaatgttagaattctgagttgngattttattgacttgtngcttgctttttcttaggctttgtnacttgnaatatgntaaactgtactatcctaataaac

SEQ ID NO: 3014 - DNA, 127 bp, Homo sapiens
taaatatatttctctcagcttcttcccttatattttttattttttcatcatattttaattttagtaatttaatttctttctccttttcttcctctgatttatgcttatcctcttctactagggttaa

SEQ ID NO: 3015 - DNA, 88 bp, Homo sapiens
  unsure (76): n=A,T,C or G
  unsure (85): n=A,T,C or G
aaattgtaatcagagtcaaatacagtattgaatggaatgtactgccttctcctcctaaatcaataaacatctttcntggaaaaanaaa

SEQ ID NO: 3016 - DNA, 442 bp, Homo sapiens
ccatgtagcaggtggtcagtatgcgtccacagaggtctcggggatcctggggggtgtagctgatctggttcacgatggtgcggacatcagccagcacttcctcatttccactcctcacggcctcgcagacctggcagcacatggagtagatgaggcaggcggtggctgcgctgtccaccccgccactcaagggcagcaaaaaccctgcctgttgacttcgtcttaaaaaatcccagagccagcaggcaggtccaaggcttatctcctcctcagggctgtggtatttccactcgatgggctcagagatgggtgccagcaagtcctcgtggcacgagagggcaaagtccaccttcactctggggtaggggctcgccctgctggcttgaatctacgaggcagaggttgtgctgagctgggattgcgccattgtactccagcctat

SEQ ID NO: 3017 - DNA, 442 bp, Homo sapiens
  unsure (1): n=A,T,C or G
ncgaggtctgcatacaaaaggaaatggcaacaattgaactggtagcccaggacaaccatgagcgggccaggcgcctgatgaaggagctcaaccagatgcagtatgagtacacggagctcaagaaacagatggcaaaccaaaaagatttggagagaagacaaatggaaatcagtgatgcaatgaggacacttaaatctgaggtgaaggatgaaatcagaaccagcttgaagaatcttaatcagtttcttccagaactaccagcagatctagaagctattttggaaagaaacgaaaacctagaaggagaattggaaagcttgaaagagaaccttccatttaccatgaatgagggaccttttgaagaaaaactgaacttttcccaagttcacataatggatgaacactggcgtggagaagcactccgggagaaactgcgtcaccc

SEQ ID NO: 3018 - DNA, 337 bp, Homo sapiens
ctggctgatgtctgcttggacactccactctgtaatgggcacaccacagggatggatgtcctctgggcagggacccccatggtgactatgccaggagagactcttgcttctcgagttgcagcatcccagctcacttgcttaggttgtcttgagcttattgctaaaaacagacaagaatatgaagacatagctgtgaagctgggaactgatctagaatacctgaagaaagttcgtggcaaagtctggaagcaaagaatatctagccctctgttcaacaccaaacaatacacaatggaactagggcggctctatctacagatgtgggagcattatgcag

SEQ ID NO: 3019 - DNA, 216 bp, Homo sapiens
ccaggctcaggccctggggtgaaaggagacaggtgctgccaagaccatacatcagtcatctggcagcagctcgagaagcatgtcctccacgccgtcaatcttgatgtggtgcactaagcgccagaaactggagtctgaggatcggtatcgtccatcagggtagagctgccacatgataggcagcaggcttgggcctatctgggtgggggtcatagg

SEQ ID NO: 3020 - DNA, 294 bp, Homo sapiens
caagcagaccagcaattgcgtcctggagatctgtgctgagcagcgaaacctgagcgagcaggtagactcagccctctctgtttcactctcccctctgccagcgctcagtgccttcccctctatctaactttgtttccctctcagatgccaagctcagtaactctttctctgaagtagggctagggcctttctgtacttgagtttatggcagaattcttttcttagtgtagtcccttcagtctttcctcccttaggactggatagaagtgtctaaaaatactcttatttgaacag

SEQ ID NO: 3021 - DNA, 431 bp, Homo sapiens
ccttttgttttctaagcttactatcttgtgtttgtttatttgcttttaatgaagtattttgtgtagaaggttaaattaggatgcaaaacagatctgccattcctttttcccttatatcttccttttggtcttcatggacgagatgaatgaggattctgctgccctgagggagttcattggaaacctgcgttctcctacctctcccaaccctccattagctcaattttgagataatggaaaattgactggaaattcaaaactcaaactactatctttagatataaacactagtaattaaaatgtgccttttgaagatgttttctaagagaaaggaaatacgttgcagtgatgtgggtactgctttcataaaacagttttttcagtattttgagaattgccatattaatttttataatggaaaacttaataaa

SEQ ID NO: 3022 - DNA, 410 bp, Homo sapiens
ctggggcttccattcacgactttctggtccctggcaggacagagcgggatgccaccagcttgtccaaagggaagttccaggagctcctggtgggcatcgttgtggagaatgacgctggccgcggcgagatcaacgagttgaagcaggtggaaggggaggcttcgtgcagcagccgcaaaggaaagctgattttcttctatgagtggaacatcaaactgggctggaaaggcatcgttaaagaatctggagtgaagcacaagggattgattgaaatacccaatctttctgaggaaaatgaagtagatgacactgagaatttacaacgggaatgattttaccaacgaaagctatggcaacccaggaattgactgccaaaagaaaactgagtgggaataccctgcaggttcagg

SEQ ID NO: 3023 - DNA, 313 bp, Homo sapiens
ccttgcctgtgaagctcattgggatgaattgcactctaatgaagcaatacattgagtttgtggcagacagacttatgctggaactgggttttagcaaggttttcagagtagagaacccatttgactttatggagaatatttcactggaaggaaagactaacttctttgagaagagagtaggcgagtatcagaggatgggagtgatgtcaagtccaacagagaattcttttaccttggatgctgacttctaaatgaactgaagatgtgcccttacttggctgattttttttttccatctcataagaaaaatcag

SEQ ID NO: 3024 - DNA, 355 bp, Homo sapiens
cctctttcttctgtttgtaaaggttttctaaggcagggcttttcagactttattcagtcaacattaagctcctacactgcctcaaagcagagcgacgatggaaccctttatttcaatggaattgtgcacgtaggccagtgtattgaagaaaaactaagtctggtttatggagagttggcatggggcttagaggttgccgacctggacatccccacttagctggctctaaggcaccctcagaaaaccactgctctaacctgagaatgccatctagtttacaaactcttagaaaactgtgtttaatactcatatcactggcttctagatgtgaagcaaatgctctacaatggttttt

SEQ ID NO: 3025 - DNA, 340 bp, Homo sapiens
  unsure (78): n=A,T,C or G
  unsure (178): n=A,T,C or G
  unsure (185): n=A,T,C or G
  unsure (306): n=A,T,C or G
  unsure (309): n=A,T,C or G
  unsure (340): n=A,T,C or G
ctgattgggggggcccaggagctacatgcctactctgtgcgccgcctctacaatgccctggcagaagacatttcccancaaccactggtgcaggtggcagcctggtgcattggggagtatggggacctcctgctggcagggaactgcgaggagattgagccccttcaggtggacgaanaggaagngctggcattgctggaaaaggtgctgcattcccacatgtccctgccagccactcgaggatatgccctcacagccctcatgaagctcagcactcgcctctgtggggacaacaaccgcatccgncangtggtgtccatctacgggagctgcttggacn

SEQ ID NO: 3026 - DNA, 411 bp, Homo sapiens
  unsure (1): n=A,T,C or G
ncgaggtaaatttgtcttgtgagattttactatatctcagacagcataaatgctgttttagcactggattctttcactgagcacaaagagttgttggggctttagcatctgactgattttgttacggggttgattctgaccataggaagtatgcaatgtgaatcactatttacagagaaacctacaacagatgcttgatgttgtagaaactgggacatatagataccaagcaaaattataagaaacctataaggtgttcaatacgcttgtgtttccaaaattcactgtacatgatcagtttggtgttcttgtaccacagtttttaactgaaggaaccagttgtaacagtctcaattttaactaaaacttgaagaactaaaacaacaatgcaaacctttcagcattgtttgg

SEQ ID NO: 3027 - DNA, 464 bp, Homo sapiens
  unsure (447): n=A,T,C or G
  unsure (464): n=A,T,C or G
ctgccaccaactcaggactcaggggctcaattctcttctttggagcatattctgtagctcttcgaagcctgccaagtgtagcttccaaacttttaagtggtcttcttttggggggctttgttgttcgtacatttactgtgcttaattcaactttcatgcccttaataatgcctaacaagtctttttcgtattttccttttcactgtcttggctctctgaagtctccttggaagtctcctcagttcgaacagactgcttatctttcttgctacagatcacactgttagtgccaaaatatctttggatgttattttttgtccgggccaacagcgctgaactgcggtacctgactgttccgtgccgaacagtgagtagcataatcgcagccgctgatgtctccgggcttccagaggacaaagggtggcgggaaagggggcgaagaggtangaacgtcgagactctan

SEQ ID NO: 3028 - DNA, 143 bp, Homo sapiens
  unsure (27): n=A,T,C or G
  unsure (32): n=A,T,C or G
  unsure (37): n=A,T,C or G
  unsure (72): n=A,T,C or G
  unsure (121): n=A,T,C or G
aggtccaccctgaccatcaacaggggngaagncggcnatgaggccgactattactgtcaagtgtgggatcgnaataatgaccatgtcgtcttcggcggagggaccaaactggccgtcctangtcagcccaaggctgccccctc

SEQ ID NO: 3029 - DNA, 357 bp, Homo sapiens
  unsure (10): n=A,T,C or G
tggaacccangacccatccaacttggctgcttcacattttcatcccctcctgcatcattgctttcattttcatagccacagtgatagccctaagaaaacaactctgtcaaaagctgtattcttcaaaagacacaacaaaaagacctgtcaccacaacaaagagggaagtgaacagtgctgtgaatctgaacctgtggtcttgggagccagggtgacctgatatgacatctaaagaagcttctggactctgaacaagaattcggtggcctgcagagcttgccatttgcacttttcaaatgcctttggatgacccagcactttaatctgaaacctgcaacaagactagccaacacctgg

SEQ ID NO: 3030 - DNA, 402 bp, Homo sapiens
gaagctttctcaggggagtattttctggtcgacttggctaatattatatgtagtctgaatttctctttcagatgcttttaacctcgtaatacaattttattcagactgagagctgtttttctcttcaatgctttcagtgtctgtcttcagaagggacacccaaaagtgtctcatggtgtttctgagtgagttgggctgtcacaatgagaactctttggcactctatcgagacccataatgggaatccagcagtatttttttgtcaccattataaatagaaacttaggctgaaacattgctcccatttccattattgcaaaagtgcaatcctacccaggagtcctgcaggttctcctcctgcagttcagggacgctgctccataatgtgacactggagtgcag

SEQ ID NO: 3031 - DNA, 163 bp, Homo sapiens
  unsure (163): n=A,T,C or G
gcaggtctgacctacctgccaacctctcctctgctggcagattgtatcatccccattactgatatcagggctttcacaacaacactcaaccttctcccctaccataaaatagtcaaataaataaactgcagtcacgttggccggaaaaaaaaaaaaaaaaaan

SEQ ID NO: 3032 - DNA, 285 bp, Homo sapiens
ctggatgatggtcttcagcctctttctgtcccttctgtccctcacagcactagtatttcatgttgcacacccactcagctccgtgaacttgtgagaacacagccgattcacctgagcaggacctctgaaaccctggaccagtggtctcacatggtgctacgcctgcatgtaaacacgcctgcaaacgctgcctgccggtaaacacgcctgcaaacgctgcctgcccgtaaacacgcctgcaaacgctgcctgcccacacaggttcacgtgcagctcaaggaaagg

SEQ ID NO: 3033 - DNA, 160 bp, Homo sapiens
  unsure (12): n=A,T,C or G
  unsure (40): n=A,T,C or G
  unsure (66): n=A,T,C or G
  unsure (73): n=A,T,C or G
  unsure (88): n=A,T,C or G
  unsure (111): n=A,T,C or G
gtagcaccatgngagaccactggaccatggtttcagaggncctgctcaggtgaatcggatgtgttntcacaanttcactgagctgagngggtgtgcaacatgaaatactantgctgtgagggacagaagggacagaaagaggctgaagaccatcatccag

SEQ ID NO: 3034 - DNA, 278 bp, Homo sapiens
caccaccacgtcgatgcggtccactgagaaggggttgaactgcttgtccggccggcgcatgaactcatgcttgaggaggtagccgctctgcccgttgaactcaaatactgccatgttctgctgcatgggcaagtccatcgtctggaagttgagggcaaccatctggcatccagcattccagaacatctggggcatgtagttggaggagtccatgcgggttcccttggggtaaatgcggctcatctggcgcttgttgtagtccacaaactgcaccgagg

SEQ ID NO: 3035 - DNA, 120 bp, Homo sapiens
  unsure (29): n=A,T,C or G
  unsure (53): n=A,T,C or G
  unsure (107): n=A,T,C or G
gataatgtaaatacttcttaaatgtctgnaactcttcaaaagtgatgcttcangataaatgagctgctaagcattttaagaatttaccgtaactctaatatctgganggaaggggatgga

SEQ ID NO: 3036 - DNA, 397 bp, Homo sapiens
  unsure (393): n=A,T,C or G
gaggtaaatgcgcatgtaatttatttatgataatgtaaatacttcttaaatgtctgtaactcttcaaaagtgatgcttcaggataaatgagctgctaagcattttaagaatttacgtaactctaatatactggagggaagggatggatctgaaaggctaccatcagtaagaggaataaaacttgctctgtgtcctccagaagtctggacagtgatcagcaggtaatagacacagaggaactgatttcaacttttgaaaaagagttttccactaattaacactgtcccacggcggaataggttccctgaagatgttgagtgctgaaagtgatcaagcaggaggctagagggcttcttgcctgggagcaggggagggttgggggagaaggacaanagga

SEQ ID NO: 3037 - DNA, 263 bp, Homo sapiens
  unsure (232): n=A,T,C or G
aagtgctcggtttacaggtgtgagccactgtgcccggccattatgtgttttaagaaagggttgtgatctgttacaggctggtgggcttaaactggatggccggcagctcaaggttgacttggcggtgacccgtgatgaggctgcaaagcttcagacgacgaaggtgaagaagccgactggcacccggaatctctatctggcccgagaaggcttgattcgtgctgggacgaangctgcagagggtgtgagtgctgctgatatgg

SEQ ID NO: 3038 - DNA, 394 bp, Homo sapiens
  unsure (325): n=A,T,C or G
gatagggactttgccaagtccaattatcttctaggattgaaaggtgcattttccccataaaaaaggcgaggaaaacccatggctgctttgtgtcacctcagtgacttacagtcccccttggcatttagttggtactagagccagtcatccttaacaaatcttttcacattttatttctttcacatgtagtcatcttcaaaaaggaaagatttggaattttagaaaaggggcaactcttctttttagcattctcatcagaaagtcacaaaaatcgatggaatcatttccactgggaagattgaccttttgtatttatttgtggggnaaattaataagcattccagatgcttgcagcttcctgcatccaggagatgctgtgttccccgtgatgcag

SEQ ID NO: 3039 - DNA, 240 bp, Homo sapiens; identical to SEQ ID NO: 326

SEQ ID NO: 3040 - DNA, 213 bp, Homo sapiens
  unsure (10): n=A,T,C or G
  unsure (35): n=A,T,C or G
  unsure (67): n=A,T,C or G
  unsure (87): n=A,T,C or G
  unsure (92): n=A,T,C or G
  unsure (103): n=A,T,C or G
  unsure (159): n=A,T,C or G
  unsure (209): n=A,T,C or G
cactctgttnccgccctcctctgaggagcttcaanccaacaaggccacactggtgtgtctcataagngacttctacccgggagccgngacantggcctggaangcagatagcacccccgtcaaggcgggagtggagaccaccacaccctccaaacaaancaacaacaagtacgcggccagcggctatctgagcctgacgcctgagcagnggaa

SEQ ID NO: 3041 - DNA, 343 bp, Homo sapiens
cctcaggttaggaaggaggggcacaggttcttgttggcatgagtgtcaactcagtgcaaaggactgtcctaatctggaaacctgaaagctgtcatctcacagatgtagggaagagaacttctacatgactctgactccagtgtccaccatgaccaagttttatgtaccttgttacattttgagctttgagcataagtcctagtgcgttgtgtatcatcagtcaacttccaatccttgttagagctgaggccagtccaatatgaattccctgaaccaccatttggcaacagtgaatttaagaagtagtaagagtgtgattgtggataaatttcactgaatgtgg

SEQ ID NO: 3042 - DNA, 275 bp, Homo sapiens
cctgatgcccgaatttcagtttggcacttacagcgaatctgagaggaaaaccgaggagtacgatactcaggccatgaagtacttgtcatacctgctgtaccctctctgtgtcgggggtgctgtctattcactcctgaatatcaaatataagagctggtactcctggttaatcaacagcttcgtcaacggggtctatgcctttggtttcctcttcatgctgccccagctctttgtgaactacaagttgaagtcagtggcacatctgccctggaagg

SEQ ID NO: 3043 - DNA, 223 bp, Homo sapiens
ctgctgccacagccagtattgccggggctccaacccagtacccacctggccgtgggggtcctcccccacctatgggccgaggagcaccccctccaggcatgatgggcccacctcccggtatgagacctcctatgggtcccccaatggggatcccccctggaagagggactccaatgggcatgccccctccgggaatgcggcctcctccccctgggatgcgagg

SEQ ID NO: 3044 - DNA, 359 bp, Homo sapiens
ctgcgagtgggtgagttctgtcacaaccgtggcatcaagctggtggtggcagacacgcggggcctgtttgggcagctcttctgtgactttggagaggaaatgatcctcacagattccaatggggagcagccactcagtgctatggtttctatggttaccaaggacaaccccggtgtggttacctgcctggatgaggcccgacacgggtttgagagcggggactttgtctccttttcagaagtacagggcatggttgaactcaacggaaatcagcccatggagatcaaagtcctgggtccttatacctttagcatctgtgacacctccaacttctccgactacatccgtggaggcatcgt

SEQ ID NO: 3045 - DNA, 400 bp, Homo sapiens
aaatatgctgcatagactactggaccatattttgtagccattaaattttcaaaagactgggcccactgtaatacttcctccaaagtaaggtttgaagggggcctcttagattcatctctgcacatcttacaaatccaacaattccgcctgctcatttttctctaaaatgagaagagaaaaggcagcgttagaatatcatcaagcttcaaataaacaatgatcatttttttctcatgttggtggtataatatgtggaaacattccattgacaaatatatcctgtcgagcagtccaccatgctaaatttgatctcctctttgttatgatccgtttgaaatcaggttctgaaattttgtgagacacccagcattttatttttcccagagtaaaagaattttac

SEQ ID NO: 3046 - DNA, 299 bp, Homo sapiens
ccactcggatcagctcctcgctcacctgaagccaagagaagaaggagagaagcaccaagaatcagctaacctcagaaaggtctgttttggagacacaggaggtactatttccagcagtcagaggaagtgcacagcaccaatgcgaggaagaaaaacaatcccacttgcgcccaccagctaagggaccagggtctatgaagccccacagtggctccgacccaccatcatggcctgctggaccagggtgttgctgtgctcacacatgttcttcagaatcttgttggctgcattgtgccggg

SEQ ID NO: 3047 - DNA, 129 bp, Homo sapiens
  unsure (16): n=A,T,C or G
  unsure (64): n=A,T,C or G
  unsure (72): n=A,T,C or G
  unsure (88): n=A,T,C or G
atctctggaagcttancaatcttattgcacactgttcgctggaagctttttgaagagcacattntcctcagngagctcatgagggttncatttttattcttccttccaacgtggtgctatctctgaaac

SEQ ID NO: 3048 - DNA, 410 bp, Homo sapiens
ccataggaaaaggatacagagtagagtttcatgaacctgaaacttggtggaaatttgatcctgaagaattagaaaagaggaataaacatggtgtgtctcgaaagaagattgctcagatgttggatcgttatgaatatcaaatgtccatttctattgtaatgaattcagtggaaccatcacacaaaagcacacaaagacctcctcctccacaggggagacagaggtggggaggctctcttggctcacataatcgtgtctgtgtcacaaataatcattaaattagctattttcagctaacacatttgttgttgcacttgaaaaagagttagtgagcctgtcttggagtttaagtagtttcaaataaaaaaaggctacagtgcctcacaaaggatgttcccagcaagttgttt

SEQ ID NO: 3049 - DNA, 464 bp, Homo sapiens
ccttgtggcccgatcacctcccaacaccttcacattggcaacacctggactagggtcttagtagtcccacccctggggtcgtcaaagaacagatcagaaattcctggggtgtaggggcaggatccttacatcccctgtactgtaacatatgcatgcaccccccagtcgcatccaagtcccacagatacaagggcttgctgaggtccgagggtctggatggtgagtccagggagcatgagaaattcatccaggccacacaggctcaggcacctatactcctgcccaccccctgcaggatggatattaccatttgaaatactttggcgcttgcagtgagatcttgcttaaaagaagaaacccaccaaattctagaatcgcagaggtgggggcacctatgtgacaaatgagggaacagaggcacagagattggcagggacatgctcaaagacatggagagcctgggc

SEQ ID NO: 3050 - DNA, 264 bp, Homo sapiens
  unsure (15): n=A,T,C or G
ccaccctaagcccgncagtggagctccttttccagattcagagctggtatcggagcggggagacctgggatagcaagttcagcaccatcgcctccagctacgaagagtgccgggctgagagcgtgggtctctacctctgtctccacccgcaagtgctggagatctttggctttgagggggctgatgcggaggacgtgatctacgtgaactggctcaacatggttcgggccgggctgctcgctctggagttctacacacctgagg

SEQ ID NO: 3051 - DNA, 128 bp, Homo sapiens
  unsure (10): n=A,T,C or G
  unsure (51): n=A,T,C or G
  unsure (53): n=A,T,C or G
  unsure (75): n=A,T,C or G
  unsure (80): n=A,T,C or G
  unsure (126): n=A,T,C or G
cttccactgntcaggcgtcaggctcagatagctgctggccgcgtacttgtngntgctttgcttggagggtgtggnggtcnccactcccgccttgacggggctgctatctgccttccaggccactgnca

SEQ ID NO: 3052 - DNA, 329 bp, Homo sapiens
cctgaggctggctcatcggaggcgtgagtgttcggccctgccatgcctcacatccccaggatgccgcggtgggaactgggctgtggctttcctgccctggcactgcttgtttgctgggatttcaggaggaaaacccccaagctccgaaagaaaggtatttcttttttattttgtggttcacttcttccactagaagactcgtttcccagagcctctaccctctcctgtcaggggtggggagcgcttctggaactgataccctgggaaggaggtatcagtgctgagcgggcaggcacagtgtgtatgggggtggggagctctccctgagg

SEQ ID NO: 3053 - DNA, 373 bp, Homo sapiens; identical to SEQ ID NO: 6

SEQ ID NO: 3054 - DNA, 466 bp, Homo sapiens
  unsure (357): n=A,T,C or G
  unsure (425): n=A,T,C or G
ccatgagtgacaggtggcctcttggtgggagaggtggggcagggggaaggcagctcccactagaccagggcagtatttaggggaaggaggcagattggagcagttggctgccaacacctggcctcactcagggagaggggccttgggcctggaagatatctgggtgaggtacccacaccatctgctgcaacctctgtgtatccattatgggctcacgccattcacaggcatgaattgagcacctagtatgtgggaaaacaggggaaacagagatggcacagacatggtctccatccttcgggggctccagtctagttgggggagatcagagaagttccatttgccactctaggccangctaggtaagcggcagagccatgaagcattgtgggagcttggaggagggagtgagcccttgcagtcanggagaaggagtcatcctggggagacttccagaaagtagccc

SEQ ID NO: 3055 - DNA, 114 bp, Homo sapiens
aaattcctgtaataaaagggaaattgagggcagagcaatcaggctggagttgcaaggacccaggggatcacctaatgccagaagccagccatccaaaactctgtttgtcaaagg

SEQ ID NO: 3056 - DNA, 373 bp, Homo sapiens; identical to SEQ ID NO: 6

SEQ ID NO: 3057 - DNA, 359 bp, Homo sapiens
aaacctaaattttttaattaaatgcctgttcaacaaagctaattggaacaaacacatttatgtaaatttacattctagaataccagggtaaacaaggagacgttattcaaagatgaatgagaaagttctattctttttcatcatttgtgtgatcaggttgcaaaggacatgctctttcctcgatgaaactgatgtcgaattagtggcagaggtggaagaaccaagcacctttctgggggctcgagcagccaccacttttctgtaagtgcctggaacactgtctgctttagtccgcaccatgttcaaacaagaagagaggagaggagagaacgaactgacttcccagccgagggtgtttc

SEQ ID NO: 3058 - DNA, 345 bp, Homo sapiens
aaaccctgcgtggcaatccctgacgcaccgccgtgatgcccagggaagacagggcgacctggaagtccaactacttccttaagatcatccaactattggatgattatccgaaatgtttcattgtgggagcagacaatgtgggctccaagcagatgcagcagatccgcatgtcccttcgcgggaaggctgtggtgctgatgggcaagaacaccatgatgcgcaaggccatccgagggcacctggaaaacaacccagctctggagaaactgctgcctcatatccgggggaatgtgggctttgtgttcaccaaggaggacctcactgagatcagggacatgttgctgg

SEQ ID NO: 3059 - DNA, 340 bp, Homo sapiens
  unsure (209): n=A,T,C or G
  unsure (320): n=A,T,C or G
  unsure (332): n=A,T,C or G
ctgtgagactagggctgtgctttgcaacccccatagcacccggcatatattgctctgcattcagtgtatatttgagagctctgttcttttggaaacactaacccatgtattttgaattttataccatttgtagatgtactagcagcaatatgtcctgtcttatggattacaaccatgcctagaagttaaaaaaaaaaatcactgtaggngtataaagtttacctcaaatataaccaaataattgagcaactggtaataactgctgtgctctgaatgtttgtgttcccccaaattcatgtcaacatcctattccacaaggngatggtatcaanaggtgagg

SEQ ID NO: 3060 - DNA, 325 bp, Homo sapiens
ctgagagtagacacttgtggtatgtggagtacagataagccaggggcaggccacggcacgctccatgaaagctaggagggagtgaaatatcagtgatcatcgcaaggaaggaggcagacaagagtaaggcacacctgactcttaggactagcagtcagaaccaggaggaaaggttttattgctatgcgggtaggtaagaacagattttacttacatccatatagttacttaaagtccagttttctgttaaacatttttcttaatatattgagccaaaactagtccagttaagctgaacttggtttttctggagatgaattgtttt

SEQ ID NO: 3061 - DNA, 419 bp, Homo sapiens
ccaggccgcaccccttgctgtctcagcagatgggatataggaagctcctgggcttagctgtgggaagccaagtaccctcaccggcatgggacatgaggggcagctagacttcacccccttcccgcagacctgcctccagagcaaggagaattctgccttaatctgttgggctccagtctccgggttgaattccagtgtatcccactgggagtgaatggatcatgaggtgggatggccccatctggatgttctgcagatccccacatgggaggagattcccaagtagaggcagccagaattctgactccctggcagcagcagggctttcaggcaccagtgtctgtgttgttagaactcagaggaagaggcaggggcagcagccgacagggggcagcatgacccaagcaaggggcctgagg

SEQ ID NO: 3062 - DNA, 246 bp, Homo sapiens
ccactgcaacagtgagtcaaactctcctcgcatgaccacaaagtatagggacaggtgtgaccccctccctgacccatccccattcaggtatgctctagcacagagccggtagccacagcggctggtgtagaaggactggctgaagatggacactgtgtgcccatccaccgcctctctcttcttcatcttgtaatctgtcaccttccaaatgagccttccattatagcaagtaccctccagcagttt

SEQ ID NO: 3063 - DNA, 220 bp, Homo sapiens
  unsure (202): n=A,T,C or G
aaagaccaatttgttctacctagcattttaactagtttttctgccggctatgttgaatgcacaaattctgtcacgcatgttcattcattgctacataatttggttcttctggaatatttttatgtagctcttggagtacagctatgaaaattaacaactgttaaaggaaataccttttttttttgtaattttttccttgaanaaccaaagtattttttca

SEQ ID NO: 3064 - DNA, 467 bp, Homo sapiens
  unsure (365): n=A,T,C or G
  unsure (400): n=A,T,C or G
ctgtagcttctgtgggacttccactgctcgggcgtcaggctcaggtagctgctggccgcgtacttgttgttgctctgtttggagggtttggtggtctccactcccgccttgacggggctgccatctgccttccaggccactgtcacagctcccgggtagaagtcactgatcagacacactagtgtggccttgttggcttggagctcctcagaggagggcgggaacagagtgacagtggggttggccttgggctgacctaggacggtgaccttggtcccagttccgaagacataattgttgctgcctgcatatgagctgcagtaataatcagcctcatcctcagcctggagcccagagacggtcanggaggcccgtgttgccagacttggagccagagaancgatcagggacccctgagggccgcttactgacctcataaatcatgagtttgggggctttgcctgggt

SEQ ID NO: 3065 - DNA, 441 bp, Homo sapiens
cctcagcatcgcctggacctgttcttgcttggggcatcccgtcggtcaccaaccatgacagcgaggcgggcctggcctgtgctccaccggagggggcttcttgcacagatgacctgctcatttcagcccctccagaatcttctggcaggcgcagagcaacaggacgtccattttacagacgaggaaaccgagacacagggaaggttgccatctgcaacccagcccggtttttatcttgtttttctgtgttttaactttttatttagacttacagtttgaaacagtgctagaatcggaagcatgtaaagaaacctgtggaccttttatgcagatacacttaagtttttaacccatgtgccttatcactggggacctcttgcactctctctcatgatttttttcccgaactagatgaggatattgacaaagattcttgcttgg

SEQ ID NO: 3066 - DNA, 349 bp, Homo sapiens
aaagaactaatttgtaaattatgacacaaaattttattaacaaggaaatatccattaattgactactacagtaaaaactttataatgcttgtatcatgaagaaagaccttccttttccttatatattaattgaactacataggcttgctgtacattttgttattcatgttataagaattctagattccattgcttttgaaatatgtttctttttaggaactaaaagtcaacttatagtttgatttctgttttatttgtactgtgtttctgattttgtgggtttctaaataaaaagatcaaacccaccactttcaatatactgttttctatttaaacttttgagttgtag

SEQ ID NO: 3067 - DNA, 119 bp, Homo sapiens
  unsure (50): n=A,T,C or G
  unsure (53): n=A,T,C or G
  unsure (54): n=A,T,C or G
  unsure (61): n=A,T,C or G
  unsure (90): n=A,T,C or G
  unsure (92): n=A,T,C or G
cttccactgctcaggcgtcaggctcagatagctgctggccgcgtacttgntgnngctttgnttggagggtgtggtggtctccactcccgncntgacggggctgctatctgccttccatg

SEQ ID NO: 3068 - DNA, 413 bp, Homo sapiens
aaaatgaatttgaaattcagtatctattcaccatgacctaagagtatacagaggaaacagttagaaatggccagttgagggtagggtgtttaattgagaagtcagcacacactggcagctcttaaaccaaatattggctcgtttaacttgaaactgtaagtattttgaaattctttgtaacatataatatgctgtaatttcaacccttatttcccctgttgttagacatagggactttagactaaacatactttttgccttcatcacagttccaagttcttcgatttgatttgtctaatggaacaaattgatgttaccttgaagtggtatgaggacctgataccttcagcctactttccccactcccaaacaatgatacatcttctccaagcattggatgtggacctgcccgg

SEQ ID NO: 3069 - DNA, 151 bp, Homo sapiens
  unsure (25): n=A,T,C or G
  unsure (29): n=A,T,C or G
  unsure (30): n=A,T,C or G
  unsure (75): n=A,T,C or G
  unsure (119): n=A,T,C or G
cgaggtccaccctgaccatcagggngggnngaagccggcgatgaggccgactattactgtcaagtgtgggatcgnaataatgaccatgtcgtcttcggcggagggaccaaactggccgncctaggtcagcccaaggctgccccctcgggca

SEQ ID NO: 3070 - DNA, 320 bp, Homo sapiens
aaaatgacatctaacataaccagcaaataccagtaatggtggtgatatatacattatcctttatgttgtaaataaattgtattcaaattaaatgcaattttctcatgatcaaaacattctgctttcgatcatgttttgccagaggaaaaggtgagcgcgcttagtgtattgccaggtacttagaaagtgctcaagatctctggcgtcctcaacagtcttggtaaccatcttggattatctttattaatggttttacaactcccctgactgacaaaccttcacttctttctttcttttcttttctctttcttttttttttt

SEQ ID NO: 3071 - DNA, 181 bp, Homo sapiens
aaacatttgtcttattttatacctgtactttgagtaaggttttaagttgaaatgtcattatttccttatctgaaggattaaaggaaacagggacccagtggcttggtggtttgggaagaacacttggtgatggcggctcactaaatttggcaccagcatagttctgattagcttgagattt

SEQ ID NO: 3072 - DNA, 454 bp, Homo sapiens
aaaaggcccacttgccgtaacctcttttggtctattttgcttcccattcagcccaaagtttatatgataaaggtgtttacttttacttcccagtctccaagtgctaacacataaacacatacatgtctgactgttgcagaactgttcgagctcctaattcagtgttaccttgttttagtcgcagcaaccctctcccctaccccttgcccgcccacgtttttctcactcttccgggttgtgcaataactctcccagccagtggtcctttccacagcctttctgtcccttaaaacacctgcaactgggggagaaatgggacccatgggagggggagtcgtcatcccttacacaagaaatagccactttccttttgttgtcattcttgtgatcctgggtgggtttctgtggcactcttttagaacatgtagcatcatcttagaggtctatttttact

SEQ ID NO: 3073 - DNA, 321 bp, Homo sapiens
aaaggaggttatgggctgagagtagattgctgaaagtcatgatttaggaagtgtaaggttactggtaatgacacaccgcaagtgcagctaagggagttgacagttgggatgagtgaaagaaaagattattagtatgaggatttcaaggaatcgagaaagtagggctttggatgagttgtttttgtagaagtcaccaatgatgacaatggatgctgatagagaaaaagatggtgaacccgggaggcggaggttgcaatgagctgagatcgtgccactgcactccaacctgggcgacagagtgagactcagtctcaaaaaaaa

SEQ ID NO: 3074 - DNA, 310 bp, Homo sapiens
aaaaggaagagaaaagcaatcatcactattttggttttgttttgttttaggagtaactgactactgaacagtactgcatgtttctgaggttcctctgttattcctgtagttcactacctctgcatcctccccaggacaagaaattcattttccttattgtactgtgttatgccaagaatattactattgtttggtgaatataaaataatcattatagcaacaatttttttggcgtcctaaataaggctgatccatggcaacggtactatgcaaagaaaagaataaagtcaaaacacttgtaaaacctttt

SEQ ID NO: 3075 - DNA, 451 bp, Homo sapiens
ctgcaacagcagagcaaggccagcaagatcctcattgtagactgggacgtgcaccatggcaacggcacccagcaaaccttctaccaagaccccagtgtgctctacatctccctgcatcgccatgacgacggcaacttcttcccggggagtggggctgtggatgaggtaggggctggcagcggtgagggcttcaatgtcaatgtggcctgggctggaggtctggacccccccatgggggatcctgagtacctggctgctttcaggatagtcgtgatgcccatcgcccgagagttctctccagacctagtcctggtgtctgctggatttgatgctgctgagggtcacccggccccactgggtggctaccatgtttctgccaaatgttttggatacatgacgcacaactgatgaacctggcaggaggcgcagtggtgctggccttggagggtgg

SEQ ID NO: 3076 - DNA, 270 bp, Homo sapiens
ccttcagaagttaaacgtgatcacttgtgctgggacagccaatagaggagtctgagatgatcatttccaaggagttcttcacagaggaggtagctttggagctgggctttgaggttgggcagtatttgaaacagtagagacggagcaaagaacccctcctggtggggtcagtcattcgctttcttttcctcctcaggaccagggctctttgaagatgaagaatgcccacaagggaacacaggcagaagatcagataagccaaagtcacag

SEQ ID NO: 3077 - DNA, 472 bp, Homo sapiens
aaaaaaggtgacttggattaaagtatgcaaactcaaggagtagtacgagcccacttgagtcaagttagcttagttgctaaagagcttgataccaaaattacttttgtttacttgatgaatgggatagttgttgcacagggccactgatctagattactgtcttatttgtcaagtacttatagttgtagaagtagcagtgtgaaaattatcggaatggagaaggggcaatgataaaacaatttattttcaggtaccagcaacttcaaggtttctgccagcccactgttgtatacacttattgagaaaacaatgcaaaatgtgaagcatccggttactggacaatttctatatcaggacagcaactgggccagcaaagttgagaaactcactttagacaatgctgctttccctttccttgcatattctggaatcccagcagtttctttctgtttttgcgaggtaagtctgttca

SEQ ID NO: 3078 - DNA, 269 bp, Homo sapiens
ccttgcctcagatccaaggtcactcggaagaggccatgtctaccctcaatgacactcatggaggaaatgctgagagaagcattcagatgcatgacacaaggtaagactgccaaaaatcttgttcttgctctcctcattttgttatttgttttatttttaggagttttgagagcaaaatgacaacacccagaaattcagtaaatgggactttcccggcagagccaatgaaaggccctattgctatgcaatctggtccaaaaccactcttc

SEQ ID NO: 3079 - DNA, 142 bp, Homo sapiens
  unsure (115): n=A,T,C or G
  unsure (134): n=A,T,C or G
  unsure (135): n=A,T,C or G
agcagcgctggtggtgcctcagccatggcctggaccgttctcctcctcggcctcctctctcactgcacagactctgtgacctcctatgtgttgactcagacaccctcagtgtcantggccccaggaaagacggnnaagatta

SEQ ID NO: 3080 - DNA, 341 bp, Homo sapiens
aaaacagatttcatctagagcttcatttccctgttgagctttcttaaagagttctcttaggactgactgtcggaactggacaggtaaactcaaggttaagttgtcttcaatgaaaatctgtattacctcctgatagttgccagatctcaaacaaatatggacttgactatatggagtcaactgttgagatgtactatcagaagaaggtacaagaacatcacatgcttgacaatagccagctaaccgcttctcatctatggtacaatgaagagataatgaacctatctctgcaattagttctttggttctaaaaaatttttccctggcattttcatagacag

SEQ ID NO: 3081 - DNA, 468 bp, Homo sapiens
ctgcactgggagagctgagagcctccatgacagaccccagccagcgtgatgttatatcggcacaggtggcagtgatttctgaaagactgagggctgtcctgggccacaatgaggatgacagcagcgttgagatatcaaagattcagctcagcatcaacacgccgagactggagccacgggaacacatggctgtggacctcctgctgacgtctttctgtcagaacctgatggctgcctccagtgtcgctcccccggagaggagcatgcggcgatgctgagtttcatcaaataggacgcagcagaagttgggaagcactgcagaagatgggttgtcttccagaaagaccactgttttggggaacagcttggctctttcttcggccgctggtggttggattagctgttggagggatgtgcaggactgaatggctagtactgatggtttcacggctgtctctgcaggcaggg

SEQ ID NO: 3082 - DNA, 173 bp, Homo sapiens
aaaaaaataaaaacaacagagtgggcttctttcctgccgttgcttttgccatttgtagcattacaggtaatcagtcagaattcagatcacttaactacataggtgagagtgagagtgggttaagttatgagtcctctgtttttgctattctctctggcctgtggttctgctgg

SEQ ID NO: 3083 - DNA, 373 bp, Homo sapiens; identical to SEQ ID NO: 142

SEQ ID NO: 3084 - DNA, 424 bp, Homo sapiens
cctcctccctcacacacacgtcgccctgtcagaaggccaggcacactactgcagccaggatgctgggatagcaaggggataggtgctccaaccttcaccttccagaaaggcagggtgatctgaagtgacgtgtagctgagagctggatggggagaatttcactttcccagttgatccagaaaggaaagaaaccccagagcatcctctcggaagaacttaaactggctttgggctccagtgcgagcgagtgacttgtggaaaggggcaccatgatgagaggccggggccggtgggtgttgctgtcctgggtgaacatctcgtcatctgtctgttctttctccccggcatcatatcccttatagtctgtgctccaggtaaacagtgtctctgccagccacagcttggcaagcccggctatgtctgg

SEQ ID NO: 3085 - DNA, 308 bp, Homo sapiens
ccaccggaagcctgggaccacaaaggctactgctgaatagaagtaaacagttcatccatgatctcacttaaccaccccaataaatctgattctttattttctcttcctgtcctgcacatatgcataagtacttttacaagttgtcccagtgttttgttagaataatgtagttaggtgagtgtaaataaatttatataaagtgagaattagagtttagctataattgtgtattctctcttaacacaacagaattctgctgtctagatcaggaatttctatctgttatatcgaccagaatgttgtgattt

SEQ ID NO: 3086 - DNA, 470 bp, Homo sapiens
aaaacagcaaatagcagatttacgggaagatttgaaaagaaaggaaaccaaatggtcaagtacacacagccgtctcagaagccagatacaaatgttagtcagagagaacacagacctccgggaagaaataaaagtgatggaaagattccgactggatgcctggaagagagcagaagccatagagagcagcctcgaggtggagaagaaggacaagcttgcgaacacatctgttcgatttcaaaacagtcagatttcttcaggaacccaggtagaaaaatacaagaaaaattatcttccaatgcaaggcaatccacctcgaagatccaagtctgcacctcctcgtgatttaggcaatttggataagggacaagctgcctctcccagggagccacttgaaccactgaacttcccagatcctgaatataaagaggaggaggaagaccaagtacatacaggggagaaatcagtct

SEQ ID NO: 3087 - DNA, 465 bp, Homo sapiens
ccttgcctcagatccaaggtcactcggaagaggccatgcctaccctcaatgacactcatggaggaaatgctgagagaagcattcagatgcatgacacaaggtaagactgccaaaaatcttgttcttgctctcctcattttgttatttgttttatttttaggagttttgagagcaaaatgacaacacccagaaattcagtaaatgggactttcccggcagagccaatgaaaggccctattgctatgcaatctggtccaaaaccactcttcaggaggatgtcttcactggtgggccccacgcaaagcttcttcatgagggaatctaagactttgggggctgtccagattatgaatgggctcttccacattgccctggggggtcttctgatgatcccagcagggatctatgcacccatctgtgtgactgtgtggtaccctctctggggaggcattatgtatattattt

SEQ ID NO: 3088 - DNA, 190 bp, Homo sapiens
aagatgtcgaagcgaggacgtggtgggtcctctggtgcgaaattccggatttccttgggtcttccggtaggagctgtaatcaattgtgctgacaacacaggagccaaaaacctgtatatcatctccgtgaaggggatcaagggacggctgaacagacttcccgctgctggtgtgggtgacatggtgatgg

SEQ ID NO: 3089 - DNA, 166 bp, Homo sapiens
gaggtaaaaacaaaaatatttatttggaaaatattagtagcatgataactcaacctcaccagatattaacagttcatcaggtcaggcaatagaacaagtccacatgagcttcttaaaaagaaatggatgactacttcaatagctgactccatcttccattttatta

SEQ ID NO: 3090 - DNA, 193 bp, Homo sapiens
  unsure (1): n=A,T,C or G
  unsure (163): n=A,T,C or G
ncgaggtctgattgaaggagaaaatatggtccttatttgctcagtagcccagggttcagggactgtcacattctcctggcacaaagaaggaagagtaagaagcctgggtagaaagacccagcgttccctgttggcagagctgcatgttctcaccgtgaagganaagtgatgcaggggagatactactgtgcag

SEQ ID NO: 3091 - DNA, 145 bp, Homo sapiens
  unsure (28): n=A,T,C or G
tcgaggtcctcaggcacttggcctttgntttcacaccaacttgatgggttctactataagatgctaaaaaggtgggttgtgtgtggttcagattggttgatttgtaaccctagttgtgcataagaattgcccagatatttttttt

SEQ ID NO: 3092 - DNA, 89 bp, Homo sapiens
tcgaggtaaagaaaacaaaattggagttgaagaataagtaggtttccaattggctattgccgttttctttgaaaaaataaacatttttt

SEQ ID NO: 3093 - DNA, 164 bp, Homo sapiens
  unsure (28): n=A,T,C or G
tcgaggtaaaaatactgaatattatagnttacctcttctcttcttttaagagcctacgcaacttttctgcacttgtttctattttctttgttttctgcttttcttccttttcagcttgtttttctcttaattccaaagatttcttttagaacccagatatcgaa

SEQ ID NO: 3094 - DNA, 283 bp, Homo sapiens
  unsure (265): n=A,T,C or G
  unsure (283): n=A,T,C or G
aaaagaggacactgaattagagtgactgttgggccagggtgggaggatgggtggtcaggtaagacagactctagggagaggaaatcctgtgggcctttctgtcccacccctgtcagcactgtgctactgatgatacatcaccctggggaattcaaccctgcagatgtcaactgaaggccacaaaaatgagctccatctacaagtgattacctagttgtgagctgttggcatgtggttagaagccatcagaggtgcaagggcttanaaaagaccctggacctcn

SEQ ID NO: 3095 - DNA, 304 bp, Homo sapiens
  unsure (38): n=A,T,C or G
  unsure (135): n=A,T,C or G
  unsure (158): n=A,T,C or G
  unsure (176): n=A,T,C or G
  unsure (232): n=A,T,C or G
cactaaacctcaagaagtcagataggtattatcatggnccaactccaatccagtcactacagtatgcaacaagtcaggacattattaattcttttcaaagtattagacaagaaatggaagcttatacacccaagntaactcaggttctctcaagtagngctgccagtagtaccatnacagcactgtcacctggaggggcacttatgcagggaggaacacagcaagccataanccagatggtgccaaatgatattcaatctgaattgaaacacttatatgtagctgttggagaacttctaccaca

SEQ ID NO: 3096 - DNA, 137 bp, Homo sapiens
  unsure (1): n=A,T,C or G
ncgaggtaaaagtcgacctgttttgcagaaagtctgctgtttttgtactaaaggctttggaatttggcatttagctaggaatgcacattctttcacctcattcatactttaagaaccacagaagtgactctgcttgg

SEQ ID NO: 3097 - DNA, 182 bp, Homo sapiens
ttggctcgcttaaatgggacccttcgggaagacgataacaggatcttaagaccctggcagagctcagagacccgcagcattaccaacaccacagtgtgtaccaagtgtggaggggctggaaaacaccaagtcatacattttacattgtagaagcagtagcagcagtactatactcagtattt

SEQ ID NO: 3098 - DNA, 125 bp, Homo sapiens
  unsure (2): n=A,T,C or G
  unsure (118): n=A,T,C or G
gnaaaccagtagcccctctggaccccccagtgaatgctgagatggagctgacagcaccgtccctcatccagcccctgggaatggttcccctgatccccagccccttgtcatcagcagngcccctg

SEQ ID NO: 3099 - DNA, 215 bp, Homo sapiens
  unsure (1): n=A,T,C or G
  unsure (2): n=A,T,C or G
nngcaggtccttgcgggaagacctcatgggacgcaaggactccctgggcagagggtgggcccctggtcctggaggcacagaatcctcgacccacacgactatgtgacctctttataactggggaagacttcgatgatgatgtgtgatctgggactggcagggtattaatcgagatacacttgttaggagggacagggttcccctaaggcactttt

SEQ ID NO: 3100 - DNA, 380 bp, Homo sapiens
  unsure (1): n=A,T,C or G
ncgaggtccaccctgaccatcaacagggtcgaagccggcgatgaggccgactattactgtcaagtgtgggatcgtaataatgaccatgtcgtcttcggcggagggaccaaactggccgtcctaggtcagcccaaggctgccccctcggtcactctgttcccgccctcctctgaggagcttcaagccaacaaggccacactggtgtgtctcataagtgacttctacccgggagccgtgacagtggcctggaaggcagatagcagccccgtcaaggcgggagtggagaccaccacaccctccaaacaaagcaacaacaagtacgcggccagcagctatctgagcctgacgcctgagcagtggaagtcccacagaagctacag

SEQ ID NO: 3101 - DNA, 146 bp, Homo sapiens
  unsure (20): n=A,T,C or G
ccatgggaagcccgagaatnggttcctatagacccggttcctgatgaattcccaggccaaaagaaccaccctgacaaattttgggttctgaaagtcttattattggacagtattgcatagctagagaaggaaaaggatttactcat

SEQ ID NO: 3102 - DNA, 268 bp, Homo sapiens
  unsure (164): n=A,T,C or G
  unsure (231): n=A,T,C or G
cattttccccttggtcacacatctgtaacaaagccctaaagtcaaaaccagtgacccgagacccacgtgcccaagactcccggggtctgaacctaaactttgtacacgttactaacataccagttcgcttacctaaaagggctaggtcatatcttaccacgtanacaaacatttcctctagaaaaaaggacagcagggatcctcttggcttccttcagccagtggctttangacatgcaagtccctgtagtaagggaagtctatgacc

SEQ ID NO: 3103 - DNA, 10 bp, Homo sapiens
tcaaaaataa

SEQ ID NO: 3104 - DNA, 159 bp, Homo sapiens
gaggtaaagctcaaacttacagagtctgttgtaaggttaatacatagaatgctagctttttagtcacctgagaatcaggaaattcacatgaacataattccctatactgacaaagaactatagctacctatgggcttgtcaagttcctacgcttcattc

SEQ ID NO: 3105 - DNA, 156 bp, Homo sapiens
  unsure (1): n=A,T,C or G
  unsure (31): n=A,T,C or G
nttcgaggtccaccctgaccatcaacagggncgaagccggcgatgaggccgactattactgtcaagtgtgggatcgtaataatgaccatgtcgtcttcggcggagggaccaaattggccgtcctaggtcagcccaaggctgccccctcggtcactc

SEQ ID NO: 3106 - DNA, 238 bp, Homo sapiens
tactctcagcatgagaaatacaagtattatgagaaagagggcttattctgagcagaatttccatctctgctgctctcccatctgccggccgttggattgggaatctatactggaacacacctgacaacctccaccagcactttttgatgaagaattggaattcactctattcacatagtagaattatatcagagattgcaagatagctaactgaagagctactatgattcttgggtgg

SEQ ID NO: 3107 - DNA, 168 bp, Homo sapiens
catgttataagaattctagattccattgcttttgaaatatgtttctttttaggaactaaaagtcaacttatagtttgatttctgttttatttgtactgtgtttctgattttgtgggtttctaaataaaaagatcaaacccaccactttcaatatactgttttctattt

SEQ ID NO: 3108 - DNA, 122 bp, Homo sapiens
gtatcacatgagctgctgagctgaaatcacagtggtttatttggtgtcttgcaggacccagcctttatatgttaatgtttttccctcattggtatgggatacctacaggatgaagtgcagac

SEQ ID NO: 3109 - DNA, 196 bp, Homo sapiens
  unsure (85): n=A,T,C or G
  unsure (188): n=A,T,C or G
agatggtcctcctctgtgcccatgacccctcagcagccaaggctggccctgccagataaatgtgtgtgcccatgatcacacccangggcacaggccacatacgtttccctgaaaccttgggctccagcctccatcccgtccatgtgggagggaacttgggtcccagcagtgtgtctttcagcaccaantcatgttt

SEQ ID NO: 3110 - DNA, 380 bp, Homo sapiens
acctaaatagcttggcgtaatcatggtcatagctgtttcctgtgtgaaattgttatccgctcacaattccacacaacatacgagccggaagcataaagtgtaaagcctggggtgcctaatgagtgagctaactcacattaattgcgttgcgctcactgcccgctttccagtcgggaaacctgtcgtgccagctgcattaatgaatcggccaacgcgcggggagaggcggtttgcgtattgggcgctcttccgcttcctcgctcactgactcgctgcgctcggtcgttcggctgcggcgagcggtatcagctcactcaaaggcgggaatacggttatccacagaatcaggggataacgcaggaaagaacatgtgagcaaaa

SEQ ID NO: 3111 - DNA, 295 bp, Homo sapiens
tcctccatcctgtggaacgtgggaaaactatcttgagtgttggcgtgttctaagtatgacataatagtttaatgtatgataaatcatgggtgtttagacgaaagatttacacatataaattggaggctttagcggtcttagtgtaactaacttttcggtccccttaacccttgatgcctgttctatgggtctctagagcggaaggagcattatactccggaaacatttgctggaaggggttatgagaaattcctctctgtatgctaactccgtaatacaagcgtttgtgtatttt

SEQ ID NO: 3112 - DNA, 287 bp, Homo sapiens
  unsure (1): n=A,T,C or G
naggtgatttgcccgccttggcctcccaaagtgctgggattacaggcgtgagccaccgtgcccagcctaacagttgctttcttttcagatccggagacatacccttcagccttgctgccatgtgaaatttgttgtctaccagaccccagagctcccagttcttggtgtgcagcaagggcagaagtgggtgactcaccttctggcacaaacatgttggcgatcaccatgagcccggccaggatgaggaaggaggccaccgtggcacggcggcccacgtaaatcatggt

SEQ ID NO: 3113 - DNA, 508 bp, Homo sapiens
  unsure (1): n=A,T,C or G
ncgaggtgttgttgcctgggctggacgtggttttgtctgctgcgcccgctcttcgcgctctcgtttcattttctgcagcgcgccagcaggatggcccacaagcagatctactactcggacaagtacttcgacgaacactacgagtaccggcatgttatgttacccagagaactttccaaacaagtacctaaaactcatctgatgtctgaagaggagtggaggagacttggtgtccaacagagtctaggctgggttcattacatgattcatgagccagaaccacatattcttctctttagacgacctcttccaaaagatcaacaaaaatgaagtttatctggggatcgtcaaatctttttcaaatttaatgtatatgtgtatataaggtagtattcagtgaatacttgagaaatgtcaaatctttcatccatacctgtgcatgagctgtattcttcacagcaacagagctcagttaaatgcaactgcaagtaggttactgtaagatgtt

SEQ ID NO: 3114 - DNA, 166 bp, Homo sapiens
ttcgaggtccatgggatggctcttctgaccattgggggccaggccaggccaggccaggcttagggcagcaaggaccaggccaaaggggcagggcctcctttggaggggttgaggggtacatcctcggctggtgtttgcatccaggggtccagcaggatctcttcca

SEQ ID NO: 3115 - DNA, 350 bp, Homo sapiens
  unsure (3): n=A,T,C or G
tcnagggggatggaggactagtgatcggctggctgcttccagtcgattagagaggtgaaaaagctgaacgtgtgccagtaatcttcaaaaggcagaacatatcacctctgccccgtaaactgttctctccgaggggaaaaaatggaagttatcctcacagttcactgccgtggtatttcttctgtcccatgctttgcatgactgccatggtacagccttgtttcaaactgttcactgtgatctgtgggtctttgagtttcagtgagtttgctgaaatgtcgaagaagtagttccaaacttcaatgttcaatgaaatttttgttcaagtttgaaatggagagagcagcttt

SEQ ID NO: 3116 - DNA, 344 bp, Homo sapiens
  unsure (1): n=A,T,C or G
ncgaggtctgaacgtctgtgggtgagccggggtcccctgggagggtcttcttgcactctgactgcagtcggtaggcactggacgtcagtaaacgaagggaagtcctcaccatatcagacttgggttttttggggaataatgctgccatttctgtaacagctaccgtgtatcctctctgagcagggaatataactgtcatgtttattttcttgggctgctcttaagagctcctgtatgtttttggtgatctgttcagtcctcctgatgacatcttcggtgctagggagagtggggcttggggccacatggggttctgctgtgtctggtaccaagccatcccctgg

SEQ ID NO: 3117 - DNA, 365 bp, Homo sapiens
  unsure (1): n=A,T,C or G
ntcgaggtcatgagggtccccgctcagctcctggggctcctgctgctctggctcccaggtgccaaatgtgacatccagatgacccaatctccttccaccctgtctgcatctgtcggagatacagttacaataagttgtcgggcctctcagaatatagatcggtggttggcctggcatcaacagaaaccaggcaaagcccctaatgtcctaatttatgcgacttccagtttagaagaaggggtctcattaagatttactggcagtggatctgggacacaattcaatttaaccatcaccagtctgcagcctgacgattcagcaacttattattgtcaacattattctgcatctcttcgcagttttgg

SEQ ID NO: 3118 - DNA, 350 bp, Homo sapiens
  unsure (1): n=A,T,C or G
  unsure (145): n=A,T,C or G
ngtggaacagacgtcagaaaaacaaaaccttcccaaaatactcctggatttggaagatggaaattgcaaactgcagtgtagcaaaaggaacattcattttaggatctggaaatctgggtgggagtccagactcctctcactagcnggaagactgaaggcaggttaggctaactattctgagaccacaaaatgcaactcagaactggatcgagtgttattacacataggaaaagtgctttataaattgtgaagcagtatatatacaatgttaggaagcagcatcataaagaccttgataaatcaatgagaaaaaaatacaaaaatgcacaaaggatgggaataggtaattc

SEQ ID NO: 3119 - DNA, 3 bp, Homo sapiens
  unsure (3): n=A,T,C or G
ccn

SEQ ID NO: 3120 - DNA, 348 bp, Homo sapiens
  unsure (22): n=A,T,C or G
ctgagacaaaagtaggcccaantccttccacagggacggaatgatgctgccagttcactgtcagcatgggtgggaagagattactgacaaaacagaccaaagtgttgggcttgccaaactccaggggcttcagcgtgaacacttcagcgataggaaaccctctggacaccgggattctcccatcaagttttggccctatttgctggatcatccactcgcagaactctttgtcaaataaaatggcaggagcatctccctgttcctgagcccagtcagcaaattcgggcaggcgaggcacccgagtgttctgggaaaagtcgaagaagaaaagctggtcctcgtcgtagg

SEQ ID NO: 3121 - DNA, 372 bp, Homo sapiens
  unsure (1): n=A,T,C or G
ngcaggtggagggcacagagagggctctgggtctaggctgcagctctgtggcctgtgctgggtcatgaggacatggggacacagagggacgggtgagactgggtgaggtgccagaatccaaccctcccaggacagtcaccagaaaggagacagtctcttagggcagagatgtgtctgtccctggagccccgtcacctctggggcccagtgtctctctgttcacggatcggcctcctgccttcctcaaagggcatgttagactcaggaaatgaccagaggggagtgaatgaggggtgcagagaactccatggctaccaggtgaagtttggggtcatcacaggctgctggggtgggcctgggggctgctgagtc

SEQ ID NO: 3122 - DNA, 115 bp, Homo sapiens
gcatcgacaaaagaaccattgaaaaatttgagaaggaggcctatgacccccacccagataggcccaagcctgctgcctatcatgtggcagctctacccttgatggacgatcccga

SEQ ID NO: 3123 - DNA, 77 bp, Homo sapiens
ccacggcagtgactgctgattgcctaaccccacatgtgttctcccccttccctgataatcaagcccctgattttcag

SEQ ID NO: 3124 - DNA, 315 bp, Homo sapiens
aaaatcagattttctaaactacaattgttttagaacactgtatgaagaacttatctagtcatagttatttgtagtcaggattttaacagcttgcaacaggtaatgttttgaatataaatatctttccaaagtgttactaatggtaaagagataattttctaggcttctattctgctgcttgaagtcagaactgctgatggagacaaaggcacgaaagtgtacgtattccggattagcaacccaggaacccatcacttctgaagactctaaactgtgctgtcattttgtttttatatgcattaaaatatttgtttt

SEQ ID NO: 3125 - DNA, 159 bp, Homo sapiens
  unsure (87): n=A,T,C or G
  unsure (110): n=A,T,C or G
  unsure (111): n=A,T,C or G
  unsure (132): n=A,T,C or G
tcgaggtccatgagtgacaggtggcctcttggtgggagaggtggggcagggggaaggcagctcccactagaccagggcagtatttangggaaggaggcagattggagcanntggctgccaacacctggcctnactcagggagaggggccttgggcctgc

SEQ ID NO: 3126 - DNA, 382 bp, Homo sapiens
ttcgaggtaaaatcttgagggattgatctcgcctcatgacagcaagttcaatgtttttgccacctgactgaaccacttccaggagtgccttgatcaccagcttaatggtcagatcatctgtttcaatggcttcgtcagtataagttcttctccaggaactcacgcactgacttggcaccccggcctatggcattggccttccaggcatggtatgtgcccgaggggtcagtctgatagagcctaggagtgccatcaaagtcgaaacccacgatgagggcagagatgccaagcggcctgcgcccattgctctgcgtataacgctgcttcagactggcgatgtagcgggtgatgtactccacaggtgaccgggtcctccgcagtc

SEQ ID NO: 3127 - DNA, 310 bp, Homo sapiens
  unsure (2): n=A,T,C or G
gntttaatatggatatactgatgaagacttcaaaattcaccaagaatctttgggatctaatttcttcaaccaatttactttagggtcctttttactgtaggtggtggggatctacctggttctcaatttgacaccctctcaacatgaatgaggttcaaatcacattcattcctaagcgatcactcaagaatggtacagatgtgttggagtatgccaatacctaaggtaaaaaagtagattatctttaactccagacccatgttctcaagataaaagcctttgacattcatgatcctgtcacattttcagg

SEQ ID NO: 3128 - DNA, 381 bp, Homo sapiens
  unsure (194): n=A,T,C or G
  unsure (195): n=A,T,C or G
  unsure (196): n=A,T,C or G
  unsure (238): n=A,T,C or G
  unsure (243): n=A,T,C or G
  unsure (271): n=A,T,C or G
  unsure (273): n=A,T,C or G
  unsure (280): n=A,T,C or G
  unsure (289): n=A,T,C or G
  unsure (292): n=A,T,C or G
  unsure (314): n=A,T,C or G
  unsure (315): n=A,T,C or G
  unsure (327): n=A,T,C or G
  unsure (329): n=A,T,C or G
  unsure (349): n=A,T,C or G
  unsure (360): n=A,T,C or G
  unsure (361): n=A,T,C or G
  unsure (377): n=A,T,C or G
ctggcactttaagaaaacgataatctcgaaaaccacaaaattgccaaattgttccctaaactcctaagcagataaacatgactaatgaatgagtttgttttgtaaagaaaaatcattcaaataaattgaataattcatactgagatgcaaagtttgtcttctttcttcctatctacttggatttataaaggggnnnaccgtaatataggaaaatataccctattttgaatgtggcatntttgnttgaaaagctggcccaattaattaaaantncttgtantggaaagtntcntcccctgagcagtccatatttnnataaatgggaanangacatctatggcgcagcatnttcatagtctnnactgagactaatgtcnacaa

SEQ ID NO: 3129 - DNA, 359 bp, Homo sapiens
  unsure (330): n=A,T,C or G
  unsure (353): n=A,T,C or G
cgtgaataccaagacctgctcaatgttaagatggcccttgacattgagattgccacctacaggaagctgctggaaggcgaggagagcaggatttctctgcctcttccaaacttttcctccctgaacctgagggaaactaatctggattcactccctctggttgatacccactcaaaaaggacacttctgattaagacggttgaaactagagatggacaggttatcaacgaaacttctcagcatcacgatgaccttgaataaaaattgcacacactcagtgcagcaatatattaccagcaagaataaaaaaagaaatccatatcttaaagnaaacagcttttcaagtgcctttntgcagt

SEQ ID NO: 3130 - DNA, 238 bp, Homo sapiens
  unsure (12): n=A,T,C or G
  unsure (14): n=A,T,C or G
  unsure (36): n=A,T,C or G
  unsure (47): n=A,T,C or G
  unsure (119): n=A,T,C or G
  unsure (187): n=A,T,C or G
  unsure (204): n=A,T,C or G
  unsure (212): n=A,T,C or G
  unsure (218): n=A,T,C or G
ttttgtatgtgngnatgtatgtgtaaatagcaatanaagaaagattnaaaagtttgctaagttttttctttttaagccctttaagtaatgatataactagaaactacgtttcatctcanaggaaaaaccacaggtgatatattctcatgcttcagggtaaaaacctctcttaaaaggctatgtttgngaaagccttcctaaaantatgcttntgttgntactatcaatttgatattca

SEQ ID NO: 3131 - DNA, 374 bp, Homo sapiens
  unsure (219): n=A,T,C or G
  unsure (224): n=A,T,C or G
  unsure (323): n=A,T,C or G
  unsure (339): n=A,T,C or G
  unsure (346): n=A,T,C or G
  unsure (362): n=A,T,C or G
  unsure (368): n=A,T,C or G
  unsure (369): n=A,T,C or G
  unsure (371): n=A,T,C or G
ctgtagaaagagcgagagagatggttaaaatgccattaaggaaagctccttgtttagaatctttaagatagagctatatgtaaccatcactattcagccatttttgacctacaaaaatggtcacttcatatggtccaacacatttggtgagaatccttaagaagtggagggcttttcctttgggcaactaatttagaggtgatcccaaacctagaaatntaatnatatatctagattcttctctcacctcttctacttctactctttctactttggaaagattttcaaagcacaacacctgtcacagaacggatgtaagttanttttcatagaaggagnccctctntttcatagaggaattngtgtanntnccc

SEQ ID NO: 3132 - DNA, 335 bp, Homo sapiens
ctgctatctagaagaaaaccaaggtcccttaatatagtctaaatataatgtgtggcttattatagagaaatctttagcaacgtaagtttaaccagtaagtgtcacaactgatcaacagtacttaaaaggaaacaaacaaaaatcacactagccacaaatttccaccatatacacatgaaattaattttaatctgttttgactccttgacactaactgatcattaatgaaatatgatatggaaagatcacagagtagaaaacaagcaaagattagtttatacaacagtgactatatacatcagagggaaaacatgctagctaatgcaacattaagg

SEQ ID NO: 3133 - DNA, 414 bp, Homo sapiens
  unsure (20): n=A,T,C or G
  unsure (164): n=A,T,C or G
  unsure (201): n=A,T,C or G
  unsure (213): n=A,T,C or G
  unsure (264): n=A,T,C or G
  unsure (275): n=A,T,C or G
  unsure (277): n=A,T,C or G
  unsure (278): n=A,T,C or G
  unsure (299): n=A,T,C or G
  unsure (307): n=A,T,C or G
  unsure (319): n=A,T,C or G
  unsure (322): n=A,T,C or G
  unsure (341): n=A,T,C or G
  unsure (348): n=A,T,C or G
  unsure (352): n=A,T,C or G
  unsure (356): n=A,T,C or G
  unsure (375): n=A,T,C or G
  unsure (378): n=A,T,C or G
  unsure (379): n=A,T,C or G
  unsure (395): n=A,T,C or G
  unsure (404): n=A,T,C or G
ctttcccagaattagttgtntagggttggcccaagagatgtaagaaaaatctcgcattgctccctaagcaccctgggccttattaaagagcaacttctatttccagtcgggggagtaacactaaagctacaagaaatatgtaataatgataggtaataatgtgntccaaagctttttcaaactagaataaggaggcaaatngaagaatgaganactgatgtccacagttcattggcagaatctaaccccttctgttatcttttntaatactattngnngcttacatagaagtttcacangaagatanaaatgcttgaanagnctgagagtaaaaaagattntgctgcnaaangctntgatataaactgcctcttncannccacagggatacctgnttaaagaantttcttattt

SEQ ID NO: 3134 - DNA, 181 bp, Homo sapiens
ccaatccgttttttaattcttaaattcttgacattacagaactaaactgaaatttattaacattccactcttacacttcttatcgacaaacagaaataaaattcatgagccaaaaaacccaaaacaaaactaaaaacagggaaaagcttataaaactaaatatggatcccagcattaacag

SEQ ID NO: 3135 - DNA, 341 bp, Homo sapiens
  unsure (202): n=A,T,C or G
  unsure (260): n=A,T,C or G
  unsure (338): n=A,T,C or G
aaaaatccatgttcaacccaaacccactccccaaccctaactataggagatgaccctttaggaagctgaaaaggtttttataaagtcacaaaatgcatctcaatgcaagtttatataatatcaaaattatctcactgattttaatgtgtaagttatataatttatttcacccaccttgtattattctagaaaataagtcagnttttatatttaacaaatatgtgcaaaaatcataaacatagcttatagaaatatcaacngatatctaattacaaagtttcccgatctacttcgcttaaaaggcccaagtccccttttttctttttatttataacctntat

SEQ ID NO: 3136 - DNA, 284 bp, Homo sapiens
  unsure (137): n=A,T,C or G
  unsure (170): n=A,T,C or G
  unsure (246): n=A,T,C or G
  unsure (270): n=A,T,C or G
  unsure (275): n=A,T,C or G
aaaccaatccaatatacagacctttgaaagtaaaagatcaactgcacagatattttttaactaaagaatgtgtcagtaaatctatgtaaatatccaaattgacacaaattttctaaagagttaaaattattaaattncaaattattattttatatacttttgatcaaaanataatatttgcttcaccataagtttgaagatattaagaaaacataatctaaggtttattacaaaaaataatggccnctgatagatatacagagaataatntattnttaaatttt

SEQ ID NO: 3137 - DNA, 268 bp, Homo sapiens
aaatatattccagaagagcgtttataattcatttacaagtgcagtattgcgctagtaaatgttacttgacctcttgtataaataatgccgattaagaattagtcctggaatagttttcgaatttctaactctgtagatctaaaacacaattgtaaatggtataaagatgtaagaatcatattgtgataaagccaatctcaaaaatagagaatccagacccttcccagataatttaagaactgagttttcctcaacttaaacatgatgg

SEQ ID NO: 3138 - DNA, 365 bp, Homo sapiens
  unsure (349): n=A,T,C or G
  unsure (363): n=A,T,C or G
gtcgatttgggaggaaaggtgtggctataaactttgttactgaagaagacaagaggattcttcgtgacattgagactttctacaatactacagtggaggagatgcccatgaatgtggctgaccttatttaattcctgggatgagagttttggatgcagtgctcgctgttgctgaataggcgatcacaacgtgcattgtgcttctttctttgggaatatttgaatcttgtctcaatgctcataacggatcagaaatacagattttgatagcaaagcgacgttagtcgtgagctcttgtgaggaaagtcattggctttatcctctttagagttagactgttggggtgggtntaaaagatgggcgnct

SEQ ID NO: 3139 - DNA, 385 bp, Homo sapiens
aaaacattgttttctaaacactaacaaaaaaaattaagggcaaactgaaaatacaaatgagatttacaggcactgtgtgtagaatgtgtaaaaattcacttagcttttcttttgtttttttggtgttgctttaagaaactttatcaaatatatttcttacaaatataaagctttctctcccaattgaaggcaattaaaaaaattcaaagtttatcaatactcagtacacaggtgaaccagtcaaattcattttctttctggaaaagaataacaaaccaatatttaggatgttcagagactcaacaaaaaccattctagaaatcacccagaacaattgttttctgttgccaaagccttttgttcttcaaaagtcaccatccaccag

SEQ ID NO: 3140 - DNA, 385 bp, Homo sapiens
  unsure (1): n=A,T,C or G
  unsure (3): n=A,T,C or G
  unsure (46): n=A,T,C or G
  unsure (186): n=A,T,C or G
  unsure (218): n=A,T,C or G
  unsure (296): n=A,T,C or G
  unsure (297): n=A,T,C or G
  unsure (326): n=A,T,C or G
  unsure (331): n=A,T,C or G
  unsure (338): n=A,T,C or G
  unsure (343): n=A,T,C or G
  unsure (357): n=A,T,C or G
  unsure (372): n=A,T,C or G
  unsure (379): n=A,T,C or G
ntntcgaggtaaatggaaagttactattataaggttaatttgcagncctcttctaaatagaaaaccatatccttggctactaacatctggagactgtgagctccttcccattccccttcctggtactgtggagtcagattggcatgaaaccactaacttcattctagaatcattgtagccataagntgcgtgctttttattaatcatgccaaacatantgtaactgggcagagaatggttctaaccaaggtacctatgaaaagcgctagctatcatgtgtagtagatgcatcattnnggctcttcttacatttgtaaaaatgtcanattangccatcnttaantcatattagtgacnccggaacagcacctnccctatntgtatg

SEQ ID NO: 3141 - DNA, 176 bp, Homo sapiens
  unsure (171): n=A,T,C or G
  unsure (172): n=A,T,C or G
  unsure (175): n=A,T,C or G
gcctctgtctccgagctcgcctgcatctactcggcccccattctgcacgacgatgaggtgacagtcacggaggataagatcaatgccctcattaaagcagccggtgtaaatgttgagcctttttggcctggcttgtttgcaaaggccctggccaacgtcaacattgggagnntcnt

SEQ ID NO: 3142 - DNA, 242 bp, Homo sapiens
  unsure (109): n=A,T,C or G
  unsure (221): n=A,T,C or G
cctgccagtctctggacggctacggcgtagggtggcaggcacaatctccgggggcagatgaaggtaatcacggagatactggataccctcattggtaaggtaccagtanaaatgtctccaggcaaactgttccttcacgtagcctcgggacttgagagactgcatggccttcacgacatgaaggttgggcacattcttgtctgccagctccgggtgcttangcatgtggacatccttcttgg

SEQ ID NO: 3143 - DNA, 200 bp, Homo sapiens
  unsure (148): n=A,T,C or G
  unsure (152): n=A,T,C or G
  unsure (177): n=A,T,C or G
  unsure (198): n=A,T,C or G
ctggtgttcagcctctcaacagcaaaccatgagactacataactatcaggttttcacttcactttcttctcttctgtctaaataatcacaatgcctttaggcttataaaaagcatctaatcattacagtgtcttatcctttttaatgntctntccttttataaaactgtggcaaganctgaatgtttaggaaaggtancc

SEQ ID NO: 3144 - DNA, 364 bp, Homo sapiens
  unsure (69): n=A,T,C or G
  unsure (95): n=A,T,C or G
  unsure (353): n=A,T,C or G
gatttacatgtgcatatacaatttataaagttaaaaattctctgtacaaaatcttacatgtacagagtntatataagccccattcttatggctgnatcaccacacagatttgcttaaaactataatactacaaacactcgggttcttcatattcaatcttggcacccatatagcaatacactattctgaaatgtaaattacaaaggaaataaaatgtaatcatgcagacattttttaatataagaaaatgcgataaaatatactacaccagatcaacatttatcaattccatagatactgagttttcaacttactgcactgttttcatataagtacatgcaaaactagcagantatggattttt

SEQ ID NO: 3145 - DNA, 374 bp, Homo sapiens
  unsure (329): n=A,T,C or G
  unsure (330): n=A,T,C or G
aaagtttatttcctttgtggatacaacattatttttacaaaaatgcaaattgggaggaaaaactaaggctagagaatatatcttctacttcttggcaaagcatgtttactattggtcaatgttattatttgactctatattgccaaagggataatcggggagaaggtcataggaattttcatccttctttaatagcagacattaaagatgtctcctattataaggagttatgtgaggtcagctaaaactaattatttgaggtcatacaaatgactcaaaattcttagagaaaccatgggtttggagaggaatcctcatatatatttcannaagaggagaaaaaataagatagaaataagatcttgtattttttt

SEQ ID NO: 3146 - DNA, 414 bp, Homo sapiens
ctgttttattgctaaactatcatgatacaagccgtataaaaatactttacatataggaaaaataaactacattaaactggagattaaaaacatttgcataggaatgtgatgtattcaaacgcctttaacagtcaggattttctaaacctaagcctgccagcaccaccatgttggagagacctgtttgttggagaattggttttctctcctctgagggctgtagaggccagaggggtgagtgaggttctttgacaagatgtccaggatgctaagcttgtcccaacagccatagcctcggtctgctcaggccaatcagaatgctgtgagcacctgctctaatggaaacaacatcatttgcatccattccattcaaagcttgaactcagcagggagtttattctggtcagccaacag

SEQ ID NO: 3147 - DNA, 396 bp, Homo sapiens
  unsure (278): n=A,T,C or G
  unsure (299): n=A,T,C or G
  unsure (332): n=A,T,C or G
ctggggagatggtgtttgtatatgaaaatgcaaaagaaggagctcggaatataagaacgtcagaacgagtgacactaatagtggataacactagatttgttgtagacccatccatttttactgcacagccaaatacaatgttgggcaggatgtttggatctggccgagaacataactttacacgacccaatgagaaaggagagtatgaggtggcagagggaattggttccactgtgtttcgagcgattctggattactataaaacaggaataatccgntgtcctgatggcatatctatncctgaactgagagaagcatgtgactatctttgnatctcttttgaatatagcactattaaatgtagagatctcagtgccctaatgcatgagttatcaa

SEQ ID NO: 3148 - DNA, 425 bp, Homo sapiens
  unsure (92): n=A,T,C or G
  unsure (155): n=A,T,C or G
  unsure (158): n=A,T,C or G
  unsure (164): n=A,T,C or G
  unsure (169): n=A,T,C or G
  unsure (314): n=A,T,C or G
  unsure (386): n=A,T,C or G
  unsure (417): n=A,T,C or G
ctgctgacagttctttggtggaaaagtaagttgcgtacttacccaagctgcccaaatgattatcaagccaagtttgtttttcaaaaataggntttaagatacaccaaagaaactatacaatacaaaaatttaacaatgaagttaaagtatatagncanaagccnaatangacaacacacatgtataatgtagaaaagaatcctttcaggtcctagaaaactaaaatggggagaacttactgaagggtaacatacataaaatgagtactaatagcaaggaataatcctaaacattttcccaataaactgactaancctcaaaaggacagcttaggaaaatgattaacatgcagtttttcttttttcctagccaattcagttctaccntagataaatctgggttgccaagcaatacatntataaatt

SEQ ID NO: 3149 - DNA, 381 bp, Homo sapiens
  unsure (224): n=A,T,C or G
  unsure (254): n=A,T,C or G
  unsure (257): n=A,T,C or G
  unsure (288): n=A,T,C or G
  unsure (295): n=A,T,C or G
  unsure (306): n=A,T,C or G
  unsure (307): n=A,T,C or G
  unsure (320): n=A,T,C or G
  unsure (336): n=A,T,C or G
  unsure (342): n=A,T,C or G
  unsure (360): n=A,T,C or G
  unsure (378): n=A,T,C or G
  unsure (380): n=A,T,C or G
ctggatgatgaagtagcacagactcctatgccatcagaatatcagaacatgactgtggatattctctgcaatgactgtaatggacgatccactgttcagtttcatatattaggcatgaaatgtaagatttgtgaatcctataatactgctcaagctggaggacgtagaatttcactggatcagcaatgacgagcctacacagtactggagaacttggcattttntgatatagaaaaaggctttccttggtatcncgntatcatgtgtcgtcatctatgcattatagtngatgggntttgtactacnngtcaccagcatanaatcatattacaagtncgtaangattcaggggctcttganagactttatcatagcctntnt

SEQ ID NO: 3150 - DNA, 328 bp, Homo sapiens; identical to SEQ ID NO: 2874

SEQ ID NO: 3151 - DNA, 228 bp, Homo sapiens
ctgaaagtaaacagaatggattgccagttacatgtatgcctgcccagttccctttttatttgcagaagctgtgagttttgttcacaattaggttcctaggagcaaaacctcaaggattgatttattgttttcaactccaaggcacactgttaataaacgagcagggtgttttctctcttcctttctaatatatggagtttcgaagaataaaatatgagagcaatattt

SEQ ID NO: 3152 - DNA, 303 bp, Homo sapiens
  unsure (275): n=A,T,C or G
aaaaacaggacttgtcactttatataaaagaatagtatgctctatttcctgaatggatgtggaaatgaaagctagcgcacctgcactttgaattcttgcttcttttttattactgttatgattttgctttttacagatgttggacgattttttcttctgattgttgaattcataatcatggtctcatttcctttgcttctttggaatatttctttcaacacattcctttattttattatacattgtgtcctttttttagctattgctgctgttgntttttattctatttacaggatgattttt

SEQ ID NO: 3153 - DNA, 236 bp, Homo sapiens
aaaaaagatgaaaaagaaaaaaaaactttgtaaaatgcgagaacagaagcaaaagacactacgctctgtcattttatctttcttttgttgaaagactaaaaaaaaactgaaatgctttttagacaatcaaatgttaggtaagtgcaaaaacttgttttttcttactggtgtagaaattaatgcctttttttatttttcagttattttataataacgaaataaaaagaaccccccag

SEQ ID NO: 3154 - DNA, 343 bp, Homo sapiens
  unsure (105): n=A,T,C or G
ccacttgtgtgggtcctcacaagcaaagagagcactaaacttgacattgggagtccaccactccaactttgctttctgaaggttttggtgtacattgagccccanaaggaaaggagagtatctgtgagtgggggcctcccttgaccccagtacgaagtctatgccctgaatccccagagtagcccttcctggtgcccaactggcctggggacaaacagcgtccactacatctaggactgccggctaagtggacacacttcttgacctcctaccaggaactttggtaaaagctagctttggggaaggggttgggtgtaaatatgagagggtggagggagaccag

SEQ ID NO: 3155 - DNA, 355 bp, Homo sapiens
aaaaaaaagttcgagtctgttgcactaggctgtacatgactaaagttgacagatgctatgctagatttataatcactagttctggtacttgtgtctttgtatgatcaaagcatgcaataagcaatacaaaataccaagccttatacttaaaagaagtttaacatattggttaatatactggttaatatactggttaaacatattgaatgtatataagtggcaaaactagatttttaaggaagtgtacattataatattggagctcagtactgcatgaagagacttcattaaaactaagaaaacatttatttggggagaaattttaggcatttaagaacttgtatttttctatttt

SEQ ID NO: 3156 - DNA, 269 bp, Homo sapiens
  unsure (1): n=A,T,C or G
  unsure (2): n=A,T,C or G
  unsure (8): n=A,T,C or G
  unsure (145): n=A,T,C or G
  unsure (246): n=A,T,C or G
  unsure (250): n=A,T,C or G
  unsure (257): n=A,T,C or G
nncgaggnaaaagatcattctgttctttcaaggagaaataagcctaaaagaagaaaaacaaaaaaaattctgtataaaactgtaatcctttgtattcatgtttacagtgctattactataattcaaaattatgtatgtgacttanagttatataatcataatttatgtttatttcaaatatctaagtttattgcttggatttctagtgagagctgttgaatttggtgatgtcaaatgttctagggntttnttagttngtttttattgaa

SEQ ID NO: 3157 - DNA, 430 bp, Homo sapiens
  unsure (335): n=A,T,C or G
  unsure (424): n=A,T,C or G
ccattacatcctctttttaatttacataatacagatacttgagaaagttgttgtggtgttgtatgccaagaaaattctttttattggtgcctatattgtaacaattatttttaatgcattgtattttgaagtaacggttcagttaaatttttcacctgctgtgtaactgaaacacaattacagtctataatcatctgtagaagtctggagataattttgcaactcatgttatgggttaaatgaatatttttgtaaaagtaaaagcaacaaatttataaattgattatttgaaactttacaacacaattgcatcccaaatacaaattgtattgctnattcattatagctattcgtcctgtaatctgtttctaggtgaaggcatactccagtgttttaggggttttgaaaataaatatttacctcngccgct

SEQ ID NO: 3158 - DNA, 228 bp, Homo sapiens
gttaaaacagaaataaattaaactcttcatcaacaaagacctgtttttgtgactgccttgagttttatcagaattattggcctagtaatccttcagaaacaccgtaattctaaataaacctcttcccatacacctttcccccataagatgtgtcttcaacactataaagcatttgtattgtgatttgattaagtatatatttggttgttcccaatgaagagcaaattt

SEQ ID NO: 3159 - DNA, 515 bp, Homo sapiens
  unsure (352): n=A,T,C or G
  unsure (353): n=A,T,C or G
  unsure (409): n=A,T,C or G
  unsure (427): n=A,T,C or G
  unsure (451): n=A,T,C or G
  unsure (467): n=A,T,C or G
  unsure (474): n=A,T,C or G
  unsure (510): n=A,T,C or G
aaagatattttcttgaattatttagaacatggtaagcctggtattttttaatcaaacaaaatatttatgaaatgggttttctcttaattctggattcatcatggctttctaataccaattgtaatatttacaatattcaccaaaacttagaattttgcaaatgctggaattctgccagtgtttctttgctaagccttgcatgcaaaatttgaaattttaacattggcacccaaaacctacatggaatgtatgtctggagtatttcaaactttacattgaaacataatttccttggaaaacaaaccataagcctgaggaggtttttatcaactggaatgctttatattagttnngtttttcactgtacattcctcattttacattcatttaacctgccgattatttaatntttttattgtaaagtagnttttagcatttgctcttatttttntactttgatgcctttncaattgncatgtctttacctgccccgggcggcccgctccaaanggccg

SEQ ID NO: 3160 - DNA, 486 bp, Homo sapiens
  unsure (327): n=A,T,C or G
  unsure (344): n=A,T,C or G
  unsure (364): n=A,T,C or G
  unsure (371): n=A,T,C or G
  unsure (390): n=A,T,C or G
  unsure (432): n=A,T,C or G
  unsure (447): n=A,T,C or G
  unsure (452): n=A,T,C or G
  unsure (458): n=A,T,C or G
aaagaaggtagataaatttattgccacttgaaaactaaatataactcagatgagtcagacaaaaaaaatcattgacattaaaattattattatttgaccaggtttgtcttttgaagatttctctcacaggcacttctgcaacaaatttgtataatttaatataaatattttgtgattattcttaaaggccaagcaatgggcatttatgatggctaatcataaatacacaataatatatattacatagtatatattaattgacaggttgcattttttctttgagcttatacacttttggaaaaagtctaccttttataaatatcaagntggatattcttgtctgntgcatttgctaaataagagncaatagntaagaatctgtttcttttntatatgtccggattgttccatttggaatacagaatcccctgnataaaactagcatgntttgntgaagnccttgtgaacttgactctaaaatatttt

SEQ ID NO: 3161 - DNA, 413 bp, Homo sapiens
aaaaactatttgtaatgtaattttaatgcattttttacaggcccagtaatggttaaatacgtcagcttactgaataattttaactatttattcttctaaggatacagcttgtctctggattttccagtcttaattttatattttattaatctattttaatgcttgcttttcccatttatagacgttgtagcagtaattgcaagaagttcttgagctgaattcctgttgtgacaacttcctataattacagtagataactttttctttcagtccgtatataacttttctataacttgtgatggacaagagatatgcttatccaataaaataagcttaaatattagatgctcttgggtcaaaatgtcctttaccaaattgacctttttatgagttctttgggtaaatacttttac

SEQ ID NO: 3162 - DNA, 201 bp, Homo sapiens
  unsure (69): n=A,T,C or G
  unsure (142): n=A,T,C or G
  unsure (150): n=A,T,C or G
  unsure (161): n=A,T,C or G
  unsure (169): n=A,T,C or G
  unsure (180): n=A,T,C or G
  unsure (181): n=A,T,C or G
gatggcacaacatacttgaagaccatagaagtttttgatcctgatgccaatacatggaggttatatggngggatgaattaccgtcggctagggggtggcgtaggagttattaaaatgacacattgtgaatcccatatttggngaacacanagaacacaggncttgtatntattcctctgnnttctggggagctttgacctt

SEQ ID NO: 3163 - DNA, 379 bp, Homo sapiens
  unsure (185): n=A,T,C or G
  unsure (187): n=A,T,C or G
  unsure (195): n=A,T,C or G
  unsure (219): n=A,T,C or G
  unsure (221): n=A,T,C or G
  unsure (253): n=A,T,C or G
  unsure (294): n=A,T,C or G
  unsure (300): n=A,T,C or G
  unsure (316): n=A,T,C or G
  unsure (336): n=A,T,C or G
  unsure (363): n=A,T,C or G
gtgggtgttttctaaatattaataggggggcttgattcaacaaagccacagacttaacgttgaaattttcttcaggaattttctagtaacccaggtctaaagtagctacagaaaggggaatattatgtgtgattatttttcttcttatgctatatccccaagtttttcatactcatttaagtaanangctagagngagtaaggaatagagccaaatgangnaggtgtctgagccatgaagtataaatactganagatgtcacttttattcaggaaatatggggagattcaagtnatatanattcctactcgaaaancttgacacctgactttccangatgcacattttcatacgtagaccagnttcctctttggtttct

SEQ ID NO: 3164 - DNA, 266 bp, Homo sapiens
ctcaaattaccctccaaaagcaagtagccaaagccgttgccaaaccccacccataaatcaatgggccctttatttatgacgactttatttattctaatatgattttatagtatttatatatatctgggtcgtctgcttcccttgtatttttcttcctttttttgtaatattgaaaacgacgatataattattataagtagactataatatatttagtaatatatattattaccttaaaagtctatttttgtgttttgggcattttt

SEQ ID NO: 3165 - DNA, 446 bp, Homo sapiens
  unsure (280): n=A,T,C or G
  unsure (417): n=A,T,C or G
  unsure (418): n=A,T,C or G
  unsure (422): n=A,T,C or G
  unsure (442): n=A,T,C or G
aaatcagcatttcccaaaaggtgtgtcaggactgagttaatcagtaagctaatagaaacaactgcaatagactagggatgagatttctcaaagcagtctgatataatatgcggcaactccttatgtactggagcgtatccaatacattctcaaaactcctaaattagctaaaatgcaaggtaaagagcagtagaaaaatgcagctcttaggataggcaaaactttggaagatttatgtcctcacaccagggtccagcaacttaggtttgaatttatgatnaggttaatgatataataaacttgggttggctggtttccctggcaattgttaattccccttaaataaaaatatgttgatacattgcaaaagaagtattttacagtttgaaacctttggaaagggcttttacctgcccnnggcngccgtaagggcgaattccanccca

SEQ ID NO: 3166 - DNA, 387 bp, Homo sapiens
  unsure (5): n=A,T,C or G
  unsure (10): n=A,T,C or G
  unsure (16): n=A,T,C or G
  unsure (18): n=A,T,C or G
  unsure (156): n=A,T,C or G
  unsure (173): n=A,T,C or G
  unsure (215): n=A,T,C or G
  unsure (232): n=A,T,C or G
  unsure (299): n=A,T,C or G
  unsure (305): n=A,T,C or G
  unsure (365): n=A,T,C or G
  unsure (369): n=A,T,C or G
  unsure (371): n=A,T,C or G
  unsure (387): n=A,T,C or G
ctggntctantcaatngngaaccaccaccccccgccccccgcaaaaagtaaaagtcaaaccaaacttcctcaagctgcatgcttttcacaaaatccagaaagcatttaagaattgaactatgggctggaagaagtgaaagggaagcatctaaaaangaaaggtgagtaaccanatagcaaaagaaaagggaaagccatccaaatttgaaagctgntgatagaaattgagatncttgctgtcttttgtgcctctacaagctactactcattccagaattcctgggtcttccaagaggatncttaangtaccagagatttgctatggaaccaaaagcgcttgagaattctgactgaggggcttcgcntagntntcacattacaaaaaan

SEQ ID NO: 3167 - DNA, 478 bp, Homo sapiens
  unsure (58): n=A,T,C or G
  unsure (60): n=A,T,C or G
  unsure (62): n=A,T,C or G
  unsure (361): n=A,T,C or G
  unsure (373): n=A,T,C or G
  unsure (422): n=A,T,C or G
  unsure (472): n=A,T,C or G
ctgagttacaaggactaaaagtgaaaagcattctaaaagtccatgaacactgttgttnananccttcttcagaacacactaaacttgtctgacacatttctcttcatacatagcaagcaacagcacccaataaaagcctgagaagaaatgctgctgtgtaaatactgcaactattcctgaaaaaagaattatgggatatatactccaaagctgcccattcccataatttgtattgcataggtcacataatcacacacatatatatacacatgtgtgtatatatatgcacatgcaagaatatattaagacgacaatgaagtctagtcacagagcaatttacaggctcaatatatttttttanactttggttganagaaaatttaatattttacagtctttcagtaggcattatatacactgcnctttatgaaatctaaaaggtattgaaataaatttttccacattttggtancaaaac

SEQ ID NO: 3168 - DNA, 198 bp, Homo sapiens
  unsure (174): n=A,T,C or G
ttttcatatcaatgaaaaattccataaaaatagctatattaaatttcatatgtaaatatttaacaaatatgtttgtattcttctatttttatacaatgaatattaatacatattgcatttatttattttaatgacatttatttaagttcaattgtacaaaacctaatttgttgncaaaagtatcaagcaataaatttt

SEQ ID NO: 3169 - DNA, 327 bp, Homo sapiens
aaaaatgtttttgaaaattgcaattcctacaaataaatgtcatagtgcaaataaatgtcaggatttagagaaggagcctaaactgaatttgtgttatttcagtaaaagttatggagttatgggtctagacgtgttaataagttagacagaactttggcactttagaacaaatgcatgagtggtatttcagttcctaagttacataaaaagtgtgaaagaacactgtgaggtcccagcaacgccagactatattaaggtaagtagaaagtgtttttatagggcttcaatacccaggtggtgacagagcagaagaaccgggtttttttt

SEQ ID NO: 3170 - DNA, 439 bp, Homo sapiens
  unsure (17): n=A,T,C or G
  unsure (20): n=A,T,C or G
  unsure (24): n=A,T,C or G
  unsure (416): n=A,T,C or G
  unsure (420): n=A,T,C or G
gttagtattgactttgnttnaaanaggcttgacttcaactgggataaaaatgtcagtgaattttgttaaagtagtaaaaatgcagttgacttagtaggaacataaaattatttcctaataagataatattgcactcctaccaaataaacaggattttagtaatatctgagggattgttgatggtgagttagactgtatttggcatagaatttggaaatgtaacttgaatgtaaatatgctgcaaaatgttgaatgtatacatagaaagactttttctgtcgacgccaaatgcccgttgtaaatgaaccttaaatattacattcctcctttgcacaataatatttctttataacacttatgattttttcccccaggacaacaaactgcccttaagagtcatttccttgttatcacangtgncaatatttttctgtatttt

SEQ ID NO: 3171 - DNA, 279 bp, Homo sapiens
  unsure (257): n=A,T,C or G
agccattacaggtttgaacaaattcaaaattgcctattattaagcctccgcaggagctactgggcataagcaaacctaagattttataacccagcaattatcctatagaaaatagtccagattattatattctgccacacctttattcatacttgactccaaaaagttctcaattattcacagggataatctagaaaataaatattagttttgctttcaaagacattactggaatgagcaggaacctgcatctttgntatattaattaacttattattt

SEQ ID NO: 3172 - DNA, 302 bp, Homo sapiens
  unsure (21): n=A,T,C or G
ctgttgaaatgaagcactttncagtctttgtggcagcagaatatacttgtccatggttcatatcaatgctaaaattccggcagggaaaaaaatgatatgttaagcacccaaatcttcacatggagggggagggggtgggaaaagaaggaaaaaaagggaaaaacaaccaaaataatttaagtaaatgacagattggaaaacagggtttataaaaattattctcttgagtttataaattgttaaactcaatttatagctatgttaaactacgtaagaaccactatactgaaagaccatttaag

SEQ ID NO: 3173 - DNA, 300 bp, Homo sapiens
  unsure (128): n=A,T,C or G
  unsure (189): n=A,T,C or G
  unsure (203): n=A,T,C or G
  unsure (222): n=A,T,C or G
  unsure (246): n=A,T,C or G
  unsure (248): n=A,T,C or G
  unsure (257): n=A,T,C or G
  unsure (264): n=A,T,C or G
  unsure (270): n=A,T,C or G
  unsure (276): n=A,T,C or G
  unsure (283): n=A,T,C or G
aaataaattacaccttttgaaaatgtttaattgtacagtcaatagcttcaacaaaatattgaagtgtctgtatttagtatctactttatatactttatactttacaaattttacaattatttggcagnaattttctgattatgacatgactgctgtgcgattcagcgatttcccagatgcaggcaatanctggtgtttgtgtnctattctcagagtaactgnctcaatgtaggtgaaaaatatcancnattttagtnaactgtncaaggnccattnacacttnatcaacactatagcata

SEQ ID NO: 3174 - DNA, 519 bp, Homo sapiens
  unsure (488): n=A,T,C or G
  unsure (517): n=A,T,C or G
ctgagcacgagtatagcagcattaactttaatctcattggctacattaatgaactttcctaatcctctcaatgccatgcagattttgtggatcaatattattatggatggacccccagctcagagccttggagtagaaccagtggataaagatgtcattcgtaaacctcctcgcaactggaaagacagcattttgactaaaaacttgatacttaaaatacttgtttcatcaataatcattgtttgtgggactttgtttgtcttctggcgtgagctacgagacaatgtgattacacctcgagacacaacaatgaccttcacatgctttgtgttttttgacatgttcaatgcactaagttccagatcccagaccaagtctgtgtttgagattggactctgcagtaatagaatgttttgctatgcagttcttggatccatcatgggacaattactagttatttactttcctccgttcagaaggtttttcanactgagagcctaagcatactggatctggntg

SEQ ID NO: 3175 - DNA, 499 bp, Homo sapiens
  unsure (18): n=A,T,C or G
  unsure (116): n=A,T,C or G
  unsure (151): n=A,T,C or G
  unsure (178): n=A,T,C or G
  unsure (204): n=A,T,C or G
  unsure (395): n=A,T,C or G
  unsure (396): n=A,T,C or G
  unsure (400): n=A,T,C or G
  unsure (467): n=A,T,C or G
  unsure (477): n=A,T,C or G
  unsure (484): n=A,T,C or G
  unsure (499): n=A,T,C or G
ctggtggcttcctgattnccgcccacagaaggtatgttcacactgagagagctctcccgccaaggggaggaatcacctgctttaatacatgttgttctcttctgtgctagtgtggncatccactctgtataaacttatgtgcaacattaanacaaaaaaagggagttgagttgataanatgacttgggaggctctcatagttgnaataactatggaagacagaagaacatgctatcatctttatttttagcactcatatctggacctattactaaaaaagcttcttcattccttccaaccactagattataatggctaaaaagtcttttccttaaatctgatgggtgtaaaaataaaaagtaacagcatttctctagggctctggtttattttgnnttgntcttccttttatagacacgacaaaaacaaggattaactttccaaatactcatggtgcacaagaaggntatgtatgcncagtatnctaatttattcaaan

SEQ ID NO: 3176 - DNA, 451 bp, Homo sapiens
aaaaatgttttcccgtgggtaattttctattatatattttcatatgggcaaagggaaaaaatgataaatcctctgtaatcacaaaccccaatttcgttttgtttattcagcttctaaaatattgaacacccagacttttaattcaacctttaagaaccttatcatttatgtttcagtagatatcaaagtaatccatgtttgtgtcaaatgatcatagaaaataaatagaagagacagtgaagcaagtaaaaagaaaagcattgttttaatttgtttgcattaatttttttcatttgtcaaaatgcttcttttgttgccacagtaaagaacagtttttattgttttgtaagtaaaattacgtagctgattttgtatgtaaagattaatttccataataaaaattattgtatgtttactgtgatcttaatgggcagggttaagaaagttattt

SEQ ID NO: 3177 - DNA, 303 bp, Homo sapiens
aaaaatacaaattttatgaaaatattaagaatttttaggatgggaattataaaagtcaatgctgaacaaaattctacttttagatagtatgtatcttaaaatattatgaaaaatattctttattctgaaaacaatgtcaggaaagaatacctgagttctctaaaaccactagttctaatttcaaattgctgttttggtaacataaagaaaacacatttacaatttaacactgcagttacctgtcaaataattagaatagaataaatgttgcatatacattaggttgaaaattatatatatttt

SEQ ID NO: 3178 - DNA, 343 bp, Homo sapiens
  unsure (4): n=A,T,C or G
  unsure (23): n=A,T,C or G
  unsure (120): n=A,T,C or G
  unsure (147): n=A,T,C or G
  unsure (164): n=A,T,C or G
  unsure (166): n=A,T,C or G
  unsure (172): n=A,T,C or G
  unsure (182): n=A,T,C or G
  unsure (343): n=A,T,C or G
aggnaaaactcattaataagatnccaaattcaagagattatagttacattgtaaaacgtaatcttcttttaataaaagctaataatgactgatgaattacaaatgcacttatttattggngattacaaacaatacttaagaacttangcagcttgagtagtagntnaagctngacagagcanagaaaattcttgtttaatatatatatatttttaattccagtaatattttcttaaattcctgttaaaaatataatcaatattaaagtcagcaaaatgcctttgactgacgcctggattattttaccacttaacctggttacacagtgatttttttttttttn

SEQ ID NO: 3179 - DNA, 417 bp, Homo sapiens
aaatatattgcattttattacgtaacagtaaaattagtaaaataattgatatactttaatttataatttctttctctcagtataatgtagaaaagtattactctgaacacctaccttaaacattacttaatataggttaactacaatgagcctctccacttatatttttgtcatgcatcttacattttaatgtccttactgttttatagaaaaggtcataaagaatgcccaactaataaagagtctctaatatctctgatgcagcaacaattgatcacatactttcacgtgaatataataaagtaacagcataatttgaaagctgtattacatcattattcacttttcaaaaaaattgttttcaaggaaacaaatatactttcaatgtaattacaaagcttcaaaaaatctcctttt

SEQ ID NO: 3180 - DNA, 304 bp, Homo sapiens
  unsure (19): n=A,T,C or G
  unsure (185): n=A,T,C or G
  unsure (253): n=A,T,C or G
  unsure (265): n=A,T,C or G
  unsure (279): n=A,T,C or G
  unsure (303): n=A,T,C or G
agatgctcccttgcttttnataattcctaactgtaaaatataattttagtacagaacaaacaaattctccttggttggtcacatcattcattattgaaagggaaacttagtatcaaaagaaacaaaacactgaaataaataactaagtaatttactgaaaggtagttttgttgcattgcacacanctgaccgcagagaattctaaagctgatttttttcttaaaggatgaaaaactcatttgccatttttagnttcttgctaagngatacatgctcctnataaggaaaactactctgtgtatng

SEQ ID NO: 3181 - DNA, 347 bp, Homo sapiens
  unsure (171): n=A,T,C or G
  unsure (178): n=A,T,C or G
  unsure (180): n=A,T,C or G
  unsure (183): n=A,T,C or G
  unsure (271): n=A,T,C or G
  unsure (281): n=A,T,C or G
  unsure (299): n=A,T,C or G
  unsure (324): n=A,T,C or G
  unsure (325): n=A,T,C or G
  unsure (339): n=A,T,C or G
  unsure (340): n=A,T,C or G
  unsure (345): n=A,T,C or G
aaaatacataaaattttctaaaacgtaaaatggaaaggtttaatacacaggaaaaacactgcacaccttaactaaacaaactagaaagaaaatatatttatatacagaactaagatgagtccattcattatttttacaaatattcacatagatggtttagagataagtagntaagcgngnctnattaattaatggatgctttctagcctctgtcttcattaattttatttcctattcaacaaaaaataatgctttcaggatatattacatntagagcaatntcatttttatcagtaatnttgcctgaaaaagagaaaaactttnnagcataaccctacnnagcanga

SEQ ID NO: 3182 - DNA, 279 bp, Homo sapiens
  unsure (122): n=A,T,C or G
  unsure (221): n=A,T,C or G
  unsure (254): n=A,T,C or G
aaattttagagtcacattttattctgatcagaatttttattgagatgttgagcttttgtttttgaaactagtttgtcataacattgtgcataatcacagtatttattttctaggacaattgngaatgtgtagacttatgtttactgctaagggaacaattatttataaaataatattaaatccagtattaggctgcctatttcagacacttaatacttgcngagatctatgttacatttaccacactgaagttntttttgttgttttttgtttgttttt

SEQ ID NO: 3183 - DNA, 367 bp, Homo sapiens
aaagctatttaatactcatgatgtctaaactttcaatttattgtctgatttctggatatttctgtattttagattctacagacttcagattctgaagcttgttgaaaaagctaagttcctcaatatggatgaaaatctatctggctgtacttttagaggggaatttttctacttttgaaaaaaattctgaatatttatatatagtattaacagaataccccagtaagtcatatttcagataaatattctatagtataatttgcatcatacccaatattttagatattaaaataagggtaaaatttggaatataatcacttgtctgcatatttcccaatgtaagttttcatgtagaatattaaaattt

SEQ ID NO: 3184 - DNA, 149 bp, Homo sapiens
  unsure (149): n=A,T,C or G
aaacttgaactattccttccagaagaatacccaatggcagcccctaaagtacgtttcatgaccaaaatttatcatcctaatgtagacaagttgggaagaatatgtttagatattttgaaagataagtggtccccagcactgtcgatccn

SEQ ID NO: 3185 - DNA, 197 bp, Homo sapiens
  unsure (120): n=A,T,C or G
  unsure (132): n=A,T,C or G
  unsure (143): n=A,T,C or G
  unsure (148): n=A,T,C or G
  unsure (160): n=A,T,C or G
  unsure (165): n=A,T,C or G
  unsure (176): n=A,T,C or G
aaagaaaatccagtagttgttggtgaaaagatccaaaagatttgaactcctgctggaatacaaaattcttgagcatctgcaaactaaaaattgacttgaggtttttttttttcctagtcnttgggaatgtanagcagggtatnttgcntgtcatcggaanaatanatttttgtttnggttttgttttgaaaatgact

SEQ ID NO: 3186 - DNA, 421 bp, Homo sapiens
  unsure (21): n=A,T,C or G
  unsure (184): n=A,T,C or G
  unsure (299): n=A,T,C or G
ctggaagagagggctgcccgnaacgactctcaagtttccaagaacttggaaagccaccacggtgaccagatggcgcagaaatcccagtccacgcagatttcacaggaactggaggaacttcgagctgaacagcagagattgaaatctcaggacttggagctgtcctggaacctgaacgggcttnaagcagatctgagcagcttcaagtcccaggaattgaacgagaggaacgaagcttcagatttgctggaaagactccgggaggaggtgacaaagctaaggatggagttgcaggtgtncagctggctttgtgtgcaacacgtgccctgaaaagtggatcaatttccaacggaagtgctactactttggcaggggcaccaagcagtgggtccacgcccggtatacctgtgacgacatggaa

SEQ ID NO: 3187 - DNA, 349 bp, Homo sapiens
  unsure (19): n=A,T,C or G
  unsure (73): n=A,T,C or G
ccaagttatcatgtccatncgcaccaagctgcagaacaaggagcatgtgattgaggccctgcgcagggccaanttcaagtttcctggccgccagaaggtatgtagtgctgcagcccccttctcccacctttgccccaggctgaataggcacccaaaagtccgtgactaaatttcgtttgtctttttgatagcaaattatgttaagagacagtgatggctagggctcaacaattttgtattcccatgtttgtgtgagacagagtttgttttcccttgaacttggttagaattgtgctactgtgaacgctgatcctgcatatggaagtcccgcttcggtgacatttcctgg

SEQ ID NO: 3188 - DNA, 434 bp, Homo sapiens
  unsure (199): n=A,T,C or G
  unsure (365): n=A,T,C or G
  unsure (403): n=A,T,C or G
  unsure (405): n=A,T,C or G
gaacaaagaatcttaagggtttattaagaactctttattttcttcataccctgttctctgcagtgctttctaacagcttctgggtgcagattttcttcggcatccttttgcactcagcttattacaggtaggtagtgcttaagaaaagtcatggaggactaaagcctaagtccttttcacttttcctccatctgaaggnaggtgagttcatcctcttcatagtaatgctgttttaccaagactttatagcagatggacccagaaagaattttctgctattgtgttcactacaacaggatagggacatcagacagccccagaaaccccttccagatctgatatgggactattaatttttatgctgntaattggtattcattcacaatgcagttgaagggggaangntccactgcattctttggctaaggacctcg

SEQ ID NO: 3189 - DNA, 367 bp, Homo sapiens
  unsure (142): n=A,T,C or G
  unsure (195): n=A,T,C or G
  unsure (275): n=A,T,C or G
  unsure (280): n=A,T,C or G
  unsure (326): n=A,T,C or G
  unsure (342): n=A,T,C or G
  unsure (348): n=A,T,C or G
ctggtggttaacaagtggatcgtcatgttcagtagtttatacattatgtgagaagtaacgttctgattctttttcttacacagaattggcagagggggtcgatttgggaggaaaggtgtggctataaactttgttactgaanaggacaagaggattcttcgtgacattgagactttctacaatactacagtggangagatgcccatgaatgtggctgaccttatttaattcctgggatgagagttttggatgcagtgctcgctgttgctgaatangcgancacaacgtgcattgtgcttctttctttgggaatatttgaatcttgnctcaatgctcataacngatcanaaatacagattttgatagc

SEQ ID NO: 3190 - DNA, 231 bp, Homo sapiens
ccaggcagccctgctcacaggcaaggtgtaggggggtatttcctcgaaagtctcggagctcaggatcacagccagctcccagaagtgcctcagcaatttctggctggttggtgatcacagccaagtggagtggagtctgctgcaggttgttctggaagttgaggaaagccaggtctcccttcacctggcggatcacttccatggtcagtgccttttcttcatggatgatgg

SEQ ID NO: 3191 - DNA, 409 bp, Homo sapiens
  unsure (175): n=A,T,C or G
aaaacaaatttctaggacttacgctctttgggcctgatttgttaatgcttatgaggtaatgatattatgtttgagaagctctacttctagtatacctcaatgctcagagagaaagccaacaatacaatcaggaaaccacaatattgacaaaacttagtactaccaccaagattgntcctcttgccttggcactactaaaaaactttacctttgttactaaagtcatggtgaatacagattttgcatttctcatgtaagcagctatataagctagggttctacaagccttagatgaaaggaaaaactttgctggaagccctgtaaaaatcactttattcacaatctgaagaatgaaagacaaatttggctgtcaatacaaaaactgtagtacaaggaagttcaactgttt

SEQ ID NO: 3192 - DNA, 374 bp, Homo sapiens
ctgaagcggcggccagagaagagtcaagggcacgagcatcggccatgcctttcttggacatccagaaaaggttcggccttaacatagatcgatggttgacaatccagagtggtgaacagccctacaagatggctggtcgatgccatgcttttgaaaaagaatggatagaatgtgcacatggaatcggttatactcgggcagagaaagagtgcaagatagaatatgatgatttcgtagagtgtttgcttcggcagaaaacgatgagacgtgcaggtaccatcaggaagcagcgggataagctgataaaggaaggaaagtacacccctccacctcaccacattgacaagggggagcctcggccctgaacagagcag

SEQ ID NO: 3193 - DNA, 208 bp, Homo sapiens
  unsure (161): n=A,T,C or G
  unsure (173): n=A,T,C or G
atatataatagctgtaactgtttcactgctatgctgttttgtgttgttatagttgtaacatatttctcaattttcctgtttttcttttagtttattgacaagactacctggtcggcctaaattcacattttcattcagtttttgggcatttgagatcaaanagtaagtatggnttctacagttacttcatttttctacttatcttttt

SEQ ID NO: 3194 - DNA, 290 bp, Homo sapiens
  unsure (1): n=A,T,C or G
  unsure (27): n=A,T,C or G
  unsure (28): n=A,T,C or G
  unsure (29): n=A,T,C or G
  unsure (157): n=A,T,C or G
ncgaggtaaaccaatccaatatacagnnntttgaaagtaaaagatcaactgcacagatattttttaactaaagaatgtgtcagtaaatctatgtaaatatccaaattgacacaaattttctaaagagttaaaattattaaatttcaaattattattntatatacttttgatcaaaatataatatttgcttcaccataagttgaagatattaagaaaacataatctaaggtttattacaaaaaataatggcctctgatagatatacagagaataatatattcttaaatttt

SEQ ID NO: 3195 - DNA, 253 bp, Homo sapiens
  unsure (22): n=A,T,C or G
  unsure (131): n=A,T,C or G
  unsure (138): n=A,T,C or G
  unsure (142): n=A,T,C or G
ccactcagcacatttcatggangtcatgtcttttcactgatacttttttgatagtttttatataacaaaatccttattctatttataacttaagatgataaggcactataaattaatgacctaaaataatntatttgnctgntatctttgtgctatttctacttcactttaatttttaggctgtaaaattggtaaatggattcttacaactatctctttccatttcttactatttggttttcaaatttcattt

SEQ ID NO: 3196 - DNA, 371 bp, Homo sapiens
  unsure (105): n=A,T,C or G
  unsure (316): n=A,T,C or G
  unsure (327): n=A,T,C or G
  unsure (350): n=A,T,C or G
  unsure (356): n=A,T,C or G
  unsure (369): n=A,T,C or G
ctggtggttaacaagtggatcgtcatgttcagtagtttatacattatgtgagaagtaacgttctgattctttttcttacacagaattggcagagggggtcgattngggaggaaaggtgtggctataaactttgttactgaagaagacaagaggattcttcgtgacattgagactttctacaatactacagtggaggagatgcccatgaatgtggctgaccttatttaattcctgggatgagagttttggatgcagtgctcgctgttgctgaataggcgatcacaacgtgcattgtgcttctttctttgggaatatntgaatcttgtntcaatgctcataacggatcaganatacanattttgatagcanag

SEQ ID NO: 3197 - DNA, 326 bp, Homo sapiens
  unsure (210): n=A,T,C or G
  unsure (238): n=A,T,C or G
ctgaactcttccttgacactgtttcaacatttacatcctatgaactcatggattataaaacatttgtgacttatactgtctatgtcagtatgattgccttagaaagaccagatctcagggaaaaggtcattaaaggagcagagattcttgaagtgttgcacagtcttccagcagttcggcagtatctgttttcactctatgaatgccgtnactctgttttcttccaatcattagcggntgtggaacaggaaatgaaaaaggactggctttttgcccctcattatcgatactatgtaagagaaatgagaattcatgcatacagtcag

SEQ ID NO: 3198 - DNA, 516 bp, Homo sapiens
  unsure (450): n=A,T,C or G
  unsure (481): n=A,T,C or G
  unsure (494): n=A,T,C or G
  unsure (506): n=A,T,C or G
cctttcagtggggcttggacaaaaagggccccaaagaccaattttgctcattaacctcacactggggatcagattgacaacttaaggatttttagggagcatatgtgagatcaaagggaagaagaaaatggtgcccctttcagatggtgcttcaggtgctaaaaaatatcccaacacaaacaagcaggtggctagctgacaggtgggggaagagatgcaagtcagatagcaaaggatctgcacagtgcaaaatcttcttggctttttatttaacttagcagtgaatgcagcaggattggcttaaagtataggtacaccccatggaaacatgcaataagatcacatcgatccagaggctggctcaagtttgactgaggggaaacggagggaaggctgttcctatcacacaatctcagcagaggttgaggtggtggggatttctttcttctnatatgacgctaccatcggtgacttcttactnggagaccactgancactgaatcaangtttctaata

SEQ ID NO: 3199 - DNA, 186 bp, Homo sapiens
  unsure (172): n=A,T,C or G
  unsure (183): n=A,T,C or G
aaatcacatgtttacacaaacacttggacaaaaatggttttagcagctttatttgtaataaccccaaactggtaaaaaactaaatgtccatcagcagaggtatggattagaaaattgtgatgtattcatataatggaatattattcaacaataaaaaataacacatctgatnaaaaaaaaaanaaa

SEQ ID NO: 3200 - DNA, 275 bp, Homo sapiens
aaattaaaaaggtaaagaagaaaaagaaaaagaaacacaaggagaatgaaaaacggaagcgtccgaaaatgtatagcaaatctattcagaccatctgctcaggattgctaactgatgttgaagatcaagcagccaaaggcatcctaaatgataacataaaagattacgttgggaagaatttggataccaagaactatgattccaaaattccagagaacagtgagtttccatttgtctcattaaaggagccacgagttcagaataacctcaaaagg

SEQ ID NO: 3201 - DNA, 385 bp, Homo sapiens
  unsure (163): n=A,T,C or G
  unsure (379): n=A,T,C or G
aaactttaggttttatttacaaatatttatcttatcttcctctcctatttgacgttttagctcaagaagagttaaaatggaatgcatctgtagatatatagttgggaatgcgtgttcagtcacttggctctgtgataataatcttatgtaccatgtcagacangattttcagactccagatcctctttgccattatctgaatttcctgatgagatatagcaaccagagtcccttgggcagtcatctaactgtgacttatttaaggagatgtctgagctcaaggataggggctcaggttcattttcttgctcttgaataatttcttcttcaaggaagttttcagcagacctgcccgggcggacggtggaagggggaattncaacac

SEQ ID NO: 3202 - DNA, 302 bp, Homo sapiens
  unsure (137): n=A,T,C or G
  unsure (170): n=A,T,C or G
  unsure (176): n=A,T,C or G
  unsure (177): n=A,T,C or G
  unsure (207): n=A,T,C or G
  unsure (212): n=A,T,C or G
  unsure (239): n=A,T,C or G
  unsure (253): n=A,T,C or G
  unsure (280): n=A,T,C or G
  unsure (299): n=A,T,C or G
aaaaatatatatttcagattttcagtgctaacagattgcatatatacagttcatttacttttattaaattggcaatcgatattttattgaatggggaattaagaatataaactgtaaattttgtcttaaatttattntttttcttggcctttatttttattacttaaggnatgagnnatattttaggagatactttctagacagttngaagnttgggtgctatatgaagaaaaacattnaatgatatactcanatataaacaccttgttttcttgaatgnaatttatttattagctaanaaa

SEQ ID NO: 3203 - DNA, 510 bp, Homo sapiens
ccagagagccagtaaattaggacagtgtttcaacaagcctaggctatctcgtaagttgaaaaatatcccactatagttgcttcatgagtatgaagtaagatggcctctgatttacactggttcaatttacaaattttcaactttatgataggtttatcagggtactaaatgcatttcaacttgatagtttcaacttatgataggtttaccaggatgtagtcccactgttgaggagcatctatttaggggttaattactttagtaataagtggaaagtaagataccttgagtaatgtttgcctataaaattgtcagcgtatttttacactattggctcaagaatgttataatgctaagggacataagttggcaaccacttggtttttggaaggactttcggtattgtattagaagtctgccctagctgttaaatttctgggtatttatcctaaggaattaattaaagagttaattgttcctttcttcagtgggccattgttttagatattt

SEQ ID NO: 3204 - DNA, 449 bp, Homo sapiens
  unsure (3): n=A,T,C or G
  unsure (19): n=A,T,C or G
ggnaaatcttaagatttgnagaatgtttctaggataggatattaaaaatgattgaaacccatgcatggtgttagacaatttttctaattattccattgagtcagttttttgtgattagtgattatcagagcaaacatcatgtagatagcacaagtatttggagaaacgttgtttgttttgttaccaaaatgttggaaaaatttatttcaataccttttagatttcataaagtgcagtgtatataatgcctactgaaagactgtaaaatattgaaattttctttcaagcaaagtgtaaaaaaatatattgagcctgtaaattgctctgtgactagacttcattgtcgtcttaatatattcttgcatgtgcatatatatacacacatgtgtatatatatgtgtgtgattatgtgacctatgcaatacaccattatgggaatgggcagcctt

SEQ ID NO: 3205 - DNA, 382 bp, Homo sapiens
  unsure (285): n=A,T,C or G
  unsure (345): n=A,T,C or G
  unsure (350): n=A,T,C or G
gccatctttcatgcctttgtcaatatgaacttctaaaattttcttctctcgaactatcttccttccgttgcagcttttacatctatctttaggactgatccgctccccatggccctggcactccatgcacacagactgaatttgctgaaccattccaggtcctatctgatgaattcttatttgcattccagtacctcggcaattgggacagcactctactgctcctttcttacctcctctaccttcacatttgtcacaaatcacattcttttgcagagccagttntcttgttgcaccattatataagtcttctagggttactgagagctgatgtacaacattttnacctntcctttctctctgcatccttcctcctcctgca

SEQ ID NO: 3206 - DNA, 316 bp, Homo sapiens
aaaatatatagaggaatcctcttgattgctcagcatgatgttagataaatgagtttgtcagaaaatatcagtatacgctgtttaccaatgttatttatttacattcttctaaagccattatggatattgtattatgagagctaaacctaaataaggttatcctgttccctaggaccttctctgtaaatagtgatttttagacgagtagtctgtcctaaatcttaaatagaaaaaaaactaaagcgatttgcttaagccattgtacattataaagagctgttttgttttgctttgctttgctttgttttgttttttt

SEQ ID NO: 3207 - DNA, 287 bp, Homo sapiens
ccattctttataggaataatcagtttaatcaagatgagctagcattgatggagaaatttaagaagaaagttcatcagcttgctatgaccgtggtcagtttccatcaggtggattatacctttgaccggaatgtgttatccaggctgttaaatgaatgcagagagatgctgcaccaaatcattcagcgccacctcactgccaagtcacatggacgggttaataatgtgtttgatcatttttcagattgtgaatttttggctgccttgtataatccttttgggaatttt

SEQ ID NO: 3208 - DNA, 345 bp, Homo sapiens
  unsure (221): n=A,T,C or G
aaaaatggagcacagtgacgagaatattcaattctggatggcatgtgaaacctataagaaaattgcctcacggtggagcagaatttctagggcaaagaagctttataagatttacatccagccacagtcccctagagagattaacattgacagttcgacaagagagactatcatcaggaacattcaggaacccactgaaacatgttttgaagaagcttcanaaaatagtctatatgcatatggaaagggattcctaccccagatttctaaagtcagaaatgtaccaaaaacttttgaaaactatgcaggtccaacaacaggtttctgactacaactcaaaagttt

SEQ ID NO: 3209 - DNA, 427 bp, Homo sapiens
  unsure (168): n=A,T,C or G
  unsure (373): n=A,T,C or G
  unsure (426): n=A,T,C or G
ctgaagatagagaaatgaggaaaaagaaggaagaatatttaacttttagtcctcttacagttgtaatatttgtggtcatctgctgtgttatgatggtcttactttatttcttctacaaatggttggtttatgttatgatagcaatttctgcatagcatcagcaatgangtctgtacaactgtcttactgcctaattcataagataccatatggacaatgcacgattgcatgtcgtggcaaaaacatggaagtgagacttatttttctctctggactgtgcatagcagtagctgttgtttgggctgtgtttcgaaatgaagacaggtggggcttggattttacaggatatcttggggattgctttctgtctgantttaattaaaacactgaagttgcccaacttcaagtcatgtgtgatacttctang

SEQ ID NO: 3210 - DNA, 491 bp, Homo sapiens
  unsure (480): n=A,T,C or G
aaatggtattacgtataaattaatataaaatgatcacctctggtgttgacaggtttgaacttgcacttcttaaggaacagccataatcctctgaatgatgcattaattactgactgtcctagtacattggaagcttttgtttataggaacttgtagggctcattttggtttcattgaaacagtatctaattataaattagctgtagatatcaggtgcttctgatgaagtgaaaatgtatatctgactagtgggaaacttcatgggtttcctcatctgtcatgtcgatgattatatatggatacatttacaaaaataaaaagcgggaattttcccttcgcttgaatattatccctgtatattgcatgaatgagagatttcccatatttccatcagagtaataaatatacttgctttaattcttaagcataagtaaacatgatataaaaatatatgctgaattacttgtgaagaatgcattnaaagctatttt

SEQ ID NO: 3211 - DNA, 409 bp, Homo sapiens
  unsure (1): n=A,T,C or G
naaatcagcatttcccaaaaggtgtgtcaggactgagttaatcagtaagctaatagaaacaactgcaatagactagggatgagatttctcaaagcagtctgatataatatgcggcaactccttatgtactggagcgtatccaatacattctcaaaactcctaaattagctaaaatgcaaggtaaagagcagtagaaaaatgcagctcttaggataggcaaaactttggaagatttatgtcctcacaccagggtccagcaacttaggtttgaatttatgataaggttaatgatataataaacttgggttggctggtttccctggcaattgttaattccccttaaataaaaatatgttgatacattgtaaaaagaagtattttacagttgaaacctttggaaagggctttt

SEQ ID NO: 3212 - DNA, 314 bp, Homo sapiens
aaacatgtactggcacaatttgtgatgaaaatattagcacatttgcaataatgtttctccataacagagaatgttaatggataccagaattttatttttgtatttatgttcatagtacttttcctcttgtctactccagacagttattccataaagcatttgtataattaaaaggaaaacagaaaaaggaaaagtaggcaaatgtgaaaatagtttcaatatatcttatgatttcttaatgtaaaatgttttgttgaagtatatggctatcatgactaagtgctagaatttatagttacaggcggtgtcctttt

SEQ ID NO: 3213 - DNA, 285 bp, Homo sapiens
ctgggatgattactgattcctccattcctttggggtaactctgccaacaggggacaggttccattctattccgacttgtgttgctacatatgtccatgtaacaatacagaaagtggctccactggctaatacagcattaccgtatttgtcatgaaaatcgggtgtacgtttctggtggctctgccttgccattgtttgctgaatgcttcgaacttggagacgatttagtgcgcttttgaccaagggaaacatcgtgaaggtgaagctagaactgcggcaatacag

SEQ ID NO: 3214 - DNA, 420 bp, Homo sapiens
  unsure (6): n=A,T,C or G
  unsure (7): n=A,T,C or G
  unsure (10): n=A,T,C or G
  unsure (29): n=A,T,C or G
  unsure (37): n=A,T,C or G
  unsure (41): n=A,T,C or G
  unsure (46): n=A,T,C or G
  unsure (181): n=A,T,C or G
  unsure (362): n=A,T,C or G
taccanntcngtaccaagcttgggataanaatggacntagntgatnactgtgacttctgtttgatgaagagtatcacttcattccatttttgtgtttttgttgcatctccaagtcagaatacaaaaaaaatcatgacgaaaagacacttgcttattaattggcttggaaagtagaatatangagaaacgttactgtttattttttttcatgtattcattcattctacaaatatattcgggtgccagtaggtacttggtataaggtttttggccccagagacatgggaaaaaaatgcatgccttcccagagaatgcctaatactttccttttggcttgttttcttgttaggggcatggcttantccctaaataacattgtgtgggtttaattcctactccgtatctcttctactactctgg

SEQ ID NO: 3215 - DNA, 441 bp, Homo sapiens
  unsure (176): n=A,T,C or G
  unsure (259): n=A,T,C or G
  unsure (341): n=A,T,C or G
  unsure (343): n=A,T,C or G
  unsure (390): n=A,T,C or G
  unsure (402): n=A,T,C or G
  unsure (413): n=A,T,C or G
  unsure (431): n=A,T,C or G
  unsure (434): n=A,T,C or G
  unsure (439): n=A,T,C or G
aaagagatttcagcaggctggttttaacctacgcaaagttaacaaacacataaagtttccggaaatcttagatttggctcctttttgcacccttaaatgtaagaatgttgcagaagaaaatacaagggtactctattccttatatggagttgttgaacacagtggtactatgaggncggggcattacactgcctatgccaaggcaagaaccgcaaatagtcatctctctaatcttgttcttcacggtgatattccacanggattttgaaatggaatcaaaagggcagtggtttcacatcagcgacacacatgtgcaagctgggcctacaactaaagtactnanctcacaagcgtacctcctattttatgagagaatctgtaataatatcnaaagcacttttntctggaaacanatttatggcttttataanggntgaanta

SEQ ID NO: 3216 - DNA, 242 bp, Homo sapiens
  unsure (20): n=A,T,C or G
  unsure (137): n=A,T,C or G
  unsure (174): n=A,T,C or G
  unsure (195): n=A,T,C or G
  unsure (198): n=A,T,C or G
  unsure (218): n=A,T,C or G
  unsure (230): n=A,T,C or G
  unsure (235): n=A,T,C or G
ccaaggctgtttgcatcccngggatccccgtctgctgaccagctaaacaccaatttcttcctgcttttctccacttggtttggaaaatcacacagttttcaggctccatctgtttggagaaaatacattctgaagcntccccaatttcaccttgtaaaaactcatgtgcagggnttggatataacaccacaacanaanacacttgatgctgtattatnttacatttattncatangatttgg

SEQ ID NO: 3217 - DNA, 501 bp, Homo sapiens
  unsure (341): n=A,T,C or G
  unsure (349): n=A,T,C or G
  unsure (379): n=A,T,C or G
  unsure (425): n=A,T,C or G
  unsure (463): n=A,T,C or G
  unsure (469): n=A,T,C or G
  unsure (475): n=A,T,C or G
ctggaactcaactaatcctaaacgaaaactcaagaacagcacaccagatgccacctgttgtttgtcagggtctcaaactccagaggaaatgcatttgcctgtcatggttttcctctctaagggcacctgtctgaacttggagctgtgtttccactggtgcctcatggggcctgggcctactctccacctgaattcacacttttctctataaggtatcaggtggggaataagtccaagaaggtgacaagaggctcccgagcaacagagcttgctcattcctggcaggcatctcccacaatgccccagagggctggcgaggccgggacagcataaggacaganaaagggcngaggggtgcttggaagtgctcatcactcangggagctggcaggcccgggatgacaggcagcctgaacagtgcttgnaacaaagacagccaccctgcggccccttgtcggagcanacctcngccgtnaccactgctaagggcgaatttcagca

SEQ ID NO: 3218 - DNA, 456 bp, Homo sapiens
  unsure (151): n=A,T,C or G
  unsure (235): n=A,T,C or G
  unsure (317): n=A,T,C or G
  unsure (411): n=A,T,C or G
  unsure (418): n=A,T,C or G
  unsure (443): n=A,T,C or G
aaaaatctaaagaattcaaaaataaggcattcaatatttgaaaaaagtacagatttacaaaatgtgtatattctgtcatgaaaactccacaccaacattatacacttggaaaaaaatacaaacaggatatattacaaatttatgcagcagntaacttagttcacaccatgcaataaaaagtacattaatcaagatacacaagcttttgtaggttctaaactgaaggacttttttnttttttttctgcagaatccttaaaacctgtggcacttaaaatttgttagcctttctaatgagaggtaaattatacacaacantgatgaaaaagattaacagaccagttgtctattatgaatcattccagctttgtgcaacaatggccgaaactcttttctcatattctcgtcttgntttcctnataaaactgtgctgcctggctattnggcttggctgtta

SEQ ID NO: 3219 - DNA, 272 bp, Homo sapiens
  unsure (110): n=A,T,C or G
  unsure (175): n=A,T,C or G
  unsure (177): n=A,T,C or G
  unsure (180): n=A,T,C or G
  unsure (235): n=A,T,C or G
  unsure (272): n=A,T,C or G
caattgcatacccatattttaagggacaggtgaatttactactttctaaagtttattgatacttcccttttatgtaaaatgtagtagtgatacctatatttccacattgngcattgtgacacacttgtctagggatgcctggaagtgtataaaattggactgcatttcttagagngnttntactatagatcagtgtcatgggccatctcttcctcagatgtaaatgatatctggntaagtgttatatggaataaagtggacattttacctcn

SEQ ID NO: 3220 - DNA, 354 bp, Homo sapiens
  unsure (217): n=A,T,C or G
  unsure (241): n=A,T,C or G
  unsure (250): n=A,T,C or G
  unsure (259): n=A,T,C or G
  unsure (267): n=A,T,C or G
  unsure (285): n=A,T,C or G
  unsure (287): n=A,T,C or G
  unsure (325): n=A,T,C or G
  unsure (327): n=A,T,C or G
  unsure (352): n=A,T,C or G
aaaacaaaaatgaacatttcttttacttaaattcttgtacttctaaggtacaaatgatgaccaataattttatctttcttcctttgaatatactgtaaattctatgaaaaattcatttataaaaacaaagcaaagaatagcataaattttattttctttccaatgttatatttgtaatagaagaaaaaaactccttctgataactgtaacctaaggnaacaaatattttacatataatttngaggcaaanctaatgagnttcttgantcagctggagaaattagncncattacctatgtcatgcataaatgatggtaagaagaananaggcatctgatcatgtatgacaacngc

SEQ ID NO: 3221 - DNA, 419 bp, Homo sapiens
  unsure (169): n=A,T,C or G
  unsure (179): n=A,T,C or G
  unsure (182): n=A,T,C or G
  unsure (252): n=A,T,C or G
  unsure (259): n=A,T,C or G
  unsure (343): n=A,T,C or G
  unsure (364): n=A,T,C or G
  unsure (372): n=A,T,C or G
  unsure (377): n=A,T,C or G
  unsure (400): n=A,T,C or G
  unsure (401): n=A,T,C or G
aaaatagctttaaatgcattcttcacaagtaattcagcatatatttttatatcatgtttacttatgcttaagaattaaagcaagtatatttattactctgatggaaatatgggaaatctctcattcatgcaatatacagggataatattcaagcgaagggaaaattccngctttttatnttntgtaaatgtatccatatataatcatcgacatgacagatgaggaaacccatgaagttcccctagtcagatntacattntcacttcatcagaagcacctgatatctacagctaatttataattagatactgtttcaatgaaacccaaaatgagccctacaagntcctataaacaaaagctttcnatgtctangacantcaccaattaatgcatcattcannaggattatggcttgttcc

SEQ ID NO: 3222 - DNA, 502 bp, Homo sapiens
  unsure (192): n=A,T,C or G
  unsure (251): n=A,T,C or G
  unsure (309): n=A,T,C or G
  unsure (375): n=A,T,C or G
ctgacaggttacacaatatatatcaaacaatgtgacacaaaacatagctctcctctttcgtctcacagaggaactaaagttccaaaatatatacaaaaccatcttccatctccaactgtcttctctttcttcccagttttatgcaaagcaggctcattaatacattcttcaccaggctcaaccaagtagcgnagtgtcttccattgcacctctaaagttggaagattctgatcccacgtcttgacgtgttncaaaaaacaatcaggtcacaaaggtaacagcaaaatacgaggccatgcccaacatttnaaaaacacagcgaagtaacaagaataaacgtgaccacaaaaacaacttaattaagccccatttctnttctgagagtatttctttgacaaaagggtatattttccaaaaccaaacacatttgataatctaaatccatatcgaggtcatcaatcactgaccataagggagactgttcattgggggggaaaaaaca

SEQ ID NO: 3223 - DNA, 318 bp, Homo sapiens
  unsure (316): n=A,T,C or G
aaaataaaaaagaaattaaaggtcatatactgtactactttcacaaagatcacacagttttgcaaaagacttgtcatatgtacaatgctatatatcaaatgagaaaagctgtaagcaattatatacgcaaaagaaatgcagtatttacagtttgtcaggagacattagaaatcatctatacattaaattacattttgcttgcaaataactggtaaaacaaaatgagccatgtccacaccaaaatataaaaatctgtattgcatttttatacctaagatgcattcacagaactgctgctgacaggaaagaaaaaaanaa

SEQ ID NO: 3224 - DNA, 221 bp, Homo sapiens
aaaaattacatgataaatgtaaatcataaaattgaatgtacttataaaggtacacctattttgtgctacataaaaaaactgtagactgcaaactgtgcatgcttaccataacattttacccggggtcgatgagtgggatttcttgcaaatatttactgctatgatataaaacaattatgtgcaaactgcaaggtccctaaaatagcagttaaagagtttat

SEQ ID NO: 3225 - DNA, 427 bp, Homo sapiens
  unsure (6): n=A,T,C or G
  unsure (29): n=A,T,C or G
  unsure (223): n=A,T,C or G
  unsure (265): n=A,T,C or G
  unsure (304): n=A,T,C or G
  unsure (317): n=A,T,C or G
  unsure (358): n=A,T,C or G
  unsure (374): n=A,T,C or G
  unsure (409): n=A,T,C or G
aaaggnatttgctcattggtctggcttanagacaggaagacatatgagcaataaaaaaaagattcttttgcatttaccaatttagtaaaaatttattaaaactgaataaagtgctgttcttaagtgcttgaaagacgtaaaccaaagtgcactttatctcatttatcttatggtggaaacacaggaacaaattctctaagagactgtgtttctttagttgagnaagaaacttcattgagtagcttgtgatatgttcgatactaanggaaaaactaaacagatcacctttgacatgcgttgtagnagtcgggaataangagaggggcttttttattttttcgttcatacgaatattggntgaagatgatactaantgctaaatgaaatatatctgctccaaaaggcattnatcctgacttgggagatg

SEQ ID NO: 3226 - DNA, 275 bp, Homo sapiens
  unsure (29): n=A,T,C or G
aaactgggctctgtgattccagagtttanaatgtagaaatgaaatgcttagctttaccttttcttggggggtgtggaccctgccagaaatgtaattacgtatgctcaagtgcattaattgaaggcactgtgcacaccattggactgctgaccacagttaaacatttccagtaaaatttcgtaactggtcacagctcattcataatcactgtattttttgaccctgataaagacaattattttgatggtgttctggtactgtaattggtatccttt

SEQ ID NO: 3227 - DNA, 295 bp, Homo sapiens
ccaaaaaaatcaagatttaatttttttatttgtactgaaaaactaatcataactgttaattctcagccatctttgaagcttgaaagaagagtctttggtattttgtaaacgttagcagactttcctgccagtgtcagaaaatcctatttatgaatcctgtcggtattccttggtatctgaaaaaaataccaaatagtaccatacatgagttatttctaagtttgaaaaataaaaagaaattgcatcacactaattacaaaatacaagttctggaaaaaatatttttcttcatttt

SEQ ID NO: 3228 - DNA, 147 bp, Homo sapiens
  unsure (29): n=A,T,C or G
  unsure (103): n=A,T,C or G
  unsure (142): n=A,T,C or G
  unsure (144): n=A,T,C or G
atagcatggcatctgtgaaatatggctgnttgttacatacagtgattctgcagacatgttgacatgacagtgaaatacataaatatgtaatgagaaaaggctnaactgtggataaaacaaagtcattacaattaaagactcnangtt

SEQ ID NO: 3229 - DNA, 434 bp, Homo sapiens
  unsure (307): n=A,T,C or G
  unsure (322): n=A,T,C or G
  unsure (323): n=A,T,C or G
  unsure (324): n=A,T,C or G
  unsure (342): n=A,T,C or G
  unsure (356): n=A,T,C or G
  unsure (379): n=A,T,C or G
  unsure (383): n=A,T,C or G
  unsure (384): n=A,T,C or G
  unsure (400): n=A,T,C or G
  unsure (431): n=A,T,C or G
  unsure (434): n=A,T,C or G
tcagtttgttaatataacacctctagtagaaagcaagcaatagttaaggtggcaggaaggcaatctactttcaaggcttttattaaagtttagaaatgatcagtggtcttcagaagattataaatttcagtctaaactgaaatgcgtttttaattttctgaataagtaacttccagtttacgatgaaaataagtgatcagtttctctgaccaaagaaagaggccattgcatgtgattggactgacctcttcctgtggtgactagaaagtgctaaaagaatattctttagtattttctctcatactanggggttaatatggannntgtttgaaattgcaaatngaataattgtccangttttttttataccttgctaaantaanntcctcttttaatctantgatagatacagtgatcgccagtgatgacanctn

SEQ ID NO: 3230 - DNA, 259 bp, Homo sapiens
  unsure (86): n=A,T,C or G
  unsure (112): n=A,T,C or G
  unsure (141): n=A,T,C or G
  unsure (181): n=A,T,C or G
  unsure (191): n=A,T,C or G
  unsure (194): n=A,T,C or G
  unsure (209): n=A,T,C or G
  unsure (215): n=A,T,C or G
  unsure (219): n=A,T,C or G
  unsure (229): n=A,T,C or G
  unsure (239): n=A,T,C or G
  unsure (253): n=A,T,C or G
gtcacattcagcattatccaggcatcaggcaacatctgtctagtgttgtcttcatcaagaacagactatatactaattcccactanaagctgtccatgccatacagaagatntattaaaaatgttttaaatggaaaatgtnctctagaccacaggactaatgtaaattaatatacacgtcnttcattattngtngaagctgatagaatncttgangtgnaaacttgcgnctgaatgttntatttgttctttanctgaag

SEQ ID NO: 3231 - DNA, 506 bp, Homo sapiens
  unsure (390): n=A,T,C or G
  unsure (475): n=A,T,C or G
ctgcctatattcaatgccagtttgaagatctgaacagaagaaaagataccaaggagatctatactcacttcacctgtgccacagacacgaagaatgtgcagtttgtttttgatgctgttacagatgtcatcattaaaaacaacttaaaggaatgtggactttattgagaagcatggatgttagtgaaagttactacagtgtggagtgttgagaccagacaccttttgctgtctcatggggcagctacaagcatgaacgggaccagggaatggcagcagcatgcagaatcttagcactctttagcacaatattttgtattagggaacttttaattgacatgagatgctaaagtcagacattggaattggaagaactataaagtgtgattcnatcgtcaagacatcacttggatttcttaatcttaaatgcttatggaagatgtgaagttgaggtgctgcattctagaacttcaatntgtagcttactctttttttcccccctttctt

SEQ ID NO: 3232 - DNA, 332 bp, Homo sapiens
  unsure (317): n=A,T,C or G
aaatagaaaacagtatattgaaagtggtgggtttgatctttttatttagaaacccacaaaatcagaaacacagtacaaataaaacagaaatcaaactataagttgacttttagttcctaaaaagaaacatatttcaaaagcaatggaatctagaattcttataacatgaataacaaaatgtacagcaagcctatgtagttcaattaatatataaggaaaaggaaggtctttcttcatgatacaagcattataaagtttttactgtagtagtcaattaatggatatttccttgttaataaaattttgtgtcataattnacaaattagttcttt

SEQ ID NO: 3233 - DNA, 508 bp, Homo sapiens
  unsure (418): n=A,T,C or G
  unsure (432): n=A,T,C or G
  unsure (450): n=A,T,C or G
  unsure (464): n=A,T,C or G
  unsure (467): n=A,T,C or G
  unsure (481): n=A,T,C or G
aaatagtttcaggaataaaaagtacaaaagaagactggttaaaatttgttgctacaaagaaaaggacacagaaagacggccaagagagagataatgttaattcaagactctcgaagagaagcttcagtgcagatggatttgagatgctacaaaacccagtaaaagattcaaaagaaatgtttcaaacctacaaacagatgtacctggagaagagaagcagaagccttggtagcagtcctgtaaaataattacaagatgtggttttgtaattgccactgggaaatttctttccttttctgttcaaaatatttcgctgaaactaatgagaaatgccatgataaagatttctcagagtttggttcccactttcattgtatttcattgaaagggcttaattaaagatggcttgagaactttnggtagccatgtgtnagaaatggatggtattcnccgggggaaacaangtntttgaatttctacnttattgaaccagattcccattgtttta

SEQ ID NO: 3234 - DNA, 147 bp, Homo sapiens
  unsure (76): n=A,T,C or G
  unsure (128): n=A,T,C or G
  unsure (145): n=A,T,C or G
  unsure (146): n=A,T,C or G
tcagtatatgatactctgtaacatttctatttatatcggcataaatttcattttttttcttcatatgcaatgtggntatataaagcttaatgcagctcatttgctaccattcggatacttagacactntgagcaagattgtggcnnt

SEQ ID NO: 3235 - DNA, 340 bp, Homo sapiens
  unsure (217): n=A,T,C or G
  unsure (280): n=A,T,C or G
  unsure (311): n=A,T,C or G
  unsure (321): n=A,T,C or G
  unsure (323): n=A,T,C or G
  unsure (324): n=A,T,C or G
aaaatattttttattgaaatattaatgtttattacatgcaaataactattttgtatctacagtcggataatggattttttattttgtatatttattctattttgtatattgttaagtgcaataaagtttttgccttgctttattttttaatacataaaacttacattctcataacgcgattgataacttaggaagttcacaatgtattttctacttntgcaattaaatattctttagtgcttgtttattattactaaatactaattaagtactaacaagnacttaaatactaatgtattaagtatttaagnctttctaatngnntctttaacaaaaaaaa

SEQ ID NO: 3236 - DNA, 275 bp, Homo sapiens
  unsure (266): n=A,T,C or G
  unsure (268): n=A,T,C or G
aaaaatgcccaaaacacaaaaatagacttttaaggtaataatatatattactaaatatattatagtctacttataataattatatcgtcgttttcaatattacaaaaaaaggaagaaaaatacaagggaagcagacgacccaatatatataaatactataaaatcatattagaacaaataaagtcgtcataaataaagggcccattgatttatgggtggggtttggcaacggctttggctacttgcttttggagggtaatttgacnancaggatt

SEQ ID NO: 3237 - DNA, 501 bp, Homo sapiens
  unsure (220): n=A,T,C or G
  unsure (363): n=A,T,C or G
  unsure (378): n=A,T,C or G
  unsure (477): n=A,T,C or G
ggattacttgagccccagaggttgaggttgcagtgaaccatgatcacaccactgcattctagcctgggtgacagagtgagaccctctccctcctaaaaaaatccttaagaaatatattgatgcttggttcctttggtcagaattttgatttaaggtgttgggagtgtagcacagatgttggaataaacctctcaaactgattttaatatacaaacaaggncgagaaccaccaaggaagagtttttatgcataaagattcctgtactctaccctagaactaatacatctgaatctctgggaatggagtataacaatcagatttgaaaaggtttctttagtaattttaaggactgaccattttanacactgctttgttanagcaaaatgattaggtacctagtatcaacctagccatccaaccttatattaataactagggaaaataaaggggttggagcctctgtgtttctttgttgnaaaatctgctactattattaagat

SEQ ID NO: 3238 - DNA, 218 bp, Homo sapiens
  unsure (13): n=A,T,C or G
  unsure (27): n=A,T,C or G
  unsure (28): n=A,T,C or G
  unsure (61): n=A,T,C or G
  unsure (77): n=A,T,C or G
  unsure (79): n=A,T,C or G
  unsure (91): n=A,T,C or G
  unsure (99): n=A,T,C or G
  unsure (146): n=A,T,C or G
  unsure (161): n=A,T,C or G
  unsure (198): n=A,T,C or G
  unsure (208): n=A,T,C or G
ggtgggggaaganatgcaagtcatatnncaaaggatctgcacagcgcaaaatcttcttggntttttatttaacttancngtgaatgcaccntgattggnttaaagtataggttcactcccatggaaacatgcaataagatcacatngatccagaggctggntcaagtttgactgacgggaaacgggagggaaggctgntcctatcacncaatctcagc

SEQ ID NO: 3239 - DNA, 374 bp, Homo sapiens
  unsure (349): n=A,T,C or G
aaaaaaatacaagatcttatttctatcttattttttctcctcttctgaaatatatatgaggattcctctccaaacccatggtttctctaagaattttgagtcatttgtatgacctcaaataattagttttagctgacctcacataactccttataataggagacatctttaatgtctgctattaaagaaggatgaaaattcctatgaccttctccccgattatccctttggcaatatagagtcaaataataacattgaccaataggtaaacatgctttgccaagaagtagaagatatattccctagccttagtttttcctcccaatttgcatttttgtaaaaataatgntgtatccacaaaggaaataaacttt

SEQ ID NO: 3240 - DNA, 429 bp, Homo sapiens
  unsure (192): n=A,T,C or G
  unsure (226): n=A,T,C or G
  unsure (289): n=A,T,C or G
  unsure (305): n=A,T,C or G
  unsure (308): n=A,T,C or G
  unsure (327): n=A,T,C or G
  unsure (361): n=A,T,C or G
  unsure (371): n=A,T,C or G
  unsure (373): n=A,T,C or G
  unsure (388): n=A,T,C or G
  unsure (393): n=A,T,C or G
  unsure (398): n=A,T,C or G
  unsure (404): n=A,T,C or G
  unsure (417): n=A,T,C or G
ggacgacacacagtatggatcacatattgtttgacattaagcttttgccagaaaatgttgcatgtgttttacctcgacttgctaaaatcgattagcagaaaggcatggctaataatgttggtggtgaaaataaataaataagtaaacaaaatgaagattgcctgctctctctgtgcctagcctcaaagcgtncatcatacatcatacctttaagattgctatattntgggttattttcttgacaggagaaaaagatctaaagatgttttattttcatcttttttggttntcttggcatgactaanaancttaaatgttgataaaatntgactagttttgaatttacaccaagaacttctcnataaaagagntnatgaatgctccacantttcnacatnccacangagaagtcaattntcttaacattgg

SEQ ID NO: 3241 - DNA, 397 bp, Homo sapiens
  unsure (49): n=A,T,C or G
  unsure (71): n=A,T,C or G
  unsure (167): n=A,T,C or G
  unsure (177): n=A,T,C or G
  unsure (182): n=A,T,C or G
  unsure (195): n=A,T,C or G
  unsure (204): n=A,T,C or G
  unsure (231): n=A,T,C or G
  unsure (337): n=A,T,C or G
  unsure (362): n=A,T,C or G
  unsure (368): n=A,T,C or G
  unsure (389): n=A,T,C or G
  unsure (392): n=A,T,C or G
  unsure (395): n=A,T,C or G
ctgaaccctcgtgaagccattcatacaggtccctaattaaggaacaagngattatgctacctttgcacggntagggtaccgcggccgttaaacatgtgtcactgggcaggcggtgcctctaatactggtgatgctacaggtgatgtttttggtaaacaggcggggtnagattttgcncgagntccttttactttntttaacctntccttatgagcatgcctgtgttgggtngacagtgaaggtaataatgacttgttggttgattgcagatattgggctgttaattgtcagttcagtgtttgaatctgacgcaggcttatgcggaggagaatgtttncatgttacttatactagacattagnttcttntatagggtgatacgattgtgnccnatngg

SEQ ID NO: 3242 - DNA, 298 bp, Homo sapiens
  unsure (2): n=A,T,C or G
  unsure (3): n=A,T,C or G
  unsure (29): n=A,T,C or G
  unsure (37): n=A,T,C or G
  unsure (39): n=A,T,C or G
  unsure (43): n=A,T,C or G
  unsure (135): n=A,T,C or G
  unsure (160): n=A,T,C or G
  unsure (167): n=A,T,C or G
  unsure (191): n=A,T,C or G
  unsure (192): n=A,T,C or G
  unsure (239): n=A,T,C or G
  unsure (241): n=A,T,C or G
  unsure (255): n=A,T,C or G
  unsure (271): n=A,T,C or G
  unsure (278): n=A,T,C or G
  unsure (280): n=A,T,C or G
  unsure (294): n=A,T,C or G
  unsure (298): n=A,T,C or G
tnncgaggtccacttgtgtgggccctcantttcaaananagcnctaaacttgacattgggggcccaccactccaactttgctttctgaaggttttggtgtacattgagccccagaaggaaaggagagcatttgtnaggtgggggcctcccttgaccccantacgaantctatgccctgaatccccagagtnncccttgctggggcccaactggcctggggacaaacagtgtccactacntntaggactgctcggntaagtggacacacttnttgaccncntaccaggaactttngtan

SEQ ID NO: 3243 - DNA, 293 bp, Homo sapiens
  unsure (182): n=A,T,C or G
aaaaggatatttaagtgagcattttctagttcatatgaaaataaccatagtacaggatgatttctgtccacacaaaggttaaattagattgcacagttaattttcacttatatttatggtactattatgtgggtgatgcctttttcttttaagcccagtacatatattatgcctgcctaagntctgaactggggctgtatttcagtagttgtagaattattgatatttagttttgatagctaatgtttaattgtttggatctgcacagtttggtttttgcacaaaagtcattt

SEQ ID NO: 3244 - DNA, 231 bp, Homo sapiens
  unsure (208): n=A,T,C or G
  unsure (223): n=A,T,C or G
  unsure (230): n=A,T,C or G
taaataaacaacattttcagtatgaactatggtaagatttcatcattctataaggcatattatttaggaggtattccttcctatgcatttcctattttacagtaaactcagtatcaggtaaaaattaactgctaatgttcctatcaacaattcatccattcctttttatgacacttttatcttgtatacaaaaaaatacacaattttnccaaaccttgagganccccccnt

SEQ ID NO: 3245 - DNA, 209 bp, Homo sapiens
  unsure (80): n=A,T,C or G
  unsure (114): n=A,T,C or G
  unsure (170): n=A,T,C or G
  unsure (182): n=A,T,C or G
  unsure (192): n=A,T,C or G
  unsure (198): n=A,T,C or G
  unsure (201): n=A,T,C or G
ctgccctacttttcaattcagatatactagtaccttacctagaaataatgttaacctagggtgaagtcactataatctgnagcctattatttgggcatttgctacatgatgagngctgccagattgtggcaggtaaagagacaatgtaatttgcactccctatgatattngtacatttttancgaccactanttgganganattcccca

SEQ ID NO: 3246 - DNA, 241 bp, Homo sapiens
aaatgatctttacagatccctgaagttgctgtcctgtcactgtatttaagtgatggatattcaattgaattattctgcataaataattctgttcaacccagaagtatagtagtatgatgggtcagatacagtcaactgttcaataaaaatgcagatgtctgaaattattaaaatgtacttaaaagtaacaaactgtatcacacacttaggcttagaagtgttctttcaagttttttctttt

SEQ ID NO: 3247 - DNA, 268 bp, Homo sapiens
  unsure (267): n=A,T,C or G
ccatggattaatttttcctgttctggaactttatctatatgtactctaccatattcaaatcctttagcacagcacaatgtctgtaagatttattcatgttttattataatagttctgttttgttgctgaatagtattccatttgtgaatatattataatttatttgttttcctgttaatggacatttgagtttttttcatttggaggctataatgaaggaaactttgtaaatatttgtgtaccagtctttgtgtgaacagatgtttnt

SEQ ID NO: 3248 - DNA, 286 bp, Homo sapiens
  unsure (216): n=A,T,C or G
  unsure (226): n=A,T,C or G
cacagtaattgaaataatttcaaataactgtaaaggaactgaaaatcttcacagagatgaagtggggtttccattaggtgctttgaaatttgataacaaatcatcaacttccactggtcaatatatagattttgggtgtctgaggccccaagattagatgccactaatctccaaagattccctccaattatgaaatattttaatgtctacttttanagagcactanccagtatatgaccatgtgattaatttcttttccactagataaaattacctggttcaaaag

SEQ ID NO: 3249 - DNA, 101 bp, Homo sapiens
ctgagggatcatgctgatcttcaggagtttgctgcttgcatacttattcttgatggcgatgaatttagttaagttttcatttactttcaccacattcttgg

SEQ ID NO: 3250 - DNA, 330 bp, Homo sapiens; identical to SEQ ID NO: 2

SEQ ID NO: 3251 - DNA, 493 bp, Homo sapiens
ctgcgtgacgtcatgttctacctggagacacagcagaagatcaaccatctgcctgccgagacccggcaggaaatccaggagggacagatcaacatcgccatggcctcggcctcgagccctgcctcttcggggggcagtgggaagttgccctccaggaagggccgcagcaagaggggcaagtgaccttcagagcaacagacatccctgagactgttctccctgacactgtgagagtgtgctgggaccttcagctaaatgtgagggtgggccctaataagtacaagtgaggatcaagccacagttgtttggctctttcatttgctagtgtgtgatgtagtgaatgtaaagggtgctgactggagagctgatagaaaggcgctgcgttcgaaaaggtcttaagagttcactaacctcacattctaatgaccattttgccttcctgcttggtagaagccccaactctgctgtgcatttttccattgtatttatggag

SEQ ID NO: 3252 - DNA, 142 bp, Homo sapiens
ccagattacccaggaccgactccttctctcggctgaattgctcaaaggactcctctcctgccaccggggggttcacgacaatgtccatggcggcctgcccagacactggggggcacaggcgcaccgacagcagcttcaccag

SEQ ID NO: 3253 - DNA, 530 bp, Homo sapiens
  unsure (449): n=A,T,C or G
  unsure (505): n=A,T,C or G
ctgggctctgcacctagggagacggcactgtgttgggggaagcgcgtgggaagccagagtcagccttatcaaccacaacccaggatgttccttcggcacaggcatctcctgagggccccgccacaagccacccctctgcccctggcctcacattccttggaagcacaaatgagtaagatgggaagggggcccagtggacatgtacctttccagaaccttcctaggcacccctcgacctgcagggtaagggccctattcctcaacctggcactcgaggcccctcgggtctgtccttcgcccctgcctatcttacctccaacctttcttcactcaaaatcccacacttgagctacaatgaaaggccagcggctccctaaacacacggggaccgcctgcctctggcttgcacgggcttgctctcttctgccagaagagaaaactcccaagantccctcagtgccaagctccaagcatcacctttttccttggaaaggaaatcttccantttccccaaaaagggggtcaccgtg

SEQ ID NO: 3254 - DNA, 533 bp, Homo sapiens
  unsure (305): n=A,T,C or G
  unsure (443): n=A,T,C or G
  unsure (479): n=A,T,C or G
  unsure (497): n=A,T,C or G
ctgcagagtatatgaccaggtggaaagtccaacagatgccccactcacaagatagggccctccaatcagtcttctggctccctttcactcatagtaactggttgctcttcctattggtcatagataaatgacacctgcacaattctccgagtgctttcaagcaacttcgggaggcagtgactaagaccctttccttgctcccagcttcctatgtcccagggctgcctgtggcacctggactgctgctgcccctgggtcccgtacattccagggcaacaatggaggaagggcaggcaacgcatgangaattaacagtctttattgggctcagaccaggagtccgtgggtcttgaggacctctgtgtatttgtcaattttcttctccacgttcttctcggcctgtttcccgtagcctcatgagctgtttcttctttccggtagtnggatcttgggctttctctttcctcttctccttccanggtggctgacactggctnggacttcccagccaaccctcgtgaagccaggccccc

SEQ ID NO: 3255 - DNA, 187 bp, Homo sapiens
  unsure (66): n=A,T,C or G
  unsure (85): n=A,T,C or G
  unsure (92): n=A,T,C or G
  unsure (113): n=A,T,C or G
  unsure (121): n=A,T,C or G
  unsure (148): n=A,T,C or G
  unsure (156): n=A,T,C or G
ccatggctgatattttgactacaacctcatgagagactgagccacaacaacctaactaagaaactnctgaattccctaccaacanaaacttntgagataatgttctgttgttntaactaanttttcaagccggcaatttgttatacanaatatgtnactaataaagcatggctcctttaggtcttct

SEQ ID NO: 3256 - DNA, 314 bp, Homo sapiens
ccactcctccatttagtcgtcaggagaaattctatgctacattagttaggtacgttggggatcgcaaaaacccagtctgtcgagaaatgtccatggcgcttttatcgaaccttgcccaaggggacgcactagcagcagggccatagctgtgcagaaaggaagcattggaaacttgataagcttcctagaggatggggtcacgatggcccagtaccagcagagccagcacaacctcatgcacatgcagcccccgcccctggaaccacctagcgtagacatgatgtgcagggcggccaaggctttgctagccatgg

SEQ ID NO: 3257 - DNA, 235 bp, Homo sapiens
ctgaccatgactgaagttccagctttactttttataaacttgaatgataaagaatagaccatgggctactactgggcattagtgcaatataacagcgataataaaattctctattagtctgttaatttatgacatgatctcggaatggaaaaagatcatttcagagtgtgcgaaataatagtctttaaccatgtaattaaatatgtgtgtttattgtcaaataaggatttgtttt

SEQ ID NO: 3258 - DNA, 194 bp, Homo sapiens
ctgagaaggctgcaagtgacgagaaagattctgtttcaaatatagccacagaaataaaggatggacaacaatctgggagacataattttgcaaagcagatttaatgtcatgttcagccaagatagacaagaacttctcttccccgaataaatcagcgggggactctttgaagctgcacattctgattcagcagg

SEQ ID NO: 3259 - DNA, 230 bp, Homo sapiens
ctgaggtctgccagatcatcgatgaaatcaaacaactgactgatgtcatatgtgatagagggactgttgggattcattcttttcagatgttcttcatacattttacaaacaccttccatgcattcattcacagattcgtagtcagcataagttctgcctcctggcctcttggtaggctgtaccagcaaaatggtgtgagacatcgcgccaaactctcttcgctacagcag

SEQ ID NO: 3260 - DNA, 406 bp, Homo sapiens; identical to SEQ ID NO: 1

SEQ ID NO: 3261 - DNA, 486 bp, Homo sapiens
  unsure (486): n=A,T,C or G
cctgaaagaagggtactagtccagaggtggctagatgggattgggtctctaagggagaactcctgctctcaggcccaaccctccacctcccccccgaaaacccttaccagagcctggggaccaggtttgtgttgtccacatattctccccacatacaagcctctccaccaatcaccagagccttctgctcaggggtaccttcaaatgccaggggttccactacgtagaaatccttccagtcagggccataggatatacggttcaggtaccagggggcagagagaagggcccggaagccggccttggtgaccagttccagctccttcatatagttcactggaatatcctctcgccacacctgtatgattgtgtctggctgaatctttactttattatcaaacacctcctgccacaccacatagcccttgccataagaaagagacgaatgtccagcagcgtctggatgtagaaggactccagacctcn

SEQ ID NO: 3262 - DNA, 227 bp, Homo sapiens
cctggcattcaaggctctctgagatctgggctacccacccatgtcctccagccgtctgtcgcacctcctactgcccactcactgttcctggcatgagatgtgatctccagcccccatgcctttgctgtgcagggtgttccagagtgaattgtccctcctgtctgtctctctgccctcttcctcgtctttccatcttcctgccccacatcactgcctcctacccaagg

SEQ ID NO: 3263 - DNA, 182 bp, Homo sapiens
aaagctttttaccacaatggagttgatgcgttggtccacacttgttgaggactatggaatggaattaagaaaaggttcccttgagagtcctgcaacggatgtttttggttctacagaggaaggtgaaaaaaggtggaaagacttgaagaacagagttgttgaacataatattagaataatgg

SEQ ID NO: 3264 - DNA, 269 bp, Homo sapiens; identical to SEQ ID NO: 4

SEQ ID NO: 3265 - DNA, 197 bp, Homo sapiens; identical to SEQ ID NO: 532

SEQ ID NO: 3266 - DNA, 279 bp, Homo sapiens
ctgcctctcatgtacttgtctgttgggggcttgtgttgatcaggagtgaattcacagtctaccatgaattggaaggttcttgagcacgtgcccctgctgctgtatatcttggcagcaaaaacattaattctctgcctgacatttgctggggtgaaaatgtatcaaagaaaaaggttggaggcaaaacaacaaaaactggaggctgaaaggaagaagcaatcagagaaaaaagataactgaagattctgccatgtaaatgtcagcttgagtggactccag

SEQ ID NO: 3267 - DNA, 389 bp, Homo sapiens
ctgtcaggggcggcgtgcctggtgatgcggcatcttaccttcatccccatctcagaatgggcagccagtctcagattcaaggaggaggaatcctgaggtgtggcgttcagtcctgaggtagatctgaggtcccctggaaattgtgttgatgctgagatggatgaggggtgctcattctctcaggtagacagtgaggagtcctggttcagccgagcctccatgtctgcatggatggttatgaccctgattgtttttggaaacagccaagctctctaggtgtactcagcaaatgcaaggtatagtgggtcctgcatacccagggtattatttgagccatggaagcaaaacagagactgcttagcctccctaagagtagttggtgggagtgg

SEQ ID NO: 3268 - DNA, 113 bp, Homo sapiens; identical to SEQ ID NO: 3
  unsure (3): n=A,T,C or G
  unsure (53): n=A,T,C or G
  unsure (68): n=A,T,C or G
  unsure (69): n=A,T,C or G

SEQ ID NO: 3269 - DNA, 492 bp, Homo sapiens
aaaagtcctaagagaaatatgtgacaggtagttactgtcagtagggatattttctacctttttttccctattgttgaagtgtcggccacaacagcttctgggcatgttacagcctcaaaatcaccacctaccaaaaagggcaaaactaaaaatccctataaaataaaaaagaaagttccacccaaatgtttagtgcatttgacaaaatattatgggtatttagcaaatgaataagaaaataaagaaaacagtgcaggaagaactatataatgttttaagatttttatattacagacctgcatctctgtacatttttcacaggatgattaccagtatctcagatagcctgagtgtgcaaaaatcttcagaataagaataccatagttgctaaatatcttttaccatgaacaataatttcttcttctctccccactccccaattataaacattttatccttcaaaatacagctctcctgagttgtacttcttgt

SEQ ID NO: 3270 - DNA, 294 bp, Homo sapiens; identical to SEQ ID NO: 280

SEQ ID NO: 3271 - DNA, 587 bp, Homo sapiens
  unsure (509): n=A,T,C or G
  unsure (543): n=A,T,C or G
ctgctgacagttctttggtggaaaagtaagttgcgtacttacccaagctgcccaaatgattatcaagccaagtttgtttttcaaaaataggttttaagatacaccaaagaaactatacaatacaaaaatttaacaatgaagttaaagtatatagcaaaagccaaatatgacaacacacatgtataatgtagaaaagaatcctttcagtcctagaaaactaaaatggggagaacttactgaagggtaacatacataaaatgagtactaatagcaaggaataatcctaaacattttcccaataaactgactaagcctcaaaaggacagcttaggaaaatgattaacatgcagtttttctttttccctagccaattcaggttctacttagataaatctggttgccaatcaatacatatataaattaatttttttctgctcaattactaccattttttctttttcccttttccctaattttctctagcaacacttttcctttggtttgatcangttgaactcaaaaggtttggtacctaaaatgaantatcaactgttatttgcaatagcaccttgggaaatgcaatccta

SEQ ID NO: 3272 - DNA, 233 bp, Homo sapiens; identical to SEQ ID NO: 620

SEQ ID NO: 3273 - DNA, 466 bp, Homo sapiens
ctggtatccttccttagtggcaaagatgaaactgagctagctgaactagacagagctctgggaattgacaaacttgttcaggggggtggattagatgtattatcagagagatttccaccacaacaagcaacgccacctttgatcatggaagaaagacccaacctttattcccagccttactcttctccttctcctactgccaatctccctagccctttccaaggcatggtcaggcaaaaaccttcactggggacgatgcctgttcaagtaacacctccccgaggtgctttttcacctggcatgggcatgcagcccaggcaaactctaaacagacctccggctgcacctaaccagcttcgacttcaactacagcagcgattacagggacaacagcagttgatacaccaaaatcggcaagctatcttaagccagtttgcagcaattgctcctgttggcatcaatatga

SEQ ID NO: 3274 - DNA, 326 bp, Homo sapiens
  unsure (261): n=A,T,C or G
  unsure (290): n=A,T,C or G
caaagctagaaccctgggaacaggctatgtgttgagggagggagaggaagaaaccaaggaccccctggtcctggcctgagcgccgctgtggatggcgcagcccttcgccagaacagggtgcaacgagcatggggagaggagagcaagtgcctcctcccccacaaccagatgcccaaggccacgtgagacacccagcggggagcccacaccccagggccccttctctggacaagtcactcccccacccacctttcaactcangcaagacagtactcacctccgctcgccanggggtggcttcttggggcttgcaggtttgggcaagg

SEQ ID NO: 3275 - DNA, 181 bp, Homo sapiens
ccttcttgaatctctagtcgtcgtcaggcttaggtcacactacccatgcactgatcagccctgccacgtgggggaggttccaaaaaatgaagcggttccaggggtgccaaggttcagagcagagtcttgagagcctgaggggcaggaggaggcaaaggtctctgaggacgaaggggtttgg

SEQ ID NO: 3276 - DNA, 546 bp, Homo sapiens
  unsure (544): n=A,T,C or G
ctgatcacttatttcatcattttgcatgttttattcactggggagggctgtgttacctgtatcagatgactgattctaaatagccttgttactgtgaaaacgaagttctatttatgattaccacatggtgtttgtttttttcttttttttccaccaaatggagcatcacagtcaatatgcttttaacagtgggagcagagaaggtagtgcttactctagtacaccaacctgatgggtcattagtttcaactggcttcagaagagtgattcttcctctaattagattttattgttgaagttccttcatatggaagatattttccatagtatttggataagctggactgtgttttaagaactcatatggatgttgaaggttgttttcagtttatctttccagggaacttctgttcagctctgatgggtctggtccttttcatgcctgagggagcagatgtgattgcctgtgattgaagccagtggagagttataaactatttttgttctaacatggatgatgcctaaactcttccctcttccacanaa

SEQ ID NO: 3277 - DNA, 461 bp, Homo sapiens
aaatattgttaaagaattctcaaaggagtaaggttaatgagcaagattaaaatggcagcagcagatccaattgcgttttctttttcataagcctaaaagcatcgcggtgtgtttcagagctgcttcctctacaaattctgcatccacattgtcatgtccttcaaaaggatacagggcttgattggaggactctatatctgtcagaatttcaatgaagtagttcagaggcagaaattctacactgaacgatgacttgttaatcatagaattccgaggctgtttcttatagttctgaagcagtcgcgtcacgtggttccgcgaaatgatgttagaactcataggatgatcccaaagtctacaaatcttctgcccaataagcggaggaagccgcacaatgatactgaatttcagtttttcatttttctctgtattatccagatctttcatgagccttatgacag

SEQ ID NO: 3278 - DNA, 569 bp, Homo sapiens
  unsure (448): n=A,T,C or G
  unsure (524): n=A,T,C or G
  unsure (538): n=A,T,C or G
  unsure (563): n=A,T,C or G
ccaggatggcctccatctcttgacctcgtgatccacccaccttccctcccaaagtactggaattacaggcattagccactgtgcccagccgaggctgtcatttttaaccggctctggatgactctgatgcagccatcctggaccttggctgtggtctggtaactggaacccagtgacgtaatcaggtgccattgggggtcatgggaaagggggatccccaaggtctgaggtggactaggaaggctttctgaagaacctgggtctgttagggcatcagccaatcaaggtacaagtaaatagaggcaaaatgagggtttgaactgtgagcagttggtcctggaaaagaaagaaaccaagagattatggggactcaatgggcttcttaagagagaataagttgaaatcaatggccagaaaccctgatggaagtggaggagaatcatctcangcaaactttttgtgtgccagtaacagaaaccctctttgtgtgatcacatgcaaagtataggatatttgcaatatanccatgggggaggantgcagggcccaagggtagattttanccagga

SEQ ID NO: 3279 - DNA, 478 bp, Homo sapiens
  unsure (451): n=A,T,C or G
  unsure (465): n=A,T,C or G
ctgctgaacaatgacatcgttttctccaggggttgaaatccatgtccatggctgacaacccaacaaggctgggacccaaattcgtacagagatgaggcagagtggagagaaacaactctggctgagccagagtctccagccactacttcttattcctgggctttagctcttcggctgcattacgcaggaaaatgtaattttttttctggggattataaaattcatgtccctttgaccagtcgtagctggaagcgtatgcaaatatgtttccattgtgattgaaacagcaagctgagatgggctgatctaactgttccgaagtttttagttttgttctggcatctttgtcccagaagctgaatctaccatcagatcccacagttgcaagggtgccatgaacaggatggaacgcgattccatttaccgcataaatgtcctgaggagctgaagngttggttccattanatcgatgacattt

SEQ ID NO: 3280 - DNA, 184 bp, Homo sapiens
ctgcacagtagtatctccctgcatcactctccttcacggtgagaacatgcagctctgccaacagggaacgctgggtctttctacccaggcttcttactcttccttctttgtgccaggagaatgtgacagtccctgaaccctgggctactgagcaaataaggaccatattttctccttcaatcag

SEQ ID NO: 3281 - DNA, 364 bp, Homo sapiens
tgaaattagtacagacttacttttttattttaaaatttttgctataacatttctgagccaaaggcagagggtatccattaacttcattgttgccttaattgaggggtgggtggcaatgccaagggtgggaacacaaggaagaaagaaatattaacgtcagctaagaaatcaacatgttatcaggctatactgtagttggttgcttctgtgttactggacatgacaaatgatctggtaaatgatgttaaattggcttgaaacaagagagtctcccaattcttagccacggtttcagtcagcccttccattccaggatgggattcacaagggcccttggtgtctggaagcaccaactgaacgcagg

SEQ ID NO: 3282 - DNA, 372 bp, Homo sapiens; identical to SEQ ID NO: 5
  unsure (6): n=A,T,C or G
  unsure (9): n=A,T,C or G
  unsure (22): n=A,T,C or G
  unsure (249): n=A,T,C or G
  unsure (364): n=A,T,C or G

SEQ ID NO: 3283 - DNA, 245 bp, Homo sapiens
ccaggccgaagctcactgtcccccacccattggaggttcctccctgatctgtctgcacatgggaaggagcagagcgcgcagggagaccgggctgtacaacaggaacatgctggctggacagtctcttgctggagggaatcagtagcactcacgtgaaccacctgcgctgcctccacgagttcgtcaagtctcagacaacctactacgcacagtgctaccgccacatgctggacttgcagaagcag

SEQ ID NO: 3284 - DNA, 251 bp, Homo sapiens
ccactcagcacatttcatggaggtcatgtcttttcactgatacttttttgatagtttttatataacaaaatccttattctatttataacttaagatgataaggcactataaattaatgacctaaaataatatatttgtctgttatcttttgctatttctacttcactttaatttttagctgtaaaattggtaaatggattcttacaactatctctttccatttcttactatttagttttcaaatttcattt

SEQ ID NO: 3285 - DNA, 224 bp, Homo sapiens
aaatgagcaataactcagatatattagagagaaatcaccgcttgccttacaaataccaaataaattccctagactcccctcccctgtagagaccatcagctcactgtgaaggcttgagcctcagtaggtaaaatttgaggaaaaaaatgagaaatggctaaaagaggcatctgctgcaggaaccttctgtgactgtcaaacattccctcttcaagctccctttt

SEQ ID NO: 3286 - DNA, 481 bp, Homo sapiens
aaatcacagcttttacctatttgttaggctatagtgttttgtaaacttctgtttctattcacatcttctccacttgagagagacaccaaaatccagtcagtatctaatctggcttttgttaacttccctcaggagcagacattcatataggtgatactgtatttcagtcctttcttttgaccccagaagccctagactgagaagataaaatggtcaggttgttggggaaaaaaaagtgccaggctctctagagaaaaatgtgaagagatgctccaggccaatgagaagaattagacaagaaatacacagatgtgccagacttctgagaagcacctgccagcaacagcttccttctttgagcttaggtgagcaggattctggggtttgggatttctagtgatggttatggaaagggtgactgtgcctgggacaaagcgaggtcccaaggggacagcctgaactccctgctcatagtaagtgg

SEQ ID NO: 3287 - DNA, 469 bp, Homo sapiens
ctgtgttgctcaagttgagctttgaagcaccgatccccaaagaaaatccagttccccccgaagcaagagtcgctgttccaaaagtgaagcctgtcgtctgtgtggccggagtctgggtggcaagtgagaacaggccggtggaaggggtacttgtggctggttggaagggagccccaaaattaaaccctccagtgccagaggtggagaaagaaaaccctgtagcaggtgtggttgttgccgtctttgcagtgccaaacgtgaacccgcctgtaggggccccagtgcctccaaaattaaacccgctcatggctccggactctggtggcggcagctactctggctcccaaagcaaatccgtcggtgtctgcagccttgggaagatttcgctcagtatcaggattcctccaccttctctggaccttgattcagtctcctaactgccacagaagggatgaaggttgaactccag

SEQ ID NO: 3288 - DNA, 502 bp, Homo sapiens
ctgaaaagctagattaaaaaaaaatcaatcaagtttcccaaagtataatgtttggaccttcaaaatatttagttctagggaaagatacaagtcagaagcacacacagtgacaagatatgccttgaaaacatgtctactgtgtagtatgataatcgatacaccaagtgcttacgttctgtttagacttcaaagtctgatcaaccatgaagtcaaaggtgtattacagaaacgagatgtaaaaatgaacaaatcccttctgccctttttccttttgggaaaactgacctcataggctcgttcctcaacaaacactgacatgaagacttacctgttggcctctcaattacatctgatgtcccaaacccactgagagtaaaacttggaactgttttcattaaaaaattcactttacagtagatctcaagatggacaaagataaataaggaaagaaacaagaaaaatgtaaagagggaaacaggcagatatttcagccaattagttt

SEQ ID NO: 3289 - DNA, 305 bp, Homo sapiens
aaagatttttctctaataaaagtacagaggaaattgaaagcaggatcagatagatgaatcaaggcttcttcagattcagtggtttacaaatatacctcaaaattcataaacaaaaataatacgtaaaagagaacagaaggtaacgcaataaaggtaacagagatagtgtcttcagtatataaagagatctgaaaaatttaagaaaacactagcaatgcaaagaaaaaacagacaaaagatttggaattcacgggaaaaaaagaaatggtcagtaaaaatgcaaaactgtttaagcattatatttt

SEQ ID NO: 3290 - DNA, 348 bp, Homo sapiens
ccacggagtgatgagttgtgtgcttgtccctggcagtggcaggctgtgtcctatggacatcttggcaggacatggaatttggcctcatgacaggcccaactagggataggaaggaaaatgaagagagccagtatttccccttctccagaagcaggtactcagctttctgggaaaagcgtgcctccagccgtggggacaggccatcctactgactacctcttgcttggcatgaaataaactgctatcctccccttggaatctaccgccactctacatcctactgctttggcctccctctcctctcaccagatggcatgtggtgtggcacctgtggctggacacaggagg

SEQ ID NO: 3291 - DNA, 373 bp, Homo sapiens; identical to SEQ ID NO: 6

SEQ ID NO: 3292 - DNA, 117 bp, Homo sapiens
ctgggctgctcccgccccagcccggcccagggtgaaggaagaggcacgtgctcctcagagcagccggagggaggggggaggtcggaggtcgtggaggtggtttgtgtatcttactgg

SEQ ID NO: 3293 - DNA, 464 bp, Homo sapiens
ctgcaggtctgacaggttctgctccagggccatgggcccagactccaggccacagcccagccgggccttccactgtttcatgaaccccaacagcaggtttaggtgggaggtctgggaggtgacctcatgctcttgcacagactgtgggcttcccttgaaggagcagccgacacctgcaaaggggcacccaattccagcctcagccacctcggggtgagccttctcctgagttcgaagacggcttcctgggcttatagactggaggtcttcccctctgcatttggggcagatctgatcctcgccattcctcgggttctcagagagacagcctgcacagcagagagccctgggctcctttgggtcctggcagacggtgggagggcacccaaagggaaactcattctcatcaggggccgggcgaggactgctgcctgagctggagccatctcagggttccaggctgg

SEQ ID NO: 3294 - DNA, 299 bp, Homo sapiens
ctgagggatttccacatttcgaggcagggagcagacaaaggccataagcagtgcaatcagccgcctctgccctgaggagccatcctggaatggctggaatctgctcgggaagctgttttcaggcagaaaggacacgttgccatccaagaagaggggcacaatgtgtgtcacactctgggcagctaactcagggctcaggggggttgtagcagtgccaatgacagacaccatggcagccaacacctcatcctccaatagtacttttctcagaactgagggctccttctctggcatagagg

SEQ ID NO: 3295 - DNA, 169 bp, Homo sapiens
ccagcgcctggcgtcttgtagtgatgaccgtactgtgcgtatctggcgtcagtatctaccaggcaatgaacaaggggtggcatgcagcggctctgaccccagttggaaatgtatctgtactttgtccggcttccactcaaggaccatttatgacattgcttggtgtcag

SEQ ID NO: 3296 - DNA, 147 bp, Homo sapiens
aaagtcaaaccactaggaaaatatatcacagcctggaaacagcaaacggacaggctatattataatttcaagtaataagttggtgaaaattcaacgaagttgctatcgaaacaataaggtgccatgctggggcaggaacactgccag

SEQ ID NO: 3297 - DNA, 253 bp, Homo sapiens
ccttgtccaggaatacaggtaaagggttctgcgtacagaaaatgggtcccgctacattttaattttcaacagtcacacaatttttgcatcaaaatgacataaaagaatactagcacaaaaaccctaaaatgggcacctcagactgcagtccaatttacagatctctggcttacgttatcctaaggtgttaccacaaatataaccaaaatgtgagatataagcataattctttcaacagctttcggtgcctttt

SEQ ID NO: 3298 - DNA, 441 bp, Homo sapiens
aaacatcctgatgaatggagagcatatccatttcactgggcttggcttcctcaagcaaaagttcccttttctgaagaaataagaaatttgattctaccatatatttctgacatgaactttgtgcaagatttatgtgaagatctctatgaactttttaagactgacaaaggatttgacaaagccacttttgaaagtcagatgtctgtgatgaggggtcagatcttaaaccttactcaggcattgagagacgggaagagtcctttccagctagtacagataccttgtgtgattgtggaacgcagtcaaggtggaagtcagggtcggattgtccacctgagcaattcctttacccagactgtcaattgcaggaagccatttttttcctcctggtagtaaatgtcagagtaagagaaacaaactgtttagaattatcatgttttt

SEQ ID NO: 3299 - DNA, 491 bp, Homo sapiens; identical to SEQ ID NO: 282

SEQ ID NO: 3300 - DNA, 209 bp, Homo sapiens
ctggcagggagaacagcgacaaacacctagccgagagtatgtcgacttagaaagagaagcaggcaaggtatatttgaaggctcccatgattctgaatggagtctgtgttatctggaaaggctggattgatctccaaagactggatggtatgggctgtctggagtttgatgaggagcgagcccagcaggaggatgcattagcacaacagg

SEQ ID NO: 3301 - DNA, 262 bp, Homo sapiens
aaaggtaccattctggcctgagatcttctgtaaatctattcctagtctttccattaccataaatctgtaactgtaagaaaaaagcatcaaaaagagatcatcctgagaaagtaatgcttgaaactgtctatttaatttgaaacaagaaaaattacgctcaacctaacaactaagtataatgcaatctaaaccattagagaatgaatgcacgttcataattctgctattcttttgcagaaactgctcaatatttactttgcag

SEQ ID NO: 3302 - DNA, 477 bp, Homo sapiens
aaatactctcaacgttttaccaagtgattttacctccacctttactaaagtctttacctaaaacatggcagtcgctggacacaggaaagcccaccttttgtttggccttttcgaaaggtgacccatattgcacagcagaacatcacagctgtggtcccagatgagacactgacatgcgagtgaaggcctctcctcctgggccccgggctgcgcaggctcctcactctgggcggtgtttcctgtctcagaattgacacggtgaatgcttagtgtctggattttcttgtgccagtgtttacatatctgacatcgagctcctctaagaggccacgttcaagcttgtgtgtccctgacccaagatagccagtgctgctcccaggtggtacttctggtaccgtgttgagacacttgggattctcagactgtggacaggagtgtttgtcatttttcatactgttttcttaataagcgctcaag

SEQ ID NO: 3303 - DNA, 555 bp, Homo sapiens
  unsure (548): n=A,T,C or G
cctagtgggagaagattcagcaggatgtcatgacattttgagaaaaactaaatcatgctcctgaaccttctgaacgcatttgttattgaaggaaagacaccacccccaaatcctgccatcttattggggctacttttgtcagtgtctgtacccttggcatcggcatctgtgactctttatccatgacctcagtgtttcttaaccaaagttgtactcagcatttcttaaccaaagttgaattttgaaaagagtcagtccttgtttgctggaattagaatgttaatgtcctagtattattccgaactacagtattaactgcttgttgctagtggattagacagattcttttcttactgtggcttccatgttgggagcagaagcttttcatcctggtcacatgaagacagatggtattattgactggagttgaattatttttatatcttgtctggcacaatatggaaattactgaaataagacggtgtataatggaattaacacccaaaataagtagaacactggaagaatttgaatttgatatttaagtnaaaatgg

SEQ ID NO: 3304 - DNA, 158 bp, Homo sapiens
ctgccgcaccacctgcaccagcttctccagctcgtctgggcagatgtcagggcagtgagtgaagccaaagtacatcagcacccactggccccggaagtcagccttgcagcgagcccggcctctgtgatccagcaggtggaagtcgccctggcccacag

SEQ ID NO: 3305 - DNA, 457 bp, Homo sapiens; identical to SEQ ID NO: 8
  unsure (403): n=A,T,C or G
  unsure (423): n=A,T,C or G

SEQ ID NO: 3306 - DNA, 345 bp, Homo sapiens
ccttcaaggaagggaggggtctcagaaccactaaggggccttcctcactcccacttactcaggggcagaagactcagttgaagacctccaaatccagagacttggtaattaagtcaaagcctggctatgctgggagaatggcctccagaccctggcagaaaatggggtaagggctggtgaggctccccaccttccttcctctacaatctgctagaacccaaaacgagaaatgaggctttgggaaagggagcacaggaagagaaatcacacagcttccctcctcctcccacttgctctattgggctcctgcatctgttgctgggctgctagcagagaggctggcag

SEQ ID NO: 3307 - DNA, 216 bp, Homo sapiens
agcaggccctctttccatcccgtgtcggatgagctggtcaactatgtcaacaaacggaataccacgtggcaggccgggcacaacttctacaacgtggacatgggctacttgaagaggctatgtggtaccttcctgggtgggcccaagccaccccagagagttatgtttaccgaggacctgaagctgcctgcaagcttcgatgcacgggaacaatgg

SEQ ID NO: 3308 - DNA, 385 bp, Homo sapiens
ggactagagggtcctgattttgtgtctgtgcctcttcatctctctggactctgatctccttctcccttcccatctccaggccttctgtctgtcccagataaaggcgctgttctcccatcctccctaccccatcctctccaccaaatcgctcccaattttgagagccaaaggctggcgcttctgacttcaggagcgaaaggaggaggcctagtttgggccgatgtattttaaagcagagtggacagcagagagtcaatttccctttcgttgggagtgggcagtggggtggctaattgtcttcggccaaccaggggcctgttgcccaggcaactcaccagctccgcctccgctgattggctgccacggtgggagtcagccaagattt

SEQ ID NO: 3309 - DNA, 322 bp, Homo sapiens
ctgatcaagactggagacaaagtgggagccagcgaagccacgctgctgaacatgctcaacatctcccccttctcctttgggctggtcatccagcaggtgttcgacaatggcagcatctacaaccctgaagtgcttgatatcacagaggaaactctgcattctcgcttcctggagggtgtccgcaatgttgccagtgtctgtctgcagattggctacccaactgttgcatcagtaccccattctatcatcaacgggtacaaacgagtcctggccttgtctgtggagacggattacgccttcccacttgctgaaaaggtcaagg

SEQ ID NO: 3310 - DNA, 305 bp, Homo sapiens
ctgaggtgttttagtgtcagaagagggctggctgacccccctagctcaatttggtctcacaggtgagaaggtacctggctataaatatgaatactgattgaggcaggcttgatctgggactttcagggcaggcagaatgactatggcccaggtcccacaggatgtggagtttccgggctcagcatcatggtatctggggcccatgtccaagtggagtgaattctagctgggaaggtccgctcaggcacacgggaaccccggtctgcttttccacccccaccccatggagtatccaaggctggtac

SEQ ID NO: 3311 - DNA, 484 bp, Homo sapiens; identical to SEQ ID NO: 7
  unsure (429): n=A,T,C or G

SEQ ID NO: 3312 - DNA, 364 bp, Homo sapiens; identical to SEQ ID NO: 9
  unsure (17): n=A,T,C or G
  unsure (20): n=A,T,C or G
  unsure (142): n=A,T,C or G
  unsure (288): n=A,T,C or G
  unsure (311): n=A,T,C or G
  unsure (349): n=A,T,C or G
  unsure (354): n=A,T,C or G
  unsure (364): n=A,T,C or G

SEQ ID NO: 3313 - DNA, 311 bp, Homo sapiens; identical to SEQ ID NO: 621
  unsure (19): n=A,T,C or G
  unsure (67): n=A,T,C or G
  unsure (109): n=A,T,C or G

SEQ ID NO: 3314 - DNA, 187 bp, Homo sapiens
ccttccccgtcacagaaatcgactgtgcacaggacagcaagcagaacaacttactcacagtgcagctcaagcagccaagagtggcctgtgatgtggaggtagatggagtccgagagagactgtcagagcaacagtacaacagactggtggactacatcacaaagacatcttgtcacctggcccccag

SEQ ID NO: 3315 - DNA, 443 bp, Homo sapiens
ccagggtgattgaaaactcagcctcaaaacaaaaaattcactagttatgattcaacgcgttcaacagaagccatccccagcccagcttaaattataaagatagacaataactctgttccaatctgcatggtgcttctttagtaaatactgtacagattttaccatggagaactttttttttagtttttaccttttcttaattacccttattccgaatggacgaacactttctaccactgctgaccattgtaaaataccgtgtatataaatcccattgaaataatgccctggaatagaacatctcaaatgctgcttaattacagactcaggtcgattacttgtatttcatgtaatgttcctccaagttagacatctggtgcaagaccaaccgggagaccatggaattgtcaaaagtacaaactgacagtgtgtatatttaattt

SEQ ID NO: 3316 - DNA, 303 bp, Homo sapiens
  unsure (5): n=A,T,C or G
  unsure (6): n=A,T,C or G
aaatnntttatgcctcatcctctgagtgctgaaggcttgctgtaggctgtatgctgttaatgctaatcgtgataggggtttttgcctccaactgactcctacatattagcattaacagtgtatgatgcctgttactagcattcacatggaacaaattgctgccgtgggaggatgacaaagaagcatgagtcaccctgctggataaacttagacttcaggctttatcatttttcaatctgttaatcataatctggtcactgggatgttcaacccttaaactaagttttgaaagtaaggttattt

SEQ ID NO: 3317 - DNA, 148 bp, Homo sapiens
ccatcacttaggttattccaccacttgttaatctcctttctgaagtctccttctttttgtggtcttatgctatccaaccaatcagcttttataccatcaaaataactctggaccctggatttcagtgattcatattgccaaatagcag

SEQ ID NO: 3318 - DNA, 270 bp, Homo sapiens
ctgccaaaaaaaaggctaccatgcaaggtgacagagagcagttgaaatggaagaatagttcctatggaaaagttgaagggttttggtctaaggaccagtcacagtggaagaatgcatctgagaatgatgagcgcttatctaacccccagattgagtggcagaatagcacaattgacagtgaggatggggaacagtttgacaacatgactgatggagtagctgagcccatgcatggcagcttagccggagttaaactgagcagccaacagg

SEQ ID NO: 3319 - DNA, 382 bp, Homo sapiens; identical to SEQ ID NO: 10
  unsure (343): n=A,T,C or G

SEQ ID NO: 3320 - DNA, 271 bp, Homo sapiens
agaggagctcggcctgcgctgcgccacgatgtccggggagtcagccaggagcttggggaagggaagcgcgcccccggggccggtcccggagggctcgatccgcatctacagcatgaggttctgcccgtttgctgagaggacgcgtctagtcctgaaggccaagggaatcagacatgaagtcatcaatatcaacctgaaaaataagcctgagtggttctttaagaaaaatccctttggtctggtgccagttctggaaaacagtcagggtcag

SEQ ID NO: 3321 - DNA, 126 bp, Homo sapiens
aaacactttcaaatatggagattaatcaccaacttcttattttttgggccagttggattcaattttttatttaacatgatttttctctttttggtctgtttgtgagcttagttttcttgggccagg

SEQ ID NO: 3322 - DNA, 277 bp, Homo sapiens; identical to SEQ ID NO: 619
  unsure (170): n=A,T,C or G

SEQ ID NO: 3323 - DNA, 406 bp, Homo sapiens; identical to SEQ ID NO: 615
  unsure (1): n=A,T,C or G
  unsure (352): n=A,T,C or G
  unsure (354): n=A,T,C or G
  unsure (385): n=A,T,C or G
  unsure (389): n=A,T,C or G

SEQ ID NO: 3324 - DNA, 274 bp, Homo sapiens
aaaaatcgaataatcctattcaagtcaaccagtgttaaccccggtgtgcttcctgccagtctgttcctccccatgggagtcacacaaaatgaaaatctcctagaaagagaaattcctctgtcctctgacttcttcacttagtacgctgcgaccttcccatgttgttcaacatcctcaactcggagcgtcactggctggaggtggtctataaatggaattggcttaactatcccttcactgaaaggtggacatttagggagtgtccagttttcag

SEQ ID NO: 3325 - DNA, 198 bp, Homo sapiens
ctgggattatgaaggggtggcctgcccctccacatctgtgggatatctcatcagcctcgatgacttacgagccctcaaggggaagcattttctcctggaccccttgatgccggagctgctggtgtttcccgcccagacagatctgcatgaacacccactgtaccgggccggacacctcattctgcaggacagggccag

SEQ ID NO: 3326 - DNA, 413 bp, Homo sapiens
ccagaggagctgtgtgtgtggaaactcgcaggccacacgggaaattagcgactgcgtggtgctgatgcagaaagaaaaatggccgagacgcgcggagagcgggacccgcaggcgcggcggcccagggacggggacgcggccggtgagaggacgcagaatgagatcagattgacttctcagttgctgactctcaactgcttagaaaggggcagaaacgataaaaacagacacccctgtaccccacactaaagagctgtgttaatattgacggtatttgcagtgtcccttgcccacggccccatccgccacccgtgactggggcacttccctcctgccctctggccgtcagcctcttgcagcaagcatttccatgaacaccaagtcggagattcgtccacgctggtgcctgcagg

SEQ ID NO: 3327 - DNA, 438 bp, Homo sapiens
  unsure (424): n=A,T,C or G
ctgcccagcgaggtcctggtgctgggggctgccaccagggcacagggcctgtgagaggtcaggctcagcccctgctccccacctcttccccctgccccatctcaggaccagcaagcctatacctgctggccttgagggtctgatgtggcacagtgtaagagagttagtgatcctgagtctggtgtcctttccctgacagacaaccagaggtccagcttcaaaggagatacacagggggcaggggtggagtagggcatcttcttcctgtgcccaatctttcctcccgtgttttctagtttctcacaggactggggcaggggtcagtggggaggcaggtggactgccctgagcaaacttccagagaaataccaggccaattttccctttaagggatggggaaaccaaagctgggaggattgggganggtggagagctgca

SEQ ID NO: 3328 - DNA, 472 bp, Homo sapiens
  unsure (390): n=A,T,C or G
  unsure (454): n=A,T,C or G
  unsure (471): n=A,T,C or G
ccactccatcctggggacctttcttcagcacccgtattccttgtaagtctagacgccgccctttcatctctagtgcacccccaaagccttccaaaggccatgcctgttgaaattcatccaccaaagccagtatttcttctgacattttggtttcatctgaattctccatctcatcagaaccattgctctcctcaaccaccgtactttcaagtctaagggcatctgagtccctccctgaattctcaacagagaatacagggtcctcctctgttcctctctcagagggctcttcttcagcagcatccagtgactgtgagttgtcaaaatatttctgtttgtcatggctgttgtccagggttttctcatgacaattaccactgcaaacagaanaagtgatgttgtacagaaaaaggataaaaacttgcatacagcgggatcaacttcaggctgtttncacactctgggacattng

SEQ ID NO: 3329 - DNA, 465 bp, Homo sapiens; identical to SEQ ID NO: 12
  unsure (432): n=A,T,C or G
  unsure (461): n=A,T,C or G

SEQ ID NO: 3330 - DNA, 292 bp, Homo sapiens; identical to SEQ ID NO: 11
  unsure (95): n=A,T,C or G
  unsure (148): n=A,T,C or G
  unsure (184): n=A,T,C or G
  unsure (212): n=A,T,C or G
  unsure (247): n=A,T,C or G
  unsure (262): n=A,T,C or G

SEQ ID NO: 3331 - DNA, 472 bp, Homo sapiens; identical to SEQ ID NO: 283
  unsure (5): n=A,T,C or G
  unsure (6): n=A,T,C or G
  unsure (9): n=A,T,C or G
  unsure (350): n=A,T,C or G
  unsure (426): n=A,T,C or G
  unsure (454): n=A,T,C or G
  unsure (455): n=A,T,C or G

SEQ ID NO: 3332 - DNA, 235 bp, Homo sapiens
  unsure (170): n=A,T,C or G
cctatgacccccacccagataggcccaagcctgctgcctatcatgtggcagctctaccctgatggacgataccgatcctcaactccagtttctggcgcttagtgtaccacatcaagaatgacggcgtggaggacatgctttcagctgtgcagatactgatgatggcttgnagactgctctttacccaggctagctgactcggcggacacctaggcaatcacacatgcgcgtctat

SEQ ID NO: 3333 - DNA, 470 bp, Homo sapiens
gggatgtaccagatgcttatgaaactatcagatctcgtgagaactcactatcacaagaacagcatgaggagaacccatccccataatccaatcatctcccctcaggtttctcccttaacacctaggggttatagtacacagagaagtttgggtggaacacacagctaaactatatgaatgccagaggacagtatctatatttaatttcaacttcatactggagcagaatgaaaatgaagcccagtggagaagtgacattcccaagatcaccctgccagacccaggactgtttgagttgtggcccatgctacctcccacctattctcctaatgcttccatctctaagtgtatgcattatctacaggtgacactacatcattatttttatgtcttatcttatatacacctaatacattccctaggaagtagatgttagcatcatcaccagtgtgcatgttaggaggctgggg

SEQ ID NO: 3334 - DNA, 206 bp, Homo sapiens; identical to SEQ ID NO: 13

SEQ ID NO: 3335 - DNA, 394 bp, Homo sapiens
cctctgagggcacagtggtaaatgatggagggggtggactcctcacttccagacagcatcaccccacacatctgtattattgatgctgaaaattccggccctacgtccagaggatagttctcaatgaggtaaaacgcagtggcacacatgaccagtacgtgctgctggctgtgaatgttcacgcagtgggcgatccctttcaggttggagaggagatagtcgctgatgaccgggatgagctgcttggcagtgtcgtccagcaggtcgcactccagcacatagaggatgccgtgcagggctccaaccctgctgggcaggtggctgctcctgagcgtgctctccagcaggcggctgacaggctccgccacggccttgtccatcccaaggacggcag

SEQ ID NO: 3336 - DNA, 199 bp, Homo sapiens
  unsure (187): n=A,T,C or G
ctgaggcctcactactagatgcagtgctgggaccttcctcttttggagctgtcccatgtacagtggacccaagctcaggaccttcgtggagctgcttctccaacctgagaaactcaagacccatcctcccgctgtcactttggacaatggaaatctacattttcttttccctttttttttttttttnaaaaaaaaattt

SEQ ID NO: 3337 - DNA, 179 bp, Homo sapiens; identical to SEQ ID NO: 285
  unsure (5): n=A,T,C or G
  unsure (24): n=A,T,C or G

SEQ ID NO: 3338 - DNA, 239 bp, Homo sapiens
ccaactcgcatattgttagtgcaggaggggatgggaagattggcattcataagattcacagcaccttcactgtcaagtactcggctcatgaacaggaggtgaactgtgtggattgcaaagggggcatcattgtgagtggctccagggacaggacggccaaggtgtggcctttggcctcaggccggctggggcagtgcttacacaccatccagactgaagaccgagtttggtccattgtt

SEQ ID NO: 3339 - DNA, 365 bp, Homo sapiens
  unsure (357): n=A,T,C or G
  unsure (365): n=A,T,C or G
ctgctggatgtcctggaccgcgggctcatcctccagctacagggccaggacctttatgccatccgcctgtgtcagtgcaaggtgttctggagcgggccttgtgcctcagcccatgactcatgccccaaccccatccagcgggaggtcaagaccaagcttttcagcctggagcattttctcaatgagctcatcctgttccaaaagggccagaccaacaccccaccacccttcgagatcttcttctgctttggggaagaatggcctgaccgcaaaccccgagagaagaagctcattactgtacaggtggtgcctgtagcagctcgacttgctgctggagatgttctcaggggagctatnttggtcan

SEQ ID NO: 3340 - DNA, 482 bp, Homo sapiens
  unsure (425): n=A,T,C or G
  unsure (439): n=A,T,C or G
  unsure (445): n=A,T,C or G
  unsure (464): n=A,T,C or G
  unsure (472): n=A,T,C or G
cctcctgaaactacagaaagggcaaaaattgttatccgggagctattgcctaatgggttgagagaatcgataagcaaagtgcgctccagtgtggcctatgcagtgtcagccattgcccactgggactggcctgaagcttggccccaactcttcaacctgctcatggagatgttggtgagcggagacttaaatgccgtccatggagccatgcgtgtgctgacagaattcactcgtgaagtaacagacacacagatgccacttgttgctcctgtcattctcccagagatgtataagatcttcaccatggctgaggtggtatggtattcgaacccgttcccgaccgtggagatttttacccttgtgtccatatgatcttgtaacatgggaggagctgggaaaagggtgcaggccaaagtccttgatcntttccccgtgggtncagcanttttcacaaaaggacctcnggccgcgnaccacccttt

SEQ ID NO: 3341 - DNA, 349 bp, Homo sapiens; identical to SEQ ID NO: 284
  unsure (272): n=A,T,C or G
  unsure (331): n=A,T,C or G

SEQ ID NO: 3342 - DNA, 378 bp, Homo sapiens; identical to SEQ ID NO: 14
  unsure (320): n=A,T,C or G

SEQ ID NO: 3343 - DNA, 303 bp, Homo sapiens
  unsure (276): n=A,T,C or G
  unsure (294): n=A,T,C or G
ccttcctaaaaaatagtggtgagctggaggctacttccgccttcttagcgtctggtcagagagctgatggatatcccatttggtcccgacaagatgacatagatttgcaaaaagatgatgaggataccagagaggcattggtcaaaaaatttggtgctcagaatgtagctcggaggattgaatttcgaaagaaataattggcaagataatgagaaaagaaaaaagcatggtaggtgaggtggttaaaaaaaattgtgaccaatgaactttagagangtctgccttggactggcncttatttct

SEQ ID NO: 3344 - DNA, 352 bp, Homo sapiens
  unsure (92): n=A,T,C or G
  unsure (187): n=A,T,C or G
  unsure (235): n=A,T,C or G
  unsure (242): n=A,T,C or G
  unsure (318): n=A,T,C or G
  unsure (329): n=A,T,C or G
ccagcccagagcacaagaaagcaaccaacaaattctggtgggagaacaaagctgaggtccagatgaaagagaagtttctggtcactccccangattatgcgcgattcaagaaatccatggtgaaaggtttggattcctatgaagaaaaggaggataaagtgatcaaggagatggcagctcacatccngtgaggtggagcagagcccgacaggaggtggttcggtctgtcttagangcctcangcagtgccagacccagaagagggctcttcagcacctagaagcttggaaagggatgaacagcccaagtagcttccanctttacagcancccctcaaaatttggaccctgcc

SEQ ID NO: 3345 - DNA, 170 bp, Homo sapiens; identical to SEQ ID NO: 15

SEQ ID NO: 3346 - DNA, 358 bp, Homo sapiens
  unsure (122): n=A,T,C or G
  unsure (215): n=A,T,C or G
  unsure (216): n=A,T,C or G
  unsure (298): n=A,T,C or G
  unsure (319): n=A,T,C or G
  unsure (345): n=A,T,C or G
cgaggtctgatggcgtcatccggctgtttgacatgcagcagcatgagtgcgcgatgagctggagggcccactacggggagggtctactctgtggagttcagctatgatgagaacaccgtgtncagcatccggcgaggacgggaagttcatccagtggaacatccaccaagagtggcctcaaggtattccgagtacagcctcccctcagatgccanngggcccctttgtgctgtctggatacaagcggctacaaccaggttcaagtccccaggggcccgactcttcgctttttgacttnggaggggaaattacattgctngacatgttctttgccaccaggcgggngttaatcttacaa

SEQ ID NO: 3347 - DNA, 473 bp, Homo sapiens
  unsure (372): n=A,T,C or G
  unsure (469): n=A,T,C or G
ctccacatgaattgagtgttcatttacctcagtattaccgtgttcatttttgtcctcgtgctacagttagctccctgccgcctcttgcaggtcttacttcagctcttgcctgtgacccacacagcttctgggctctgcctctgctctaagaagtgctgtgggggtagagaaccaggaaggacatgctgttgggaatgtacacctgggcagaggtggccctgttaagatgtgactgtagccacagccagggatgggatccctgggtctctggaatctgaaacctcaacaaataccagtcttgacccctagcagcagagataagaataaaggggttggtttgctattaagtcagatgggggctctctccttgtnatgctgtccctgtgggtaacagacagggaattgaccatcttactgttgtaccaggtagctggggggggttggataatcccattgaagctgggacagncctt

SEQ ID NO: 3348 - DNA, 179 bp, Homo sapiens
ctgtcccagatcggctgcctgccagggaaagggagatggatgtcatcaggaatttcttgagggaacacatctgtgggaaaaaagctggaagcctttacctttctggtgctcctggaactggaaaaactgcctgcttaagccggattctgcaagacctcaagaaggaactgaaaggcttt

SEQ ID NO: 3349 - DNA, 299 bp, Homo sapiens
  unsure (88): n=A,T,C or G
  unsure (138): n=A,T,C or G
  unsure (149): n=A,T,C or G
  unsure (165): n=A,T,C or G
  unsure (192): n=A,T,C or G
  unsure (249): n=A,T,C or G
  unsure (279): n=A,T,C or G
  unsure (286): n=A,T,C or G
  unsure (288): n=A,T,C or G
gttggatttgcaaacctccccaatcaagttcaccgaaaatcagtgaaaaaaggttttgagttcacactgatggtggtcggtgaatcanggtctaggaaaatcgactctcataaacagcctattcctacctgatctgtncccagaaagangtcatacctgggacancaggtaaaaacattcttatgttactgnaagtgtaattctacatgaaagatgcttgaagactgcctaattaatattttatgtctnagctggtgtgttttgtttgttcttgttcanctttgancncaaggaaaaac

SEQ ID NO: 3350 - DNA, 308 bp, Homo sapiens
aaatgattctttatttcaataaactttaacaaacaatatataatatttcttccttaaaaagctcattcaaagatcataggcagacttcttccccattgtattttagttggggagataaaggcaaaaagaggaaatgtaagctatcttacagtcattctgagaacctctggtttcatgctatactttcccagctaaaagttactaatttacgaagttcagatactgaaacttaaaaatcaagatccatatattaggatgtcctgctgtcacactggtggtggcccattgtgtcggagtctggtaaatgg

SEQ ID NO: 3351 - DNA, 466 bp, Homo sapiens
  unsure (317): n=A,T,C or G
  unsure (382): n=A,T,C or G
  unsure (399): n=A,T,C or G
  unsure (439): n=A,T,C or G
  unsure (463): n=A,T,C or G
ctgcagccccttgaacaggtgaaagctggaatagaagctcattcggaagccaaaaccagtggactcctgtgggctggattggcactgctgtccattcagggtggggcactggcctggctcacgtggtgggtgtactcctgggatatcatggagccagttacatacttcatcacatttgcaaattctatggtcttttttgcatactttatagtcactcgacaggtgagtagtttgttaggaaaatggtaagttagaacatctttgcaaagaatgtcttatctaagcaatgagcaaaaaacctttttatttactgaatnctgccatctggtttttatgagctggtaaattttttattggttttccaagactgaatgaagactcncacacagagaaattatntataaccttctttggaaaagtaattagtgtaacacacaanttcctccattgggaataaatatgnggt

SEQ ID NO: 3352 - DNA, 243 bp, Homo sapiens; identical to SEQ ID NO: 622

SEQ ID NO: 3353 - DNA, 337 bp, Homo sapiens
  unsure (256): n=A,T,C or G
cctcttccctgatggccgcgtcttcatggaagtaggagagaagactgtaaaaagcgaaaggcagcagcctggtgtgctgatccggggccacacgggaggaggagccgccccagcctgaggtcactctctgtcaactgaaagagtgccagccaggatatcttcctcttctctaaacactcgaggattgcttgcacaaacgtggaaaagcctttggcaggtctgtggtgctatttgaggtcagatgtgacgacagcanggcccatcaaggagaagaagaaaaggaaaaccaatagctcctctctctcgcagtccagctttctttacttgcttcctgatg

SEQ ID NO: 3354 - DNA, 337 bp, Homo sapiens
  unsure (235): n=A,T,C or G
  unsure (280): n=A,T,C or G
  unsure (337): n=A,T,C or G
ctgcataatgctcccacatctgtagatagagccgctctagttccattgtgtattgtttggtgttgaacagagggctagatattctttgcttccagactttgccacgaactttcttcaggtattctagatcagttcccaccttcacagctatgtcttcatattcttgtctgtttttagcaataagctcaagacaacctaagcaagtgagctgggatgctgcaactcgagaagcaanagtctctcctggcatagcaccatgggggtccctgcccaaaggacntccatccctgtggtgtgcccattacagagtgggagtgtccaagcagacatcagccan

SEQ ID NO: 3355 - DNA, 198 bp, Homo sapiens
ccagaagaaggggtaatttatatataattcaaactatatacagcataaatggaatgcagcccatcccaaactggctctgtgaaacaattggacctttatagttaaaattataacaagtgtaataatacaatagatttacatgggaagcaaaatccaagggacattttatattaagtatttactgtgctgtttcaattt

SEQ ID NO: 3356 - DNA, 201 bp, Homo sapiens
  unsure (129): n=A,T,C or G
  unsure (156): n=A,T,C or G
ctgcaagaagaatggaatgaacataatgccaaaataattaaatatataagaactaagacaaagccccatttgttttatattcctggaagaatgtgtccagctacccaaaaactaatagaagagtcacanagaaaaatgaacgctttatttgaaggnagacgcatcgaatttgcagaacaaataaataaaatggaggctagg

SEQ ID NO: 3357 - DNA, 281 bp, Homo sapiens
  unsure (245): n=A,T,C or G
aaaatattttaatcaggcagagttttatggatagagaatagaagagaaaggtagtaaatattgaacatattccaatataggaacctatctctgtttttagtacaaaatatttctgacatctgaactagaggtcaagagaataaattcatttgtatacatctgagcaacctgtctttcagatgataaagtatctagccttttctgacaccataatagttcattttgtagggaataagccattaggngtatataattgctttctagaaatggacctaatgtcc

SEQ ID NO: 3358 - DNA, 292 bp, Homo sapiens
  unsure (92): n=A,T,C or G
  unsure (198): n=A,T,C or G
  unsure (252): n=A,T,C or G
  unsure (267): n=A,T,C or G
  unsure (289): n=A,T,C or G
  unsure (292): n=A,T,C or G
ctggtggtgcctcagccatggcctggaccgttctcctcctcggcctcctctctcactgcacagactctgtgacctcctatgtgttgactcanacaccctcagtgtcagtggccccaggaaaagacggccaagattacctgtgggggaaacaatattgggagtaacaatgtacactggtattaccagaagccaggccangcccctgtcctaatcatctcttttgataacgaccggccctcagggatatctgancgattctctggcttnaattctggggacatggacctcngcn

SEQ ID NO: 3359 - DNA, 267 bp, Homo sapiens
  unsure (1): n=A,T,C or G
  unsure (3): n=A,T,C or G
ngnaaaatagactcaggatttatttattttctttttagctttatagcaattaattggctattgattggttggaatgttcaactctccatttcctcaaatacaataaaatagtttcattaaaatgtattcatgcttgaaaagaagggcgccattaaatggtttcctttctgttccactccaagggaaatgcgccgtttgtaaatcaaaaatccatcatccaaaatcacttgttcttaatgatgcttttggagaagatgagggacgtgg

SEQ ID NO: 3360 - DNA, 462 bp, Homo sapiens; identical to SEQ ID NO: 16
  unsure (194): n=A,T,C or G
  unsure (287): n=A,T,C or G
  unsure (328): n=A,T,C or G
  unsure (407): n=A,T,C or G
  unsure (431): n=A,T,C or G
  unsure (435): n=A,T,C or G

SEQ ID NO: 3361 - DNA, 235 bp, Homo sapiens
  unsure (150): n=A,T,C or G
  unsure (152): n=A,T,C or G
  unsure (172): n=A,T,C or G
  unsure (195): n=A,T,C or G
  unsure (207): n=A,T,C or G
  unsure (230): n=A,T,C or G
gtctgcatggggggccacggatcagatacttagtcctattgcttatcctcaccaaagggtgtgccacccagggccacagtcatggaagaagaccatcccggtcctcacccataggcgccaagccctgttcatgatgggatcacagggcananatcaattcattttactccanaaactaaggccccacggggtgangctcttttgggnttctaagggaaatggacctctgncccca

SEQ ID NO: 3362 - DNA, 471 bp, Homo sapiens
  unsure (1): n=A,T,C or G
nccagcaggctgcggaggtaacgctcccgaagggcggctcgtgcccgctgctcctgggattccagggattcttgagctatgggacactcctggatttcaggaacctctggcctcaagggggctctgcgtccatcaggggcaaagccacggctgaagccatcagggccccggggcagccggagcacaggcacgggaatgttcactggagtttgcattgtcttggctcctccactgccagcatcctgctgcagccacagacacttcctgcctggagtactgtagtcaactcctcactgggtccctggcttccaccttcaccccccgccgtctgcaccccaacaccctgttaatgcctgagtcagatcatatccctcttctgctcggagccctcttgtggcttctgtcttactctggatcctgccggcaccctctggtgtaccacgcttgctcttcccaccccagccacacagg

SEQ ID NO: 3363 - DNA, 179 bp, Homo sapiens
  unsure (130): n=A,T,C or G
  unsure (156): n=A,T,C or G
ccatcgtgtttgatggtaaggtttctcacaaagccgaaaatgtagctgaagatcaaaaaaatctcacaagaaggggagggagaagagattcgattctgagtctcctactcccgggttctgcgtagagaanccgactgctgctggaggtcggcaacncggccacaaccgctcagtcttcg

SEQ ID NO: 3364 - DNA, 246 bp, Homo sapiens
  unsure (1): n=A,T,C or G
ngtaaatatagtcattgatatactacaaattgtatttctctctctatgtttgcctataaaatttatttacttaatcaaaatggttgcctgatataatttcccctgcaaaagttgtcaaaagaataatgttattgccttaggcaggaactcaagcacaaagataaaaagctgtatctgagtatttgctgtattttatttgttcacatttagcctatttgaggttaacactacttcatttgacagttt

SEQ ID NO: 3365 - DNA, 383 bp, Homo sapiens
ctgagcacactgccacccagattaaaatctgggttatgtgaccaaggaaaaagaggagactggatattggataggcaactaacagtctctgccgcaccctacttaacaaactggcccagcttctgtgttcagatctgatgcttggtgcccgcagctccaaggagaccccatggttcaagctgcaattacttgctccacaggcccttaccaaggaaagtcaggttttttccctcctgaggatcctctgaccagcatcttcagattttttttcagttagaagtattcattgggcacctgttttttgtttgtttgtttgtttgtttatgaccacatcagtctttcattagaatctttgctttatctcattgcatagttgaatttct

SEQ ID NO: 3366 - DNA, 251 bp, Homo sapiens
  unsure (46): n=A,T,C or G
  unsure (58): n=A,T,C or G
gggagatgccggcaccccccaaccctggggctgttccctggctcangatggtgtctcngggctaggattatggtcaggagtccatcggggcctcaagcacctcctgggaggaatcacccaccttgcccagatccctcaccccctcccagtgccaccctacggctgagtttccactctgcaaaccctaaggcagagacataagcccacagggttggttttcacgaatgtcacaagcccatgtgtctgggcag

SEQ ID NO: 3367 - DNA, 192 bp, Homo sapiens
ccacacctgctgctgccagggcagtggagtagggcgtgccaggatgagatggggcttgggccccttttaaggccaggggaaccctcccaggccccactatgggaagccagagggaacagtgaaggagcagagagggcgcccccaaaccaaaagcccagagagcaatgtccccaccaccaagggagtggggac

SEQ ID NO: 3368 - DNA, 303 bp, Homo sapiens
  unsure (1): n=A,T,C or G
  unsure (2): n=A,T,C or G
  unsure (224): n=A,T,C or G
  unsure (250): n=A,T,C or G
  unsure (260): n=A,T,C or G
  unsure (271): n=A,T,C or G
nncaatggtgtgatgaattccttgcaggatcgctacggttcctactgatccgagctctgtgactcaggcttacgatggtgacggcaacaagaactccacagttcccaggctggggatgctttgccttgtggaagctggggaggatttgttacttcctatgtgtggtgtgtgtgtggggtggcctttgaggcgctcactcctgtgaggggaatggtcagtaccancccttgtcctctgcctgtggactganccctttattncctctcacacnaccctccgtgtgttagactcttgtccttctgt

SEQ ID NO: 3369 - DNA, 222 bp, Homo sapiens
  unsure (158): n=A,T,C or G
  unsure (176): n=A,T,C or G
  unsure (212): n=A,T,C or G
gaatcctttggtccacttctgctgactcaacccctgcccatgccaacaaaggagtactaagaaaggcaggttagcctgaatgtctaaattcaatttgttcaactttataaaagcaagcaaagctactgggggttgccccctcccaccatcattctggnccaccatttgggccacangcttagggaaatgaaggaaagtcgttttctttgaangaaatcctgg

SEQ ID NO: 3370 - DNA, 297 bp, Homo sapiens
  unsure (165): n=A,T,C or G
  unsure (180): n=A,T,C or G
  unsure (204): n=A,T,C or G
  unsure (235): n=A,T,C or G
  unsure (270): n=A,T,C or G
  unsure (290): n=A,T,C or G
caaacttgatttgagagcaagtgcaagggagagaaaagaaaaatgttaagtgtaaatgtttttattttcctaaggaagaacacttgtaactgatggttacatacttgaggctaacatggaaacatatcatgtagctaaatcccatccagttttcctaaacttgancctggagcctgctgnggagtagaaacagtcccaccaganggtatagcaactcttctggcagtgcccaganaggcagaactgaatggagttcctgggggctgcatngccaactttggacctgcccnggcgggc

SEQ ID NO: 3371 - DNA, 236 bp, Homo sapiens
  unsure (236): n=A,T,C or G
caagtcctggcctgcagccactctggtggacttggctttgggtctggggtcttagtgtcttaggcttgagggagaggggcagtgaagaggtgccctcagcctccccattaccccgcctctcctccacagaacccacatcctaggctggcctaccacaagcaagggggctcaggaggggcccacgcggatgtgagggttcatgagtgggtccaggttgggatcgctgtcagacctcn

SEQ ID NO: 3372 - DNA, 292 bp, Homo sapiens
caagtaaacacttacagtgcacacatactacacacggtgcaggagtcttgtttcctcccatgaattcttgatatgtacttaccagtaggacagcttgaatttttactaatctgggcattgtgcatactttttgggtaatatataatttcagaaataaaggtgttacatttttcaggctagaacttggtaaatatgaaaccaccaaggtggtgaattactgtatgtaatctttttcctccaaaaaataagataactggtcttacacttaggttagcattatgattctaatttt

SEQ ID NO: 3373 - DNA, 246 bp, Homo sapiens
aaaccaaagatcatgtttagaacaatgaaaaattatttgttgtatctaatacacgcctgtattgtgaaaagcttcatttagcaatgatgtaataatttttaacttctaggaaataatctgtgaatggaaagattttttaagattttgagatagtgtttagtctcatgttgggaacacatgaatgtgatgaacatagtgaatactaaagaaaacgcttcagactttcagaatgatggttcagaattt

SEQ ID NO: 3374 - DNA, 338 bp, Homo sapiens
  unsure (131): n=A,T,C or G
  unsure (134): n=A,T,C or G
  unsure (140): n=A,T,C or G
  unsure (276): n=A,T,C or G
  unsure (300): n=A,T,C or G
  unsure (323): n=A,T,C or G
ccatcctggctcctgtctcgtctggccttttgtttcctcatccctgcagtggggaccatgttccagtggggactgagggaggtggtgtgtacagtgttgtgtgcagagcctggcatggcagcgaccttcancanatggangtgctgtttggcatcacccgtttgcgtgcaagtgaccggcaggcttctgtcttctctgtaaatgaaggaggctgcaagggaagcaagggtccaggcttctgccttggacgcacaagccttggtccgcccttccttnttgaacttccccaagggctttggnaaggggtgcctgaaggggtaacnaggaatggggggcaa

SEQ ID NO: 3375 - DNA, 165 bp, Homo sapiens
  unsure (146): n=A,T,C or G
ctgcaggtcccaggagggcctgaggtcaaagctgtggaaggccctcttggtatcagggctctctccccatggcctcttccccacctctgattgctggttgtggccccataactcatcaccccttgtctccttgcttaaatgtgcanggcttaatgtggcacttga

SEQ ID NO: 3376 - DNA, 455 bp, Homo sapiens
  unsure (19): n=A,T,C or G
  unsure (224): n=A,T,C or G
  unsure (239): n=A,T,C or G
  unsure (246): n=A,T,C or G
  unsure (251): n=A,T,C or G
  unsure (300): n=A,T,C or G
  unsure (364): n=A,T,C or G
  unsure (393): n=A,T,C or G
caagtcctcccaaagacancaatgggagaagtgaccccataactgcataaaataatccctcttctttgaagctcttggcaggaatcgctcagccagcaggaaacctttaacccaatacccagaaagacagacatttggaggaagagggatcttccagattattcttccattctgccccatcctctacagagaaggaaactaagacacttttcaagaatcacaanataagttaatgatanaaagcanagtanaatcttgagtggaggagtgaaaataacattcactttgttcaaatcccanctctaccactttccaatggtgtgaacttgcacaaataactctgagtctcattttcttcatttgnaaaatggagagaacaatctccgcttcaanagattgtcttaaatggaacatgcaaagcatcctgatatcgtttacccaaccacacatagcag

SEQ ID NO: 3377 - DNA, 207 bp, Homo sapiens; identical to SEQ ID NO: 17
  unsure (201): n=A,T,C or G
  unsure (207): n=A,T,C or G

SEQ ID NO: 3378 - DNA, 237 bp, Homo sapiens
  unsure (161): n=A,T,C or G
  unsure (209): n=A,T,C or G
  unsure (226): n=A,T,C or G
caagtctgtgcgggtctggatagaggagaggtcaagggcttggactggggaccctgagctgccaaggtgtggggactccttgcagtcctggtgcagcaatggcaggaaggccagcaggggccctagttgagcaggttgccctgctcctgggcctgggtcangctgtccttgcggtgcaggtggtgaacccccatcctcttggggctgcnctgggggccgactgganctggggagtgg

SEQ ID NO: 3379 - DNA, 435 bp, Homo sapiens
  unsure (5): n=A,T,C or G
  unsure (288): n=A,T,C or G
  unsure (302): n=A,T,C or G
gcccnggcaagtaaagctcttaagttcagggtagcggtctcaaactgccaaacactaggatgaggatgtgactctgcatgtgttttggatgagaggaagcatcgtcccagtcacttttctcctcctgtgctgtcctttcaaaaacaggtctggatttcacgccctaccccaagaaaaagaactggttcagaaaacacttccccaagtttctccaacagaacactgtggctgcagggcctggtagtgtgaagggcagcaactgacatataaaaatgtacttaaaatcanagtcaaaaaatggntttaagttttaatactcttaattagctccctgctttatactgtaactccacagaagacatagggccacctaggattcacaggaaggagcagctctgattcttacatggctggctccgatgcccccacagcagg

SEQ ID NO: 3380 - DNA, 231 bp, Homo sapiens
aaaactaacttcactgttaaccaagcagttcaacatgaaagactgaatctcttatgtttaatattttcttctcttttaatcttcataactaatttttttcagataattgtataaaataaccatggtagcaaaataatgtgatcactggaaaataagcagggaaaaacatgctatgaagatactcctatctgggtgaattcttgatagctttacatttttcatctggcattt

SEQ ID NO: 3381 - DNA, 186 bp, Homo sapiens
  unsure (160): n=A,T,C or G
tccatcaccatgtcacccacaccagcagcgggaagtctgttcagccgtcccttgatccccttcacggagatgatatacaggtttttggctcctgtgttgtcagcacaattgattacagctcctaccggaagacccaaggaaatccggaatttcgcaccanaggacccaccacgtcctcgcttcgac

SEQ ID NO: 3382 - DNA, 216 bp, Homo sapiens
aaaatggtttcacctgttaaagggccaacagaactcttggttttacttttgtaattactgtacagaaaatttcaagagtgtttgagtgcttgtcatcaggtgttttccttaataagtagggatatgatcatttacaggaattatatatgaaaaaagtttttgaaatgtatttttgtgatgtgctatgttgaggggaaaccaaatatttatgatttt

SEQ ID NO: 3383 - DNA, 443 bp, Homo sapiens
  unsure (1): n=A,T,C or G
  unsure (366): n=A,T,C or G
ngtctgcattgaggtgaccccaggggacaggagttggcaccaaatggtagtgagagccctatcctcccaggagtccaagccagagcaccagggcttggcagagcctgagaacgaccagctcccggaggagtaccaacaaccgccaccctttgcccctgggtactgctagagaacaggtccaccctggctctgggactcgctgccaggggctgccacactcctgaatgccttaacatttcttccatggccccacaccatggcatccgggggtcttcgggaacccgggaaatggaataaagatgtttttggggtctgttcctgcactcacccatggggtgagctggttattttagcaacaatcaccanagtgacgctgatggtttggggcaccagctatacatcagccccagtgccagaccttctattcattattttacgcctca

SEQ ID NO: 3384 - DNA, 388 bp, Homo sapiens; identical to SEQ ID NO: 287

SEQ ID NO: 3385 - DNA, 247 bp, Homo sapiens
  unsure (46): n=A,T,C or G
  unsure (57): n=A,T,C or G
  unsure (78): n=A,T,C or G
  unsure (119): n=A,T,C or G
  unsure (125): n=A,T,C or G
  unsure (139): n=A,T,C or G
  unsure (165): n=A,T,C or G
  unsure (172): n=A,T,C or G
  unsure (188): n=A,T,C or G
  unsure (247): n=A,T,C or G
gaaaggattatgggaaagatggaagctgacccatacctatccaagntcctctaccancttcatgaaaccgagaaggangatctgatcccataggaaaggtccctgagagagcgagtgcntcagtntcgaatggacacanatctggaaaccatggatctcgaccanggtgganaggcactggctccacngcaggttctggacttggaggacctggtttttacccaagggagccactttatggacctcn

SEQ ID NO: 3386 - DNA, 146 bp, Homo sapiens
aagtccttactacgtgtcccacttcctccccgccctgctcacacctcgagtgctccccaaagtccctgactcccgtgtggcgtttatagagtctctgaagagagcagataaaatccccccatctctgtactccacctactgccagg

SEQ ID NO: 3387 - DNA, 415 bp, Homo sapiens
  unsure (1): n=A,T,C or G
ngtaaatatgatcttgggagatgtggaagaaactgtgactactatagaaattgatgaagaaacatatgaagagatatataaatcaacgaaacggaatattccaatgctctttgtccggggagatggcgttgtcctggttgcccctccactgagagttggctgaaacaaagaatttgtcctgtatggaaaacgggagactttgtacagtggcctctctaaaagtacaaaacattcataagagaaacctgcatacattttgatattaagaaataattccggggattcttccactcctgaaatgagttgatttgcagataactcacaacttcttaagctaaatggtattttcatttttctcaagctctccaataaatatgaccaccaagatccaaaaaaaaaaaaaaaaaaaaaaaaa

SEQ ID NO: 3388 - DNA, 294 bp, Homo sapiens; identical to SEQ ID NO: 18

SEQ ID NO: 3389 - DNA, 555 bp, Homo sapiens
  unsure (354): n=A,T,C or G
  unsure (453): n=A,T,C or G
  unsure (506): n=A,T,C or G
  unsure (507): n=A,T,C or G
  unsure (537): n=A,T,C or G
ctgctcgacagcatatggcaccagcccattttcaatttgctgagcatcggccaaagcctgtatgcgaaagccaaggagctggacagagtgaaggaaattcaggagcagctcttccatatcaagaagctgttgaagacctgtaggtttgctaacagtgcattaaaggagttcgagcaggtgccgggacacttgactgatgagctccacctgttctcccttgaggacctggtcaggatcaagaaagggctgctggcacccttactcaaggacattctgaaagcttcccttgcacatgtggctggctgtgagctgtgtcaaggaaagggctttatttgtgaattttgccagaatacnactgtcatcttcccatttcagacagcaacatgtagaagatgttcagcgtgcaggggcttgctttcacaaacagtgcttccagtccttcgagtgcccccngtgtgcgaggatcacacgaggagaaaacttctggaaagtgtggcctctgcaannacatgatgcccctgagtactgtgaaaaaantgttcacatgccttatga

SEQ ID NO: 3390 - DNA, 255 bp, Homo sapiens
caaagtgattccccggaatcgtgtgctgggctggtcccccttgtcagactcagtcacatgcccactcgaagtcgcactgctatggaaagtgggtgcaggtggtgggcaccctggcgtgatccgcctgcttgactggtttgagacacaggagggcttcatgctggtcctcgagcggcctttgcccgcccaggatctctttgactatatcacagagaagggcccactgggtgaaggcccaagccgctgcttctttgg

SEQ ID NO: 3391 - DNA, 396 bp, Homo sapiens
  unsure (1): n=A,T,C or G
ngtaaatgtttctgccttgtttgtatctctcttgaaagactgtatataagtacaggcacagcatatatttgagagaacatctcacaaatttcatttactataggtttctcaataatctttacatttaatcaatgagaaaagtgattcagtctcttgaattttaagttaaaaaaattaaaaagtatttccagggactcttaaagctctctcccaaagtataaaatattatgtactttcaaaatcttaagcattcacgttctttctgagaccaacgcaggatacaaacttactctcaacatagatgcttatgtgcttttgggcacacatagtcttagaacagtggtcaaacagctcacaggaccctgtactcctcttcatcctggactgtgacggtgg

SEQ ID NO: 3392 - DNA, 188 bp, Homo sapiens
  unsure (15): n=A,T,C or G
  unsure (17): n=A,T,C or G
  unsure (54): n=A,T,C or G
  unsure (81): n=A,T,C or G
  unsure (117): n=A,T,C or G
  unsure (153): n=A,T,C or G
agtctggcttttcanancagtgccagtgagaggcaccagtgtaacttgaagcangaatagtgatggctcaggtccccacangtagctcctccatacctgtgggactcaaaggctaanggcactaacttcatagggctcaaaggctggatgaanagaacaatcaatgtgttaaatgtcctttcgaccta

SEQ ID NO: 3393 - DNA, 307 bp, Homo sapiens
  unsure (1): n=A,T,C or G
  unsure (156): n=A,T,C or G
  unsure (233): n=A,T,C or G
ngtccattttttgtagaactgctcagtcatctgggggcttccaccccatgggcccacaattgcccaatcagtgggtggcagacatgggtgatgacacggaatgggtgaggcatctggggtacactgagtttcccgagtccctctttgccccccganccctggcaggcccctaagggcttgccccgcatcctccagtttgcagacaaggctgtacagatgcaactgagacacanatggggatccacatgggggggtcatggggtctttctgtctctcctcttccaacctgggggcaagtacaggcacg

SEQ ID NO: 3394 - DNA, 367 bp, Homo sapiens
ctgaaccgaaactagctacctgacgatatgaggcaaaagacaaggaagcaggactgtgagcgcgggcagtcggggtaagataggaaccaacggccggagccaaaataggaaaaaagctagaagtagatgtttcccatggactgactttcttaaatagtggttcagttgctgttggtttacatgactctgtccaacttaaatccaatagcttttccacacgtccacgttccaaatttgatgtgaaagctggtagtacacctaaggcatcctcttcaaaatcttcagaaacttctggctgagataattccatttttcttttggaaaatggaattttcctatgttttcgtttggataaacgtaattctgg

SEQ ID NO: 3395 - DNA, 467 bp, Homo sapiens
  unsure (377): n=A,T,C or G
  unsure (414): n=A,T,C or G
  unsure (438): n=A,T,C or G
  unsure (448): n=A,T,C or G
ccaaattcagtcccgatttgtggggtgtgtctgtttgtacagtagatggacagaggcattctactggagataccaaagttcccttctgtcttcagtcctgtgtaaaacctttgaaatatgccattgctgttaatgatcttggaactgaatatgtgcatcgatatgttggaaaagagccgagtggactaagattcaacaaactatttttgaatgaagatgataaaccacataatcctatggtaaatgctggagcaattgttgtgacttcactaataaagcaaggagtaaataatgctgaaaaatttgactatgtcatgcagtttttgaataagatggctggtaatgaatatgttggattcagtaatgcaacgtttcantctgaaagagaaagtggagatccaaattttgcaatangatattacttaaaagaaaaagaantgttttccanaaggccagacatggttggt

SEQ ID NO: 3396 - DNA, 342 bp, Homo sapiens; identical to SEQ ID NO: 444
  unsure (1): n=A,T,C or G
  unsure (293): n=A,T,C or G
  unsure (307): n=A,T,C or G
  unsure (321): n=A,T,C or G

SEQ ID NO: 3397 - DNA, 396 bp, Homo sapiens
  unsure (1): n=A,T,C or G
  unsure (303): n=A,T,C or G
  unsure (396): n=A,T,C or G
ngtaaaaaaaaacctaaatgatcaacagatgttgctttctatatttttcctttgttctgtttgaactgggctaagtaagcacagttagaccctgctgttcacttgaccacgtcctaaacccgggacaagtgagcactcattcatgcacagcagacccggaggcatgggctggggcagcacaactgggttcccgcagcgccctgcctgcaggctcatgctggaggccacggaaccaggcggcacagggcagattctgtttgtcaagcgccccacaagccttgcccagattgtcaagctcagcancgagaatggttttgacgaggaggatggaaacagcatctgctctggaagccgctctggcgtggggagagtggggagagggtgcccttgctgcan

SEQ ID NO: 3398 - DNA, 205 bp, Homo sapiens
  unsure (1): n=A,T,C or G
  unsure (3): n=A,T,C or G
  unsure (135): n=A,T,C or G
  unsure (191): n=A,T,C or G
ngnaaaagatgctgcttccctgttttcttccaggaacacagagaccaacacggtttcaaacacagggcgagcttctcactatttcctgggaatgttacttctcagcccaacacttctcttcccaagaagttcaanttttgagactgtttttctccccggaacagtacttaaaaaaaaaaaaatcattgatnttcaaaaatgggtt

SEQ ID NO: 3399 - DNA, 376 bp, Homo sapiens
  unsure (358): n=A,T,C or G
gtccaccacatcaccccagagaaatttctggaatctgattgagtctccactccacgagcactcagggttccccagcagctcctgtgtgttgtgtgcaggatctgtttgcccactcggcccaggaggtcagcaagtctgttcttggctgggtcaactctgcttttcccgcaacctggggttgtcgggggagcgctggcccgacgcagtggcactgctgtggctttcagggctggagctggctttgctcagaagcctcctgtctccagctctctccaggacaggcccagtcctctgaggcacggcggctctgttcaagcactttatgcggcaggggaggccgcctggctgcagtcactanacttgtagcaggacctgc

SEQ ID NO: 3400 - DNA, 339 bp, Homo sapiens
  unsure (197): n=A,T,C or G
  unsure (237): n=A,T,C or G
  unsure (318): n=A,T,C or G
  unsure (319): n=A,T,C or G
ctgcgtctgtctgaatggtgcgtgaaggctctcagaccttacacaccattttgtaagttatgttttacatgccccgtttttgagactgatctcgatgcaggtggatctccttgagatcctgatagcctgttacaggaatgaagtaaaggtcagttttttttgtattgattttcacagctttgaggaacatgcataanaaatgtagctgaagtagagggggcgtgagagaagggccangccggcaggccaaccctcctccaatggaaattcccgtgttgcttcaaactgagacagatgggacttaacaggcaatggggnncacttccccctcttcagcat

SEQ ID NO: 3401 - DNA, 385 bp, Homo sapiens
  unsure (235): n=A,T,C or G
  unsure (332): n=A,T,C or G
  unsure (340): n=A,T,C or G
  unsure (357): n=A,T,C or G
  unsure (362): n=A,T,C or G
  unsure (376): n=A,T,C or G
aacttgtctttagccttggtgctttgatccttctatattttgaccccacaggtgtggtccggtttacttaatcaggacatgggcctaagaacaaaccttttcccttcatgataacatccatagacaacttattagaagggactagagtttttgcaaatttccctgctggatggggcctatagctatacttagtatatgcctaaacatggtaattggatagtaaatggttttctanttccattgctgtatatttgcctaaatggacttgtgttcaaattatttcttcaattgtcatagataatcctgtaccaaatggggaagaattaggaaanaatcatgntggctaaagggactctngattnaggggacgaactgncatttacct

SEQ ID NO: 3402 - DNA, 272 bp, Homo sapiens
  unsure (166): n=A,T,C or G
  unsure (210): n=A,T,C or G
  unsure (216): n=A,T,C or G
gtcctccttcctccactctctcaacccctctgttgggtaacatgaaaagactgtattcctctaagatgttgggattgatatacgtgatttaatctgcaataggtggaataaccaggggaactggttatgaatatgtgaatgcaccagcaaatttatccttgaaggngtgatggtagaaataggaaaacaacaaaagaaaaacaataacanaaaaanaaagtgtgatggctgggtgcaacggctcacacctgtcatcccagcactttgggagg

SEQ ID NO: 3403 - DNA, 459 bp, Homo sapiens
  unsure (394): n=A,T,C or G
  unsure (450): n=A,T,C or G
aagtccatcgggagaagccggtccctgagacatgtggcgcttggaaggaacttcaacgtccggtgcaaggagaccctggacgacgtcctgcaccggattgtccagctcatgcaggacgacgattgtcctcttcagtctctgtcggtggctgagtctcggctgaagctgggtgccagcgtcctactccgggccctagccaccaatcctaacctgaccgcgctggatatcagcggcaacgccatgggggacgcgggcgccaagttgctggaaaacagtaacaaaaaacaccaccacacatggaaaaatccttgcaactaaacacagtggaccaacagagacaactctcacagtgtcttaaggtctgggaatctgggcatgctgcccacagcttgangagacatcttcaggtttaaggcaaagggaacagcctacaaaaagcacaaccaccanctaccccta

SEQ ID NO: 3404 - DNA, 153 bp, Homo sapiens
ccagcatcccatctgcaccgttggtcaggtcactggcagagaaccttgtgccgttagacgtggaacctgccgtcgtgatgaacacgcctccaacagttccctgagccatttctgtcacgtatggctccagagccttggggaccagacttctgg

SEQ ID NO: 3405 - DNA, 297 bp, Homo sapiens
  unsure (1): n=A,T,C or G
ngtctggcctgcagggaagggccagacggcacctctcagtggagactgaatcttccttccttcaggaggctgcctccagggaagacctggggtccttcctgcgctcagcgctggctggctgtcctgttcatgcagtggaagacattacagaagaattcatacgagaagaacatgaagcctgtggagagggcagccttcagcaagctgggggacaggcccttgaagaagcccagggcgccttccttttgcagcacctgcttggcacagtccatgaggcccttgtatctccgtacctgg

SEQ ID NO: 3406 - DNA, 477 bp, Homo sapiens
aaatcacttagtgcattaacaatgttacaaattccaataatgtcagacatatggatgatattcaaaataaagtacaaaaatacatttcaaaatcaaatataaatgactttatggttatctgccatgctcccctttaatttggcctgatagtctacatttgactgtaattataataacatctgtaatttcaagtacaatagtacaatcataataattttgaagaacgtatgacctaggaccccaaaatgcaatccaatatacaatttggagtatggtttactttttagtgaagtttaatactaattgaagtactaaattgaacaaggccagtactctgaagtactaatctcaagtatttgatcccatgtaagaaacagaagggaatttttaaggcaattttggtattccaaaatattggggatctaccttaattttctattattcccctcaagtctcaattgaatatttccatttttt

SEQ ID NO: 3407 - DNA, 197 bp, Homo sapiens; identical to SEQ ID NO: 19
  unsure (7): n=A,T,C or G
  unsure (35): n=A,T,C or G
  unsure (88): n=A,T,C or G
  unsure (94): n=A,T,C or G
  unsure (99): n=A,T,C or G
  unsure (119): n=A,T,C or G
  unsure (162): n=A,T,C or G
  unsure (171): n=A,T,C or G
  unsure (185): n=A,T,C or G

SEQ ID NO: 3408 - DNA, 252 bp, Homo sapiens
  unsure (20): n=A,T,C or G
ctgccacagactccaaaggnacacaagtttgtgccaacacacggagtcattctggctctctgctgaggcccctgttttctggcaggtgccctccttggaaactggttttggctctgatcagcggttctttttgcagcaaagcctgcatctgtgttgacttgcaagattttgcgtttattcaggcaaaaactggtcaaaatggttactacatgatttgttcccagaggtttgaaacattcagtgaaacttttt

SEQ ID NO: 3409 - DNA, 356 bp, Homo sapiens
  unsure (193): n=A,T,C or G
aggtaaaagcacagagttctataataataggaaaatagagggaatgattgctcaacttttcttgaaaaagagtcaggaaaatattgaccgagaaggcagtcattgacctgagtcttaaagaatgaataaggtttttacagatggagtagggtagggataactttccaggtataaggaagattttgtattccanggacctttgaatattttagaatggctagaaaacttggtattatgtagcacagaaaaagtggtatgactgaagagatagagaacttaccacaaagggtcttgaatgccatgatacatagtttggattttcttctgtagggagcaaggagttagtgaaggatttt

SEQ ID NO: 3410 - DNA, 387 bp, Homo sapiens; identical to SEQ ID NO: 20

SEQ ID NO: 3411 - DNA, 235 bp, Homo sapiens
  unsure (142): n=A,T,C or G
  unsure (187): n=A,T,C or G
  unsure (194): n=A,T,C or G
  unsure (218): n=A,T,C or G
ccagagttcaggaacgccgggcacagaccaaagaccgcggtccagccccgcccaggcgggcatctcatggcagtgcggacccgtggctggcagcccgggcagtcctttgcaaaggcaccccttgtcttaaaatcacttcctntgtgggaaagggggagaaacttttatatatttgtatgggactctnaggaggngcaacctgtatatatattgcttcntgcttgcttttttatcc

SEQ ID NO: 3412 - DNA, 444 bp, Homo sapiens
ctgtgtggtgcttctgtggtgaaggagctttcatcattcacccttggcacagtaagtattgggtgccctgtcagagagggaggacacaatattctctcctgtgagcaagactggcacctgtcagtccctatggatgcccctactgtagcctcagaagtcttctctgcccacatacctgtgccaaaagactccatctgtaagggatgggtaaggatttgagaactgcacatattaaatatactgagggaagactttttccctctaactctttttcccatatgtccctccccctcctctctgtgactgccccagcatactgtgtttcaacaaatcatcaagaaatgatgggctggaggctgggcatggtggctcatgtctgtaatcccagcactttgggaggccgaggcaggtggatcacttgtcaggagtttgagaccagcctgg

SEQ ID NO: 3413 - DNA, 369 bp, Homo sapiens
aaatcctcaagtgttacaacagttagatagtaaacgacagcaggtccaaatgacagttacagagaccaaccaggagtggcaggtgttgcagttgagagtgcatacttttgctgcctgtgcagttgtgagcttgcagcagcttccggagaaattaaatcctatcataaaaccattaatggagacaattaaaaaagaagagaatacactagtgcaaaactatgcagctcagtgcatagctaaactccttcagcagtgcacaacaaggacgccctgtcccaattcaaaaattattaaaaacctctgtagctcactttgtgtggacccatatctaactccttgtgtcacatgtccagtaccaacacaaagtgg

SEQ ID NO: 3414 - DNA, 290 bp, Homo sapiens; identical to SEQ ID NO: 21
  unsure (125): n=A,T,C or G
  unsure (236): n=A,T,C or G
  unsure (248): n=A,T,C or G

SEQ ID NO: 3415 - DNA, 186 bp, Homo sapiens
ctgaatgaagaaaacctctctaccaaaacagaagcagtataggaccgacaagtgtacctctgcacccaatgctggaatcaaatccaaagcttttaattctctcaacaagatgtaaacaggaaagaaatctagttgagcatgaagataggatctaacagcttttccagttgttagatgactttgtgg

SEQ ID NO: 3416 - DNA, 148 bp, Homo sapiens; identical to SEQ ID NO: 22
  unsure (46): n=A,T,C or G
  unsure (132): n=A,T,C or G
  unsure (135): n=A,T,C or G

SEQ ID NO: 3417 - DNA, 373 bp, Homo sapiens
ctgtagcttctgtgggacttccactgctcaggcgtcaggctcagatagttgctggccgcgtacttgttgttgctttgtttggagggtgtggtggtctccactcccgccttgacggggctgctatctgccttccaggccactgtcacggctcccgggtagaagtcacttatgagacacaccagtgtggccttgttggcttgaagctcctcagaggagggcgggaacagagtgaccgagggggcagccttgggctgacctaggacggccagtttggtccctccgccgaagacgacatggtcattattacgatcccacacttgacagtaatagtcggcctcatcgccggcttcgaccctgttgatggtcagggtgg

SEQ ID NO: 3418 - DNA, 148 bp, Homo sapiens
ctgtttccttcatcttctggaagaagtccttgttgcagagtccctcggttgcaggtgttaaggagcaggccacgacgatgaaatcagattgggcagccagctcaggggtagacacaaactctgcctggaattccgctgcttcctcagg

SEQ ID NO: 3419 - DNA, 533 bp, Homo sapiens
  unsure (445): n=A,T,C or G
ctgggtgtgttgccaagcgacatcaccatctcctctgcttaattctgcttccaaaataacttcagtggcaccagaaaaatcagcataggagtgaagactgttatcgcctgtcggttctacttgtgctgtatcagatcgcaatttccattctactgttccagtctgaaaagtttgactacttgttctaatagaaatgctatctacttttaggccaactgacccacactcaaacttccaggaaatataagcaaaagatgatccttcctttcgggccaaatataccatgtgccagtctgtttcaacttttctgaatatagattccattttccacacgccattctcccatccagaaatggtttgattgttatttgaaactcgaacataacgatctttcacaatattgtaacaaaggtggagctgtttagaaatcttctcattttcacanggaataaacaagggttcttttctctgtaggacccatttcaccttggggctactcttccaagccactggacccagatattcttccccca

SEQ ID NO: 3420 - DNA, 166 bp, Homo sapiens
  unsure (44): n=A,T,C or G
aaggccccatttctcctcaccacggggtcgcttgtcagctccangagccagtctggccccactgagaacttttcagtcgagggcctgatgagtcttgggaatgcgcttctgcaagagggcccaggctttctccacctggcgttgggtgatatgcggtcccacaagg

SEQ ID NO: 3421 - DNA, 152 bp, Homo sapiens
aggtctgctatttggcaatatgaatcactgaaatccagggtccagagttattttgatggtataaaagctgattggttggatagcataagaccacaaaaagaaggagacttcagaaaggagattaacaagtggtggaataacctaagtgatgg

SEQ ID NO: 3422 - DNA, 214 bp, Homo sapiens
ctggggctgctgcccacccaccctgcccaggctcctgaaggtggcctcaccttccaggtgcttgacaatgccccgcaggctgttcccgtgggctgcaatgagcactcgcttgccggccttgatctggggaacaatctcctcgttccagaagggcagggcccgggcaatggtgtccttgaggctctcgcaggtggggagttccccgggcttcagg

SEQ ID NO: 3423 - DNA, 253 bp, Homo sapiens
  unsure (61): n=A,T,C or G
  unsure (65): n=A,T,C or G
  unsure (85): n=A,T,C or G
  unsure (135): n=A,T,C or G
  unsure (140): n=A,T,C or G
  unsure (151): n=A,T,C or G
  unsure (171): n=A,T,C or G
  unsure (234): n=A,T,C or G
cctggacctgggatgaagatgaatgaagaacatggactcatgtggatgtggtttggctcanatgnccctgcaataaacaaggggncagtacttagtccctgagtgtggttgaggtttgaggtcctggtcgagcanggcantactggaccangtctacgtcagcattcaggntcaatggggacaccagtggcttcaaacttcctgatctaattatgtttttagacacttagaagntattgaggactttacctgc

SEQ ID NO: 3424 - DNA, 251 bp, Homo sapiens
aaatgaaattcgaaaaccaaatagtaagaaatggaaagagatagttgtaagaatccatttaccaattttacagctaaaaattaaagtgaagtagaaatagcaaaagataacagacaaatatattattttaggtcattaatttatagtgccttatcatcttaagttataaatagaataaggattttgttatataaaaactatcaaaaaagtatcagtgaaaagacatgacctccatgaaatgtgctgagtgg

SEQ ID NO: 3425 - DNA, 153 bp, Homo sapiens
  unsure (18): n=A,T,C or G
  unsure (70): n=A,T,C or G
  unsure (108): n=A,T,C or G
  unsure (115): n=A,T,C or G
  unsure (127): n=A,T,C or G
aagtccttggagactcangagttttgagagcaaaatgacaacacccagaaattcagtaaatgggactttnccggcagagccaatgaaaggccctattgctatgcaatntggtccnaaaccactcttnaggaggatgtcttcactggtggcccc

SEQ ID NO: 3426 - DNA, 199 bp, Homo sapiens
ctgctgagcttggagcatggcgctgtcactgtagtcgatggctgagcggtagctgctccgcaggcagaagaaccggaagacatcgggggaaaaggtcttcagaaagtccttaatagtaatgtagttctttaatgatttggacattttttcttctttgctttggcgtgcaaatgccctgaaacaaaaacaaaagcattca

SEQ ID NO: 3427 - DNA, 313 bp, Homo sapiens
  unsure (1): n=A,T,C or G
  unsure (284): n=A,T,C or G
  unsure (307): n=A,T,C or G
ncaggtaaatgattctttatttcaataaactttaacaaacaatatataatatttcttccttaaaaagctcattcaaagatcataggcagacttcttccccattgtattttagttggggagataaaggcaaaaagaggaaatgtaagctatcttacagtcattctgagaacctctggtttcatgctatactttcccagctaaaagttactaatttacgaagttcagatactgaaacttaaaaatcaagatccatatattaggatgtcctgctgcacactggtggnggcccattgtgtcggagtctggnaaatgg

SEQ ID NO: 3428 - DNA, 352 bp, Homo sapiens
cttgctgtggagctccactgccatgtacccagtagggtttgacatttcattagccatgcaacatggatatgtattgggcagcagactgtgtttcgtgaactgcagtgatgtatacatcttatagatgcaaagtattttggggtatattatcctaagggaagataaagatgatattaagaactgctgtttcacggggcccttacctgtgaccctctttgctgaagaatatttaaccccacacagcacttcaaagaagctgtcttggaagtctgtctcaagagcaccctgtcttaattctccaagcggatgctccatttcaattgctttgggacttcttcttctttggtttttt

SEQ ID NO: 3429 - DNA, 345 bp, Homo sapiens
  unsure (46): n=A,T,C or G
  unsure (230): n=A,T,C or G
  unsure (257): n=A,T,C or G
  unsure (259): n=A,T,C or G
  unsure (270): n=A,T,C or G
  unsure (292): n=A,T,C or G
  unsure (293): n=A,T,C or G
ccccgttggtccgcgcgttgctgcgttgtgaggggtgtcagctcantgcatcccaggcagctcttagtgtggagcagtgaactgtgtgtggttccttctacttggggatcatgcagagagcttcgcgtctgaagagagagctgcacatgttagccacagagccacccccaggcatcacatgttggcaagataaagaccaaatggatgacctgcgagctcaaatattaggnggagccaacacaccttatgagaaaggngnttttaagctanaaagttatcatttctgagaggnncccatttgaacctcctcagatccatttctcctccaatttatcatccaacatt

SEQ ID NO: 3430 - DNA, 462 bp, Homo sapiens
  unsure (338): n=A,T,C or G
  unsure (417): n=A,T,C or G
  unsure (435): n=A,T,C or G
  unsure (450): n=A,T,C or G
ctgaaaaactgtaaaagttacatacatacatacctaatggcactaggaatgtacaatatcaattattggaaaaataagtgagtgactcagagtcgtaagaaattatttaatattagtattttttcttttatagacaaacataacatacacatggtttctaccttctataagacaaagtagaaaactaaccgttactgcatttacctcaaacacagcactgactgtgccacagataacatggtccaaaatattcaattctatagataggccatggtattgaatgcatggttaagttttaggaaaggcatatatttcctgaagtatgtatgttaaatacncaaatatctataaataacaaaaagttaccagcaaaaatgtttaggttataacattcccaaacttcctaacattttaagngtttaagatatatgttgnctgaccagttcgttnggttacagtttt

SEQ ID NO: 3431 - DNA, 228 bp, Homo sapiens
ctgctttccggcaaagatcaacctctgctggtcaggaggaatgccttccttgtcctggatctttgctttgacgttctcgatggtgtcactgggctccacctcaagggtgatggtcttgccagtgagtgtcttcacgaagatttgcatcccacctctgagacggagcaccaggtgcagggtggactctttctggatgttgtagtcagacagggtgcgcccatcttccag

SEQ ID NO: 3432 - DNA, 429 bp, Homo sapiens
ctgagcatgctgagaaacaagctgttcggtacagatttccttttctctcagcctttccccagccttagtcttttctgtccctctgtcctatctatcccaggacccctggcttccctcatcatctgtctgtggctatctgtcccacagggcagaactgtaggactgaggatccattattgtcctgggctgacttcactaaggtaactccctgaatcctgtggagctgctggatctagcccacattccaaatactggccttcccacgtccctccttccctacaccagaggcaactcctcagcttttgctacctttccattcctcctccagcgagagagccctcctggcaagttaccattctggacatggctggacaaaattctggagttggtacatgaccacctgaaggatctctggaatgatgggtaagg

SEQ ID NO: 3433 - DNA, 375 bp, Homo sapiens
  unsure (307): n=A,T,C or G
  unsure (308): n=A,T,C or G
  unsure (375): n=A,T,C or G
aaatatgtggaagagagcataacgaacgtctaggtgtttatcacttggcttaagcattatcagtttacctattgtattcatccatggatgtttcagaaggaaccaccatgtcatcatcacatagttacttaatatcaagtcgtcagtgttggaaccattctgatcgactaataaggtgttttgttctttggttcccttttcgcagttagttcaagtcaggatacacatcaagtcttttacctgcccgggcggcctcgagccctatagtgagtcgtattagaagggcgaattccagcacactgggggnncgttactagtggatccgagctcggtaccaagcttggcgtaatcatggtcatagctgttttcccgggn

SEQ ID NO: 3434 - DNA, 404 bp, Homo sapiens
  unsure (142): n=A,T,C or G
  unsure (325): n=A,T,C or G
aaatttgtcttgtgagattttactatatctcagacagcataaatgctgttttagcactggattctttcactgagcacaaagagttgttggggctttagcatctgactgattttgttacggggttgattctgaccataggaantatgcaatgtgaatcactatttacagagaaacctacaacagatgcttgatgttgtagaaactgggacatatagataccaagcaaaattataagaaacctataaggtgttcaatacgcttgtgtttccaaaattcactgtacatgatcagtttggtgttcttgtaccacagtttttaactgaangaaccagttgtaacagtctcaattttaactaaaacttgaagaactaaaacaacaatgcaaacctttcagcattggttgg

SEQ ID NO: 3435 - DNA, 393 bp, Homo sapiens
aaactcgccagtgagactgaggacaatgataacagtttgggtgagtgaaagagcgacggtcagggataagccaggcatttggatatgtgggtgggaactgtcacaacaggagtgagaagtctctctttcctgctccaggggacatcctgcaagccagtgacaacctctcccgggtcatcaactcttacaaaacaattattgaagggcaggtcatcaatggcgaggtggctaccttaaccctgcctgactcggaaggaaacagtcagtgcagtaaccaaggcacgctcatcgaccttgcggagctggacacgaccaacagtttgtcctccgtgttggccccagcacctactccaccctcctcaggcatcccaatcctccctccaccaccccagg

SEQ ID NO: 3436 - DNA, 265 bp, Homo sapiens; identical to SEQ ID NO: 23
  unsure (92): n=A,T,C or G

SEQ ID NO: 3437 - DNA, 377 bp, Homo sapiens; identical to SEQ ID NO: 24

SEQ ID NO: 3438 - DNA, 399 bp, Homo sapiens
  unsure (397): n=A,T,C or G
aggtcatttctctcccacgcctagctacctccactccagttcagcacccagagacctcagactggatccactactggcccaagaatactgatgagaaacctagtctggattgggtcggaagctggaatttggtgctctgcagaccagtgctcaaaattgtggttatttttgaggactcgccttcaatccagaacatttgcgtttcaccttcctcgcccagatccagttaacaagcgcaccatcctgggaagtgcatgtctcagaccaactccaccttcaccttcaccacctgtcgcatcctgcatccttcagatgagctcactcgggtcacaccaagccttaactcagccccaactccagcttgtggcagcaccagccacttgaaatccacgccggngg

SEQ ID NO: 3439 - DNA, 183 bp, Homo sapiens
aaataacttacatacttttatccaggcaaaactgtctctgcttttcattaactctaattataaaataaatacagctccctattttgttttgctgttagtaattttttctgagaaaagtgttagggtacctgggtgccgctttgatgatgttgtccacacgcagaatcacctctgctgcttcag

SEQ ID NO: 3440 - DNA, 478 bp, Homo sapiens
  unsure (10): n=A,T,C or G
aaaaatgganagtctgaattttattagagctcacacaccatatattaacatatacaactgtgaaccagctaatccctctgagaaaaactccccatctacccaatactgttacagcatacaatctctgttcttggtaagtgttcttggtaagtgtgagattggatttctctccagggaggaaggatgacttgtttattatgagcatgaactctggatccagaccacctgagtttgctagttactgtctgtgtggctttgggaaagaattttaaccacactgtgcctcaatttcttcaactgtaaaatggggatggtaacactatttatctaatagggttgttctgaggaataaataagttaatatatacaaagcatttagaacagtgtttggtacacagaagtgctatataagcattggctttaacattaattattctcaacatcattaatggcattaatatttaccattatattaatg

SEQ ID NO: 3441 - DNA, 241 bp, Homo sapiens
ctgtcccctggtggcctgctgtgtggggtgggtgtggagggtgaggctgtgcagaatggtcctgccagccacagcagggccctggtggggatttgcactgggcactccaatcctggggaggatgccagggacggggatgctgaggaagtcagagagcttggtacggttgaagaaaactgagtcttgggcaatttgtgctaaaactaggtgagttgccaaacccaaggcatcttaccaacag

SEQ ID NO: 3442 - DNA, 269 bp, Homo sapiens
ggcaagctccaaatgagaagatgaagcaagtgttaaagaagactatagaagaagccaaagcaataatatctaagaaacaagtggaagccggtgtctgtgttaccatggagatggtgaaagatgccttggaccagcttcgaggcgcggtgatgattgtttaccccatggggttgccaccgtatgatcccatccgcatggagtttgaaaataaggaagacttgtcgggaacacaggcagggctcaacgtcattaaagaggcagaggcgcag

SEQ ID NO: 3443 - DNA, 433 bp, Homo sapiens; identical to SEQ ID NO: 26
  unsure (334): n=A,T,C or G
  unsure (335): n=A,T,C or G
  unsure (418): n=A,T,C or G

SEQ ID NO: 3444 - DNA, 362 bp, Homo sapiens
aaaaatggagagtctgaattttattagagctcacacaccatatattaacatatacaactgtgaaccagctaatccctctgagaaaaactccccatctacccaatactgttacagcatacaatctctgttcttgggcattttgtcagtgatgctgatctttgccttcttccaggaacttgtaatagctggcatcgttgagaatgaatggaaaagaacgtgctccagacccaaatctaacatagttctcctgtcagcagaagaaaaaaagaacagactattgaaataaaagaagaagtggttgggctaactgaaacatcttcccaaccaaagaatgaagaagacattgaaattattccaatcca

SEQ ID NO: 3445 - DNA, 419 bp, Homo sapiens; identical to SEQ ID NO: 27
  unsure (1): n=A,T,C or G
  unsure (8): n=A,T,C or G
  unsure (187): n=A,T,C or G
  unsure (341): n=A,T,C or G

SEQ ID NO: 3446 - DNA, 288 bp, Homo sapiens
  unsure (1): n=A,T,C or G
ncaggtgggagggcggttgccgctgggcgcgacttggtgcgtttcgggcaggaccgactgactgtgtgtgcgcggagcagacgtgtcccgggccaggccgggccgtggaaggaggagaaggagagtcaaataaaataagaccaccccccaacaccaaaaaatggatagagttagtacgagaagtgcccagtgaagccaaatgacacgtcattttacagtgtgacctttttttccccttccagacttgcaggctttttcaaaagcagagcggagaattaattgtagcag

SEQ ID NO: 3447 - DNA, 210 bp, Homo sapiens
  unsure (163): n=A,T,C or G
  unsure (169): n=A,T,C or G
  unsure (171): n=A,T,C or G
  unsure (187): n=A,T,C or G
  unsure (205): n=A,T,C or G
cccagctacacaggaacctgaggcaggaggattgcttgagccccggaggttgaggggtgcattgagcagtggtcatgctccagcctgggcaacagacctgggtgagaaacccagaccctgtctccaaaaaaaaagctggcacttaatcacattagctataatnagcaangnctttagattctctgantcattctacaactttagncattc

SEQ ID NO: 3448 - DNA, 323 bp, Homo sapiens; identical to SEQ ID NO: 25

SEQ ID NO: 3449 - DNA, 207 bp, Homo sapiens
  unsure (1): n=A,T,C or G
ngtccacaggatcaaggactgtcagctttctaacccagagccagggatgtgatgtcccaattggtcccaagtccctcctacccgccgcctctgctccacctaagctccacacccactcctgaaccagccacctgtccaggaaatgaggcaccctaagcctatactagagctcctgatacctctgtggcactcgccagcctttaccag

SEQ ID NO: 3450 - DNA, 201 bp, Homo sapiens; identical to SEQ ID NO: 28
  unsure (117): n=A,T,C or G
  unsure (133): n=A,T,C or G
  unsure (164): n=A,T,C or G

SEQ ID NO: 3451 - DNA, 527 bp, Homo sapiens
  unsure (486): n=A,T,C or G
aaaaaggcggagatgactaatcaacaaagttcctaaccaacagcagcagccagttaatattaatatctcagtccagcatatctcatagaatccaatttacctcacaaattttaacagttctcatgttaaattcacaaatatttcagaaaagttctacataaaaatgttaacaatggttaactggggtgatgagatggaggggattggattttttccttcttaatctgtagttttccattttcagacatcatcccgcccctccgcgtatgtgctatctgtgtgaggaaatcctacacacggtcccattaccattcctcgttgggacgtcctcagacactggacacaccccatagtacaggggcggctccttagacgcagtcgctccagctctgtaggtgtcggtgtcactagggggcaccgagcaggtcttggatgtcacagcttcctcctctggaggattcaggcccacactgtaaccaaaatctntgtttcagaaaaaccagcctgatcagttgggttcccttcag

SEQ ID NO: 3452 - DNA, 422 bp, Homo sapiens
  unsure (151): n=A,T,C or G
  unsure (165): n=A,T,C or G
  unsure (340): n=A,T,C or G
  unsure (347): n=A,T,C or G
  unsure (356): n=A,T,C or G
tggtaagtggcttcgtggtctttatagctgttactcttttgtactttgtctttttcttttattttcttttgagcgattgtgcgaacatagcatagcacgcactatgccttctggggttggaactgcctggccagggcgactggcggataangtcttgtgcgtggnctcgaggcttaaaagtagcagtggggctttgtgaaggacaaaatggcgatggcgggcccgtgtaagtcccccttcctatgatgaggaccttttcacagacctgtactgagctccgtgaggataaataactctgaagagatgggccctgcaagcctcttgcttacccgctgttcanaaaatanccgttttcnaaatgccctgagttgacctaatgcttattgggctcctgtcttgcaggaatttacccccccctttgg

SEQ ID NO: 3453 - DNA, 426 bp, Homo sapiens
  unsure (112): n=A,T,C or G
  unsure (330): n=A,T,C or G
  unsure (345): n=A,T,C or G
  unsure (398): n=A,T,C or G
  unsure (414): n=A,T,C or G
ccaaatctcttcacatcctgttccatttctttttgcattcctgctaatgcttttactgtctaattaaaataattcactgtgatatcttgaatagagacaacagcttcttcanccccgtctgggtccattcttcagcttctttctccagggcaactatcctggagacgtaggacctacgtcatcctcatccaaggaattataaagttgcaacttctcgcatagccctaaatggctgcagtaagtactggaaaaacatggttgccatggtaactaattcctgggaggcttcatcttcctcttggtaaactttcattaatgctaccatggtgnttggcttttccatgncctttggataacctaaagagcaaaaggtgaataaaagcttaagtcagaacagngggaatacataccccnccaaccaaaact

SEQ ID NO: 3454 - DNA, 169 bp, Homo sapiens
ctagcattcacatggaacaaattgctgccgtgggaggatgacaaagaagcatgagtcaccctgctggataaacttagacttcaggctttatcatttttcaatctgttaatcataaatctggtcactgggatgttcaaccttaaactaagttttgaaagtaaggttattt

SEQ ID NO: 3455 - DNA, 313 bp, Homo sapiens
  unsure (302): n=A,T,C or G
ctgcggccagctagctggaggctcacgcatctccccagtcaccttcaacaggtacagcctgcggtcagacacaaccacaaggcacatgaactccccagtgtggcctgccaatgccactggcaccttgaggcagcactggaactcctcctgggcatcgctgaacacctcaacatccaggaagagccggagtcggtggtccacagagcggaggccacagcgctcaggggggggactgaggctccaactaccatggtcacgggtgctcggtgcctgaggtgggctgttcttggccctgtcaaggnggtcaccatgg

SEQ ID NO: 3456 - DNA, 278 bp, Homo sapiens
  unsure (243): n=A,T,C or G
  unsure (255): n=A,T,C or G
taaagggaactgtcttctgtcgagaagtaaaggaaacttcatgaaggatgtagaagcttagctgcctcagagaagagagaacctgaagatctgaggcaagctggacaggaagaaggtggatatttgttgatggaagaattcaagtttataatcaattcccacttagcacctactgtgtgctaggaacttgaatgtgtatgtttgacaagtcctgcttggcctgatgggtgggagaaagaaccngacctggctganatggctaggcggagggcttttaa

SEQ ID NO: 3457 - DNA, 279 bp, Homo sapiens; identical to SEQ ID NO: 289
  unsure (1): n=A,T,C or G
  unsure (3): n=A,T,C or G
  unsure (48): n=A,T,C or G
  unsure (70): n=A,T,C or G
  unsure (120): n=A,T,C or G
  unsure (134): n=A,T,C or G
  unsure (137): n=A,T,C or G
  unsure (175): n=A,T,C or G
  unsure (184): n=A,T,C or G
  unsure (192): n=A,T,C or G
  unsure (220): n=A,T,C or G

SEQ ID NO: 3458 - DNA, 211 bp, Homo sapiens
ctgggtggatggtggttccacgtattcaggtggcaaacaggaaaaacatgtgttcgaagaagaatggaggtaggtggtctcttaagaatggttaagaggcttgggagtcagactgcttgggtttgcatcccagctttgccgttttctggctatcaaacttgtcagctattatttgttgagtacgtactatttgatttatgaccacaggcag

SEQ ID NO: 3459 - DNA, 434 bp, Homo sapiens
  unsure (1): n=A,T,C or G
  unsure (297): n=A,T,C or G
  unsure (371): n=A,T,C or G
ncaggtaaatgtgcgtaatggatctgtgctttgggggagtttgaaatgaagtccagcctgataaagcatttgtttgttaccaccttcgtgatgttggccgatgaagtgaaaacttgctattgaaagaccagtcctctgtagacgagaccttttctaatgtactgaaggacggccaggactgatatccatattcagatgcaaatcgagcttttgggaaaactttccagttccagcaatcatgccagtacgagctctctgatgtttttcacatagagtgtcacatagtccttgatgtanattggccggtcagtgaaactgatatgataccaattcatcatcagcgcctcctcattttcattattgccactccntatgatgatagaaggatgagaattcagtctcttgactggtaggcacttctgctgtcactgaat

SEQ ID NO: 3460 - DNA, 371 bp, Homo sapiens
  unsure (18): n=A,T,C or G
  unsure (369): n=A,T,C or G
aaaacaccctaggatgcnttgaatcaggcttgattttgttagttgagttacaggagaattttaagggtgagggtatgggggtcagggaagaaaaggaaatgggaaatggaccaaaaaaaatcttgagtcatcatctaaatcaacaaagcactgatagctccaaatattaggtcagacactaaaacgactgatataggctcaagtggtttataaaacctataaaaagactacaccagcaaagtccctgtcaatctgtcagagttcagaaactaaaacagggagtaacattttagcttaaaaccttatctcaagagaatcatatacacttcacatgaataaaaatacctgaaaccaaacatttttacctcngg

SEQ ID NO: 3461 - DNA, 363 bp, Homo sapiens
ctgagaatagtggacacagggtcccagaaacaaggctgcaaagcctaaatatcttgcagcctattggcccagctcagtgggtcccgctgctttagaagcctgcacccacccactcagtctggtgtgatctgagcccctgctacgtgctcagtctgcactagacagcaaaagcaatgcggtgaaaggtgtttgaggtttggagtgagacagacttgggctgaatcctgactctgcgacctaattggttatatgtccttgagcaacttatattaccaacctgagctctagttttaccatctgtaaaataaggatgatcacaggtttcttccagggtcataagggccaaacacacttggtagctca

SEQ ID NO: 3462 - DNA, 278 bp, Homo sapiens
aaaactttccttagataaggaatcatattgaagcccagaagcttttgcaagagtccattccaaagctgcaggtcatagattttgtattctaaacacagctcagtcaccaatcttactgccatggactcgtggctgtggtttttccacagacccttaatcattccttctttaggactgctgcaaaataattcatatgtgatggggatattcaaagtctcaaatgatgccagaaaagttatacatctcaaataagatttcacttcttcaatgggtttttt

SEQ ID NO: 3463 - DNA, 409 bp, Homo sapiens
  unsure (114): n=A,T,C or G
  unsure (318): n=A,T,C or G
  unsure (386): n=A,T,C or G
aaatggctttaggcttatagggggtgtaaactttaagaatataattctcccattcaagtttacagcaaacatctagccaccttcaaaacaaagaatatacagaccatcatttancaaatactaatacatgattttccttggggatggcaggtttgagaatcctttagcaacaggacataattcccctaaattacagtgaattatttataacgagataaagctttcaggtacaagctgaaggtggggtgtctaacaactaaaaactatcactaaatctcaaagagaaagttcttgcaaaatatgtaaaggtcacaaggngcagacattctccttctttaggcttttatctaaggaaaggctatgaaactgggcccatctgtatacangctcaaatttacctttttacctc

SEQ ID NO: 3464 - DNA, 283 bp, Homo sapiens
aaatatatgggaggatgtgcgtaggttgtatgaaaataccaagtcattttatatcagggacttgcgcacccacagattctggtatctgtggaagtcctcggccactcccccgtggagacaggacaactgtgtgttgacagaagtcacatgggagaatgctcatagcagcccccacgcagtgacacaacctggaacaccgcccagtctgaccagcacagaaaagcagcacctgctgaattcatgccacgggggactccacagcagccaaaagagtgggctgtgg

SEQ ID NO: 3465 - DNA, 307 bp, Homo sapiens
aaagggaagctgtggctgggctgtcctcttgtcccttttttctgtaacactcaaccatgcctgagctcttctggcagccccaaccatctgggtgatacacacacccagatgtctgtaaaatctctgttgtagacccaactaattctaaagctgggactcagtgattaatataatgggtgaacaatcgaaatatagaaacatgggaacaacaaaaatgaagagaaggaggatttgcagattatatgttgacatgttgaagaatgaataaagttaatggggaaaacttgtgagatctgagatgaaattt

SEQ ID NO: 3466 - DNA, 235 bp, Homo sapiens; identical to SEQ ID NO: 290
  unsure (1): n=A,T,C or G
  unsure (77): n=A,T,C or G
  unsure (172): n=A,T,C or G

SEQ ID NO: 3467 - DNA, 208 bp, Homo sapiens
gcgagagccactcaccactctacatgcaccccccgaagtgcacgtcctgcggctctcagtccccacagcatgcagagatgtgcctccacaccgctggccccacgttcccttgaggagatgggagagacccagtctgagtactcagattctagctgtgagaacggggccttcttctgcaatgagtgtgactgccgcttctctgaggagg

SEQ ID NO: 3468 - DNA, 340 bp, Homo sapiens
cctcgtccagccgcacacggcgactctgcatgaggtatgccagacagatggtggcagagcgcgagatacccgcctggcagtgcaccagcacccggcctccgctgttctttacccagtctgcaagggagatgggggagtggtgtcagacggaatgtgcacagcccaggagacaggtgcccccagtcctctcctctggagcccctcgggatttctgggcagaggtgcccccttaccaatgaagcctatggcctcctggaaccaggcactgatctccaccatctggttgtcctccacagggatactcttgtagcggaaaaggccctcaaagtggttggggcag

SEQ ID NO: 3469 - DNA, 154 bp, Homo sapiens
ctgcattctattccactccagtgcctgggccagttagcaccagtgtggaagacagtgagctggctccggacaacagggatggaggaaaggtcccacattcacattcctgatacgtggacaaggtgaggggccgcaatcgctctggcagcatttt

SEQ ID NO: 3470 - DNA, 482 bp, Homo sapiens
  unsure (358): n=A,T,C or G
  unsure (384): n=A,T,C or G
  unsure (416): n=A,T,C or G
  unsure (429): n=A,T,C or G
  unsure (442): n=A,T,C or G
  unsure (452): n=A,T,C or G
  unsure (480): n=A,T,C or G
aaaacaagcaagcttaattcagtcaggcatatattgcaaataaaaacatgtttccaagtaggctggaataaaaatgctaaataagaactgggccaaaagatcatagataatgggcttcttctcttggtaatatgtgaatacatttacccatggggtagaagtatttcacctgccccatgaagaacctgatggcttgtggtgtctgtgctgtgtcaatactaacagatgtgaggagacagactatggaatggacgctgtggctatctgtgagatagtggaaggggttatacacactggccacaggaagttgcaaaaattagatggactctgtgtagctagccactcttgagtgtcaggnctgcatatgtgagttttaaagaaggngcaagatagcaataaattcccttaaagagcangatatgtcctggnagctctatagttncatgatcaangacctggacctgcccgggcgggcgctcnaa

SEQ ID NO: 3471 - DNA, 258 bp, Homo sapiens
ccatcatatagcccatggtggagttgtcccgaagtgcctgggctttcatgatccgctccatattggctgtccagccgtaggtgctggtcacaatgcagcaaggtgaagacacaaagtctattggagattgtcacctgtggacgatcacaaaagccttagattgacattaccactttgaaagagaaaacaggcattgtcaagcctaattccagcagggggaggaggtggacagaccacttgagtttgagaccatgctgg

SEQ ID NO: 3472 - DNA, 184 bp, Homo sapiens
aaaacaacaattaagtggattatgggaacaggaaaaccatcttactttggttccaggatatactggtaatatagctaaggatgtagatgcttatttattacagttacattgagaagatttcatctactaaagagcatttggtttttcaaaacatccctgaactgtataatttacaaaaaaaaaa

SEQ ID NO: 3473 - DNA, 364 bp, Homo sapiens
  unsure (322): n=A,T,C or G
aaagtaaaaacataaggcttttaatcaaacaaattcatagttagttgttctctaagccatcttggtattccaggcacagtcatatctggagagacaactgctaaatagccagagccctgaaatgttcaccctactcaatgcctggttttcttttctccctttacctgataatgagcctgggcttgctgtgcagagttcaaggtgacattgcagagtttgcagtacaggggcttacatagctcctccagggcacagtcttgctcccctcccttcgataactcttcttcccctgcaggaggcaaggaagcctcctgcccaaaangcttctgtggtggaagctgcaagggtcctgtagacctggtgg

SEQ ID NO: 3474 - DNA, 484 bp, Homo sapiens
ctgaacgccagtttgctgctcgatatggcaaacctatattagcaagtagggatgctcgaagctccagtcgagagcaagaagcaggtgttcttgctatggatgcgctgccccgccaagtactaccgtttcttttgagaagaatgaaagaagatgttttgcaggatcttccacctaaaattatttaagactattattgtactcttagtcctctccaggttcagctctatgaagattttgctaagtctcgtgccaagtgtgatgttgatgaaacagtttcttcagctacactttctgaagaaactgaaaaaccaaagcttaaagctacaggccacgtattccaggcattacagtacttacgtaaactgtgcaaccatccagcattagtcttaacacctcaacatccagaattcaagaccactgccgaaaaactggcagttcagaattcttctctacatgatattcaacatgcccctaagctctcagt

SEQ ID NO: 3475 - DNA, 441 bp, Homo sapiens
gcgtggggcgcccacaatttgcgcgctctctttctgctgctccccagctctcggatacagccgacaccatgggtttcggagacctgaaaagccctgccggcctccaggtgctcaacgattacctggcggacaagagctacatcgaggggtatgtgccatcacaagcagatgtggcagtatttgaagccgtgtccagcccaccgcctgccgacttgtgtcacgccctacgttggtcaagcagacggcttagtctggggctcatctaaactagttccagtgggacacggaattaagaaacttcaaatacagtgtgtagttgaagatgataaagttggaacagatatgctggaggagcagatcactgcttttgaggactatgtgcagtccatggatgtgactgctttcaacaagatctaaaatccatcctggatcatggcattt

SEQ ID NO: 3476 - DNA, 348 bp, Homo sapiens
  unsure (238): n=A,T,C or G
  unsure (247): n=A,T,C or G
  unsure (329): n=A,T,C or G
aaaaaatgggaaattttaatattaagtatgtccatgattgaaagaatcattccagaaatggcagcaaagaggctcaatgaattcattatcatttttcctttgaccaaacactttccttggagtttttctccgttgctgccaggagtgatccggaaataatatacataatgcctccccagagagggtaccacacagtcacacagatgggtgcatagatccctgctgggatcatcagaanaccccccanggcaatgtggaagagcccattcatagtctggacagcccccaaagtcttagattccctcatgaaaaagctttgcgggggcccnccagtgaagacatcctcct

SEQ ID NO: 3477 - DNA, 412 bp, Homo sapiens
ccgctgacacatgtgtctatgtatgctaattggaagctccccaatacatgtctatgacaaaacttttacacaaccaatcaacatttgacattttttacatcctcttcctctcatgaattatattccattttcaagaaaataatagttatcctttgaaaaggcaaaacgctcaagccactgaaaaacagtatctaaatttctgtaaagtgcaaaaatactaaggtggggggcaattattatattctgacaaataaatattctgaacttttcaacatgaccctttggcactagtggtttgggagccctgacattcgcctggtgtcagttcagcatcagggttgagctgcttggaagcaggaagttcagcgtcatttattacaaatccagtgcaacagaatccacgtgtttcaca

SEQ ID NO: 3478 - DNA, 408 bp, Homo sapiens
  unsure (328): n=A,T,C or G
ctgcatttcacatgccttgcaatggatcagccaaggccgagaccccatcttccagccacctagtcccccaaagggcctcctcacccaccctgtggctcacagtggggccaagcatactccgtgaggctgctgccatccatgtgctagtcactggcagcctgcacctggtgggtggtgtcctgaagctgctggagcccgcactgtcccagtagccaaggcccggggttggaggtgggagcttgccacacctgcctgcgttctccccatgaacttacatactaggtgccttttgtttttggctttcctggttctgtctagactggcctangggccacggctttgggatgggaggccgggagaagatgtcttttttaaggctctgtgccttggctctccttcctcctggct

SEQ ID NO: 3479 - DNA, 392 bp, Homo sapiens
  unsure (238): n=A,T,C or G
gtccttacagccgctcgtcagactccagcagccaagatggtgaagcagatcgagagcaagactgcttttcaggaagccttggacgctgcaggtgataaacttgtagtagttgacttctcagccacgtggtgtgggccttgcaaaatgatcaagcctttctttcattccctctctgaaaagtattccaacgtgatattccttgaagtagatgtggatgactgtcaggatgttgcttcanagtgtgaagtcaaatgcatgccaacattccagttttttaagaagggacaaaaggtgggtgaattttctggagccaataaggaaaagcttgaagccaccattaatgaattagtctaatcatgttttctgaaaacataaccagccattggctattt

SEQ ID NO: 3480 - DNA, 437 bp, Homo sapiens
cctggccctgaagcaggtgggtggcagagacccagagtgggcagtatggcagttccttggttccttttctggcatcttcccacagccgggacatcttgggtagcagagatgatgtgcgggctgagcaactcctcacatagagtcaaggcatcttgggctctgcctgcctggatcagtgctaccgctgcctccaaaaacacctcaggcatacagggccccttggctccgagctatccagcaacagggccagcaggtccaagtaatgctctgcagcgtctcctgccctccccgtctgtaggcacctgcttgctaatatgtgcttggtctggctctgagtgccacaatgaaagggtgaggctaggtcaagtggtggcagtagtaattctacctcaaatgagaaactgcggggctttggaacttgcatgggacattcaagg

SEQ ID NO: 3481 - DNA, 292 bp, Homo sapiens; identical to SEQ ID NO: 29

SEQ ID NO: 3482 - DNA, 381 bp, Homo sapiens
ccttatatttgtacctgtataaataccatatcacagcacaaaaacataccccatctggctctcttaaggtacatgataaatcagactaatgcacattcatcaaagtgggatcatctcaggatatgtgcatatttgacgtgggtatgaattcagggtttccttgggtctctttcaaggactctcctttctcgtcggtatttctatttccttattttccttctgtttatgaagaactgttatttttatatttaatgcccaattttcactacttgttcatgtcagttctctgaaatgttactgcctatgaaccgtgacatgtactctttataacagaaccagaagttaaaagatgtagacatcacacaaatcaatgattatttt

SEQ ID NO: 3483 - DNA, 318 bp, Homo sapiens; identical to SEQ ID NO: 291
  unsure (129): n=A,T,C or G
  unsure (212): n=A,T,C or G
  unsure (270): n=A,T,C or G
  unsure (279): n=A,T,C or G

SEQ ID NO: 3484 - DNA, 265 bp, Homo sapiens
  unsure (105): n=A,T,C or G
  unsure (138): n=A,T,C or G
  unsure (211): n=A,T,C or G
  unsure (264): n=A,T,C or G
cgaatagagctcttggaagtccctccaaccatggcctgggtctccttctacctactgcccttcattttctccacaggtctctgtgctctgcctgtgctgactcancccccgtcttacatctgccttgctgggagcctngatcaagctcacctgcaccctaagcagtgaacacaacacttacaccatcgatcggactttctgttgtttttgnttgtttctgtatcttgtctcaacttgtggtcagcctttctccctgcatcccang

SEQ ID NO: 3485 - DNA, 326 bp, Homo sapiens
ccttcctttcacacacatcagaaatagggaacccaagacctcgagagaggaaatgggcccagggacatgccttggcttggggtggcttaggaccagggcaagacgcctgaccccagagcagaccatgctgacactgggcaacacattccctgctctggacctcagttcctttggctactaaggaggcccaacgatcctcgcctgtgtgggacggggctacctgcagacatagagggcctttgagcacctcgtagcttgcttcccagccagcctgggtgtggaaatggccgtgctgacaggctctctgcgatagggcccagccatgg

SEQ ID NO: 3486 - DNA, 283 bp, Homo sapiens
aaacatgacttggtgctgaaagacacactgctgggacccaagttccctcccacatggacgggatggaggctggagcccaaggtttcagggaaacgtatgtggcctgtgcccctgggtgtgatcatgggcacacacatttatctggcagggccagccttggctgctgaggggtcatgggcacagaggaggaccatctggtgacactgaggaccagtgttgcccacagccagggagaataaggatgaagaatgagtgttgccacacccctccagatgagctcaag

SEQ ID NO: 3487 - DNA, 445 bp, Homo sapiens; identical to SEQ ID NO: 616

SEQ ID NO: 3488 - DNA, 411 bp, Homo sapiens
  unsure (392): n=A,T,C or G
ctgatcaggagcccagatgccagggtggattttctcagtgggatctagtattgctagaagagccttccttacatggcagaaacaggcacatgggcctcttcccttaaaatgcatctgtctcacatgcttggggactgctgtgcgggaacacctggtgtggcctggcgaggcagcgtatacatggcccccaaaaactggtctgcaattcttcccgcttcttgcagcccactcagcagagcaccatgcactgtggctgggtagttacggatcgtatgttctcccgcaaagaagagtcgtggaatcggctgtggggcacctggaatcgaggggccaggagtgattggctgagccattaaatcatagtcattttccagatgatccttgcagcaacnttaggaataagagccccga

SEQ ID NO: 3489 - DNA, 281 bp, Homo sapiens
ccaaaactgcgaagagatgcagaataatgttgacaataataagttgctgaatcgtcaggctgcagactggtgatggttaaattgaattgtgtcccagatccactgccagtaaatcttaatgagaccccttcttctaaactggaagtcgcataaattaggacattaggggctttgcctggtttctgttgatgccaggccaaccaccgatctatattctgagaggcccgacaacttattgtaactgtatctccgacagatgcagacagggtggaaggagattg

SEQ ID NO: 3490 - DNA, 216 bp, Homo sapiens
aaaatcataaatatttggtttcccctcaacatagcacatcacaaaaatacatttcaaaaacttttttcatatataattcctgtaaatgatcatatccctacttattaaggaaaacacctgatgacaagcactcaaacactcttgaaattttctgtacagtaattacaaaagtaaaaccaagagttctgttggccctttaacaggtgaaaccatttt

SEQ ID NO: 3491 - DNA, 376 bp, Homo sapiens
  unsure (291): n=A,T,C or G
  unsure (302): n=A,T,C or G
  unsure (304): n=A,T,C or G
  unsure (317): n=A,T,C or G
  unsure (333): n=A,T,C or G
  unsure (340): n=A,T,C or G
  unsure (349): n=A,T,C or G
  unsure (370): n=A,T,C or G
  unsure (371): n=A,T,C or G
ctgtcccttacaaaggatactgtgcgtggagtcctggcatggttcctggcacataggccccagcacgaggagaccgtttctgttactgctttaggagtgcataggggagtcaggctttgtaaccaacatgcgtaatgtttttgttttgtttggggggttttttggcggggaaggagggatagattcatagtctgcagccccttgctgtctggtggcacaaagtcccccagacgtgagactcccactcgagaaacaactaaagaatgccataaatcaacgtggacaaaaggnccctacattananactatcctgaggncccttttactttgganccaaaanccttatttnaaatggggggaaaaagggganntggaa

SEQ ID NO: 3492 - DNA, 454 bp, Homo sapiens; identical to SEQ ID NO: 31
  unsure (211): n=A,T,C or G
  unsure (394): n=A,T,C or G
  unsure (396): n=A,T,C or G
  unsure (452): n=A,T,C or G
  unsure (454): n=A,T,C or G

SEQ ID NO: 3493 - DNA, 240 bp, Homo sapiens
aaagcgggctgcatgtgtctgcatgctcagattagaaactgtgtatcttgaagtgtcttgaagctgattttctataaatgggcatttgggaaaatgtctcaggtgttctgacatagcattatccttcggttcccaattgctcaattttccaccacaggcaaagcaagccactctgtctccaggtcctatgtagtaaaagcctgcttttgccagatctgttggcgacagaaaagtcaatgg

SEQ ID NO: 3494 - DNA, 250 bp, Homo sapiens
  unsure (107): n=A,T,C or G
  unsure (110): n=A,T,C or G
  unsure (181): n=A,T,C or G
ctgcctctgttaccttgactgtctcagatttcgttgacccgagacgggtcctggcactaggaatgaaagactgtctctattattttggtttgctccaggttaggganaancccacgcaaggctcctactgaccatatgtttcatttctagctttgctgtctgggcaccaatttccctaggnttaactaattgctcaatgttaaggcagctctggggaaattcgtcttgtgtaactggggtgctatgcagg

SEQ ID NO: 3495 - DNA, 178 bp, Homo sapiens
ggatgaggacctgtacccagagcactaccggaaatactccgactacatcaaaggcagcaacctggatgcccctgagccctaccgaattggccggatcaaagagatcttctgtcccaagaagagcaacggcaggcccaatgagactgacatcaaaatccgggtcaacaagttctacagg

SEQ ID NO: 3496 - DNA, 191 bp, Homo sapiens
aaaaatacagttccccaggttgaggtatgtggtggcctgttgtcacggcagcatgagcacggcggcgcccagggcgggggcggaagggcctagctggagactgccatcacgtagttcttggaggggctgctccggcccagcagcacttggttcttgcaggtgaggagcccacaggaggcggccagtggggc

SEQ ID NO: 3497 - DNA, 417 bp, Homo sapiens; identical to SEQ ID NO: 30
  unsure (1): n=A,T,C or G
  unsure (9): n=A,T,C or G
  unsure (12): n=A,T,C or G
  unsure (164): n=A,T,C or G
  unsure (237): n=A,T,C or G
  unsure (384): n=A,T,C or G
  unsure (400): n=A,T,C or G
  unsure (408): n=A,T,C or G

SEQ ID NO: 3498 - DNA, 219 bp, Homo sapiens
ctgtcacctctggggtgtggcttcttcccggaaccgcaccagaggcccctggagcccagggagggaccacggagggcaggtgtaacccctggcctggagcacagctctcagagccctgaggctcccggggacagaaacaagtaacaaagtgagaccacgagagaaaaagaatccacagtttctacaaaaagccccaccctccccaagcaccctggtcag

SEQ ID NO: 3499 - DNA, 476 bp, Homo sapiens
  unsure (473): n=A,T,C or G
aaatgaagagagaatcttagctttacagctttgtgggtggataaagaaaggaacggatgtagacgtggggccatttttgaactcccttgtacaagaaggggaatgggaaagagctgctgctgtggcattgttcaacttggatattcgccgagcaatccaaatcctgaatgaaggggcatcttctgaaaaaggagatctgaatctcaatgtggtagcaatggctttatcgggttatacggatgagaagaactccctttggagagaaatgtgtagcacactgcgattacagctaaataacccgtatttgtgtgtcatgtttgcatttctgacaagtgaaacaggatcttacgatggagttttgtatgaaaacaaagttgcagtacgtgacagagtggcatttgcttgtaaattccttagtgatactcagttaaatagatacatcgaaaagttgaccaatgaaatgaaagaggctngaa

SEQ ID NO: 3500 - DNA, 383 bp, Homo sapiens; identical to SEQ ID NO: 33
  unsure (1): n=A,T,C or G
  unsure (25): n=A,T,C or G
  unsure (305): n=A,T,C or G
  unsure (319): n=A,T,C or G
  unsure (362): n=A,T,C or G
  unsure (377): n=A,T,C or G
  unsure (383): n=A,T,C or G

SEQ ID NO: 3501 - DNA, 312 bp, Homo sapiens
  unsure (6): n=A,T,C or G
aaccanaaattttccgaagaagtaaaaaccccagaatttgtatcaagaagactcttaagggataatgcacaggccgctgagtttcgggaagcatggggccgtgagggcaaactcaaagagcgcgtgggaaattctgccgggcagagtttgaacaaacccaatattcacaagagagttttaacagaagctaccgtgggcagggaaagatctttgggagaaagaacccaagagtgtagtgcatttgatagaaacttgaatctggaccaaaatgttgttagacttcaaagaaataaaacaggagagagggtcttt

SEQ ID NO: 3502 - DNA, 232 bp, Homo sapiens
aaagagaattacctatattctcctgatactgattaccaagtcattcacctgaacaccagaattagaattaaacattgtaccatacaatttcattatcttatcagaatgaaaccaattcacagggaaactagagactacggctgtggtggtaacctgcagatatacacattcccatgcactgacataagttgaaaacacatagtactttctagatggaatttttttctttagg

SEQ ID NO: 3503 - DNA, 423 bp, Homo sapiens
  unsure (24): n=A,T,C or G
cgacaccgtaactatccgcactanaaagttcatgaccaaccgactacttcagaggaaacaaatggtcattgatgtccttcaccccgggaaggcgacagtgcctaagacagaaattcgggaaaaactagccaaaatgtacaagaccacaccggatgtcatctttgtatttggattcagaactcattttggtggtggcaagacaactggctttggcatgatttatgattccctggattatgcaaagaaaaatgaacccaaacatagacttgcaagacatggcctgtatgagaagaaaaagacctcaagaaagcaacgaaaggaacgcaagaacagaatgaagaaagtcagggggactgcaaaggccaatgttggtgctggcaaaaagccgaaggagtaaaggtgctgcaatgatgttagctgtgg

SEQ ID NO: 3504 - DNA, 184 bp, Homo sapiens
ctgatgcctcactactagatgcagtgctgggaccttcctcttttggagctgtcccatgtacagtggacccaagctcaggaccttcgtggagctgcttctccaacctgagaaacttcaagacccatcctcccgctgtcactttggacaatggaaatctacattttcttttccctttttttttttt

SEQ ID NO: 3505 - DNA, 430 bp, Homo sapiens
aaatcattcattcaatagataccaccgtgtgacctataattttgcaaatctgttacctctgacatcaagtgtaattagcttttggagagtgggctgacatcaagtgtaattagcttttgggagagtgggttttgtccattattaataattaattaattaacatcaaacacggcttctcatgctatttctacctcactttggttttggggtgttcctgataattgtgcacacctgagttcacagcttcaccacttgtccattgcgttattttctttttcctttataattctttctttttccttcataattttcaaaagaaaacccaaagctctaaggtaacaaattaccaaattacatgaagatttggtttttgtcttgcatttttttcctttatgtgacgctggaccttttctttacccaagggattttt

SEQ ID NO: 3506 - DNA, 324 bp, Homo sapiens
  unsure (323): n=A,T,C or G
ctgtgggaggctgaaaaggtcaaaatgcggcaaatcctggacaaacagcagaagcagatggtggaggactaccagtggctcaggcaggaggagaagtccctggtgagcaccccaggaaggatgtcggtgccctgcacccatctgtgtcctcttccacctccccaggtggctggggcaagggtcccctgcattcttggtgctttcagctccagaattcttagtccttcactcttgtttcttcctctgcaggaccccatggtttatatgaatgataagtccccattggtgagttgccaggagaggccgcctcctccatgccaagng

SEQ ID NO: 3507 - DNA, 240 bp, Homo sapiens; identical to SEQ ID NO: 617

SEQ ID NO: 3508 - DNA, 198 bp, Homo sapiens
aacctaccaatctaaagaaaactttgaaaactgaactgtgtaacgtggaacaacacgtcgaactctccgaggtgatcgctctcgctctcttcgtggagatctttcccgggaacgtttcctctgaggtgatctttctctcgatctacgtctttctctctctctctcacgacttcgatcatcttttctgcaagagcactt

SEQ ID NO: 3509 - DNA, 482 bp, Homo sapiens; identical to SEQ ID NO: 32

SEQ ID NO: 3510 - DNA, 339 bp, Homo sapiens
  unsure (130): n=A,T,C or G
  unsure (323): n=A,T,C or G
ctgctgcccctcagtcttctttccttctccttttcttttcctttcttctctcttgtgcattcttcaggtcagtcatcacattcaaagtcttccatacccacataaccacaatgatcatggcattcaccancagtggggctgaaaatactatagaaatgaacatccccctggagtcgaaatactggtatttcgaaaataatctccagttcatcgcagccgcctcattgatgtattcagcacagtagactaagatgactagacacagaaagtgcccgatctgtagtctgtagcttcgggaggacaagcaggtgaggagcacgcanagcgcgtggaaggtgg

SEQ ID NO: 3511 - DNA, 184 bp, Homo sapiens
aaattcacaaaaaactgtacattatcaaaaagtcactaaaacaccacatttggttatataaaaagtcccttttgctgtaaaaggaacacagaaacttgttggtgttgatggtgtggtttcttcctgtcaaccagactgatgggagggaagcaaaagggcagggggtgggttgtctttttatttt

SEQ ID NO: 3512 - DNA, 381 bp, Homo sapiens; identical to SEQ ID NO: 292
  unsure (311): n=A,T,C or G
  unsure (338): n=A,T,C or G

SEQ ID NO: 3513 - DNA, 323 bp, Homo sapiens
ctgggtcttgacgctgttcatcagagccagggcggaggacgcagcctccggaggctcctcgaagtttctccgagaggggctcagactgtaaaagatctgtgggtctaggtggggtgcctcatcgaagggaatggagatctcgaaggtctcatcgtccttcattgtccgcctccgactgctccggtcattcatggcgcggcttcctgcggaccccagcagccgagggcctcaggggcactgcaaaatggggaaattacaagcccttctaaatttattgtgaggatgcagtgatgcgacacacagaagctcagcccagcacctgg

SEQ ID NO: 3514 - DNA, 406 bp, Homo sapiens
  unsure (148): n=A,T,C or G
  unsure (326): n=A,T,C or G
  unsure (357): n=A,T,C or G
ctgtggtcaagtacacggatatgcatgtacaaggatatttattggtgttgcatataatgataaattattgagagttttctaaatgtacattttcctccttctggtagccatcttctctacgaagagtgactattgcctctttacccanaaatattggaaatgcaggaatggtaagacaattcctaagtgttcttagtcaaaggtaaattcattttcatatgacagaaaatataaacgtatattttatcatttcttttaacatttgaacttctactaaaggtggctgggatggaaaataatgatcgattcagtagaaggtcaagcangttggtaaagtgtaattttatggttcctctntgggaaccttactattttatacttggggctaaccttaaatgagtgctca

SEQ ID NO: 3515 - DNA, 190 bp, Homo sapiens
aaagtagtcttccgtggttgggaagcctcacctcccaagaccagagtcagttggagctggttgttgttggaagggagtgggttggggaactggggtgggggcagggagatccccccgctctgctggcggtcctaggtggagaagaactgcacttcacagagtctggggtttggtgggaaggggatgatgt

SEQ ID NO: 3516 - DNA, 329 bp, Homo sapiens
cctccgtgcatgatcagcactttgccgttgatgcactgggccaacgggagccactcgaacacctcgctaaagagctcgtacatctgggctgtgtacttggccttcacctcaccctcgaaaccgtagatctggttcatgttgtctgtctcgtggttgcctcgaaggaggtgaaagtgatctgggtacaggagcttgaagccgaaaagggtgaggatcacttctacagagaaggagcctcggtccacaaagtcaccattaaatatataggggttggtctccgagggtaaaccgttgagctcgaatatgttgaggaggtcatagaactggcc

SEQ ID NO: 3517 - DNA, 246 bp, Homo sapiens; identical to SEQ ID NO: 34

SEQ ID NO: 3518 - DNA, 515 bp, Homo sapiens
  unsure (376): n=A,T,C or G
  unsure (384): n=A,T,C or G
  unsure (450): n=A,T,C or G
  unsure (461): n=A,T,C or G
  unsure (501): n=A,T,C or G
  unsure (504): n=A,T,C or G
cctacaaccctggatgcttgggttacttaagcgctcctccctcccaccagatccctgcctccagtgtccctcccactccaacgcatcctaccaggctcctttaagcctactgtcatgacattgctaacagctaacagcataacctgttctccaactccctatggtcagggcactcaccatcctttgcaacctggacccaccttatttgtccaatcataccaggaccttcaggtcccacattccctactctttagtttccgctggacagaaaactctcctcactatcccacaaatggaccgtacttgtgttaagctttgagtgacagcctctgtatttcctccctcccagcacataacatgtggtcctccaattctncagtattntataattttacccacctctcaaagcctacctcttaaaagtatcttctctatgaaacctcctcctgntactctaagtnttttcttacattccttctggcgcttacaggttgcattggnatnacccccgcccc

SEQ ID NO: 3519 - DNA, 315 bp, Homo sapiens
  unsure (5): n=A,T,C or G
  unsure (111): n=A,T,C or G
  unsure (130): n=A,T,C or G
  unsure (144): n=A,T,C or G
  unsure (145): n=A,T,C or G
  unsure (152): n=A,T,C or G
  unsure (183): n=A,T,C or G
  unsure (224): n=A,T,C or G
  unsure (238): n=A,T,C or G
  unsure (253): n=A,T,C or G
  unsure (265): n=A,T,C or G
  unsure (288): n=A,T,C or G
  unsure (293): n=A,T,C or G
  unsure (294): n=A,T,C or G
tcgangtccaccactggatttctgattaagtcactgactaactctaaccaccactggaagtaccattcaacttctggacaacctctggttgtgtaaaataactcaatttantaatagcttaaacattaangttatctattattnngcaactnaaaggcatcatgattcagaaaatatattgcntgaatatcataaccagaccaaaactaacaaaagaaataatnttttgcaatatganaataatatttacaanaccaaaaacaanaacaaagtttttgctctttttanatttnnccctacaggaacttctgtgtg

SEQ ID NO: 3520 - DNA, 155 bp, Homo sapiens
ggaacaaattgctgccgtgggaggatgacaaagaagcatgagtcaccctgctggataaacttagacttcaggctttatcatttttcaatctgttaatcataatctggtcactgggatgttcaaccttaaactaagttttgaaagtaaggttattt

SEQ ID NO: 3521 - DNA, 309 bp, Homo sapiens
  unsure (301): n=A,T,C or G
ccatttaccagactccgacacaatgggccaccaccagtgtgacagcaggacatcctaatatatggatcttgatttttaagtttcagtatctgaacttcgtaaattaagtaacttttagctgggaaagtatagcatgaaaccagaggttctcagaatgactgtaagatagcttacatttcctctttttgcctttatctccccaactaaaatacaatggggaagaagtctgcctatgatctttgaatgagctttttaaggaagaaatattatatattgtttgttaaagtttattgaaataaanaatcattt

SEQ ID NO: 3522 - DNA, 273 bp, Homo sapiens
ctgcatctcctgccctgctgtcattacagggatgggcaggctggcatgggggcacccgctgcccctgcctgggtgttgctgtgtattcctgccggccaggggccactgccaggaccacgcctcccttttcatatcccgattcttaagttctgctattgtggtattctggtggagaaaaaagaaccgcgtggctgttttcgaactgcctggaacctaagaccctgaattcttttcccccccaaggggaaaatctatatggaaaacatttatttt

SEQ ID NO: 3523 - DNA, 301 bp, Homo sapiens
  unsure (218): n=A,T,C or G
  unsure (263): n=A,T,C or G
  unsure (267): n=A,T,C or G
  unsure (279): n=A,T,C or G
ccaaggggctgaagaagatgcagagcagcctgaagctggtggactgtatcatcgaggtccacgatgcccggatcccactttcaggccgcaaccctctgtttcaggaaacccttgggcttaagcctcacttgctggtcctcaacaagatggacttggcggatcttacagagcagcagaaaattatgcaacacttagaaggagaaggcctaaaaaatgtnatttttaccaactgtgtaaaggatgaaaatgtcaagcagatcatnccgntggtcacttgancttgatctgggagaaagccacc

SEQ ID NO: 3524 - DNA, 306 bp, Homo sapiens
  unsure (184): n=A,T,C or G
aaaaattcttggtagttgagcagctctgggggaataagggcaaatatgcttgttatgaactacactgaaatctaccaaagttaatgtttactttgtgtagatccatttgtctattttatttatttttcccagtgaaaagtgtatttggatagagaacttttcattctataaatacactatgagntactaaaatatcatggattttgtttattcctgaaacatagttacatagttaaactgtacatatgacatggcttatgttaaaaatacccagtgctcagttttgaaagataggccaaaaaaaaa

SEQ ID NO: 3525 - DNA, 421 bp, Homo sapiens
  unsure (128): n=A,T,C or G
  unsure (270): n=A,T,C or G
  unsure (285): n=A,T,C or G
  unsure (306): n=A,T,C or G
  unsure (314): n=A,T,C or G
  unsure (320): n=A,T,C or G
  unsure (374): n=A,T,C or G
  unsure (376): n=A,T,C or G
  unsure (389): n=A,T,C or G
  unsure (412): n=A,T,C or G
  unsure (420): n=A,T,C or G
ctgcctcctctttctcccagagtctgagccgaaactacagtccagaggtatagccaggccctgggtcccgtaggcacagaccgttatcattattcagagtatgcagcagcttcagggcagtgtgctantcaagcagagcctagcctgtatttcatagaaacagaactcactttaactgaattattattttttctttatagagtgcaggatgtttttgttgttaacacaggcgtctttctcaggtccgtttgaatcctgaggagtgtgccnatgttttaaggcggngggttgaccacctttgttctncacaagtnaatcanaaatcaaaggctctcctggttctcctctctctgggctggttttttagcgaggcngnagacgcttcacangtaaaccgagagttcacatgggnttgctcang

SEQ ID NO: 3526 - DNA, 140 bp, Homo sapiens
aaacctgagactaacttaaacacttccttgaccttcttgttgcctgttcatttttgtgccaaggaagtagctgccccagtgtatgtcttgccttctccgcgtcattgttggaagaggagagatgcatcgagcagtcccag

SEQ ID NO: 3527 - DNA, 511 bp, Homo sapiens
  unsure (479): n=A,T,C or G
  unsure (504): n=A,T,C or G
ccacgctctcacggaaccactggcatcagatggtgaagtgactgctacccggttgccatctgttgaacagacttttggatgaagtgtgttggggaagaggataaggttatatctaggacaactctttgagttggtccttcatataagaatcgtgacggtaagagaataaacacttgtactgggatcagaatacatgatggatgaaattctttacatgttttagcagaatgaatttgtttaatataataaagtttgctacttatctgtatgtaggttgctaaaaaggattttcttaactcagattttaagccaaataaccatttaacactagtatttgttaaatggggtatttttctgtatttgtatgtttcactataataagggaattaaggataatgtgcattgagaatattttgaaaaataattgactcaaattttatttcttggtcttttgctgtttacctgcccgggcggcctcnaaggcgaattccacacacttggcgnccgtcta

SEQ ID NO: 3528 - DNA, 513 bp, Homo sapiens
  unsure (493): n=A,T,C or G
  unsure (508): n=A,T,C or G
tatttcccagttcgaggccgctgcgcggccctgcgcatgctgctggcagatcagggccagagctggaaggaggaggtggtgaccgtggagacgtggcaggagggctcactcaaagcctcctgcctatacgggcagctccccaagttccaggacggagacctcaccctgtaccagtccaataccatcctgcgtcacctgggccgcacccttgggctctatgggaaggaccagcaggaggcagccctggtggacatggtgaatgacggcgtggaggacctccgctgcaaatacatctccctcatctacaccaactatgaggcgggcaaggatgactatgtgaaggcactgcccgggcaactgaagccttttgaggccctgctgtcccagaaccagggaggcaagaccttcattgtgggagaccagaatctcctttcctgactaccaacctgcttggactttgctgctgaatccattaaggtcctaaccccctggnttgccttggatgccntttcc

SEQ ID NO: 3529 - DNA, 238 bp, Homo sapiens
  unsure (105): n=A,T,C or G
  unsure (137): n=A,T,C or G
  unsure (167): n=A,T,C or G
  unsure (187): n=A,T,C or G
aaattttgaacttgtttcaatcaagttgtagccaaaacaaaaaggtcataattactgtgctcatataagagatgtgacgagggaaggagggagggagaaatgcangaaaggagtggggagaggaggaagggaggaanagagggaggaaagagtaaggtacacatcangttaaaaggggcagaattangaataaaactaagcacttaatctaatctgatcaggaagaaactctgccctt

SEQ ID NO: 3530 - DNA, 519 bp, Homo sapiens
aaaataaataattcagtatgttttattatactcagttgtgcaaccatcaccactacagaacatttttaccaccccaaaaagaaaccgtatactgactagtgctcattccccctgtcccatccttagcagtcaccagtctgtactttctgtctccatggatttgcatattctggacacttcctaaaaatggaatcatgtaattcgtggcctttcgtatttggtttctttcactccgcatgttttcaaggttcatctatactgcagtatgtatgaatacttcattcctttttattgccaagtaacatcctactgtatgaatgaatgcacactctttatccattcattaactgatggacactttgggttgtttccccttttaggctattataagtaatgctatgaacatttgtgttttttgtgggattatatagctaggagtgaaattgctgggtcatagggtaactctatatgaccttttggtaaccttctgaggaactgctagattgttttccaaagcag

SEQ ID NO: 3531 - DNA, 379 bp, Homo sapiens
  unsure (288): n=A,T,C or G
  unsure (303): n=A,T,C or G
aaaagctaggaatggggctggttatggtggctcgtgcctgtaatcccagcactttgggaggccagggcagaaggattgcttgagcccaggattttgagatcagcgtgggcaatgtagtgagaccccgcctcttaaaaaataaaataaaagctagggacagaagaatggactaaaattgaggaaggctgtgaatggaggctaaagatgaacataaagattcatctctgcaaagattggtttttgtgccccctgtctggtgaccatgacagatgacacctgctatcccantgctgcttcctgcanagcacggctgtggtcactcttcaacaaagcagtccaacaaccagcacacatttgattctcctttgagtttttgaca

SEQ ID NO: 3532 - DNA, 388 bp, Homo sapiens
  unsure (368): n=A,T,C or G
cctctgagccccaccatgggcagcttgtactcggagtacctgaaccccaacaaggtccaggaacactataattataccaaggagacgctggaaacgcaggagacgacctcccgccaggtggcctcggccttcatcgtcatcctctgttgcgccattgtggtggaaaaccttctggtgctcattgcggtggcccgaaacagcaagttccactcggcaatgtacctgtttctgggcaacctggccgcctccgatctactggcaggcgtggccttcgtagccaataccttgctctctggctctgtcacgctgaggctgacgcctgtgcagtggtttgcccgggagggctctgccttcatcacgctctcggnctctgtcttcagcctcctgg

SEQ ID NO: 3533 - DNA, 309 bp, Homo sapiens; identical to SEQ ID NO: 35
  unsure (11): n=A,T,C or G
  unsure (229): n=A,T,C or G
  unsure (272): n=A,T,C or G
  unsure (277): n=A,T,C or G
  unsure (289): n=A,T,C or G
  unsure (296): n=A,T,C or G

SEQ ID NO: 3534 - DNA, 363 bp, Homo sapiens; identical to SEQ ID NO: 36
  unsure (291): n=A,T,C or G
  unsure (317): n=A,T,C or G
  unsure (332): n=A,T,C or G
  unsure (350): n=A,T,C or G
  unsure (353): n=A,T,C or G
  unsure (354): n=A,T,C or G

SEQ ID NO: 3535 - DNA, 291 bp, Homo sapiens
cctggggcatctctgtactgaactccaacaaaaccaaggtccagggaagctgtgagggtgcccatccccacctgcttctctcattcccctatggacacctcagctttggattcatgcaggacctccagcagaaggttgtctacctgagctacatggcggtggagtacaatgtgtccttcccccacgcagcacagtggacattctcggctcagaatgcatcccttcgagatctccaagcacccctggggcagagcttcagttgcagtaactcgagcatcattctttcaccag

SEQ ID NO: 3536 - DNA, 110 bp, Homo sapiens
cctgcgcagattcaagagccttagatactggctttccaggcttcccagaaaaagtagctgcaactcgagcaaagcaggttacacccctgaacatacccataggaaagagg

SEQ ID NO: 3537 - DNA, 416 bp, Homo sapiens; identical to SEQ ID NO: 37
  unsure (288): n=A,T,C or G
  unsure (326): n=A,T,C or G
  unsure (329): n=A,T,C or G
  unsure (369): n=A,T,C or G
  unsure (379): n=A,T,C or G
  unsure (385): n=A,T,C or G

SEQ ID NO: 3538 - DNA, 360 bp, Homo sapiens
aaaatatattagaaatgtaaaaattgtatatggggctcacattatatttctattggacagctctgtcctagagccaagctcggactgccaaagattggacatcctgtgactgcaagtttccagtgagcccttactcagcagcttgcttaggtggtctgtggttcatagaaacagagaggaggccaagcatgcgaaaaaggaacgggagaaaacagctctcagggactttaataactacagtctgtaacaaataagcagtgaatgtttgaatttggttggtggaaagctgggatgcaagtcatctctgcctattacgacaaaagcctatcgaccccagcagccagcacaggcaggctgcag

SEQ ID NO: 3539 - DNA, 122 bp, Homo sapiens
ccagaggctgcggtccgtcaagggcttgcctcgcttcagaatcagtaacatagatcttaagtgtaattgattaataagcagtgagttactgtagcttcctttagctctaccgaactcttttt

SEQ ID NO: 3540 - DNA, 271 bp, Homo sapiens
  unsure (1): n=A,T,C or G
naggtctcgaatagagctcttggaagtccctccaaccatggcctgggtctccttctacctactgcccttcattttctccacaggtctctgtgctctgcctgtgctgactcagcccccgtctacatctgccttactgggagcctcgatcaagctcacctgcaccctaagcagtgaacacaacacttacaccatcgatcggactttctgctgtttttgtttgtttctgtatcttgtctcaacttgtggtcagcctttctccctgcatcccagg

SEQ ID NO: 3541 - DNA, 253 bp, Homo sapiens; identical to SEQ ID NO: 38
  unsure (97): n=A,T,C or G
  unsure (120): n=A,T,C or G
  unsure (130): n=A,T,C or G
  unsure (205): n=A,T,C or G
  unsure (215): n=A,T,C or G
  unsure (239): n=A,T,C or G

SEQ ID NO: 3542 - DNA, 138 bp, Homo sapiens
gctcctgccttgcacgttagagagccggtacatgcaggtgggaagctccacacggagaggcgcgccgcgcccgtgataaggttttacctggtacatcggcatggcggaaccaaagcaagagagggtggcgcgtgccaa

SEQ ID NO: 3543 - DNA, 232 bp, Homo sapiens
aaagtcttaggacaaaaacactacgttaagctcaggtacaaactgggtgacaaaaattaaataccgaatgcttttaatgatgcgttattggtaccctgtgacactgcttatagtttctttacttttgaattacagaagcctgtcctggaagacagttttttaacatgctggaaaatcgtccaacatcgattaatttagtactcatccacttttcattttagaaataaacagg

SEQ ID NO: 3544 - DNA, 218 bp, Homo sapiens
gtgctttgcatttaggacacagcccggagccgcagaaggtcagcaggagcacgtctggcaccttcagtaccaggctgggtgagagagcccgagaggggggccgggggggcagtcagggccctgcttcgctgcctgggcccttgtagatggccttctccaggccgtccaccacctccctgtattccaggaacgattggtagtgtgtgcactcaaagcag

SEQ ID NO: 3545 - DNA, 537 bp, Homo sapiens
  unsure (400): n=A,T,C or G
  unsure (450): n=A,T,C or G
  unsure (487): n=A,T,C or G
  unsure (488): n=A,T,C or G
  unsure (502): n=A,T,C or G
  unsure (528): n=A,T,C or G
ctggtccccttcatcttccccaggcaagagggggtaacccgtcaggagctctgctaaaatgcagcccaggctccacatatcaatgggcatgccatacctggccccaaggatcacttctggagcccggtaaaaacgcgactggatgtacgtgtagacacgctgatgctcgtaacaactggagccaaaatcaattactttaataccgcttctaccctgctgctttaacaaaatgttctcgggcttaaggtcacagtgaattattctgtttttgtgcaaagcatccaagcactgcagaatcgagtgggcaaacttgcgaaccaaaggcagactgaagccctggaatttattcttcttgatgagctcatagaggttcatgctcagcagctcaaacgtcatgcanatgtggttgcggaaggtgaaattctccagcatatggatgacattcattgngttatccttgtcctgcttcccaggtgttccaggattnngatctcctccctgnttcccggggaagcgctttcattccgncctttttag

SEQ ID NO: 3546 - DNA, 367 bp, Homo sapiens
aaaagggacccaaggtcaggggcagaaatgggaggcagaggggaggcacccatctcacaccccacccctagggactaaagccgtagccaacagagcagtagtaatccgcgtcgtcttcaggctgcacgggactaatggtgaggacacaggcattgtgggcctcatccttggctgccgagaatcgatcggggatgtcagcaggccggtggtgatcctcctccgagcggtagtagaggagatatcgaggggcactgcctgcccgctgctggtaccaggacacaccgtagtccctgatggtgacgtgctgggggctgagcgtgcaggagagttgagccacttggcctgggaagaccagcagtgcatccag

SEQ ID NO: 3547 - DNA, 268 bp, Homo sapiens; identical to SEQ ID NO: 618

SEQ ID NO: 3548 - DNA, 178 bp, Homo sapiens; identical to SEQ ID NO: 39
  unsure (5): n=A,T,C or G
  unsure (8): n=A,T,C or G
  unsure (129): n=A,T,C or G
  unsure (149): n=A,T,C or G
  unsure (155): n=A,T,C or G
  unsure (165): n=A,T,C or G
  unsure (178): n=A,T,C or G

SEQ ID NO: 3549 - DNA, 194 bp, Homo sapiens
tgaggagcttctgggagatggacacagctatagtcctagagctattcattcatggctgaccagggccatgtacagccggcgctcgaagatgaaccctttgtggaacaccatggtcatcggaggctatgctgatggagagagcttcctcggttatgtggacatgcttggtgtagcctatgaagccccttcgctgg

SEQ ID NO: 3550 - DNA, 317 bp, Homo sapiens; identical to SEQ ID NO: 294

SEQ ID NO: 3551 - DNA, 156 bp, Homo sapiens; identical to SEQ ID NO: 40
  unsure (77): n=A,T,C or G
  unsure (99): n=A,T,C or G
  unsure (101): n=A,T,C or G
  unsure (121): n=A,T,C or G
  unsure (124): n=A,T,C or G

SEQ ID NO: 3552 - DNA, 287 bp, Homo sapiens; identical to SEQ ID NO: 41
  unsure (111): n=A,T,C or G
  unsure (211): n=A,T,C or G
  unsure (220): n=A,T,C or G
  unsure (260): n=A,T,C or G
  unsure (272): n=A,T,C or G
  unsure (275): n=A,T,C or G

SEQ ID NO: 3553 - DNA, 264 bp, Homo sapiens
aaagaattcttcaaccccccaagggacagttatggtcctttgattctctgctgtggcagtaggtgtgcctcatgcccttccagtgcaatgcaagccctccagcctcaccccagagaggatcactgatgtcagcagcagcctgaggctgaatccaggttgaaagaagaataacttgaaaaaatatatttccacacacagaattttgtttttcttccaagttggttaagacatatattttgtttctttttttttttttttttaaaa

SEQ ID NO: 3554 - DNA, 272 bp, Homo sapiens; identical to SEQ ID NO: 42

SEQ ID NO: 3555 - DNA, 252 bp, Homo sapiens
  unsure (91): n=A,T,C or G
  unsure (178): n=A,T,C or G
  unsure (201): n=A,T,C or G
  unsure (233): n=A,T,C or G
  unsure (238): n=A,T,C or G
ggcttccacgcgggtgagccttcaggacttcaggtccagtctgcccatttataaataggaaagcagaggcattgaaacctctaggtcctangctgcttgaaggcatcaaagtgcctgactggtcctcagagcctggcaaagtattcagcttacaacatacatttcatgaatatttgtngaatgaataaataaacggacaanaaggccagacgtggtggctcacgcctgtaatnccagnacttttgggaggcc

SEQ ID NO: 3556 - DNA, 219 bp, Homo sapiens
  unsure (22): n=A,T,C or G
  unsure (171): n=A,T,C or G
  unsure (218): n=A,T,C or G
gtgcctactatgagaagggcgntgcctttgtccagactgagaagttcacattcaccgtgcctgccatgcccgcgctgacccctgccccgagcccagcttcctaacccaagacacacctccccaacctcagtcttcccatctgaacgatgggtcctgaggcacagctctgancacagaggtcccttctgccacctaccatgcaccatgttccttgccang

SEQ ID NO: 3557 - DNA, 262 bp, Homo sapiens
gaaaagtacaggacattcctctgctcctattgcccctgtttccgttcttttcacactgtctgtgggtgctgtgccctgttggaactctctttaacgtcttacgttggagccgctaaccttccccaggtgtttgtcttcattgctttcacagggaaagaattactcgtcccactgacgagttctatgtatgtccctgggaagctgcatgatgtggaacacgtgctcatcgatgtgggaactgggtactatgtagagaagacag

SEQ ID NO: 3558 - DNA, 288 bp, Homo sapiens
ctgcaccgtgtcattggagaggaacttcccatctgcatcctgaagctggcaggtcacaatcttcccatggtgactccactgtggggagaacttgagctcgctccgggtgaagacagacttgatggtcaaggaggtcgaggtgacagcagcctgcctcattggaaccccctctaggagccactgcaattggatcggatacccatagcaggagaaattcagcaagcaggtcagagtgacttcctgggactcttgaatttctggagggagctggatatgaggtggaaaagg

SEQ ID NO: 3559 - DNA, 533 bp, Homo sapiens; identical to SEQ ID NO: 43
  unsure (485): n=A,T,C or G
  unsure (517): n=A,T,C or G
  unsure (533): n=A,T,C or G

SEQ ID NO: 3560 - DNA, 514 bp, Homo sapiens
  unsure (499): n=A,T,C or G
ctggctggcggagcatgagcgccccagatcccaagcactgcaagtccagatgcaacgggagcctggctcaagggacgacaagatccagccggaaagtgtagaagtcacaccccaatggcgggatagcagcccctgtgtgtgagcacccctccatgccaggaggagggccagagatggatgactacatggagacgctgaaggatgaagaggacgccttgtgggagaatgtggagtgtaaccggcacatgctcagccgctatatcaaccctgccaagctcacgccctacctgcgtcagtgtaaggtcattgatgagcaggatgaagatgaagtgcttaatgcccctatgctgccatccaagatcaaccgagcaggccggctgttggacattctacataccaaggggcaaaaggggctatgtggtcttcttggagagcctagaattttattacccagaactgtacaaactggtgactgggaaagacccactcggagattctncaccattgtggtgga

SEQ ID NO: 3561 - DNA, 324 bp, Homo sapiens
ccaggtcagtaagtggaaaaaccccaggggacttctatgatagacggacaactaagcctgagtttttgagacctggtcctcgaaaaactgaagatacctacttcattagttctgcgggaaaacctacaccaggcactcaaggaaaaataaaattagtaaaagaatcttctctgtcacgacaatcaaaagatagtaacccttatgcaactttacctcgtgcaagcagcgtgatctcaactgccgaaggaactacacgaaggacaagcatccatgattttttgaccaaggacagtagactgcctatatcagttgattcaccaccag

SEQ ID NO: 3562 - DNA, 281 bp, Homo sapiens
ctggggcacagctccgcctctcctccagcccctcggtcccatgaggccaaacaatgaggacagaggggctgaggggtgtgtccagggcccagtcccacctcagcaggaaggtggcgtcagcactcgcagtcccagcctcacgccgcatcgcagtcccgggggatcttcacacagggagggtgagctggttaagaaggcgggtgatcctccccccggatgcttcgatacttagccatgtcttccggaaatactttagaaagttcttgaatcaacaggctttt

SEQ ID NO: 3563 - DNA, 388 bp, Homo sapiens
aaaggccacgtgaggaagatgctgcggcatgcggaagcatcagccaccgtggagtacgcatacaatgacaaagccattttggagcagaggaacatactgacggaagagctctatgggaacacatttcagctttacaagtcagcagatcacccaactctggacaaagtgttagaggtacagccagaaaaattagaacttattatggatgaaatgaaacagattctaactccaatggcccaaaaggaagctgtgattaagcactcattggtgcataaagtattcttggacttttttacctatgcaccccccaaactcagatcagaaatgattgaagccatccgcgaagcggtggtctacctggcacacacacacgatggcgccagagtgg

SEQ ID NO: 3564 - DNA, 194 bp, Homo sapiens
cctagcaggtgtgagtttggttcccactgcagccagcaagaagatgatgctgagccagattgccagcaagcaggccgagaatggcgagcgggcaggtagccctgatgtgctgaggtgctcgagtcagggtcaccgaaaagacagtgataagtcccggagccgcaaagatgatgacagcttgtctgaggacctgt

SEQ ID NO: 3565 - DNA, 221 bp, Homo sapiens
cctgtctctgaggggaggctgtgaccggattcttccccgacagagtcaccctgggattcctcagagcaagtgctccggtcgcattccagatcatccactggcaaaagcatcacttcttacacgtggttttcagggaagtacctaatgcagaacgcaagggtggggtggcaggagcgaggctgtacagatacacagaggtacactgtacaaggccggggagg

SEQ ID NO: 3566 - DNA, 512 bp, Homo sapiens
  unsure (445): n=A,T,C or G
  unsure (499): n=A,T,C or G
aaaatttctatccattctgtcaggttctgttggtttatcagttccagtggtagtgtatactgaacaagagcatagaagatcttgaatatctgtttctggatgaggacagactgatcagactggtcagaaagaagctggataaaacgatcctttagaactggcagaaaatgctgcattgctgctaccaatggactccgctcctctggttttttatactcataatttttcacaagctgataaaggcaaagaagaattcctagccaacaagcactgttatcggactgaagataaaagccaattttgtccacaatggcagtccagcggcttggataatcatgtttgatgatgtgatgaatgcatgtagtaagctgtaccctgatgagctcaggagaatggataatggcttctacaatattttctcgaatacaatggcgatcttcttctnggaatagtataagggggatatatcccctggtgctgtttcttcgatcaggccaantctgtgttatcat

SEQ ID NO: 3567 - DNA, 254 bp, Homo sapiens
gttaacataagccattttaattccctgggaagtgggagagtgggtctcccattttccccaagcaccctttttggtaattgtgttctgtgggttggaaggaggtgaagggggacctgggagcgagctgttggtgggtgggaatagggatttggccccgagtggagcagccgcctgttaggagcccaacatggcgcctgaaaagcacatgatgcgaaagggaagagaggagaatccattccctgccagccaggcag

SEQ ID NO: 3568 - DNA, 487 bp, Homo sapiens
aaatctgtttttctaactgggggaaaagattcccacccaattcaaaacattgtgccatgtcaaacaaatagtctatcaaccccagacactggtttgaagaatgttaagacttgacagtggagctacattagtacacagcaccagaatgtatattaaggtgtggctttaggagcagtgggagggtaccagcagaaaggttagtatcatcagatagcatcttatacgagtaatatgcctgctatttgaagtgtaattgagaaggaaaattttagcgtgctcactgacctgcctgtagccccagtgacagctaggatgtgcattctccagccatcaagagactgagtcaagttgctccttaagtcagaacagcagactcagctctgacattctgattcgaatgacactgttcaggaatcggaatcctgtcgattagactggacagcttgtggcaagtgaatttgcctgtaacaagccagatttttacctc

SEQ ID NO: 3569 - DNA, 532 bp, Homo sapiens
  unsure (432): n=A,T,C or G
  unsure (487): n=A,T,C or G
  unsure (525): n=A,T,C or G
agaatacaagtgtggtaaatgccatgtttgtactttatctaacatcttctctttcagtagtcttgttttttttatatcatgtgattgtttgtgtgtcccctttcctcttctttgcttaacacaattatcttgtgttaaggatctcaaagatttcatgagacaagctggggaagtaacgtttgcggatgcacaccgacctaaattaaatgaaggggtggttgagtttgcctcttatggtgacttaaagaatgctattgaaaaactttctggaaaggaaataaatgggagaaaaataaaattaattgaaggcagcaaaaggcacagtaggtcaagaagcaggtctcgatcccggaccagaagttcctctaggtctcgtagccgatcccgttcccgtagtcgcaaatcttacagccggtcaagaagcaggagcangagccggaccggacaagtcccgttctgttagtaggtctcccgtgcctgagaaganccagaaacgtggttcttcaagtagatctaagtctccancattggg

SEQ ID NO: 3570 - DNA, 509 bp, Homo sapiens
  unsure (467): n=A,T,C or G
aaaccttaagaaccacataatactatataatgcttttctgtacaaatctcaagaaacactttcattcattaaaacatcatgaaaatccttaaatgtgttaaatggaaaaaaatgaaaccatgaacaaaaaagctatacatgtaggtgcatatttatctcctcctgagttgggagaaatctttctaagcatagaaacaatggtagcaaaagagaagaatagatttggctggattaacaataaaaaatttctgccagaaatatgaaaattcaatttagacaaaattcaatataaacaaaattaatatagacaaaggtggtaaacaggtggttctcagagaagataaatacatgattatttaacataaaaagaaatgttcaatgtttctagaagacaaataattacaaacctaaacaaattgtatatttgttagattggcataaattataataatccaacattgagttangtggaatataaattggtaaaatatttctggaagacaatttgg

SEQ ID NO: 3571 - DNA, 396 bp, Homo sapiens
cctccagcgtccgggccactcgctcccagcagcacacacccgtcctctctagctctcagcccctccggaagaagcctcgaatgggcttctgaggacacaaggtgggctgccctcaagccccagagagcccctcatccttcctctgggaccagatgtgccttccacagttgaaacttgagaagcagagctcgccaccttctggaggccactgtgatgatgagccaagcaatttggagccaagttgaagggacagggcaacaaaatacagtagtagtttcttttgtattttgtatattcgcctgaagatcatcccgcaaggcaggctggaggtgccggtgggcctgtgttgctgggattttagtctgtgctgggaggcagggctccgctgcgtctcag

SEQ ID NO: 3572 - DNA, 162 bp, Homo sapiens
ccagcctggatctcctcaagtccccaagattcacacctgactctgaaatctgaagacctcgagcagatgatgccaacctctggagcaatgttgcttaggatgtgtgcatgtgtggaagtgtcactggcatgtatacacacacacacacacacacacacttac

SEQ ID NO: 3573 - DNA, 309 bp, Homo sapiens
aaaatcaagtctgttttgttttgacactaaattggtgagaattgaatgctgtcaacgttaaatatgaacataatttcatatcttctaggaaagtgctttaagtcctttttgtaagcttgggaatgtatccacggaaaggatttttcatagacggaatttccagaagtgaatcataactactgttagagcataagcatgcatgattgtgctgtgtagatcagttttgttgaaagtttagattgttgtgtttgtcaattataatttaatgtttcagtttttatatgaaatgttgtaaatgtataccttttt

SEQ ID NO: 3574 - DNA, 174 bp, Homo sapiens
ccacgtgcaggggcaggccctggcccgccatgagcagaagtggagtggatcttcaaatcccactttgtcctcctggacggatcacaggcgccgtaagcctggcgtttgagcacttggaaaattcctctggcaagccaagcccttcctttcccgtagctctctggttgtttcagg

SEQ ID NO: 3575 - DNA, 221 bp, Homo sapiens
ccaggattgagtcctatgaaggaagggaaaagaaaggcatatctgatgtcaggaggactttctgtttgtttgtcacctttgacctcttattcgtaacattactgtggataatagagttaaatgtgaatggaggcattgagaacacattagagaaggaggtgatgcagtatgactactattcttcatattttgatatatttcttctggcagtttttcgattt

SEQ ID NO: 3576 - DNA, 303 bp, Homo sapiens
  unsure (288): n=A,T,C or G
ccatggtgtaggcagtgcaatgtcttcgagtgagagtgaaggtggtaactcattgcatggattctagagttctgtttattctaatccaagttcttccacttaaaaacaatgttcttcctctcattgagtctcattcctcatctataggatgggaataagagcatgtacctggcaggttgttgtaaggattaaatggtgtaaaaaaatgtcaagtgcttgcaactttgaataccaaacttgagtgaaagctcaataaattgttacccaaaaaaaaaaaaaaaaaaaaangcccttcccgggggg

SEQ ID NO: 3577 - DNA, 531 bp, Homo sapiens
  unsure (519): n=A,T,C or G
aaaaaggtaattttcagcattttggcacctaaaagggaaactttcatctgcttacacaggccagaagcaaagacaaagattgcatgttgttcttacagatgacttaaatcatctctttgatgataaaaatatttttaagccgtgaaagttatgagatattctgggtaagcctgattatcaaagaataccacaaatagctttggagatcgtgtattgtttgtcactgagtcaaagagatctgtgggattgtgaggattcttgggtggaggggtgactaatcctgcacgtccctttgtgaagactccagtaagtactcgcacaacgtacatgtgctttctcccattgctgtctggcttggagtaggtgtccttggcagaataactggcatccacagcaaaataggttccttttccataggatacagcatttttcccacacaacttctattaaagccgtgctgattgacatatggcactgagtctgcatctgtcccatggaagaggagtctctcattattcntatggtcattct

SEQ ID NO: 3578 - DNA, 479 bp, Homo sapiens
  unsure (462): n=A,T,C or G
ctgggcccggtgccagcagccctgcccctaatctgcctgcccgggggctcctgagggagacaccctctccccagggctggaggctggacttcagcaggacccactgcagcccttaccccctttcccctgctgtactgtcaggaccccttcccacacaggaaccaccggcccaggctctagctagtcatgacagttccccagtgccaggcactgcaggaggctctgagaggggtcggtggcctctgtctcaactcagctcgctcagcggccctgggaagccaggggaggttctggagccaagctccagccagacccatcccatcagcattgctgcagctccccaagggctctgctgcgtgcttggaagtgaaaattgctgatggagggggtgggtccgacgagaagagaggaagggacagagtccagccacaggtggttctgggcattctccaactcctccanacctctctgaggacctc

SEQ ID NO: 3579 - DNA, 276 bp, Homo sapiens
aaaaaagagagctacctgtatgtcatgcatcccatccaaaacatgtcacaatattttatatatattacatagtatttacaacaaagccccttccatagtatttacaataaagctccttccaaaatcaccaagaggcttctttccagaatagcaagtgctttcaagttactgtaccaagtattctcactaatacagtagtgtatctaaatgggggaggtgggggagtatcaactgcctaatattagttactgaattttcagattagatccctagttt

SEQ ID NO: 3580 - DNA, 273 bp, Homo sapiens
aaagttttattatgaaaacacacagaatcaaatgtgttatccatgtatttgcaacagcagagaaacagtgacagtggaccatccccataggggacacttatcctttggctaaactaatataaataatggaaatgacacctaatacaataacacggcacataaaaaagattaaattaagagaagggacaggaactgcggagaggagtcctgggtatggaggagatgtgtctcatggagaagcatccgggctcaagtgacctttcctgaagactt

SEQ ID NO: 3581 - DNA, 225 bp, Homo sapiens
  unsure (92): n=A,T,C or G
ctggagcagcttgagttagaacggaagcaagcacttgagcagtacgaggaagttaaaaagaagctggagatggcaactaataagaccaaganctggaaggacaaagtggcccatcattgaaggattaattccgactgatagaaccaggttcaaagaaccctcacctgatcactaactggggacctgcagcttttcactgaggcagaacttgaagagagagaagaa

SEQ ID NO: 3582 - DNA, 486 bp, Homo sapiens
aaactctccagagacactactttgaagtgctggaggtgggttttgaaagacaggggtgcataggacctctccgacatcctttcagaatatttcaggtaccaagaagaggtagcaagctcctaactagcttatggaactacctcattctagcatcagggcattctccacttgcccaaaggctctctttgcaataaacatggtttgaaaataactttagggtgcaacaggcaaacaatcaatcatatatacaaataacatgtgtctatcacaaaatttacagaaggtaagaaaacgtgttgttgtgtttccttacaaagtccatattaataaacggaagcagcattttcagctatgaaactgaagcacaaagaaagctgaagaaatccacctcttttattaaaattcttgtaaagttcaattccataaagaaattctagtgtctcatcaagattttcacaaaatatatagaaaactgttcatgtattt

SEQ ID NO: 3583 - DNA, 175 bp, Homo sapiens
ccagacacacacgcccaggcgggagctctcactcttttgggaggggtcattcccaggggaccacagcctctggggaaacatctggggtgggggcagggttgcgtgggttgacaatggcctccttggtctgcgccatgtccgagatgaccccatcagtaatgatgaacagcaccga

SEQ ID NO: 3584 - DNA, 421 bp, Homo sapiens
  unsure (5): n=A,T,C or G
  unsure (8): n=A,T,C or G
  unsure (121): n=A,T,C or G
  unsure (315): n=A,T,C or G
  unsure (335): n=A,T,C or G
  unsure (337): n=A,T,C or G
  unsure (396): n=A,T,C or G
ccacngangacttggggagatacgtaatacaaataaagaccttaaccaatcccaacactttcagaaaaactttcacctgtggggaagtgggggcatgtgactggagagcaatgaacggaantttacactggatctgaattgttactaaaaaagtaactgacacgcacacacaagtggccttcctggcggagcatcaacaaagccaagaggtgcgagtacccaagactcccagagttgttccacccctggggctagctgtatttatgccctcgctcaaagaccagctttttcaaacactaatacctacctgccctnggtggtaacaacactgtaangngctgctcattccactgtaggattttacatttttctcaccatggcacagcctctttttanttcatacccaatagtctagcctggg

SEQ ID NO: 3585 - DNA, 195 bp, Homo sapiens
ctgcttcatcagatcaattctacccgagactttgaaagcatccgattggctcatgaccacttcctgagcaatttgctggctcaatcctttatcctattgaaacctgtgtttcactgcctgaatgaaatcctagatctctgtcacagtttttgttcgctggtcagtcagaacctaggcccactggatgagcgtgga

SEQ ID NO: 3586 - DNA, 429 bp, Homo sapiens
  unsure (387): n=A,T,C or G
  unsure (401): n=A,T,C or G
  unsure (409): n=A,T,C or G
  unsure (429): n=A,T,C or G
aaagcaaaccgtgccccttggcttgccattctttcagcagcacatgccacgttctaagcagatgggcttccgtgatcccgttttctagtttggggtaactgagtcttgaatgctttactagtccggcaatctttggacttaggcttctgccctttgagactcacatgactttctggtttggggtctggtcatttccctttcaatttttgaatctccttctctgttcagttggcttggcaaagtaccctctgttctcatgtcactaattcctgctctaggtcatctttcctttgtgcaagcccacattcccaccatcctgtgaactttgttgtacttggtgttgggcaactgggtgagtgttgtgacaggctcagacctgaatccttnctcaggagcaattnggagaacncaaaattacctggccgggcn

SEQ ID NO: 3587 - DNA, 244 bp, Homo sapiens
aaataagacaatattatcacattaaccaccaaaaaataactagtataacaattcacctggatgatttgcagactatcatttctgtgttctccccatcaaatacaatgaaaagctgatctaaagatatttacaactggagtggaatacacatttttttgaggctagttatatcatggagaatcacacttaatgagatctgactccatcactgtaccaaagaagtcaaggagtcagacgtaaacag

SEQ ID NO: 3588 - DNA, 536 bp, Homo sapiens
  unsure (468): n=A,T,C or G
  unsure (525): n=A,T,C or G
  unsure (527): n=A,T,C or G
aaaatatgcatattctaaaagctcttagcagagttgctgttcagaaaggctgggtgagtgtctgtcttcctagtaacagggcagaggtcagcctgtcctaccacactctcctactgcactctagccagtgttagtaacgtgcttctggtcacattttcacatgaaggctattaggagctattgacaaagtttaagtagacaaatcacataaccagatttgcatttttgattccggcttcagagcctaatagctctattagtcttatgtggcccctaggaggcattcaagataatggtgacactaagcaaaggagggcaagttgaggtggagtgtctgaacaagcaggtctctaacctgcagctatggagaagcaattcagtgtttcctgtggcgggtggagggcatacttacccagcagagcatgtgagactctttgatatgcaccttcatgtattatcttgttcaanttctctgaggttgggatcattattatttcccattttgcagatgagaaaattgagcananaaaggtcac

SEQ ID NO: 3589 - DNA, 332 bp, Homo sapiens; identical to SEQ ID NO: 44

SEQ ID NO: 3590 - DNA, 529 bp, Homo sapiens; identical to SEQ ID NO: 297
  unsure (31): n=A,T,C or G
  unsure (297): n=A,T,C or G
  unsure (313): n=A,T,C or G
  unsure (502): n=A,T,C or G
  unsure (511): n=A,T,C or G
  unsure (523): n=A,T,C or G

SEQ ID NO: 3591 - DNA, 253 bp, Homo sapiens
aaaagcacaaagtgaccttcagccccggagctctccctgcttgccttaaccccttgggcggcgccaggagttacacgagacctctgtcccggagccctgcgctcactcttccctccgccctcactccccagacactgccgaggcgacccctcccagcgtcacctcgaagcccagccaggagtagggggacagcacgtcatagaagagctccacggtgcgcggcaggggccccatgctgcaggctccggaagag

SEQ ID NO: 3592 - DNA, 394 bp, Homo sapiens
ccttagccctgctcctctcaattccatcctgtagagaacaggagtcaggagccgctggcaggagacagcatgtcacccaggactctgccggtgcagaatatgaacaatgccatgttcttgcagaaaacgcttagcctgagtttcataggaggtaatcaccagacaactgcagaatgtggaacactgagcaggacaactgacctgtctccttcacatagtccttatcaccacaaatcacacaacaaaaaggagaagagatattttgggttcaaaaaaagtaaaaagataatgtagctgcatttctttagttattttgagccccaaatatttcctcatctttttgttgttgtcatggatggtggtgacatggacttgtttatagaggacaggtcag

SEQ ID NO: 3593 - DNA, 451 bp, Homo sapiens
  unsure (361): n=A,T,C or G
  unsure (438): n=A,T,C or G
aaagtttgattacatcagctataggagtaaagtgctaacttacaaagcttacagtttgtgacaccagtgataatgcatgcatactgctattttcaccaccaactggtgaaacaatgaaaagacagtttacttttactgagataccgaaatgagtcaaagactatattagccaatataattcctttgtttttagtgtgaaatactatggtagggcctaattaaaaataaaaacaatatggagaacagtaaaacagtcatcaagtgactctaagcttgtatttactctaagcttgtattaagcttgtattgactctactgcctcttgtattttttttttttaatttctattcagggatccaanaattttagtaattattaactgagcagcagattgccactggactgttttaagatttactatcaccaggtcttacatanatacataaatttt

SEQ ID NO: 3594 - DNA, 411 bp, Homo sapiens
cctcaggaaactgacaatcacggcagaaggcgaaggggaagcaggcacgtccggaagcgctcctccagcagggacagctcgctgatgaggtcggtgatggcgttggtaaaggcttcctgggggctgtagtccggcgtggtctgcactcggatgatgatcttgtgctccaaggggtgggggactttgtagccagcaaatagcacttgcgggtcttttaggagttgtgatttaatgatgtttcccagtgtgtggtcttctttgttgatggtgaataaacaggcattgggtaccttggtgtccttgttaatggtgatcttctcgccctcgaagagcaagaacgactcgaagctggaggggcgttcatgctcccgccgccgttgcgtccagaccccaagtgtccgccaccgccgc

SEQ ID NO: 3595 - DNA, 349 bp, Homo sapiens
ccatcctggattggcttcatcagaggaggctgaaggccggatgaggggccccagtgttggagcctcaggaagaaccagcaaaagacagtccaacgagacttaccgagatgctgttcgaagagtcatgtttgctcgatataaagaactcgattaagaaaggagacaagttccatgggatacaacctccctcttgttttgtttgtctctccttttcttttgttactgttcttgctgctagaacttttttacctgcccgggcggccaagggcgaattccagcacactgcggccgttactagtggatccgagctcggtaccaagcttggcgtaatcatggtcatagctgtttt

SEQ ID NO: 3596 - DNA, 345 bp, Homo sapiens; identical to SEQ ID NO: 298
  unsure (20): n=A,T,C or G
  unsure (27): n=A,T,C or G

SEQ ID NO: 3597 - DNA, 305 bp, Homo sapiens
ccaggatggtctcgatctcttgacctcgtgatctgcccgcctcagtctcccaaagtgctgggattataggcgtgagccaccatgcccagcgtcagaacatttagtttttgatagtgaggtcggccagccttcaggacagaatggggcaaagggtttgagcatcattctgagactccaacatgacagccacaggcaccgaccttgagccggtccagtgcagtgcagtgcagcccataagccccttggcttccactagaccaggacacctccctctcacccagcctccccttgctctcaccctttgg

SEQ ID NO: 3598 - DNA, 532 bp, Homo sapiens
ctgctcgacagcatatggcaccagcccattttcaatttgctgagcatcggccaaagcctgtatgcgaaagccaaggagctggacagagtgaaggaaattcaggagcagctcttccatatcaagaagctgttgaagacctgtaggtttgctaacagtgcattaaaggagttcgagcaggtgccgggacacttgactgatgagctccacctgttctcccttgaggacctggtcaggatcaagaaagggctgctggcacccttactcaaggacattctgaaagcttcccttgcacatgtggctggctgtgagctgtgtcaaggaaagggctttatttgtgaattttgccagaatacgactgtcatcttcccatttcagacagcaacatgtagaagatgttcagcgtgcagggcttgctttcacaaacagtgcttccagtcctccgatgcccccggtgtgcgaggatcacagcgaggagaaaacttctggaaagtgtggcctctgcagcaacatgatgcccctgagtactgtgaaa

SEQ ID NO: 3599 - DNA, 272 bp, Homo sapiens
ccagcagaatctgtgatcttgaggtggctgcgcaggccgccagcgcccccagactggtcggagatctcgtacgcgccagtcactagcaggtccttgtgaatctcctcacggaggcacttgcgagagttaatgggcagatggaaggagatggcaaggaccaatctggggccgagcaggaacaaaagcagcaacgctaacggaaaagggccgcgccgggctggtgggccagacaaaccagacatggtgctggagactcgttcgccaccgaaggc

SEQ ID NO: 3600 - DNA, 508 bp, Homo sapiens
  unsure (444): n=A,T,C or G
  unsure (487): n=A,T,C or G
ccaaggtgtcggtgctgaacgtggcggtcctggagaacccgagccctttccacagccccttccggttcgagatcagcttcgagtgcagtgaagccctggcggacgacctggagtggaagatcatttatgttggctcggctgagagtgaggaatttgatcagatcctagactcggtgctggtgggccctgtgccagcagggagacacatgtttgtctttcaggccgacgcccccaacccatccctcatcccagagactgatgctgtgggtgtgactgtggtcctcatcacctgcacctaccatggacaggagttcatccgagtgggctactacgtcaacaacgagtacctcaaccctgagctgcgtgagaacccgcccatgaagccagatttctcccagctccagcgggaacatcttggcctcgaacccccgggtgacccgcttncatatcaactgggacaacaacatggacaggctggaggccatanagacccaggacccctcctggg

SEQ ID NO: 3601 - DNA, 342 bp, Homo sapiens
atttcctacagtgcgaaacttgtcattctagatgttctgttgccagtatcaaaaccggcttccaggctgtcacgggcaagcgagcacagctccgtgccaaagctaactaatttgctaatcactgattttgcaaagcttgttgtggagatgtggctggacaggtttgccatcagagtggatataccgttgtattaaaaacaagataaaaaagctgccaagatttttggcgagtggttggtctgaagtccttgcaagacgctgatgctcaagctgttgacatactcattgcctactttaacacctgtcagagaaacgtgatatggggtaaggaggtgctttttt

SEQ ID NO: 3602 - DNA, 272 bp, Homo sapiens
ctgcgaggagctcactgcggtcctaaccccgccgcagctcctcggacgcaggtttaacttctttattcaacaaaaatgcggattcagaaaagcacccaggaaggttgaacctcgaagatcagacccagggacaagtggtgaagcatacaagagaagtgctttgattcctcctgtggaagaaacagtcttttatccttctccctatcctataaggagtctcataaaacctttattttttactgttgggtttacaggctgtgcatttggatcag

SEQ ID NO: 3603 - DNA, 545 bp, Homo sapiens
  unsure (27): n=A,T,C or G
  unsure (491): n=A,T,C or G
  unsure (512): n=A,T,C or G
aaaatgttttccacatcaactacttangaagaagttacagcaatatgatcttccactgctcaggaagacagagtgaacttggatatgatgaatattaaaaacaaacatacagagcacctgggtctggacttgtgggctaaagaaatgcttcctgaatttgtccgaggtgatgtgttgagcaaccgtgccacagttcaccagcagtgacactctagttcttcagtatattcctgttgtgaacctatttctttgaatttaatcatctgggatgattgctgcagtgtgagtctttagcattttgaaaatcccacagaagagattaagaaggttcctcttcccagaagacactcatataaagcatgcttctatagggttaactgttcagaaattgtaaggtgcatggtcatcaccaggtaagcagctctacaggggcccatggcccatactcatccttgcgtgcccaggggagccagcgtgcatatgaacagtanggaagtggcataaccacgcanaagggctcaggacaacttggcatttttgttgtg

SEQ ID NO: 3604 - DNA, 277 bp, Homo sapiens
ctggacttgcacttgtttgcctgactgctgtccccctaccacagtaccagtctcgtgggctggtaaaggcccctggcaagagctcgttcacgatgtttgtggatctagggatctaccagcctggaggcagtgggaacagcatccccatcacaggtgaggacaggaggacagacctgctgtgaggccagggtccaggggcagcctggaggggagcacagtggtcttgagacgcagcctcacaaagcatagccacaggacctctcccttgggccctagc

SEQ ID NO: 3605 - DNA, 287 bp, Homo sapiens
aaagtagtcttccgtggttgggaagcctcacctcccaagaccagagtcagttggagctggttgttgttggaagggagtgggttggggaactggggtgggggcagggagatccccccgctctgctggcggtcctaggtggagaagaactgcacttcacagagtctggggtttggtgggaaggggatgaggcaggagcagcaagctggggagatgggacccacctcagtccccagcttcattttcttctaatgtttccccactggtggcattctctgcagtcttggagg

SEQ ID NO: 3606 - DNA, 396 bp, Homo sapiens
ccattgggagctcttccacattggctcctgtgtcctttgaccttcctccatcttcttctctttttattttttagcactgccttaatttcggcgctgaggtgggtactgcagagaaaagcaaacactccagaacccatgcactggatccaggagtgggtggtagaaagggatgtggagggaggggtctgagctctaatactaaagacagagacttaggagactgtgaaggggtgtttatggaaagtcagggaattttacctccccgaggagaggaatcctgtgtcatccacctttgtgtcccctcccctgggctcacaacagtgaaccatggggtgaacaaggaccattccactgcctctcccaggttctccaactctgtggcttactatggcctgg

SEQ ID NO: 3607 - DNA, 182 bp, Homo sapiens; identical to SEQ ID NO: 299
  unsure (54): n=A,T,C or G
  unsure (155): n=A,T,C or G

SEQ ID NO: 3608 - DNA, 140 bp, Homo sapiens
cttacggcctgccccgaggccacaacccgacccaggccacgccatccgatccagaccctttctcgcagactcggtccccagaaccacactctgcttcactgactgtcctgcccccatcccgggccgcaccagcagcatgg

SEQ ID NO: 3609 - DNA, 425 bp, Homo sapiens
ccatgtcggagctgaagcttaccagctctctaaagcatttgctagggaatcatgcagagggtccaaaatattttttagaaaagcattcatctgtcccgggatagaagtagaggaagctggtaggcaggcgctagaccctaaagaaggactgctgagccagttcttaagcctgtggtcctgtcggtgaggaaagtgagagcagtccagagcaggtgaaaagagcagagctcattcctgcagtggctcttttgcctaaagcagcattcctcaaacttctcactcgaagcattaagttacggtgagatgctaacacacgctttagacttaagtcaaaatttactgtgaagccacagcaaaccatggcttcacagatgaattagttgctacacaaataagttcgatacataagtacagtaattgctttt

SEQ ID NO: 3610 - DNA, 195 bp, Homo sapiens
aaaacagcctgggtaggaaaattagaagcaagctggatgcagtggctcatgcctgtaatcccaacacttttgggaggtccaggcaggaggatcacttgggcccaggaggtcaagcctgcagcgagctgagatcacaccactgcactccagcctggggtgatagaacaagaccctgtctcaaaaaaaaaaaaaacc

SEQ ID NO: 3611 - DNA, 350 bp, Homo sapiens
cctgtctcagtcagacctctttgctcaatctcatttacacaatgcacaacaatggaggggatcattggagaagtctgggacacaaagtctgccagcattccctctccaatcttgacaggtgttcctatcagggtaggaatgcagggaaggggacagcggtcccgacattctggatgagagaccacacgacagtctcgacacttcagagataatttgccaaattttatccgctttccacatggaacacaggattcaggtttaataaccgtcttagaaacaaagtcatgcaggcgcatccctccattactctgtggcgtgcccacactgtctgtctcagttcttggctccag

SEQ ID NO: 3612 - DNA, 391 bp, Homo sapiens; identical to SEQ ID NO: 45
  unsure (5): n=A,T,C or G
  unsure (9): n=A,T,C or G
  unsure (44): n=A,T,C or G
  unsure (245): n=A,T,C or G
  unsure (308): n=A,T,C or G
  unsure (314): n=A,T,C or G
  unsure (333): n=A,T,C or G
  unsure (368): n=A,T,C or G
  unsure (374): n=A,T,C or G
  unsure (391): n=A,T,C or G

SEQ ID NO: 3613 - DNA, 311 bp, Homo sapiens
aaaaaaatgaaacaaacacaaggcattgctgcagtgactgggacatgctgatgacccagagtgactatgagaaggaacggtgacaagtgtttggatttaatggtctcaccaaggaatgttgggttagaaaagtaaaataactcaacaccaaacatgaaaaagtatgcctggcatccccaaactttatgccattatttttaggttcataatatgaacaactaagtgataaaacctttagattccatattgtgctcagaagattgcgtttcttctgcagatctctagtaaaaaaagatctcttccatattcag

SEQ ID NO: 3614 - DNA, 222 bp, Homo sapiens
aaaggctcacctgattaggtcatgctcacccacaaaaatctcctttttgtaacgccaaatgtggtcaacacacaatccaatcacagtagtgattattccatcatatttgcaggttctacccacagtcaaagcaaatgagttttagaaggcatgtacaacaggaggtaataggtattcttaggggccatcctcaaattttatttgccatattcacccctctgg

SEQ ID NO: 3615 - DNA, 346 bp, Homo sapiens
ccaggttctttacatgtgcttgttttgttcacagcgggccaatccgagcctacatccttgcccacaaggatgccatccagctctggaggacgctcatgggacccaccagagtgttccgagcacgccatgtggccccagattctatccgtgggagtttcggcctcactgacacccgcaacaccacccatggttcggactctgtggtttcagccagcagagagattgcagccttcttccctgacttcagtgaacagcgctggtatgaggaggaagagccccagttgcgctgtggccctgtgtgctatagcccagagggaggtgtccactatgtagctggaacaggagg

SEQ ID NO: 3616 - DNA, 469 bp, Homo sapiens
  unsure (383): n=A,T,C or G
ccacggaagtgggaaagtgaaggcaagaagtgtgtcctgaataaagcttggctggttttcagacaaaaggtcttctgggtaataaatgttgtctggagcagccctcaggagaagaggtaagagcctgtatgggatggtgtcgctgccaacatccttccctgtgatcccacttactcttccctggctgatgagatacttggggttgtgattcatgatgattgaatttccttttgaggatttgtctttgggcagatgaaggaggctcagagaaaagcccctccctgcatgtgctggcccaagtgacctcattttgaagtcaagtggcaaaccagcggcatattttagggtgccatttgctgaatgctttcagcatccctaatccngtcaattgttcccatttgtttcctgaatagcaaacacttccttgaaattcttctcaaactcagcctccagtcttaaatccatttgg

SEQ ID NO: 3617 - DNA, 535 bp, Homo sapiens
  unsure (535): n=A,T,C or G
ccaaccgctcggacgggactttcttggtgcggcagagggtgaaggatgcagcagaatttgccatcagcattaaatataacgtcgaggtcaagcacattaaaatcatgacagcagaaggactgtaccggatcacagagaaaaaggctttccgggggcttacggagctggtggagttttaccagcagaactctctaaaggattgcttcaagtctctggacaccaccttgcagttccccttcaaggagcctgaaaagagaaccatcagcaggccagcagtgggaagcacaaagtattttggcacagccaaagcccgctatgacttctgcgcccgagaccgatcagagctgtcgctcaaggagggtgacatcatcaagatccttaacaagaagggacagcaaggctggtggcgaggggagatctatggccgggttggctggttccctgccactacgtggaggaagattattctgaatactgctgagccctggtgccttggcagagagacgagaaactccagctctgagcccgcgtgggn

SEQ ID NO: 3618 - DNA, 256 bp, Homo sapiens
ccatgcccagggccacagccgagggcacaagcgtgtagtagcgctcccagtagttggtggagacaaagagggcgtagatgcccacagcgaggaacatcatccacttcgttccaaaaaacctgatgagcacaggtgtgtagagcagggcggcgatgggagtcacgttgatgcccatcagcattttgctgtcgatgtcgggcagccccatgttgccatacttcacctcgcggtaggtctcgtcgtagtgcaggatcag

SEQ ID NO: 3619 - DNA, 235 bp, Homo sapiens; identical to SEQ ID NO: 3257

SEQ ID NO: 3620 - DNA, 324 bp, Homo sapiens
aaaataaaactttatgaaagaaaaaacttatatgttacagagaagctaaagcacctgtaatgctaccagaaagttatcatttatgatatatttcatgcacagccctaatttctcggtgtaatatttctgatactttaagtgatcgtttattttaattaccataatttctaatgcactgttttatccttagctttgtttgttattatgttttggaatgaaatttggtcagataatatgattacggtgagttctgtaacagctactggtaatatttttgtaaatcacgtgaaagcattggagcaactgtcttggaaaatgctcttt

SEQ ID NO: 3621 - DNA, 363 bp, Homo sapiens
  unsure (9): n=A,T,C or G
  unsure (169): n=A,T,C or G
  unsure (227): n=A,T,C or G
  unsure (239): n=A,T,C or G
  unsure (257): n=A,T,C or G
  unsure (261): n=A,T,C or G
  unsure (283): n=A,T,C or G
  unsure (306): n=A,T,C or G
  unsure (334): n=A,T,C or G
  unsure (351): n=A,T,C or G
cctagattntcatcaaaaatggttctagcaagttcttacaaggaataactaaataatatgtaggttctaaagaataatgtaataattaggtcaattagatttatctattttccccccttggtagtaccttttaattccgtattttggaaaaatttctcacttccaaggncgtgaaacttaatgatcttccaaagggctgaaattcaacatattcttttataaaaaanaactttcttcanccttcctgagaaaaccangatntacaatttttaacaattttatntgattttagaatatccacttacnggccagaccccatgggtcacatcttgtnatcccaaccttttggangcttgaagtggg

SEQ ID NO: 3622 - DNA, 478 bp, Homo sapiens; identical to SEQ ID NO: 46
  unsure (268): n=A,T,C or G
  unsure (292): n=A,T,C or G
  unsure (332): n=A,T,C or G
  unsure (367): n=A,T,C or G
  unsure (388): n=A,T,C or G
  unsure (392): n=A,T,C or G
  unsure (431): n=A,T,C or G
  unsure (455): n=A,T,C or G
  unsure (464): n=A,T,C or G

SEQ ID NO: 3623 - DNA, 188 bp, Homo sapiens
  unsure (32): n=A,T,C or G
  unsure (51): n=A,T,C or G
  unsure (153): n=A,T,C or G
  unsure (173): n=A,T,C or G
  unsure (176): n=A,T,C or G
cctctttcacatcaatatccattccccagctntggaaggggtgggcatcanggctggtgaatgctacacaattaaagccaagaagatttaccatagcacttaatgaacatactagccatttgtggagtctccactttgtggaggcccttcaantactaaaaggatctcagcanggntaaatgacttgt

SEQ ID NO: 3624 - DNA, 533 bp, Homo sapiens
  unsure (241): n=A,T,C or G
  unsure (532): n=A,T,C or G
attgttatccgctcacaattccacacaacatacgagccggaagcataaagtgtaaagcctggggtgcctaatgagtgagctaactcacattaattgcgttgcgctcactgcccgctttccagtcgggaaacctgtcgtgccagctgcattaatgaatcggccaacgcgcggggagaggcggtttgcgtattgggcgctcttccgcttcctcgctcactgactcgctgcgctcggtcgttcngctgcggcgagcggtatcagctcactcaaaggcggtaatacggttatccacagaatcaggggataacgcaggaaagaacatgtgagcaaaaggccagcaaaaggccaggaaccgtaaaaagccgcgttgctggcgtttttccataggctccgcccccctgacgagcatcacaaaaatcgacgctcaagtcagaggtggcgaaacccgacaggactataaagataccaggcgtttccccctgggaagctccctctgcgctcttctgtttcgaccctgcgcttaccggatccng

SEQ ID NO: 3625 - DNA, 534 bp, Homo sapiens
  unsure (524): n=A,T,C or G
  unsure (529): n=A,T,C or G
cctataccattcaaggacagtatgccattccacagccagatttgaccaagctgcaccagttggcaatgcaacagtctcattttcccatgacgcatggcaacaccggattcagtggcattgaatccagctctccagaggtgaaaggctattgggcaggtttggatgcatctgctcagactacttctcatgaactcaccattccaaacgatttgattggctgcataatcgggcgtcaaggcgccaaaatcaatgagatccgtcagatgtctggggcgcagatcaaaattgcgaacccagtggaaggatctactgataggcaggttaccatcactggatctgctgccagcattagcctggctcaatatctaatcaatgtcaggctttcctcggagacgggtggcatggggagcagctagaacaatgcagattcatccataatccctttctgctgttcaccacccccatgatccatctgtgtatttctgaacagtcagcgattccaggtttacctcggccgcgacccnctaanggcga

SEQ ID NO: 3626 - DNA, 329 bp, Homo sapiens
ccaactcgcatattgttagtgcaggaggggatgggaagattggcattcataagattcacagcaccttcactgtcaagtactcggctcatgaacaggaggtgaactgtgtggattgcaaagggggcatcattgtgagtggctccagggacaggacggccaaggtgtggcctttggcctcaggccggctggggcagtgcttacacaccatccagactgaagaccgagtctggtccattgctatcagcccattactcagctcttttgtgacagggacggcttgttgcgggcacttctcacccctgagaatctgggacctcaacagtgggcag

SEQ ID NO: 3627 - DNA, 440 bp, Homo sapiens; identical to SEQ ID NO: 300

SEQ ID NO: 3628 - DNA, 244 bp, Homo sapiens; identical to SEQ ID NO: 47
  unsure (8): n=A,T,C or G
  unsure (9): n=A,T,C or G
  unsure (12): n=A,T,C or G
  unsure (109): n=A,T,C or G
  unsure (215): n=A,T,C or G
  unsure (222): n=A,T,C or G

SEQ ID NO: 3629 - DNA, 343 bp, Homo sapiens; identical to SEQ ID NO: 48
  unsure (10): n=A,T,C or G
  unsure (25): n=A,T,C or G
  unsure (45): n=A,T,C or G
  unsure (99): n=A,T,C or G
  unsure (104): n=A,T,C or G
  unsure (218): n=A,T,C or G
  unsure (287): n=A,T,C or G
  unsure (313): n=A,T,C or G
  unsure (323): n=A,T,C or G

SEQ ID NO: 3630 - DNA, 537 bp, Homo sapiens
aaagagaaacttaaatcctgttgtattctttcaacacaagcaatgatacttctcagagtctgctcaaaagctcagctctgtggactccgtgacaaaatgtacgcgtccactgccgaccctcttggtttctgaaaccaacctttcttcctgctctcctctttaagagcaaaccccaacatgtataaggtcacagcaagtggtagccaggaaaagctgtgggacccctcatttgagtcacatccatatggcatggagaaagaaaacctctctgccagaaggaactgaactctggaagtcctaaggaaggtcaccatgctcagcagataggaaagcattgccaagggctgtccctcaagagcttagttttcttagggagaccagaaagacatcagatcctgactgccctgttttgctcaagttctgaaatgagtggcatgatgaagagctggtggagctgagggaaagagtcaaccatgtggggtggggtagtgaggaaggtgtatgaggaaacaaactgggccctgacgaaacagcggg

SEQ ID NO: 3631 - DNA, 137 bp, Homo sapiens
ccagtactttcttaatctctttaggggcagctaaaggaaattctgaatatgtgactcttagatccaaccaccatctctcaagaagaaatactactaccaccatttctgccctcaaaactcactaccgtgactatggg

SEQ ID NO: 3632 - DNA, 335 bp, Homo sapiens
caccatcttccccttattgctgtggacttcagggctctgctgctctgtcctccacagaacttgtcaatcagcttcctaccagctaagatctggtgctgtctgatatatcctccctgcggcttgtcactcatgctgtctaatggcgtgaggtgcattgagttgtattctgatgtctttgtccttttgaagccaccgagtaaggtcacacaactttgaaacgagcagggtaccatctgaggatgctggacattccttttaacaattacctaggggagaggcagtcctcagacaggactcaggtgggtgggcctcaaagaggaagggaaagggggcag

SEQ ID NO: 3633 - DNA, 175 bp, Homo sapiens
ctgaaggagcatttgcggaaaggtgacagcctcgtcaacaagccagacgagcgcggcttcacccccctcatctgggcctccgcctttggagagattgagaccgttcgcttcctgctggagtggggtgccgacccccacatcctggcaaaagagcgagagagcgccctgtcgctgg

SEQ ID NO: 3634 - DNA, 441 bp, Homo sapiens
aaaattgggacaagagtaaaactagaccagatgcgacttggctgaccaccaccaaatgtgactttgtgggacgataagtgaagagaaataaatggttctctttgaaggcacactacataaaatatttttgtgggaccacctcgaaatttccatcagacacaccaacacagtgaaatacagtacttgagaattcatgcaccaggtcagaaggttgtaaagtcaacatcgagttttaacaaacccttctgtatatgccctgataaacaagtgaacttaagagcttctagctagtaaataaataagtcagtcctgtggcaaatattacaagtttgaatcacttactagaagaatacttaattccgaaactcggttgggctgtttttatttttttatcatgtggagttgccaaacattaaaccagaagttgcatggaagtttttt

SEQ ID NO: 3635 - DNA, 326 bp, Homo sapiens
cctcaggcgcctttgtctacctgcggcagccgtactatgccacgagggtgaatgcggctgacattgagaaccgagtgttggaactgaacaagaagcaggagtccgaggatacagccaaggctggcttctgggaggagtttgagagtttgcagaagcaggaggtgaagaacttgcaccagcgtctggaagggcagcggccagagaacaagggcaagaaccgctacaagaacattctcccctttgaccacagccgagtgatcctgcagggacgggacagtaacatccccgggtccgactacatcaatgccaactacatcaagaaccag

SEQ ID NO: 3636 - DNA, 446 bp, Homo sapiens
  unsure (409): n=A,T,C or G
cctggagcagcttctcagggcagccctggcccactaaggcccagtaatgagggcagaggggtgcagagccatacctggctacacccacaggtggacacagggagcaagctacttcgctgttctctgggctcattcccccagcacaggagggcctccatgcacactcattccacaggccccactggccctgtcacactcacacggcacgcacttggcgctgcctgctgtctgccttccacctgggggtacaagaggtcacccaagggggcaggcgtgcagggcctcttggatcttctggcggcaataggagtacttctgcaggatctggcggaggtgctcctcctcctcccgctgcaggatacgtaggaagttatgtagttcaggcatgctgaaggcgtcccactgcaangggcaaaaggggagtgtacaggctgcagaagggatgg

SEQ ID NO: 3637 - DNA, 373 bp, Homo sapiens; identical to SEQ ID NO: 49
  unsure (215): n=A,T,C or G

SEQ ID NO: 3638 - DNA, 308 bp, Homo sapiens
ctggagactcaaactcctgtacagctaccttctgggaaatagtttttgacacctatttttcagattcttgtccggaatttctgctgctcttttcaaaaaagggcattaacaattctctggaaataaagcacctgttagcctgacatatgcaaaaagcagggcggcatcacccattacgagctcccccagccagcagtcagtattggattggccttgcctggctggtggcagtttgggagaaacagccaaagaggttagtttatttcaacaccaaattagaccatggcccatttccaacgggtctcttt

SEQ ID NO: 3639 - DNA, 533 bp, Homo sapiens
  unsure (533): n=A,T,C or G
aaaaaatttaatgaataaacactggggtctacagtagtatttgaaggagatctcacaaacaggtttggtttttgaaggttagaactggtggtctagagaattcatttcattccagagaaataaagagaggaatttcttgggttccttcaggaatgcatctagctttgcctcatctttgtttgaactatggatacggcagaagaaaacatgaggatttcacagatttaaggtgcaaaaagtcactgggttctctaagaagtctgggattcttctgctggaaaaataagtttgttgagaaaaaatgagttggaggaggctgttattgaagtgaagcagaattgtttttactaatctgcttattacccactctgtagtgtggaaacaaattattcatgcacaaggtcctcttactgttcctcctaaatgtctcccaaatcccttctctcccttcaatgtccaggccaccagcatgactttttgctgtgtgtagcacctccgcccaggacctaaagatgcaaatctagtcgtagctn

SEQ ID NO: 3640 - DNA, 285 bp, Homo sapiens
ccaagacccaaacacaccacagggatggcacaggatgttggggcagggagatgagcaggtggggctcaggaagaggagaggcaaaggaataagaaaggaaaaggaggaaaaagagaaaaaggcaagatggggcaggggcaagggagagatggggaggtataggagacagacagaaaaaggaaagagaaagcaaagaaaaagagaaagaactacaaggcaaaaaagcatctagaaaaatgagggagaaaagggagaaagacaccctgacacagccctttctttcag

SEQ ID NO: 3641 - DNA, 418 bp, Homo sapiens
  unsure (418): n=A,T,C or G
ctttggatccatttccatcggtccttacagccgctcgtcagactccagcagccaagatggtgaagcagatcgagagcaagactgcttttcaggaagccttggacgctgcaggtgataaacttgtagtagttgacttctcagccacgtggtgtgggccttgcaaaatgatcaagcctttctttcattccctctctgaaaagtattccaacgtgatattccttgaagtagatgtggatgactgtcaggatgttgcttcagagtgtgaagtcaaatgcatgccaacattccagttttttaagaagggacaaaaggtgggtgaattttctggagccaataaggaaaagcttgaagccaccattaatgaattagtctaatcatgttttctgaaaacataaccagccattggctatttacctcn

SEQ ID NO: 3642 - DNA, 371 bp, Homo sapiens
aaaaaagccacacttgaacaggatgaccagaatcacgatcaacaccagaagtccaccaacgctgcctttaatgatgataggcaaagaatggtacttctcatctttcaggaagacgacagtgatcttagttctgtggttctctgcattcagtccctcatatagagatttgttgaaagatatttcaccaaggatctgcagttcagttacatcttttagtaactcctcagagtgatcccaggagatctctgcagccacggtgacattttctttatctgaagcgatgacacagctcactgaatgccattcttccacatgctgaaccgaactgtacgcacaagcgcgctcctgactccaggtgcacaccgtggagg

SEQ ID NO: 3643 - DNA, 345 bp, Homo sapiens
cctggtacctagtaggttcatgatacgtatttattgaatgaatgaggcacaagataatgatgcgaaaaaaatccccaccaagaggggaacaaaaagacctaaccagataatccccaattcatgtcatggcttgaggatggaccattttattctgttaggctagagcaaatctttttcccgaaacaccagggctgacaaggcggcgtgaccagggctggaggatgccgccgtctgtgcaggcttccccctgccctgggtgcatgccccctgcggggctggggagaaggtgacacagaccttgcccttcccacaggcatgccggggagactcacgcttcacgttcag

SEQ ID NO: 3644 - DNA, 289 bp, Homo sapiens
ctgcttggacttcaaagccctccgcctagccatctcagccaggctcaggttccttctcccacccatcaggccaagcaggacttgtcaaacatacacattcaagttcctagcacacagtaggtgctaagtgggaattgattataaacttgaattcttccatcaacaaatatccacctctcctgtccagcttgcctcagatcttcaggttctctcttctctgaggcagctaagcttctacatccttcatgaagtttcctttacttctcgacagaagacagttccctttagg

SEQ ID NO: 3645 - DNA, 538 bp, Homo sapiens
  unsure (516): n=A,T,C or G
  unsure (534): n=A,T,C or G
  unsure (537): n=A,T,C or G
cctcctacacctacctctctctgggcttctatttcgaccgcgatgatgtggctctggaaggcgtgagccacttcttccgcgaactggccgaggagaagcgcgagggctacgagcgtctcctgaagatgcaaaaccagcgtggcggccgcgctctcttccaggacatcaagaagccaggtaaaagaaactggcatttttaggaaattgttctacatagacatgaaccataaaagggaaagtaacctctgggggactagcacctgtttgtattccttaaagtgaaatgatggcaatcatctttcgggactgacctgaaatgaagagaatactcattgctgatcacttgattatttgggcataatgttccaaatggaatacatggtgtgaagtagaagtgacaatttgatgtgggatcggtaaatgtgtatcctactttttttagggtatgatgtgattgctcaagctcagtcaggtactggcaaagacagccacatttgctatttccatcctgcaaanttggagattgagttcaangana

SEQ ID NO: 3646 - DNA, 283 bp, Homo sapiens
ccaagaaacaaaagcaaaatcgtcccattccccagtggattcggatgaaaactggaaataaaatcaggtacaactccaaaaggagacattggagaagaaccaagctgggtctataaggaattgcacatgagatggcacacatatttatgctgtctgaaggtcacgatcatgttaccatatcaagctgaaaatgtcaccactatctggagatttcgacgtgttttcctctctgaatctgttatgaacacgttggttggctggattcagtaataaatatgtaagg

SEQ ID NO: 3647 - DNA, 390 bp, Homo sapiens
cctcaagtctttaccccacccctttcttgttcttccaagaagcagatgcccagttgctcagcagcagcggtagagacttgaatctgcccaccagtcacaaggcgggtcacagattcctcttcctctcttctcctcgttcctctgaaccctccaccaatgtgcctcagcctgtgtgctgtgtggcaacagcattctggttcccactgccaagatctcccaccactctgctgggatctgcagtggcagggagtgggggttgtgtaaaggggaagtcatcttttgagatccagatagacatggtttgtgcacttacgtccagatgggaagcatccttcctgcaaccctaaaataatcatgcagcctctcagacggacgccatcggtcccaagg

SEQ ID NO: 3648 - DNA, 199 bp, Homo sapiens
ccaggctccatgaggtgagggtctcgccttggactccggatagggggtgctcgaccccgcgcccaggcccctccgccttcagccagcgcatcttctgtcggtactgctggacagcatcttgcacacaggcgtccatcatggcctcagtgaggaccccgtccttggaggcatatgccgtggcctgccaggacacggccag

SEQ ID NO: 3649 - DNA, 202 bp, Homo sapiens
  unsure (186): n=A,T,C or G
  unsure (187): n=A,T,C or G
ctgatgcctcactactagatgcagtgctgggaccttcctcttttggagctgtcccatgtacagtggacccaagctcaggaccttcgtggagctgcttctccaacctgagaaactcaagacccatcctcccgctgtcactttggacaatggaaaatctacattttcttttccctttttttttttttnnaaaaaaaattttccc

SEQ ID NO: 3650 - DNA, 290 bp, Homo sapiens
  unsure (273): n=A,T,C or G
  unsure (279): n=A,T,C or G
ccagagggatccccttgaggagctcgctggtgacacatttgtcgtcctccccctcctcctccacctggtcggcccaactgggcttcgaatcaaagtctccagtaggcatcgcaaaaagtattctccacgcagcccaacttgaagatgatgaggatgatgatgtcgataccaagaagcagaagaccgacgaggatgactagacagcaaaaaaggaaaagttaaactaaaaaaaaaaaggccgccgtgacctattcaccctccacttcccgtttnaaaatntaaacgtggtc

SEQ ID NO: 3651 - DNA, 519 bp, Homo sapiens
  unsure (176): n=A,T,C or G
  unsure (431): n=A,T,C or G
  unsure (476): n=A,T,C or G
  unsure (494): n=A,T,C or G
ccatgctgcgtcttctgacttgggtgatcgggacgggctcgcctcgcttacaggttctggcttcagacaccctgaccaccctgtgtgccagcagcagtggtgatgatggctgtgcctttgcagagcaggaggaggtggacgtgctgcttctgtgccttgcagtccccgtgtgccancgtgcgggaaaccgtgctccgggggctgatggaactccacatggtattgccagcacctgatactgatgagaagaatggcctgaaccttctgcggagactctgggtggtcaagtttgacaaggaggaggagatccggaagctggctgagaggctctggtcaatgatgggcctagacctgcaagccagacctctgctccttgctgattgacgacgtgatctatcatgaggcggctgtaaggcaggcaggggccgaanccctctcccaagcagtggcacgttaccagcggcaggccggcggangttatgggcaggctcatngagatttaccaggaaaagctctacc

SEQ ID NO: 3652 - DNA, 207 bp, Homo sapiens
cctaagcctcagtgtgggccaaggctcaaaggtgctggcacaggcttcccagggagaacagaaactcagcagtgaaagccgcagaggggaagaagcaggctgatgtcaacagcgtggggctctgtccctcaccccaaagagagggagtgtgccagatcccaggccaccaagcggggccagctccagcctgggcgatcgtcccagcag

SEQ ID NO: 3653 - DNA, 478 bp, Homo sapiens
  unsure (364): n=A,T,C or G
  unsure (402): n=A,T,C or G
  unsure (405): n=A,T,C or G
  unsure (421): n=A,T,C or G
  unsure (448): n=A,T,C or G
  unsure (454): n=A,T,C or G
  unsure (460): n=A,T,C or G
aaacatgcgatgtccttcagtttacatttgcagattttggtgaaatagcatcttccagtgaagtccactgcgttggtaggagggatgtctgtagagaaaaggtctatttcagtatcagccagcaaaacagccttcattcccctagagctgacacttgtttacagaatttgcaacacaggatggacacgcacctgtccttgaaactacaaatgttggtagacatggcgtcgcaggaaggatgaggtgcgggattttgaaaaaggaaacaagagtaatgctcctactattttgattcccctaggctaaaattcaagtttgcgggacctagagcttttctaagtcctaatattgggaaggaaattangttttttttttttcttgttttccccgggggcggagtanaanaatatttattggattnggaacaggggagcggggcaaacttggnttttcnttttancttttggaaaaaggggag

SEQ ID NO: 3654 - DNA, 364 bp, Homo sapiens
aaataataacagaatttgtcttttttttcctgccacagcaccaaatgccaaagagccactcatctgtagagcttgctgtgctgctggcggaatctgcaaacctgtaccctctgcaagtcttgccattaactgaagacgaccagttgttcccaaatcaattccagtcctttccagttcatcactgtccaaaaatgaactagcactcgaagcatcagtacgttcagtaacatgaccaactttcattggtcttcctgctagttcaaatccattaagttgttccaaagcctttttggcacattctgagtcagaaaatgtaataaatccatatcccttggatcgaccagtttcactgtcccatcatcag

SEQ ID NO: 3655 - DNA, 220 bp, Homo sapiens
gactccaaccagttcttccgggacgtcacggcggactttgagggccagagtcccaaatgcacccagggtgtgcgggaagcgttccgacagatcaaggacttgttcctacagggagcctacgacacggtccgctgggagttcggcacctgccacccgctgtcagacgagaaggacctgacccagctcttcatgttcgcccggaatgccttcaccgtgctgg

SEQ ID NO: 3656 - DNA, 283 bp, Homo sapiens
ccagtgtatatgtttataactagaaagaaagaaaacagagcaccaatcgtggagggagtgacctctgctatattgatgctggcattcttggctcagtatgccagattgcttttaagataacctgaacctaagggctttccagcatcggaaaaccttggaaaagactaaagcttgtttataggcagagatggactaaaggacatgggtgtaagatttggggtggaggccctttgagaatgttcactgcttacattcctgttacagcttgtgtaacctgaagagg

SEQ ID NO: 3657 - DNA, 541 bp, Homo sapiens
  unsure (424): n=A,T,C or G
ctgaaaagcatgcttgatatagtagagcatgatctcctcaaacctcacttgccctctgtcacttatttgagattaggtggcagcatacctcctggtcagaggcattccattgtttcccggtttaataatgatccatctatagacgttctgttacttaccactcacgttggtggcctgggacttaatttgacaggcgctgacacagtagtatttgtggagcatgactggaatcctatgcgagatctacaagccatggaccgggcccatcgcattgggcagaaacgtgtggttaacgtataccgattgataaccagaggaacattggaagaaaaaataatggggttgcagaaattcaagatgaacatagcgaatactgttattagccaagagaattctagtttgcagagcatggggactgatcagnttcttgatctgtttactcttgataaggatggcaaaagcagaaaaagctgacacctttacttctgggaaagcaagtattgaaatcaattttgaaacctgatgatctttggatcaagac

SEQ ID NO: 3658 - DNA, 248 bp, Homo sapiens
ctgttgtggactcttcttaaggagcttcaggctccacagtggtttgtgttcctctctgctcgtgtgtctgacatggagtgaccaagtcccacacactgagtcccctgtgtcccggggctgctggcgcctgggtccttggagaggctgtggggttgggagctagaggtcctcatgggtagagctcaggtccaccctctgagcctgtccaaacaccaggaaggtgcacagccccaggttgctgatgatgg

SEQ ID NO: 3659 - DNA, 165 bp, Homo sapiens
aaatgtcaaaggttttgaggtgtccagaaccacctccagaaaggggtagggtagaatgccacctgttgcctggtgtgtgctaacctggagcaggtaggggtaagactcaatagtcatcttttaccaaatgggtttgccccaggttaataagaggggtctagtagg

SEQ ID NO: 3660 - DNA, 301 bp, Homo sapiens
ctcctcttcctcctcctcctccacctccggcttttgggggatcactgtcctctctcggcagcagaatgagccggcaggtggtccgctccagcaagttccgccacgtgtttggacagccggccaaggccgaccagtgctatgaagatgtgcgcgtctcacagaccacctgggacagtggcttctgtgctgtcaaccctaagtttgtggccctgatctgtgaggccagcgggggaggggccttcctggtgctgcccctgggcaagactggacgtgtggacaagaatgcgcccacggtctgtgg

SEQ ID NO: 3661 - DNA, 256 bp, Homo sapiens
aaaatatacatgactaataaagtgaacattcagaggagccactgctcagcatgttccatgtcggccacttgtggacactgatctcatccaaagaggacagaagtttcaaacatctgagcagtttaagttaaaaataggatgaaggggaaataagagaacaggataagtgtcctcccaagacagcagtggctgatgcccacatggcgcaaacaggctgacttcaatgagtgttcacgggatgtgtgataaagcccag

SEQ ID NO: 3662 - DNA, 148 bp, Homo sapiens
aaatacttatgaaagctttcagacaaaaataaactttcacgttaccatgatgaaactggggttgtttctgttcctccaactgaaagatgggacgctgagctcggggactcggcccccgtggtgcacctcgcaggcgctgtgcgtgtgg

SEQ ID NO: 3663 - DNA, 336 bp, Homo sapiens
ctgacggctatcctgggcacagtggggcgggctgtctcaggcataaagggatggctatcctgggcacagcggggcgggttgtcctggaggcgggctgcaccatcctcatgggggccctccagtggggctttcctgtctcctgagtgtacacaggccccagtgaaggagcccggtgtggagccccataccacagcatgtttcagtgtctgctatattgtgagcctaagccacccaccacagggcttgaccctgcgaccgtcctctcatttctagaacgggaaagcacagtgcttctccttgagggttaaaaggatgctgctgggtgtcagggactta

SEQ ID NO: 3664 - DNA, 361 bp, Homo sapiens
ccaccatgcctatttcttgacttgtgtcttcaggatcaaatgttttacatgtcaggaaagtcactatccgtcctttccagggcaaattatccgacccaccttgacagaacaacttcccacacatggtatcactgaggaaaaagccaaaatgtattgcaggattcaaattgcagttttacataaatgctctaggactatggatatttaactgatggtatttttccctgtagccgagactcttagttgtactttacactcattttcccttatttctcagtaataggatgcctgaacgttagcacaatatattattgctcaaataaacagtattacctagatccctgtacacctaatttttcca

SEQ ID NO: 3665 - DNA, 260 bp, Homo sapiens
ccactcctggaaacccactgatagatgagtttcccccattcttctggcctccgccacatgatcaggaagctggacttgctcttatccaaccactcgaggttccctttcttcctcagttcctctaatacaatctggatcgactccacaggaagctttcgctgtagcttgacgttgttgaagagcgggctctcctgagcttccatcaccgtcatgctggactgtttgtgcaggcggcagaaggacaggaccagcgagcacca

SEQ ID NO: 3666 - DNA, 338 bp, Homo sapiens
ctgcagagccagatgatccacaggatgctgtagtagcaaatcagtacaaacaaaatcccgaaatgttcaaacagacagctcgactttgggcacatgtgtatgctggagcaccagtttctagtccagaatacaccaaaaaaatagaaaacctatgtgctatgggctttgataggaatgcagtaatagtggccttgtcttcaaaatcatgggatgtagagactgcaacagaattgcttctgagtaactgaggcatagagagctgctgatatagtcaagcttgcctcttcttgaggagcaccaacatctgttatttttaggattctgcatagattcctttt

SEQ ID NO: 3667 - DNA, 296 bp, Homo sapiens
  unsure (1): n=A,T,C or G
ncaccctaggcccacttttccacatggcaacaggcgtggagctgggggctactgcccctactgtgtaggcggtgggctccccatagtctcctctgccctgctgccgtgtacctggctcccttcactcatccacatcaccggccctaggccagggtctgaaccacacacacagaatggctgcagtaagcaggaacgggaagagctttcacattcagaacaagaaggggttttttagttactcaaaagcaatctgagcatgttccagcacttcaaccttactctttcagagctttggg

SEQ ID NO: 3668 - DNA, 373 bp, Homo sapiens
ctggcttccagagcaccataataaatagtttcaaagatctgcttattcagtaactgggcttctgcactctcaaaagggtatctcatcaggataaaagcatctgccagaccttgtaccccaattccaatggggcgatggcgtttatttgataggcatgcctctggtgcaggatagtagtttatatcaataattttattcaagtttcggacaacgactttagtgacttcagccaacttcttaaagtcgtatgtgtgttctgatgtgacatacatattcagggccagggaagccaaattacaaacagcaacctcatctttgctggtgtactccactatttctgtgcacaggttgctgcatttgatggttcccaggt

SEQ ID NO: 3669 - DNA, 396 bp, Homo sapiens; identical to SEQ ID NO: 301
  unsure (256): n=A,T,C or G

SEQ ID NO: 3670 - DNA, 418 bp, Homo sapiens
  unsure (359): n=A,T,C or G
  unsure (417): n=A,T,C or G
ccaccagcaagcacgacattaatccttggatctggcagcaacaccaaaaaagagcgtttgctcttcacaggcactccctaaaacgaatctgctcattcgcctggaactcactgagactgcttcacagcatgaccaagcatcgaccacctctcaccaccccaggcgtcccaggtccaacccagcgccctcttctctgcctcctgtctccctgctccttggcccaggacacctgcagccagctaccatgatcctattaacacccaagtcagagcacggcactcacctgctgacaaccctccaacagctcccatctgactctggatagaagccgaagtctcgccatgaccccccaactctgnggcctcactcctccaggtctctccacctggcctccctgccatatctgaagtattagang

SEQ ID NO: 3671 - DNA, 455 bp, Homo sapiens
  unsure (322): n=A,T,C or G
tggggaggaaagagcttccagggggcgaacgcagcacagaggaagaggcctgctccacttgtctgggaacctgggcaggaggcacagaggaagccaaggcctggagctgcaggtcccccggcatctctctctgtcccggcagcccaggatggcctggtgcccccacctgctgcagcaggagccccaaggagtgctagctgagggtggttgctggggtggtcctcatggacagtgaggtgtgcaagggtgcactgagggtggtgggaggagatcacctgggttccaggccatccttgctgagcatctttgagcctgccttccngtgggagcagaaaaggccagaccctgctgagttagaggctgctgggatccactgtttccacacagcgggaagctgctgggaacaggtggcagagaagtgccatgtttgcccttgagccttgcacttctttcag

SEQ ID NO: 3672 - DNA, 402 bp, Homo sapiens
aaaaatgtatatatataaaataaagtgacagattcagagtcactgttcattgtgtgtttgggggctgcacaaagacacctagccaaagaagcaagtgaaagcctgcattctgctcaccatgccatacatcctggcatagggctgtatcctcccaaaggggattcctttgtctaattcataccaggccactgtattgactagagaaggccatggatgggtttctcactcttagaagggaaagaggaggaatggctacagcctccccaagccatagatgggactgcctcccactatccccagacacaaatggtaaattggaaaacctgtatccagacatttcttcagccacttcattggcaccaagcgtctctcaaaatgtcttctgttccttaacctaccagg

SEQ ID NO: 3673 - DNA, 375 bp, Homo sapiens; identical to SEQ ID NO: 50

SEQ ID NO: 3674 - DNA, 150 bp, Homo sapiens
aaataaaataattttatttcataaaaagaaataaactagaaagaacaatgcccttaaaaaaaatgtttgcttcactaaaaccatgttgtgaaggaaattcatcaaaggctgttaccttattcaacacgcgtagaaattgggttctgattt

SEQ ID NO: 3675 - DNA, 548 bp, Homo sapiens; identical to SEQ ID NO: 302
  unsure (493): n=A,T,C or G
  unsure (512): n=A,T,C or G
  unsure (545): n=A,T,C or G

SEQ ID NO: 3676 - DNA, 547 bp, Homo sapiens
  unsure (547): n=A,T,C or G
ccaaagtgatggagctcctgcccacgcacgccttctccacactgttccctgttcttcaggacaatttagaagtttatttgggattacaacagtttatagtcacttcagggtcaggacacaggttgaacatcacggcggagaacgactgccggcggctgcactgctccctgagagacttgagctccctgctgcaggccgtgggccgcctggccgagtactttatcggggatgtgtttgctgcacggttcaatgatgccctcacagtcgtggaaaggttggtcaaagtcactctgtacggatctcagataaaattgtacaacattgaaactgctgtgccatcagtattgaaacctgacctcattgatgtgcatgctcagtccctggctgcgctgcaggcttactctcactggttagcacagtattgcagtgaagttcaccggcagaacacgcagcagttcgtgacactcatctctactaccatggatgcaatcacacctctaatcagcaccaaggtccaagacaactgctgctatctgcgtgccacttn

SEQ ID NO: 3677 - DNA, 279 bp, Homo sapiens
ccacacccagatcatactgatatctacagcatagtcctggctacaggggagctcaactctaactcgtgaagcgggcctggtttagaaagtaacaatgaggtagtaactcatgatagtgctagctgttatcaaaaattaacaactttaggtatttttgttttgggtttttgcggtttaggtacatccaaaatttcttcatagtctgcactcattccctttgcccagcgaccaactgtgaccattcgctctgaattctgactttcagggcaatctttcttt

SEQ ID NO: 3678 - DNA, 232 bp, Homo sapiens; identical to SEQ ID NO: 303

SEQ ID NO: 3679 - DNA, 492 bp, Homo sapiens
  unsure (471): n=A,T,C or G
  unsure (487): n=A,T,C or G
ctgtttgcttttctaggcaaaaagcaagcctgacctggccctggcacccccattatgtttgcagaggggtgaaaagggacttgacagatgtgggcggaggggagggagagcagtgcccttcctggacacctggaggaaccgcacaccccgaactctcgccctttgcattaggcgtggccttgccattgcacctgccaataaaatgtgggcagaaatgttaagacccagggcatgattccgcaggttccggctccctcgtggcatctgggacagcatgctggggacagcttccatcagagcacctcacaacacccacactggacataaaatgtgagcaagaagtaaatatctttttttttctgtttttgagatggagtctcggtggctcacccttggctcactggcaacttctgcctctgggttcaagcaattctcctgcctcagcctccccagtagcttggattacagganacctgcccggcgggcngtcaa

SEQ ID NO: 3680 - DNA, 373 bp, Homo sapiens
ctggggtggcaaacctagtcccttttcaaagctggatcccaaggtgaaagcagccttcacaagagcttacaataaggaagcccaccttactccatactcacttcaagctataaaggcatctagacacagcacaagcccatccctggattcggaatacaatgaagaattaaatgaagatgactctcaatctgatgagaaagaccaagatgctatagaaactgatgccatgatcaagaaaaagacaaaatcttcaaagccttcaaaaccagaaaaagataaggagcccagaaaaggaaaaggaaaaagttcgaagaaatgaaaccatttttcactagcgacagccactttttactctccctcctgaccagtccag

SEQ ID NO: 3681 - DNA, 345 bp, Homo sapiens
aaaattgaacaattttacttattcaaatgaatctgtgaatataaccaaatagttgaaatcccttctcaattaaattgcaaataataatatcacaaagtatcagttctcctttaacaaaagccattctcaagatattaaaggaagaataatcatatataccttacctatcccaagcagtccgccattctgtaatgttaatactcgtcttatattactcaccacaatttaatgacccaataaatgttaagtgttatttgtacttaaaaggacagtaaaatggcatttagttaaatatgataagattagccaagaaaaaggctgttgcaaaaaatgtacagtaatttt

SEQ ID NO: 3682 - DNA, 266 bp, Homo sapiens
ccagaggaacagaccagcttttgcacaatgaagcgcaagggaacaagtggtttgcctggtgtcctacctgtcctgaacctggtcctgtgggccattgaaaagttagatctgtgatctctggggtttttgtggctttgttcaatgcttccactctagggcaggcagagcagtctatactctcccaagcctgcttgacctccaagtagagctgatacagagatctgtgaatattgtgatagaaattctttggtattcatacacttcag

SEQ ID NO: 3683 - DNA, 158 bp, Homo sapiens
aaaaaaacttctacaaaactctagtatgggcttctgactttttccagggtgtagaatttgactcaaaagtaaaaataattttgttttagtatattctactttcattaatgtttttttgttctgaaagtgatattatattgtacatgtaaaattaattt

SEQ ID NO: 3684 - DNA, 412 bp, Homo sapiens
cctgtgagcttccccatggctgggggttatggagtgatgggtgacgatggttctattgattatactgttcacgaagcctggaatgaagccaccaatgtttacttgatagttatccttgttagcttcggtctcttcatgtatgccaaaaggaacaaaaggagaattatgaggatattcagtgtgccacctacagaggaaactttgtcagagcccaacttttatgacacgataagcaagattcgtttaagacaacaactggaaatgtattccatttcaagaaagtacgactatcagcagccacaaaaccaagctgacagtgtgcaactctcattggaatgaaacctcagaaaaagagcaacagaagtaattgtttcaagctcctgattctttctactaaatcatgaacagcttt

SEQ ID NO: 3685 - DNA, 316 bp, Homo sapiens
ccaccttaggagtctgacctctcacttttccagcacgggtcagggaaccatggactttacctccaagcatgcggcctgctacttccagggtagtcagggcctccaccccgcactggcccagagtggcctcatcctccaggggcgcgcctgccaggagcacgacttgatcttccggggcaatgccctccagtgaggctacatgagccttgatctgggcgaccgtttcctggccggtcacctcgaaggtgtgtagctcctgggcgcggacaaagagctgcatattggcgactgaacggcggtcccagctaccgcgaag

SEQ ID NO: 3686 - DNA, 136 bp, Homo sapiens
  unsure (16): n=A,T,C or G
  unsure (110): n=A,T,C or G
  unsure (126): n=A,T,C or G
ctttccccaccaaaanaagatgcactgacattttgaaagaaaattagtttgacatcagatttttcaacagcaatgccttatgtcagaacaaaatggagttacatattcangccaagtgtggtggcncacaccttgt

SEQ ID NO: 3687 - DNA, 312 bp, Homo sapiens
aaaatatattttgtgcaaaataccttactatgctataaaccaccattaaaaaccagtgttttgatttggtacttaaatatttttggagtgaaaattatcactaaagtaacatgactccaacaaaagtatggtttcattataaaagagtactatattgatttgcccaagttttgtaacttagtaaaggtattaacttccttggatttgtactttgtgatttagtatgctgtatcgtgggctggttatgttaactgaaaaaaataaagtcattacctgagttttgcagtgctctaacttaaacagaaagaacag

SEQ ID NO: 3688 - DNA, 290 bp, Homo sapiens
  unsure (1): n=A,T,C or G
  unsure (8): n=A,T,C or G
  unsure (241): n=A,T,C or G
ngttcgangtgccgtgtggacagccctgtcggggacagtgaggagactcagtgcctgtcctgggggacagctctgcctggaggctggggtctctttgaccttcctgagacatcctgatgcctccaccctacttctgtgtcccggcaggagtgagagcgcagagagccctgagacagcccctactggagcacctcctggggagcagccagatgtcatccccgcccagggcgacctgctgggngacctcctcaacctggacctcggccccccagtgagcggcccacccctgg

SEQ ID NO: 3689 - DNA, 418 bp, Homo sapiens
  unsure (323): n=A,T,C or G
  unsure (362): n=A,T,C or G
  unsure (402): n=A,T,C or G
ccaggcaagtggcagagccagacctgggtcttcacacactttcctcttcttgactgtactggcgcaggtgcttaagatttgggggaaggtgggtgggtatctggcctcttctttgggactcaaattgtgatatctctctgagaacccacaggctccctctttagggctgaggtgagaagttctgaaagtcaagcagacacatccaggcatttgggcaagaaacttcttccttccaaatcaaaggtgaaatgaaaacgattatgagcccacgggggatgaacagaggtgaatggtgggctagtctcgaggatggcctaattcanggtttcctaagtgtcagccattcatggaaccacccctgnggatttttgctacctctctggatctgtgcccacttttacngttatgttttttcttt

SEQ ID NO: 3690 - DNA, 184 bp, Homo sapiens
ctgattgaaggagaaaatatggtccttatttgctcagtagcccagggttcagggactgtcacattctcctggcacaaagaaggaagagtaagaagcctgggtagaaagacccagcgttccctgttggcagagctgcatgttctcaccgtgaaggagagtgatgcagggagatactactgtgcag

SEQ ID NO: 3691 - DNA, 382 bp, Homo sapiens
  unsure (348): n=A,T,C or G
  unsure (381): n=A,T,C or G
ctgaagaaaaaagctcaaatgatctagtcactttcgatactgtacttcagatgcgaaatggatattcgagtggaaacctgacaaagtgcgcctgctttgatgtgaactggtatagacaatgaccagtggctgggtcaagtgggatgtctctctgtgagcacaaaggcttatcaaatgacactaaagataagttcaacaaccatcacattggaagggagaaggcgaacatttcatgtttggcgggcatgtgagtgcacaagatggaaagagcgattggagcatcctggtataattacccccattgtgctcttaatggaaatttcaaaggacgggagtattcttgttggntggtgtccaggtttgtggcacttgttccaagang

SEQ ID NO: 3692 - DNA, 408 bp, Homo sapiens
  unsure (221): n=A,T,C or G
ctggtggggctgccagggtacacgcccctgaggatgccattcttgatgcggatcaggcgtttcttccaggagttgatcccagacaggtagacgtgtttcagggcctcccgactgagccggaagtcgaccccgtctggggtcaccgtgaactggaagccacggcctggtgagcttccgccatcctgggggttggtcggcaccttccgcggtgggaattgcanggcgcggctgggtttctgtgcggtgaaggttgctcaaaggtctgggagcctggggggccccagagtctcgtgaggatggtggcattagagtcaaactcaggaacaggccggtctcctgaacctcagtttcacttgggggctcagcccaatcgccagggccttctgctcttgttcctccctccaaggt

SEQ ID NO: 3693 - DNA, 160 bp, Homo sapiens
aaattatctcaaaagtgctttgttgtaaaaataaatttgtgactaaacaaagactttcatattaaatgggttcaattgaactcatttcttattttccaagtgtcaatgtgaaaagaaaataaatgctagcactactgactagtcagtatatctccacttt

SEQ ID NO: 3694 - DNA, 373 bp, Homo sapiens
  unsure (361): n=A,T,C or G
ctgtttggagaaattgccgacgtagtacttcttgaagtcccacatcatcaggattcgggcagggatgcacgactctgcatatgagtggcagcagtcacagaaatacttccctaggtattcgcagtaccggagccgcttcacaaacttaggctctactggagttccacagccggcacagaaaaaattctgggctgccaccacaaggtccctcttgagtggtggatgaatattaaatatgatttgaaatctaggaggagcccagtcttcagtccctctgatcctagacttaaatttaatttcctgtactacattcatactggattcaaagtcttttcggacacgctcttcatttacgactatngagccagacctc

SEQ ID NO: 3695 - DNA, 184 bp, Homo sapiens
aaaatgattacacttcaaataaaggtactaaaatcacgccccccaaatttgtaagcgcttttgttgttattgggtactcactgtgaatagaagtaaatgtacttgacctgtatgagaataaacattttatcaagtacagcaaaaaaaacggaattgattgtgaaagccatggggatgggacttt

SEQ ID NO: 3696 - DNA, 347 bp, Homo sapiens; identical to SEQ ID NO: 51
  unsure (247): n=A,T,C or G

SEQ ID NO: 3697 - DNA, 143 bp, Homo sapiens
  unsure (7): n=A,T,C or G
  unsure (19): n=A,T,C or G
  unsure (100): n=A,T,C or G
ctgctantctgcaacctanttttccctctcacctttaactgacgttttgtcctcaataattacacaaggacctagagtacctataggacaaaaagtatanaataaaaatatgcctttagtcatttggtttttcttaaaaaggt

SEQ ID NO: 3698 - DNA, 311 bp, Homo sapiens
  unsure (151): n=A,T,C or G
  unsure (167): n=A,T,C or G
ctgctgctgccgttgaccatcctgaactctgggggagaggaggagtcagcctggcttgcagacggccgacccagaacatggctgtctgtggtcatttccttccttcacacccagtgggatgggcacagagcccaaccttggtcttaccaantcccccaccctccttntgcatcagcatccaggctcacacagctctccagaagaatttgatcttagctgcagccttggggtacatcactctacacccagtctcttccctgcgcttctttcaaccaacagaagcaaacatcaaaagcacccacacctactgg

SEQ ID NO: 3699 - DNA, 219 bp, Homo sapiens
  unsure (157): n=A,T,C or G
ccaacagagcacttatggcaaggcatctcgagggggtggcaatcaccaaaacaattaccagccatactaaaggagaacattggagaaaacaggaggagatgttaaagtaacccatcttgcaggacgacattgaagattggtcttcttgttgatctangatgattattttgtaaaagactttctagtgtacaagacaccattgtgtccaactgtatatag

SEQ ID NO: 3700 - DNA, 168 bp, Homo sapiens
aaagaaacaccaccaaaaggggattagcttagtccatcccttcctcagtcatctgcttcccaccttcctccaaatgttatcccagaacattctggaggcagggagaaggggaggcagctaatcagagtctgagagcacgatgatctctttctggatcgcattgtgtgg

SEQ ID NO: 3701 - DNA, 313 bp, Homo sapiens
  unsure (313): n=A,T,C or G
gatgtgatggtgtccaccttccacaagtactcgggcaaagagggtgacaagttcaagctcaacaagtcagagctaaaggagctgctgacccgggagctgcccagcttcttggggaaaaggacagatgaagctgctttccagaaagctgatgaacaacttggacagcaacagggacaacgaggtggacttccaagagtactgtgtcttcctgtcctgcatcgccatgatgtgtaacgaattctttgaaggcttcccagataagcagcccaggaagaaatgaaaactcctctgatgtggttggggggtctgccan

SEQ ID NO: 3702 - DNA, 385 bp, Homo sapiens
  unsure (306): n=A,T,C or G
  unsure (324): n=A,T,C or G
  unsure (348): n=A,T,C or G
  unsure (365): n=A,T,C or G
  unsure (366): n=A,T,C or G
  unsure (369): n=A,T,C or G
aaaatacattcaaataaaaagatataagttacttgcagtgaatgcacacatacaacagcagggagagctgagaacataattaaccaatactcttgtgttcagagaataaatagtctgaaaccgtgggactgaggcttgttccttaggggcttttctcaaagtatccttggtggacataaggttaccctcactcaatggaaggacacatcttctgctgccggggaggacacagcatgacagtttcatttatatgggatgttttccttccataaatgtctggaacacggtgtcacaggacaccatggngtacagtgcagccctcanattagaataaataagtcacatggntggactggaatgccacnnacncactattgacttgaaa

SEQ ID NO: 3703 - DNA, 141 bp, Homo sapiens
  unsure (1): n=A,T,C or G
ncgaggtaaaagatactttggattcaattaagaagagtttttaagaaaaaagaggaaggttctggcatggggagctctgcaacccactgctgggtgccagaagcgagctgtggagcggaagatgaagatggcaccatgtgt

SEQ ID NO: 3704 - DNA, 230 bp, Homo sapiens
  unsure (172): n=A,T,C or G
  unsure (177): n=A,T,C or G
ccaatcaaggcttgctggagtgtctcccagccaatcagggccttgaggaggatgtatcctccagccaatcagggcctggggaatctgttggcgaatcagggatttgggagtctatgtggttaatcaggggtgtctttcttgtgcagtcaagggtctgcgcacagtcaatcanggtanagggggtatttctgagtcaatctgaggctaaggacatgtcctttcccatgagg

SEQ ID NO: 3705 - DNA, 286 bp, Homo sapiens
  unsure (195): n=A,T,C or G
ctggatgatggtcttcagcctctttctgtcccttctgtccctcacagcactagtatttcatgttgcacacccactcagctccgtgaacttgtgagaacacagccgattcacctgagcaggacctctgaaaccctggaccagtggtctcacatgggggctacgcctgcatgtaaacacgcctgcaaacgctgcctnccggtaaacacgcctgcaaacgctgcctgcccgtaaacacgcctgcaaacgctgcctgcccacacaggttcgcgtgcagctcaaggaaagg

SEQ ID NO: 3706 - DNA, 239 bp, Homo sapiens
  unsure (5): n=A,T,C or G
  unsure (215): n=A,T,C or G
  unsure (224): n=A,T,C or G
ctggnacacggcagggtcagggttctggatatcaggtaaaacagtcaattgtgtcccagatccaaaggtcagttgccttgcagaaccagaagactccatgtcacccacgaggcagtagtacacagcagtgtcgctcagggaaacccggggcaggctcagagtgctggactttctgtcggcagggataaacagggaggccacttcgtttgtaactnttgtcttgnatccttgaataataa

SEQ ID NO: 3707 - DNA, 208 bp, Homo sapiens
  unsure (3): n=A,T,C or G
aantttgaacatgtactgtgacacttttgacacttttctgaagatttatcccgtttttctagcctttaaggtaatgctgaaggaatacatatactttaatatcaccttttttagaaacttaaaattgaatcaaaataatcagttttaaggaagctttttctcctccttccttttttgtagaggaaagaacacttgataaaaattagat

SEQ ID NO: 3708 - DNA, 354 bp, Homo sapiens
gttggatgcactttatgaaatagcaatggcatggaacttagtaaaaccagttaccattagcagagcatggaagaagattctccctatggtagaggagaaagagagcctggactttgatgttgaagatatttctgtggctactgtggctgccattttacaacacaccaaaggattggaaaatgtgactactgagaaccttgaaaaatggcttgaagtagacagtactgaaccaggctatgaaggtgtaaactgatagcgaaatcatcagaagagcccaaggcccgggcagatgaatccagtgaaaatgaggaggaggaaatagaactaattccagacaaacatattaatctgcaa

SEQ ID NO: 3709 - DNA, 242 bp, Homo sapiens
ctgagacccctgccctgtgagcccttctatccccacaagttgtcaggacaatcccttgtggttagggggaggggcggggagagagctctatttctcagccagtgccgagctaccctccctcctgggctgtgatttcatttgtgcaatgggggtgtgcaggagtcactagcttctcggggcctgtcccgcacatacacgcacttatgcgacatccagacatttgctacattttccaagggctt

SEQ ID NO: 3710 - DNA, 444 bp, Homo sapiens
  unsure (371): n=A,T,C or G
  unsure (404): n=A,T,C or G
  unsure (411): n=A,T,C or G
ctgagaagatccttgaggacaattttggcctattcagaagaggacacagccatgcagatgactccttttcccacccaggtggaggaacttctctgtaatctgaatagcatcttatatgacacagtgaaaatgagggaatttcaggaagatcctgagatgcttatggatctcatgtacagaattgccaagagttaccaggcatctcctgatctgcggctgacctggctccagaacatggcagagaacacaccaagaagaagtgctacacggaggctgccatgtgcctggtgcacgccgctgcgttagtggctgagtatctgagcatgctggaggaccacagctacctgcccgtgggcagtgtcagcttccanaatatttcttccaatgtgctggaggagtcttgnggtcttntgaggacaccctgtccaccttgccccggggcgg

SEQ ID NO: 3711 - DNA, 227 bp, Homo sapiens
  unsure (213): n=A,T,C or G
ccaagggttgggagtgtcccaaagttcaagtcctgggtttctgggtctttggggttggggtcgcagtccccaagttcagaatcaggagtcgtggggtcaaggtgataacatccagattcctagatgactggggtcaaggctggggtcaagggtcccaggttcctggagtcaaggtcattaggcttgaaggtcactgaggctggcagtcatgangaccttggtcacta

SEQ ID NO: 3712 - DNA, 167 bp, Homo sapiens
ccaggctcaggccctggggtgaaaggagacaggtgctgccaagacctggagaaggacaaaagaagacagaatcaagggtgaaggaaaggaccaggcagtggcgaggggtggtgctgctggagcaggtctaagtgggaagcctagtggtcagggatggcccccagagg

SEQ ID NO: 3713 - DNA, 236 bp, Homo sapiens
ctgttgatgaactcatgaaaaaaattatccttgaattcaaagaaaaatgtaaagacaagaagaatcctttaggaaactgtggagatataaatttagtacgactgggtccagaaaagtctattaatagtgaggttctaaagttcagtttggacagccaagtaaaccacagaatgaaaaaagagttaccttctcatgttcaggcgatgcataaaagaaaggaatttctagattatcag

SEQ ID NO: 3714 - DNA, 323 bp, Homo sapiens
ctggctgataagaagggcctccatgttgtggaaatccgggaggaatgtggccctctgcccattgtggttgcgtccccccgggggcccttgaggaaggatccagagccagaagatgaggttccagacgtcaaactgactgggaagatgtgaagactgcacagggaatgaagcgctctgtgtggtctaatttgaagagagccgccacgtaacctctctggccttgtgcaccagttcctgtctgcctgcacctaggagagactcagcccctcacagcttgggatgttaccttgccttttgtttgttttgagggaagtttaatcttt

SEQ ID NO: 3715 - DNA, 251 bp, Homo sapiens
  unsure (62): n=A,T,C or G
  unsure (69): n=A,T,C or G
  unsure (155): n=A,T,C or G
  unsure (168): n=A,T,C or G
  unsure (169): n=A,T,C or G
  unsure (208): n=A,T,C or G
  unsure (216): n=A,T,C or G
  unsure (225): n=A,T,C or G
cctggaaggtgtgcaggagtttggtagaggagtgatctaggtgaggggaatggaaggtgcanagaccanagctgagagggcctgaggcactttccagagcgtggggaggggcctccaccaaggcgagaagggctgcaggtccagatcaccagcgnttgtagacagtanngtggcgcttggagtttacctgagggccagtggagctccngggacctntccggacgnggacctgtggtgactgggaaggacct

SEQ ID NO: 3716 - DNA, 199 bp, Homo sapiens
  unsure (183): n=A,T,C or G
ccagagggaaggcccaagagacgtctctgaagccaccgttcctgattattcagaggcagggtccacagtgagtgactcggtggggctggaggaacccagggtgacccagagggggctctggagcgggtccctaacatctgaaaaagtcctcccagggaactcggagctggaacttccaggcancttcgggggtgacatt

SEQ ID NO: 3717 - DNA, 176 bp, Homo sapiens
  unsure (4): n=A,T,C or G
cttnggtaatggaaatctcgcgagggttaatcttctcttgagaatggcagtcaagaaatgagatggttcacttgactactgagcagttacaccaaggagagcgtgaaggagatgattgagccagagaagaaacgggttgtgatggcaatggtgtgggggaaatgaacttgagcttt

SEQ ID NO: 3718 - DNA, 187 bp, Homo sapiens
  unsure (92): n=A,T,C or G
  unsure (139): n=A,T,C or G
  unsure (160): n=A,T,C or G
aaggtgtgcaggagtttggtagaggagtgatctaggtgaggggaatggaaggtgcagagaccagagctgagagggcctgaggcactttccanagcgtggggaggggcctccaccaaggcgagaagggctgcaggtccanatcaccagcgtttgtagacangtagtgtggcgcttggagtttacctga

SEQ ID NO: 3719 - DNA, 181 bp, Homo sapiens
aaaagcctgagggaacctggaggggggctcccactctctaccttctttcctccgagtttgtgactccgagatggacaaagtgtgtgctgtttttggaggctcccgagcattggcagagctgtggcccaattaatggcccggaaaggctaccgactgggcggtcattgccacaagcctgtaa

SEQ ID NO: 3720 - DNA, 236 bp, Homo sapiens
  unsure (209): n=A,T,C or G
  unsure (213): n=A,T,C or G
  unsure (224): n=A,T,C or G
aaatttaacagtgtcctcttgaaaaaccttaatcacagttaagtgatggcatgggcaatgaattttaatcatatttaggaataaaatactagatattagtgtataacaattagatatatgttaattgagcactacaaagcctgaaagcttaacaaagtggggctataactagtaattttttggtaaaaatatagtgatctttttctacngggnattattattangggacaaattat

SEQ ID NO: 3721 - DNA, 333 bp, Homo sapiens
  unsure (1): n=A,T,C or G
ncgaggtcctcaggcgcctttgtctacctgcggcagccgtactatgccacgagggtgaatgcggctgacattgagaaccgagtgttggaactgaacaagaagcaggagtccgaggatacagccaaggctggcttctgggaggagtttgagagtttgcagaagcaggaggtgaagaacttgcaccagcgtctggaagggcagcggccagagaacaagggcaagaaccgctacaagaacattctcccctttgaccacagccgagtgatcctgcagggacgggacagtaacatccccgggtccgactacatcaatgccaactacatcaagaaccag

SEQ ID NO: 3722 - DNA, 168 bp, Homo sapiens
aggtcctcctgcagtgttccgcacagcaaaccgcacgctatggctgacagccgggatcccgccagcgaccagatgcagcactggaaggagcagcgggccgcgcagaaagctgatgtcctgaccactggagctggaacccaagtaggagacaaacttaatgttattaca

SEQ ID NO: 3723 - DNA, 377 bp, Homo sapiens
  unsure (370): n=A,T,C or G
cgccaacatgggccgcgttcgcaccaaaaccgtgaagaaggcggcccgggtcatcatagaaaagtactacacgcgcctgggcaacgacttccacacgaacaagcgcgtgtgcgaggagatcgccattatccccagcaaaaagctccgcaacaagatagcaggttatgtcacgcatctgatgaagcgaattcagagaggcccagtaagaggtatctccatcaagctgcaggaggaggagagagaaaggagagacaattatgttcctgaggtctcagccttggatcaggagattattgaagtagatcctgacactaaggaaatgctgaagcttttggacttcggcagtctgtccaaccttcaggtcactcancctacaa

SEQ ID NO: 3724 - DNA, 125 bp, Homo sapiens
  unsure (1): n=A,T,C or G
  unsure (11): n=A,T,C or G
  unsure (39): n=A,T,C or G
ngaggtaaatnaacacattccaggcaatgtaaaacagtnaaaagacaaactcaaatccctgagaatggctgggaagggaaaatggtggtaaaaattccaaatgagtgaaacttacaaagggcagt

SEQ ID NO: 3725 - DNA, 190 bp, Homo sapiens
  unsure (169): n=A,T,C or G
cctgggacctggcctgcacccagtctgtggcccagggaggcatggcaccctagcagcaaagcctgggcaaaggctgagccataccagacacagtagcccaggctacacagggcagagctgcgagtgctacctagccctggggccaaggcggggcaccacaatgctgaangagggcactgcccacagccag

SEQ ID NO: 3726 - DNA, 243 bp, Homo sapiens
  unsure (184): n=A,T,C or G
  unsure (225): n=A,T,C or G
  unsure (242): n=A,T,C or G
aaatgaacacattccagacaatgtaagacagtcaaaagacaaactcaaatccctgagaatggctgggaagggaagatggtggtaaaaattccaaatgagtgaaacttacaaagggcagtctcccctgcctgggctctgtcctagacagaagtgacagtgatgactttggtgatgttctccccantgcaagagaactgcattcagaattagacaacctcagtgacnagtatctctcctgcctnc

SEQ ID NO: 3727 - DNA, 321 bp, Homo sapiens
  unsure (284): n=A,T,C or G
  unsure (297): n=A,T,C or G
  unsure (313): n=A,T,C or G
cctgcttgatccataggctcacatttgatcccaactggcggctgcttcttggcattaactttggattcccaaccagtaaatcttagcaagatctgagtttctccaggtatgatattattttgtttgaccatccttatcttcaagggctgtgggatctggcagctcttcatttggcccacaccgtgtgaggttgctcttggtgcaccgaatggggaagtttctacatcagtacctcggagagtccactggaagccctggacagtgggaattggtggcacccccancatggaggccaanaacacacagactgaanctccagga

SEQ ID NO: 3728 - DNA, 116 bp, Homo sapiens
  unsure (1): n=A,T,C or G
ncaggtctgttgatgaactcatgaaaaaaattatccttgaattcaaagaaaaatgtaaagacaagaagaatcctttaggaaactgtggagatataaatttagtacgactgggtcca

SEQ ID NO: 3729 - DNA, 151 bp, Homo sapiens
  unsure (112): n=A,T,C or G
  unsure (126): n=A,T,C or G
  unsure (134): n=A,T,C or G
  unsure (149): n=A,T,C or G
  unsure (150): n=A,T,C or G
cctctcctgtgggttccagaccctgttccagcaacaattgctgggacacctgggccgactgctccacctcgccaggccctggccctctccatctcagccctgacagccaccnagtgataaacacancaggcttnctaaacaatgtgacnna

SEQ ID NO: 3730 - DNA, 174 bp, Homo sapiens
ctgagcaggacctctgaaaccctggaccagtggtctcacatggtgctacgcctgcatgtaaacacgcctgcaaacgctgcctgccaataaacacgcctgcaaacgctgcctgcccgtaaacacgcctgcaaacgctgcctgcccacacaggttcacgtgcagctcaaggaaagg

SEQ ID NO: 3731 - DNA, 228 bp, Homo sapiens
  unsure (75): n=A,T,C or G
  unsure (99): n=A,T,C or G
  unsure (113): n=A,T,C or G
  unsure (130): n=A,T,C or G
  unsure (173): n=A,T,C or G
ccaaagtcccacggctgccctcggtgtgcactcaggctctggaacatcatggctcatcacgtttaacctcctgtntccatctgggtgatgaaaacctanggggagttaacgcnccgctgcagctcattgncaaagccagcttcaggcagagaacgaaggagggagcgacttcngggctgggtgagctggattctgttcctgctctgccaccaccgtaagcggtcccag

SEQ ID NO: 3732 - DNA, 241 bp, Homo sapiens
  unsure (16): n=A,T,C or G
ctcggaagcgcggcancaggcatcgtggggaggtgaagagcttccctaaggatgacccatccaagccggtccacctcacagccttcctgggatacaaggctggcatgactcacatcgtgcgggaagtcgacaggccgggatccaaggtgaacaagaaggaggtggtggaggctgtgaccattgtagagacaccacccatggtggttgtgggcattgtgggctacgtggaaacccctcgagg

SEQ ID NO: 3733 - DNA, 269 bp, Homo sapiens
  unsure (10): n=A,T,C or G
  unsure (237): n=A,T,C or G
aaatactttnattttcatttcacaaaaaaagcaacagtgtttgcagctacacatgcctttcagtcagtgttggtcatatgcaaaacaagttatcacaaatataaagaaaaataagccttttccctttacaagtgaaacaacacaatttgcatatacaatattatatacacatattttcaaaatgtttcacaaaagacagattatgatacaaatttagaattccacccacaagctcanactcaaggaattgaagatctctataggtgttt

SEQ ID NO: 3734 - DNA, 375 bp, Homo sapiens
ctggtacacggcagggtcagggttctggatatcaggtaaaacagtcaattgtgtcccagatccaaaggtcagttgccttgcagaaccagaagactccatgtcacccacgaggcagtagtacacagcagtgtcgcccagggaaacccggggcaggctcagagtgctggactttctgtcggcagggataaacagggaggccacttcgtttgtaacttttgtcttgtatccttgaataataaatcgtggtccttggctgggaaactgttggtaccacgtgatataatcatttgtagcaatgttgttgtggctacaggttatgttcacttcttgtctttcatatgagtccatggagatgggctgggtggtcttagcgag

SEQ ID NO: 3735 - DNA, 273 bp, Homo sapiens
aaataacatcacccttccatgtatagtaaactgttcatatttctacaggtactaagagtacactggaattacgtgttacatataaatggagaggtggagggaagggggaaaacttgcactaagtcgcctaagagataaactgataatgttagtaagacagctttgtattaaaaactttttatactacaagttactgcagaatcatctactgtaagttttatctccccaccagaaaactgaaatgttgatttacaatattaatgtaaaatattt

SEQ ID NO: 3736 - DNA, 579 bp, Homo sapiens
  unsure (535): n=A,T,C or G
aaaaggcactagttttaagtgcacagctcataaattctgctgacattttggattaaccttatgtaggttgccagctaatgaattgtaattgatttcaatcttagctgataaatctaattggtaatttatagaacaaatatttgataagctcctattaattgtcaccccaccaagcggacagctaacatgaattgcacttcactgcagctttagagatcggtttaggctgagacattgcgcctgccttaggttgctgacttctttatttcagagctctggagacacctagtttgaaaaatgttattctgtttttttgtgagaacttagtaaacaagaaaatactcttgagtgaaatgcaatgtatttcttttgtaatcagtgcatttgaaaattcaagccagcatattcctagtagatggaagcaaaattaagttgtctttgtagaaaatgaagagcctttcttccaccaaaaatccctgctgtatgcaaatagccctgattaaccctctcccttctgctgtttcccatattacanacttggagactgtcctcattcccatatgtaatagacatccaaga

SEQ ID NO: 3737 - DNA, 158 bp, Homo sapiens
ccttctagcatggcatcaattccgatataggttcctgtgcgcccaacaccagcactgcagtgcaccacaatgggaccactgaagaaattgctgaaggcattcactctccttctcagtttgaggagcaagtgaggatcctcaggcaccccgtggtctgg

SEQ ID NO: 3738 - DNA, 310 bp, Homo sapiens
aaaaatattaacagttattcatttaatatttttccacactttgaaaccacctttgcaaaaattacaatggagaaaactgtatcagtgaacaagatctgatctaactgactccatcttgcttttaacctccaagctgtccttgttcattcctgggtggataccaaactaactttgggaggaacttagttgatagtttcactttgaaagaaagactgtaacaaaaaccctcttcctgactgggactacactgcctttgcaggactaacaaattagctacaaaattaaaaattatggtttagaagctgtgcag

SEQ ID NO: 3739 - DNA, 325 bp, Homo sapiens
  unsure (9): n=A,T,C or G
  unsure (187): n=A,T,C or G
  unsure (204): n=A,T,C or G
  unsure (306): n=A,T,C or G
  unsure (316): n=A,T,C or G
cctcagccntccggccaagaaaacagaaaatatggggacagaacagtcattcgtgcacatcccagatctcagagagcagcggtgggagctttttgtcctgcagacgcagtgcaaacacttgctctgagtggacgctgctcagggtccggaggctcaccagtttcattagcatccgtgggaacatcantcggtcatggggatggnggatggagacgtaggcatgcagggcttccacatatgtgtgctgcaggctctctacctggagctggtcctgcacgttgggcgcggtctataggtcaccaacanagttgaggancaggtctgg

SEQ ID NO: 3740 - DNA, 420 bp, Homo sapiens
ccatttccccccgcagctttctgccagcactcccaacagtctttccacagaaccgagcactgctcggtgaatgaggactggacgctccagggcacccgcctgccccttatactggaggtcaaatctcaggggcagttggaagtcaagctgaattgtcccacactgatgtggccggcccagggcatcgtggaggtgcacgtcaatcttaggtccatagaaggcaccatctccagagttgaggtcccagggttctccaaattccttcagggcctgtttaaggacctgttcggcctggtcccaaaggcaagggtcccccaggaagccagatggccgggtggacagtgccaggcggaaggagaagccaagaacggcatagacggaacggaggaaatcaagacagctttggatctctgcttccag

SEQ ID NO: 3741 - DNA, 225 bp, Homo sapiens
ccatctctctcaaagcaatgaagaaggagatgaagattggggcctattacacaagataaacagtgtcagcatgctttaccagagagaacattttcatcaccccactactgaaagccatgtataatccaccaccacctgttttttgggggacctgggacacatgaaacacagagaggaaatttcatgggtactggatgaaacaaggaaggaaatgtttttgctcac

SEQ ID NO: 3742 - DNA, 315 bp, Homo sapiens; identical to SEQ ID NO: 3124

SEQ ID NO: 3743 - DNA, 304 bp, Homo sapiens
ccaggccaaggggagctcgctggctgcccatggtgcccggaagaatgggggtggcagtggcaagagtgcaggcaaacgactgctgaagagggctgccaagaacagtgtcgacctggacgactacgaggaagagcaggactacctggatgcctgcttcaaggactcagactacgtttacccctcactggagtcagatgaagacagccccatctttaagtcccggtcgaagaaaaggaaaggctcagacgacgctccctacagcccaacagcaagggtcggcccatcggtgccaagacaggacagg

SEQ ID NO: 3744 - DNA, 273 bp, Homo sapiens
ctgcatctcctgccctgctgtcattacagggatgggcaggctggcatgggggcacccgctgcccctgcctgggtgttgctgtgtattcctgccggccaggggccactgccaggaccacgcctcccttttcatatcccgattcttaagttctgctattgtggtattctggtggagaaaaaagaaccgcgtggctgtttttgaactgcctggaacctaagaccctgaattcttttcccccccaaggggaaaatctatatggaaaacatttatttt

SEQ ID NO: 3745 - DNA, 313 bp, Homo sapiens
ctgcgtcgtgacattgaggacttaaggaccaccatgtcaggcagatatgcccaggacatgggagaaaactgtgtcacacagtgaggaattctgggggattcccccagggaggagctgggctgctgagagcctagtccagcaggtttctgccctgacattctcttgtctgctattcccagagaggtctcagaggggaggggagagcctgcatctgggggccaagggcgaattccagcacactggcggccgttactagtggatccgagctcggtaccaagcttggcgtaatcatggtcatagctgtttcctgtga

SEQ ID NO: 3746 - DNA, 557 bp, Homo sapiens
  unsure (504): n=A,T,C or G
tagcttggcgtaatcatggtcatagctgtttcctgtgtgaaattgttatccgctcacaattccacacaacatacgagccggaagcataaagtgtaaagcctggggtgcctaatgagtgagctaactcacattaattgcgttgcgctcactgcccgctttccagtcgggaaacctgtcgtgccagctgcattaatgaatcggccaacgcgcggggagaggcggtttgcgtattgggcgctcttccgcttcctcgctcactgactcgctgcgctcggtcgttcggctgcggcgagcggtatcagctcactcaaaggcggtaatacggttatccacagaatcaggggataacgcaggaaagaacatgtgagcaaaaggccacaaaaggccaggaaccgtaaaaaggccgcgttgctggcgtttttccatagctccgccccccctgacgaagcatcacaaaaatcgacgctcaagtcaaaaggtgggcgaaaaccccacaggactatnaaagataccaaggcgtttcccccttggaagcttcctcgtgcgctcttcttgtt

SEQ ID NO: 3747 - DNA, 301 bp, Homo sapiens
ccacatcaggaggttgcaggttaaccagaactcaccgacacagcaggagagcagcttggaacctgcaacctagccaaaacctagtgccttggattgggggagaaaacatgcagccattcctctctctctgctggctagaggggattctggcttttcctcccagagccacccctttccctcctcctaaagttgatggtggttctttaaggaaagggagaagtgcacagtgtgatagggcaggaagagaaggaaacggaggagaggaggggactttcccataagcaggcagaagaaaaggcag

SEQ ID NO: 3748 - DNA, 262 bp, Homo sapiens
ctgcctgggccccaccctcctgactcctgctgatggttaagggccgggagcagatgctgccaaggccacatgtaccaaagcaggctgggcccagggttctatttattgccttgctctgccctctcccttccccggttgtgggacaagagccctccctgaacccctgcaaccctccctgaacccctgcaaatgaaaccaaacgtccacctgggtgtgttcattccttcctgtccttcaaagtacttgatagcctttcataagg

SEQ ID NO: 3749 - DNA, 271 bp, Homo sapiens
aaatatttgttcttttaattttgccatatccaaaaacaagtttgtagagtgtccttctagatgcctttttattctttcccaaattttgatcttattaagaacatctaatagtttccacaaatccttatgttaagcttctagagcaggccatatcatttgaggttgaggtgccactataccgccacggttccagataataggaacttttgccatacttcttatcatttctaccatctgaccgttttgttcagatcatctgaacatagtgtgg

SEQ ID NO: 3750 - DNA, 186 bp, Homo sapiens
  unsure (17): n=A,T,C or G
  unsure (22): n=A,T,C or G
  unsure (29): n=A,T,C or G
  unsure (42): n=A,T,C or G
  unsure (61): n=A,T,C or G
  unsure (72): n=A,T,C or G
  unsure (80): n=A,T,C or G
  unsure (114): n=A,T,C or G
  unsure (148): n=A,T,C or G
ctccagcagacccctgnatacntaaaggngcaaaccaacaanatggtgatgctgtcctgcnaggctaaaatntccctcantaacatgcgcatctactggctgagacagcgccangcaccgagcagtgacagtcaccacgagttcctgnccctctgggattccgcaaaagggactattcactgagaa

SEQ ID NO: 3751 - DNA, 283 bp, Homo sapiens
aaaattaaacctaaagaataggaggaccccagcaggcagaggaagggcctgcaggaagatgtaaataattaacataaagaacttttcctttaatagaggagctgaaagaagatcagggaggctacatagagagtgtcagaagggtaatgctagctgaggctggaggtgggccagaccatccagggccatggaaactggatttctttctgagtgcattgggaaacctgcagggttttaagcaggaaactgaaggatccaatttatattaaaaacattactctgg

SEQ ID NO: 3752 - DNA, 362 bp, Homo sapiens
  unsure (9): n=A,T,C or G
ccattttgngtcttttgaggttgtgctgtgggggtttgggtttgagggaagggagcagggtggcggttgaggaacgcttcagccttagctgctacctttcggcagcagtgaaatacaagctgcagcctcggctgccagggctcccttttgacttattgtcgccactgccccttggtgctgtgtggtcccagtggaaggaggggaagattttggaaacctggtagccaccagtaaggtgattctctgccctgttggggcctaaatttgggggcttttgggcaacctctccgtgtactgcgtctgtccacactcgattgggccccaggtgtgtatgaggcgctctggtaaggtgctcaggccag

SEQ ID NO: 3753 - DNA, 240 bp, Homo sapiens
  unsure (213): n=A,T,C or G
  unsure (235): n=A,T,C or G
ttgtgctgccgttcgtgttttgtggggaggcgcagtgtctgtaggccgtgtggcttgcagagtgtctttcggcccaggtaaacgccgctgtgaaggactccaggaaagctgctcccatcacaatccccctgcctgacagccacaggtaagaacacagaatgcacccacaagatggaactgaaagcaaattaatttataaaaaaaaaaaagaanaaagaaagaaaaaaagagaaantttac

SEQ ID NO: 3754 - DNA, 303 bp, Homo sapiens
  unsure (51): n=A,T,C or G
  unsure (290): n=A,T,C or G
aaaggtatccgggagattggcagtttgtaatacaagaattatgtgcccccnagaaggtttctggcctcagtgtctctatctgtctaatgggcagcagatcagacaaggtctgtcggctctgacaggttcaaggccatctcctctaaatgactcactgtctctggagaaatatgtgagcattttcacaggggaaaagaggggtgcattccacagcccctgccccgaggaggtctgagaaggtgaaggaaggccagatgcagagagacaggggatgacaaatgacagctcanatttctcccatgg

SEQ ID NO: 3755 - DNA, 441 bp, Homo sapiens
ctgctccaaagacacccagtatctcaaggattctctggcactggggaaaacagaggaggaggcactgaagcacttccgagtgaagtttaacgaagccctccgtgagagctggaaaaccaaagtgaactggctggcccacaacgtgtccaaagacaacaggcagtagtggctcctcccagccctgggcccaagaggaggcggctgcgggtcgtggggaccaagcacattggtcctaaaggggctgaagagcctgaactgcacctaacgggaaagaaccgacatggctgccttttgtttacactggttatttatttatgacttgaaatagtttaaggagctaaacagccataaacggaaacgcctccttcatgcagcggcggtgctgggccccccgagctgcacctggctctcggctgaggattgtcaccccaagtcttccag

SEQ ID NO: 3756 - DNA, 311 bp, Homo sapiens
cctccacgaagaatatttttggccgatactcttcacagcggatgaaggattggcaggagattatggctctgtatgagaaggacaacacctacttaggtaaagtggcccggcctgggagccctggtatccatggggaagcccactctcagagttctgagataccaggcttataggaggcacagtctgtgagtgggaagagactggagtgtagatgttgcccatttgtaggtggtaaaatcaattgtttttgatggaattgattttccctgagtggagtgctgggggaaggaggaggtccaggccggtagtgg

SEQ ID NO: 3757 - DNA, 290 bp, Homo sapiens
ctgcctgcgcccccgggcttcgcagccttgcttgttttctctggacagcaacagaacagtgttcacagcgattcaaagggtggcattgggttggacgttctgggtacaagccaacctagtcccacgttgtacgtgaatgtttaatgtgctctcaaaacatggaaaataagtttagtgcacatagctaaatcacaaaacatccaatttctctgtttcctcaggaagtcattactgcgccaccacatcacatgaccttaacatgatcaatgtatttctctgccttgacattt

SEQ ID NO: 3758 - DNA, 490 bp, Homo sapiens
  unsure (480): n=A,T,C or G
attgttatccgctcacaattccacacaacatacgagccggaagcataaagtgtaaagcctggggtgcctaatgagtgagctaactcacattaattgcgttgcgctcactgcccgctttccagtcgggaaacctgtcgtgccagctgcattaatgaatcggccaacgcgcggggagaggcggtttgcgtattgggcgctcttccgcttcctcgctcactgactcgctgcgctcggtcgttcggctgcggcgagcggtatcagctcactcaaaggcggtaatacggttatccacagaatcaggggataacgcaggaaagaacatgtgagcaaaaggccagcaaaaggccaggaaccgtaaaaaggccgcgttgctggcgtttttccataggctcccgcccccctgacgagcatcacaaaaatcgacgctcaagtcaaaagggggcgaaaacccgacaggactattaaagataccaggcgttnccccctggaa

SEQ ID NO: 3759 - DNA, 319 bp, Homo sapiens
ccaaaacctgcagtaggggttgcactactgatactcatgccagccatctgctgattcatctgtgagaggctccactggggctgctgagcttgcggcaggccaaacttactctggggtgcacccatttgtcccaccattcctccttgggggccaacaacgttctgaggaagtggcatcacaccagtttgtgcatttcccataaacccattgggcatgggcatgcccaccatcatgcttggactctgtcccatcacatttcctataaggccaggagctgcaggcacaggcacgcccatcgatggaaagccctgaaatgcag

SEQ ID NO: 3760 - DNA, 291 bp, Homo sapiens
ctgatgcagtccgagagctagatggaagaacactatgtggctgccgtgtaagagtggaactgtcgaatggtgaaaaaagaagtagaaatcgtggcccacctccctcttggggtcgtcgccctcgagatgattatcgtaggaggagtcctccacctcgtcgcagagtcaccatcatgtctcttctcaccaccctctgaatctgcattagccagccaactagccctttcagcgtcatgtgaccagcgcgccccattcagcttggctggtgtcgtttcacatgacccaggctgg

SEQ ID NO: 3761 - DNA, 269 bp, Homo sapiens; identical to SEQ ID NO: 2613

SEQ ID NO: 3762 - DNA, 319 bp, Homo sapiens
  unsure (157): n=A,T,C or G
  unsure (196): n=A,T,C or G
  unsure (265): n=A,T,C or G
  unsure (284): n=A,T,C or G
  unsure (293): n=A,T,C or G
  unsure (304): n=A,T,C or G
gtccatgtgactgaactttagacagtgagatataagcagatatcttctgtggcagtgttaggaaactattaaagacagtaagaacattgccctttgccttctttttcctttcttcatttttctgcctggaatgcaagtgtgatggctaacaccctancagccattttagattatgaagatgagagtcactccccangaagggtggacctgaaagctggattctagatgtggaatgacaataccaccctggaccacctacctgtangctgtgtgtgtgtgtgtgngattgacanagagagaaganagatagagagattcc

SEQ ID NO: 3763 - DNA, 198 bp, Homo sapiens
ctgcaaccctgtctacagtaacatctggggatctagatttattcactgagcaaactacaaaatcagaagaagtggcaaagaaacaactttccaaagactccatcttatctctgtatggcacaagaaccattcaacagcaaagtactcctggtgtatttatgggacccacaaatataccatttacctcacaagcaccag

SEQ ID NO: 3764 - DNA, 428 bp, Homo sapiens
cctgggcaccttcaggaaggccacctcctatcaggagcccttttcgtacatgggggagctcttttccaactcttgttacccctatgacagaatcctagtgcctagcattgaatgagctatgtggaatatcaggttaccagggagaaggtagcttggagtcaggagatcaagaaattctcatacctttcatctcttcccagttttccttgtagacagctagccaagcccaacgtccagagcttaccattatcaaaccaaggcacacacatgcacgcgctcagcttagaagacctctatccagcacagatgtccacaaagatacacccttttgttgggagttaatgtccatgttctttcttgttctcattacggtcccaccccctcctccagatcgggcagggctccaagagaaaaggaaagtagaacag

SEQ ID NO: 3765 - DNA, 265 bp, Homo sapiens
ctgtgaaacagaaggcactttgtgctaaaattcagagggtctctcaagagagaacgccacagcagagagacccaatccgcctaagttgcaggcgaccctttagggtggggaggagtatcccccaggaaggcatctgcaaaggaaaaaattgtaatcatgattccaaggcaaaatggctaaagttgggagagaagaaataccaagagagaagacaaaacatggctgtgccaaggactgaggagtgagctttacaaggacttatcag

SEQ ID NO: 3766 - DNA, 216 bp, Homo sapiens
ccaggctcaggccctggggtgaaaggagacaggtgctgccaagaccatacatcagtcatctggcagcagctcgagaagcatgtcctccacgccgtcaatcttgatgtggtacactaagcgccagaaactggagtctgaggatcggtatcgtccatcagggtagagctgccacatgataggcagcaggcttgggcctatctgggtgggggtcatagg

SEQ ID NO: 3767 - DNA, 334 bp, Homo sapiens
ctgaagcaacttgggattaattgcttgattagcttcacgaagcacagagataaggtcgctcacttgctttatgttattaggtgtaaagaaagtgtatgctgtgcctgttttggtactgcgagcagttcttccaattcgatgaatataatcctctgaggagttagggtagtcataattgatgacaaatttcacatcttccacatctgtaaggtgttgcagtgtggcaaaatagcaatgtacggagttttgcacaccacaacagccagaccaaaaataaaaagttagacaattgtattcccaagaaggtacgggctgcaaaaaatacagttaaaat

SEQ ID NO: 3768 - DNA, 235 bp, Homo sapiens
cctaccataacaacatctttacacacagtcaggtaggtctggataatttgctgataaatgaccctatgaagcttcaggtagtcttcttcttgatcttgaataaaagataaaattttgctttctaaccaaaagccagtgtcttccaacatggacaaatacacctttccttctgagcagaacttgtgctgaagatggatgctcaggcgacagtggagaccaaaggctcgcggggcag

SEQ ID NO: 3769 - DNA, 221 bp, Homo sapiens
aaagtggcccagggtcaagctctgagccttcagcatcctccggtatggaatttcttccccacagaaaaagtaagtgacaaccaactcactggcctggagcgcgtggacacctgtcagtttctttggctctttgtgatcttctggagccaggcttggattggagaagggtgtggctcccgtctgaacagtggccgaatgattcctgtccctctgctgactgg

SEQ ID NO: 3770 - DNA, 445 bp, Homo sapiens
aaaaagccaaatacatttctgacaaatggaatgtctgataattatgtgactgaatctcacatttactaattctgaaactagttaataccaaatagttcttaaaagacaaaggaagagaggtgatttctctgtggaaaggttgggcctaagggtcaaggatggttctaagtcatcagactacagagttttaatctaaacatttttcttcattttttactatgttagaaagagcaccctgagatattaaactactacccaaagcatctttttcaaaaagtgaaaaaaggaaaagggaggcactccatcatggattcgcactaaaacaaatatcttctatatatttgaagttgaatgctcttaactaccaactgaatggcacgttcacatatgaagacttcttgtgattcctgcaagacagtgggagtgtgaatgacccctgctgtgg

SEQ ID NO: 3771 - DNA, 203 bp, Homo sapiens
ccaggatggcagagacttccttgtcatcatggagaagtgccagcaggggactgggaaaagcactctacccagacctcacctcccttcctccttttgcccatgaacaagatgcagtggccctaggggttccactagtgtctgctttcctttattattgcactgtgtgaggtttttttgtaaatccttgtattcctatttttttt

SEQ ID NO: 3772 - DNA, 246 bp, Homo sapiens
cctggaaggtgtgcaggagtttggtagaggagtgatctaggtgaggggaatggaaggtgcagagaccagagctgagagggcctgaggcactttccagagcgtggggaggggcctccaccaaggcgagaagggctgcaggtccagatcaccagcgtttgtagacagtagtgtggcgcttggagtttacctgagggccagtggagctccagggacctatcaggacggggacctgtggggactgggaag

SEQ ID NO: 3773 - DNA, 394 bp, Homo sapiens
ctggctcccagcctcgtctacctctgcagagcaaagggccaagatgagaacggtatagccacatgtgtgcgcgcatgtacatgcacacagacacactcatgcattcacgcactcacacacaccaagatctgacggttgtagctggataggggagattctgggaagatgaacagaatcctgaggatgtcaggatgaagaagccataggagcatgatcttacaacttcaaattgatgtccatgagtaaggaggaactgaaggataaaggcaagactactggggtttcagcaaaggtaaagatggctgggtggtgagatgagtggagagagtacctgtgtcatagccctgagggagtccagagatgaaactatgggccccagactttactgcagcag

SEQ ID NO: 3774 - DNA, 183 bp, Homo sapiens
aaacaagaatccactgttgctactgaaaggcaaaagcggcgccaggaaattgaacaaaaacttgaagttcaggcagaagaagagagaaagcaggttgaaaatgaaaggagagaactgtttgaagagaggcgtgctaaacagacagaactgcggcttttggaacagaaagttgagcttgcgcag

SEQ ID NO: 3775 - DNA, 219 bp, Homo sapiens
ctgcaggacatgtagagaaaccaaaccgggaaatcttacaaggagttgaaaagattaatgtcccaacctgatgagattacggccttgagacaataaggtggagcaacagaacaatgggaaagaggactgggagaggaatctaagaaccagatggcttcagctctctagaggagctgagcctattcacagtgcctaacctggaagcctgtgaggaacagg

SEQ ID NO: 3776 - DNA, 357 bp, Homo sapiens
ctgagttcccttcccgaaggtcagctcggggctcccgacgatcatgcagaagtagatgccactgtcttccggcttcacgcttgtgagattgagaatgaaccggcttgcatcccgaaacacagctatcttctcctgttccacctcttcaccgtggatagtcccttttgcggaatcccagagggccaggaactcgtggtgactgtcactgctcggtgcctggcgctgtctcagccagtagatgcgcatgttactgagggagattttagcctcgcaggacagcatcaccatcttgttggtttgcacctttatgtatgcaggggtctgctggaggactgagttgccatggagaactgtcag

SEQ ID NO: 3777 - DNA, 349 bp, Homo sapiens
aaacttgttaaaataccttgttgctagtgctcagaacatctaggtacagtctttatttttaagacagtatctatcctaggcaaatgagagcttgtttttatgtatttaagagtttcctcttgtcatttcaatgtcaaattgatttgactcaatttcatgatttcatctcgctcaaggccatcaaccggtcagagccagagcccttcaaaggctgtatgtgagtatatgagggaaaactttccacataattttacatcatttctatctcatagcagttttagttttctcatagctatctcatagcagttttagttttctcaaattctatgctgtttttgtactactgcag

SEQ ID NO: 3778 - DNA, 370 bp, Homo sapiens
  unsure (370): n=A,T,C or G
ctggtctgggaagaggtggtctgctgacctgtggtatctcagaggggacgttcctcctcctccctgtgcaccaggtgggctgcaccctcctgcctattcaggatgtggatgccacaggagagcagcaggcagtggaaacttcagttgcactggttctcctggtggcaaaggcatgaagcacaggggtcgattaatccaggctactagaaagctccagagcaaagtgtgcgggtcccacaaatgcttggctggtggggtctggatcagtgctgagatagagttggcagaagaagcagaggcactctgcttgctttcctagccagtcctcccctacacacacacacacacacacacacacacacaatctcan

SEQ ID NO: 3779 - DNA, 370 bp, Homo sapiens
aaaatactatttctttggaaatcgaaattcaagaaaattggaataataataattaaaaaaaacctctttgggtaaattttacctgcgttcattggttttaacatgctgccactttttctctttctctctccctctctctttctgcaccattttcaggtaggtggcatatattgtctcctttcaccctttaacacatcccaagaacaggacattatcttctgtaaccgcaatatgcttaccaagttgagaacattttctgcccagcagtccatgttccgggtccatcagttctttgttagtcagtttccgtctgaggcagcgatggcaaggggtcaaggtggacagcagccagtggtagacttgtggattt

SEQ ID NO: 3780 - DNA, 240 bp, Homo sapiens
aaaaaacaaataggtggaaattgggagtttgtaatcagagatagtcaaacactaacgaggtacaatttgaaagtaacattattcagcttctcaaatcaacctattattttttttaccaacttactgtgtttcccaaggtcttaacctcattctagattgttaactacagctaggtttaccagggttcaaggagttgaatgtgaaatactagaggcttatcttgaaggcaaaactttaagg

SEQ ID NO: 3781 - DNA, 320 bp, Homo sapiens
  unsure (5): n=A,T,C or G
ctganaccacaaacaggtactttgagggagatagggtgggataggagttttatgccaaacaggttggctaaacagacatattcaacaggtcacagggggaactatgaatattcatgaaagggggtcatatgtgtgcttgataagcaaacatatgtgttacatacatcccatgttcaccttcgagtggagaattaacattaaaatgcagtaaaattaggttctgtatgttgaaaggtgaaacacaggacacgaagacactttgtacacagcctcggtgaaccagccagaaccagcccatggttgaatactttgtagcctag

SEQ ID NO: 3782 - DNA, 285 bp, Homo sapiens
  unsure (5): n=A,T,C or G
  unsure (9): n=A,T,C or G
  unsure (11): n=A,T,C or G
  unsure (99): n=A,T,C or G
  unsure (109): n=A,T,C or G
  unsure (111): n=A,T,C or G
  unsure (179): n=A,T,C or G
  unsure (200): n=A,T,C or G
  unsure (213): n=A,T,C or G
  unsure (256): n=A,T,C or G
  unsure (276): n=A,T,C or G
  unsure (278): n=A,T,C or G
  unsure (282): n=A,T,C or G
ccatngggnangcccaagagacgtctctgaagccaccgttcctgattattcagaggcagggtccacagtgagtgactcggtggggctggaggaacccanggtgacccananggggctctggagcgggtccctaacatctgaaaaagtcctcccagggaactcggagctggaacttccangcagcttcgggggtgacattngtatccggccagnctagctgggaaaggagaccttgtgtcctggcaacagggagagncaggactgggatggacctcngncgcnact

SEQ ID NO: 3783 - DNA, 441 bp, Homo sapiens
ccagagatggcccttcaagcaacagctcattccacagcagcgaagaggaagggactgaccttgaaggagacatgctggactgcagtgggtctcggcctctccttatggagtctgaagaagaagatgagagctgcagaccccccccggggaagctgggaggagccgttccattcgctccaccagaagtctctcctgagcaagcaaagacagtgcaaggtggaagaaagaaccagtttcaagccttcacacagccagccactgatgggctcagtgagccagatgtttttgccatagctcccttcaggagctcaagggttccaaatgatgacatggacattttctccaaagccccatttgtctccaagagcagtatggctccttcccagccagaggagtcagacgtgtttttgagagctcctttcactaagaagaaaagcatgg

SEQ ID NO: 3784 - DNA, 380 bp, Homo sapiens
  unsure (5): n=A,T,C or G
  unsure (6): n=A,T,C or G
ctganntcaaacaccttgcacaccagctcctctccgctgtgcagatgcacggcacgaaaaacgtggtctccctccagaggttccaacaataagtatttcccgatacaagaaacgcaatgcgacaagttcggagtctcgggcgggctcggggagccgaggttcgggctgaaactctggctgggctccgcggaccttatagacgacaactcttcgaaatcctgggttttgttccgcgatctcccatatctcgctattgtgatgggggtagacctgtgtatgttcatgagtgtgaggatcgcacacgacaaacaaaaaaaaacccgctggagagatgagtcgctggcgagtgcggttgcaggcgcctcggtgccactgatttt

SEQ ID NO: 3785 - DNA, 274 bp, Homo sapiens
ctgctcattgaggagtgttgaacttcaacctgagggggccgacagtgccctccaagacagagacgactgaacttttggggtggagactagaggcaggagctgagggactgattccagtggttggaaaactgaggcagccacctaaggtggaggtgggggaatagtgtttcccaggaagctcattgagttgtgtgcgggtggctgtgcattggggacacataccccttagtactgtagcatgaaacaaaggcttaggggccaacaaggcttccag

SEQ ID NO: 3786 - DNA, 351 bp, Homo sapiens
aaatgtgtttggtaactattggaaaattttctcttcttaattatgttctgtgtattgtattgatcctgaattgtatagttaatagtgacttttcaagatggggcatgctcaagatcgaacagataataaaagatatgcacatagaatactaattgtagcttttttttcttctggaacatttcagttcttcaccctctagcttcttccaaatatcagtattcccacttgcatagaagtgcagaattgaagagttgggtgttacataaataggctaagtgtttggatgacttgttcaaggtgacaaaattttaattccagttttctgactcctagtacaccacacacaccttt

SEQ ID NO: 3787 - DNA, 169 bp, Homo sapiens
aaaaacacaggttgccaaggcaggctgcctagttcctatcatggccctgccacttggcagttctatgccctccacttctctgtgcctcagttccctcaggaagaactgagtattcactctttccgtgcgctgagcacagtggagggcatgagggcactgagaggagcag

SEQ ID NO: 3788 - DNA, 237 bp, Homo sapiens
cctgaccatggagaccccggcttggtcccacctaatctctgcagaccacaggttggtgacgggtctctgggatgaggctggagctgggagcacctcaggctcaaaggaacttagcatttggctccaggaatggatagcccagggtgggcggcagcgtttccattttcaacacacccaacctcagcacaagactcccagatctgcaacggggatggtgacagtctcagtcgactgtgg

SEQ ID NO: 3789 - DNA, 446 bp, Homo sapiens
ccattattcagttccaaagctgcttccacgttttcaggtatctttacagcaatacccttctgctctggtaccaatcttctgtattggtctgttcttatactgctgtaaagacatacctgtgactgggtaatttataaagataagaggttgaatcagctcctgttctgtgggctgttcagacttctgcttttggggtggcctcaggaaacttacaatcatggtcaaagttgaagaggaagaaggtacatcatcacatgacctgagaaggggagacagagagagagaaggaggaggtggtacacaatttcaaacaaccagatcttgttaaaaactctatcatgagaacagcaagggggaaatccaatcccgtgattcaattacctcccacgaagaccctcctccaattctgagaatgaaaacttgacatgatatttgggtgggataac

SEQ ID NO: 3790 - DNA, 376 bp, Homo sapiens
cctgaaggacccagggccctctggctggatgcgtttgcctatcaggacccagaattacttacagacctgtttagggctaggcttggcctctttcttgagctcatctggaggggtgtggcaacactcattcttcatccttattctccccggctgtgggcaacactggtcctcagtgtcaccagatggtcctcctctgtgcccatgacccctcagcagccaaggctggccctgccagataaatgtgtgtgcccatgatcacacccaggggcacaggccacatacgtttccctgaaaccttgggctccagcctccatcccgtccatgtgggagggaacttgggtcccagcagtgtgtctttcagcaccaagtcatgttt

SEQ ID NO: 3791 - DNA, 298 bp, Homo sapiens
aaagctcgtaaattatctcaggaattttccatttaatattttcaggctgtggctgaccgtgagtaacaaacccaggaaagcgaaactgcagaacagtggatgggagaaagggtgaattactgtatattcatgagggatattagtccatagtttcttttttcccttttaacaaatttttgggttttgtatatagtttgtctggttttggtatcagggtaatactagcttcataaaatgaattggaaagcgtttcttctgttttcctaaaaagattatatggaattagcattcattcttt

SEQ ID NO: 3792 - DNA, 117 bp, Homo sapiens
  unsure (89): n=A,T,C or G
aggtgcaaaccaacaagatggtgatgctgtcctgcgaggctaaaatctccctcagtaacatgcgcatctactggctgagacagcgccangcaccgagcagtgacagtcaccactagt

SEQ ID NO: 3793 - DNA, 322 bp, Homo sapiens
ctggatcatacggttgcagtccgtctaagaaataattactaatgaaactggcagagctttgactgttttagctttgcaagaaacccaaatgaggaatgctatctatcagaaaagactggccttagactacttgctagtagctgaaggagtttgtggaaaatttaacttaaccaactgctgcctacaaataaatgatcaaggacaggtggttaaaaacatagtcagggacatgacaaaggttgcacatgtgcctgtagaggtttggcacgagtttaatcctgagtctttatttgaaaaatggtttccagctataggaggattt

SEQ ID NO: 3794 - DNA, 390 bp, Homo sapiens
  unsure (5): n=A,T,C or G
  unsure (229): n=A,T,C or G
  unsure (280): n=A,T,C or G
  unsure (283): n=A,T,C or G
  unsure (319): n=A,T,C or G
  unsure (325): n=A,T,C or G
  unsure (344): n=A,T,C or G
  unsure (363): n=A,T,C or G
  unsure (377): n=A,T,C or G
ctgcngcatcatctcctcctgcccagggccccatgctattgtcctagttctgctgctgggccgctacacagaggaggagcagaaaaccgttgcattgatcaaggctgtctttgggaagtcagccatgaagcacatggtcatcttgttcactcgcaaagaagagttggagggccagagcttccatgacttcatagcagatgcggatgtgggcctaaaaagcatcgtcaangagtgcgggaaccgctgctgtgcctttagcaacagcaagaaaaccagtaangcntagaaggaaagtcaagtgcaggagttggtggagctnatatanaaaatggtgcattgcaacnaaggggcttactttttctnatgacatatacaangacacacacgaaa

SEQ ID NO: 3795 - DNA, 323 bp, Homo sapiens
  unsure (1): n=A,T,C or G
  unsure (12): n=A,T,C or G
  unsure (13): n=A,T,C or G
  unsure (109): n=A,T,C or G
  unsure (133): n=A,T,C or G
  unsure (166): n=A,T,C or G
  unsure (198): n=A,T,C or G
  unsure (203): n=A,T,C or G
  unsure (209): n=A,T,C or G
  unsure (222): n=A,T,C or G
  unsure (239): n=A,T,C or G
  unsure (263): n=A,T,C or G
  unsure (266): n=A,T,C or G
  unsure (294): n=A,T,C or G
  unsure (307): n=A,T,C or G
  unsure (319): n=A,T,C or G
ncgaggtggacnnctccatcctgcagttcctgccatgagcctcgggctcctgtgctgtggggccttttctctcctgtgggcaggtccagtgaatgctggtgtcactcanaccccaaaattccgggtcctgaanacaggacagagcatgacactgctgtgtgcccangatatgaaccatgaatacatgtactggtatcnacaanacccangcatggggctgangctgattcattactcanttggtgagggtacaactgccaaanganaggtccctgatggctacaatgtctccanattaaaaaaacanaatttcctgctngggt

SEQ ID NO: 3796 - DNA, 219 bp, Homo sapiens
  unsure (16): n=A,T,C or G
  unsure (17): n=A,T,C or G
ctgacaagaggcacanncacagagctatgaggacagtcttatttaggcaaaccattcttatactcatgcgtaccagaaaaatgtctttgtctcttctgtgacactgctagatgctggggatataacacacatcgctgtccctaccctcacattaggggtagctgtaattatattctggtcaagaactgtgatgctaaatttcaattcttactagctttt

SEQ ID NO: 3797 - DNA, 240 bp, Homo sapiens
ctgggtgtgtgccgcgtagtgaaaatcctcttgtcagggggtatccggggagcttcgtaacccgaatggatgcgctctgcaatcagcaggcagcacggctgtgcaggggccccatctgagacccggatcttggtcacatacggggttaggcggaatggctggtaccgaggccctggatcccggtcaggacctcctctgatacggcagaagacggacttctcctgggtaaagtccctgagg

SEQ ID NO: 3798 - DNA, 333 bp, Homo sapiens
aaaaattcagatttccagttcgtatacatataagcagagcaaaaatttcattaatctaataatggaattttcaatttgctggctaacaaataaattgatctaatttttagaaactacaagaacaaatgtgcatgaatttaaccgtgttcaccaggaatcaagaggatgaatgttactaggtacaaagggtcttctgtgtgtgtgacaagaatctaggcaacaccattattcataggttaaggatgctatttgctccgtatctgaaaaaaagaagatataaattcaatgtctagaatgtagccatgacagggaaaatattagagccactatttt

SEQ ID NO: 3799 - DNA, 134 bp, Homo sapiens
tccgccagtgagtccttggtttttaataatgagaagtcctttcccccaaggtgtgagcattgcagcgcagtgtgtgtgtgtggttagagccagcttagtccttcactttgtcgaccgaagtgggagctcaacag

SEQ ID NO: 3800 - DNA, 184 bp, Homo sapiens
cctggaggcccagggtggacgtggtcctcagccagaccaagggcctcctctagtggaggggcttcctgggctctctctgcactgcccctcagggtgctttctggggtccagtcaatggatcttacacacccatgaacactgagcccttggggagacgtgtccaggcttcagtttcccctcccag

SEQ ID NO: 3801 - DNA, 163 bp, Homo sapiens
cctctagaacctgcgtcaagaatgtctccatcgccaccacaaattgaagggaaaccacccttatcacagagcaggaggcattgaaactggccttgcagagctgaacaggtggtgagagcagagcagtgcaggtggacagagatgaggaagtcttagcagtcag

SEQ ID NO: 3802 - DNA, 171 bp, Homo sapiens
gcttgaggctagcccagtgaagaaaaaccagagactcatgtttccaggggtcagtctgtcaggcaggaaggacccaggatttgaacccagcttcagtgtgcaggctccgaggctgcccaggacgggaaagtccaaggaaggggcctggtggtgctccacttgcagttcttt

SEQ ID NO: 3803 - DNA, 344 bp, Homo sapiens
aaattatatatattatatatgtaacatgatcagcaagtctggaaacataacgaagttttatagtattgatttattcctatcactctgagatatggtgacattacatgatatgttcaacgtgttgttcctcattagcaatgtgttatgcataatggggaccaacatgggacattaatacaacatttctatcagtgcctgcacatgcttctgtgatacgttgcctccaatgatttttgtctctaattttcagaatataaacctgctccattagcattttctggaagaagcaatcaaatgggttaatctgtgaaagtaaatgttatctatatttcccaacattatgg

SEQ ID NO: 3804 - DNA, 208 bp, Homo sapiens
aaagcgaattctctactgaaaggtctgctctgcttaaggagctacaaactgctctcaaaagaatgaaatactgagttccaattcagtgaggcacagtgttggactatggcacatttagttggagtcggggggaggtcaggaatatgatcagataatggattttataccttagagcaaaatctattagtctctctcagtttatcaattt

SEQ ID NO: 3805 - DNA, 410 bp, Homo sapiens
ctggggcttccattcacgactttctggtccctggcaggacagagcgggatgccaccagcttgtccaaagggaagttccaggagctcctggtgggcatcgttgtggagaatgacgctggccgcggcgagatcaacgagttgaagcaggtggaaggggaggcttcgtgcagcagccgcaaaggaaagctgattttcttctatgagtggaacatcaaactgggctggaaaggcatcgttaaagaatctggagtggagcacaagggattgattgaaatacccaatctttctgaggaaaatgaagtagatgacactgagaatttacaacgggaatgattttaccaacgaaagctatggcaacccaggaattgactgtcaaaagaaaactgagtgggaataccctgcaggttcagg

SEQ ID NO: 3806 - DNA, 420 bp, Homo sapiens
aaaccttccagaaagcatgaatccaaaaggaaatgtccaacaggtgatatgaaccagatattttatggcctttcctgtttcagtctcaaactttctaaacatcaatggggaaaaaaaattctctagagtttttcagttttattcttctagagcacaattttccggcctgttactgagtacggtcttctaacaggtacacaattaactcataagtagacaacacaatggcagtatttgggatctgccggataagctgggcaaacagtcctctataaaaggcaaggtggccttcttcccggaacaccaggcgcgccgtctggacaaaagacttgtacttggtgccctcttcccggagcctcgtccttatgacttcgtgtggataagcaatgcaggaggcacagcccttagaaagagcagcag

SEQ ID NO: 3807 - DNA, 227 bp, Homo sapiens
tgactacttcgtgttggcctccttcgagcccccacctgtgaccatccaacagtggaacaatgccacatggacagaggtctcctacaccttctcagactacccccggggtgtccgctacatcctcttccagcatgggggcagggacacccagtactgggcaggctggtatgggccccgagtcaccaacagcagcattgtcgtcagccccaagatgaccaggaaccagg

SEQ ID NO: 3808 - DNA, 269 bp, Homo sapiens
ctgcctcctgagggtgtggggttattagggtctcaatactttctcaaggggctacactccccatcaggcagcatcccaccagcctgcaccacaggctcccctgggaggacgagggaaacgctgatgagacgctgggcatctctcctctgtggctctaggacatctgtccaggaggctgggcggaggtgggcaggatgtgagaggtggggagtactggctgtgcgtggcaggacagaagcactgtaaagggctctccagccgcagctcag

SEQ ID NO: 3809 - DNA, 259 bp, Homo sapiens
ccttcaaggtgatctgccatcttaccggtttgttctctggcttgtctacgacgagtcctcctggcctcccgctctgcaatgcgacgttttgcatgctcctgatacagtgcccgatcgcgtccaaaggagtcaagatttggtgccatcagagctttgtcttcaagatggactgacttgaatggcttgaaaactccgaagattcatctttaatatcatcttgtcgtctttggacaaggcgggaagctcgctgtttgtacag

SEQ ID NO: 3810 - DNA, 402 bp, Homo sapiens
caaaattccgggtcctgaagacaggacagagcatgacactgctgtgtgcccaggatatgaaccatgaatacatgtactggtatcgacaagacccaggcatggggctgaggctgattcattactcagttggtgagggtacaactgccaaaggagaggtccctgatggctacaatgtctccagattaaaaaaacagaatttcctgctggggttggagtcggctgctccctcccaaacatctgtgtacttctgtgccagcgcggggtacgagcagtacttcgggccgggcaccaggctcacggtcacagaggacctgaaaaacgtgttcccacccgaggtcgctgtgtttgagccatcagaagcagagatctcccacacccaaaaggccacactggtgtgcctgg

SEQ ID NO: 3811 - DNA, 210 bp, Homo sapiens
ctgaataggcacccaaaagtccgtgactaaatttcgtttgtctttttgatagcaaattatgttaagagacagtgatggctagggctcaacaattttgtattcccatgtttgtgtgagacagggtttgttttcccttgaacttggttagaattgtgctactgtgaacgctgatcctgcatatggaagtcccacttcggtgacatttcctgg

SEQ ID NO: 3812 - DNA, 201 bp, Homo sapiens
ctgttttccagcaaagatcagcctctgctggtcaggagggatgccttccttatcttggatctttgccttgacattctcgatggtgtcactgggctcaacctcgagggtgatggtcttaccagtcagagtcttcacgaagatctgcattgtcaagtgacgatcacagcgatccacaaacaagaaccgcgacccaaatcccgg

SEQ ID NO: 3813 - DNA, 234 bp, Homo sapiens
gtgtgaggacagccccatcttcatctgccctgcactcacaggagccaatggggtcacggtgcctgaagagggcctgacacttcacagagtggggacccaccagagcctatagaatcaattccttggtctcacagccatgtagacaagccctggtcatctcagcagccaccgcacaacacccctggtggaagacacgccctcctcccctctggtcacacaagagaacatcttcca

SEQ ID NO: 3814 - DNA, 300 bp, Homo sapiens
gtgcagcaagtagctgctgaatattgtagagcatgtcgcttgaagtctacttgtatctacggtggtgctcctaggggaccacaaatacgtgatttggagagaggtgtggaaatctgtattgcaacacctggaagactgattgactttttagagtgtggaaaaaccaatctgagaagaacaacctaccttgtccttgatgaagcagatagaatgcttgatatgggctttgaaccccaaataaggaagattgtggatcaaataagacctgataggcaaactctaatgtggagtgcgacttgg

SEQ ID NO: 3815 - DNA, 462 bp, Homo sapiens
ctggcttctggtgtctctcatcacaccactgcggacgctgtctgtagagcagccttggtgtgggtgactctgaagctggagtgatgggaccccagctatccttgttttttaccgccttgtctggcactgtgaccacgcttcagggctgcttctgggggtcttggtccctggatgtgccatttccttgcccttctgaccctcacacttcttccaaagtcttgagcagagttgggggccaatggtagcattgctgtcatctctgggaggagagtgagtatacaagtcagtgacagttcagccaggctcccttgggtttgggaagaggcactgcccttctgtgctgtggatcctgcttgtctgctctggagtccccccacccttgccaggagcttcacaaaccagagacgggctgtcagcaagagctcagacaggatgtggtacaagtgcaggtgcacgagttta

SEQ ID NO: 3816 - DNA, 469 bp, Homo sapiens
ccagtgagaggcactccctgcagggatttcacagcccaaatggcgggaccgtccaggggctccaagaccaacaggagcatgtggtagccacgtcacaacccaagaccatggggcatcaggacaagaaagatctatgtgggcagtgttccccgttaggctgcctcatccggatattgattgacgggatctctctcgggctcaccctgcgcctgtgggacgtgtatctggtagaaggcgaacaggcgttgatgccgataacaagaatcgcctttaaggttcagcagaagcgcctcacgaagacgtccaggtgtggcccgtgggcatgtttttgcaacccggttcgttgatacctgggccagggatgaggacactgtgctcaagcatcttagggcctctatgaagaaactaacaagaaagcagggggacctgcaacccccagccaaacccgacaagggtcgtcggcatccag

SEQ ID NO: 3817 - DNA, 290 bp, Homo sapiens
aaatgtcaaggcagagaaatacattgatcatgttaaggtcatgtgatgtggtggcgcagtaatgacttcctgaggaaacagagaaattggatgttttgtgatttagctatgtgcactaaacttattttccatgttttgagagcacattaaacattcacgtacaacgtgggactaggttggcttgtacccagaacgtccaacccaatgccaccctttgaatcgctgtgaacactgttctgttgctgttcagagaaaacaagcaaggctgcgaagcccgggggtgcaggcag

SEQ ID NO: 3818 - DNA, 280 bp, Homo sapiens
aaacttttctgaaacgattagctgtagccaaattatgtggttacgttttgctacattagaatttgaaaatgcaatatgtgtggtaaatctactgtttgaaatttataatggtctctgatatgattcgaattttggtaacttttgaaagttattttccccctttagtcatggatttctatttgttttttaatgttaatttttctagaaagcatctgaattgactaggcttttcctatataaaaaactcaaaacttgttaactctgtactttaataaaattt

SEQ ID NO: 3819 - DNA, 465 bp, Homo sapiens
ccaggaaaagactgaccattggtctccaaagatgctggatagcattgccagatcacatctaaacaactccgactgcagtttcacacaggtggtggtccaaaatttgtaaaaaagtgaaagtgatgtgtgaagatagggctgagatgagaggaaatggattcaagcctcattggaaaagctgagttagtttgttactttaatttgagcatagacaatggggtcaaagtctgcagaatggttctcagccaagtgattgctcttttcttctgagagtttgaaagttgtgctggcataggtaagtgattcccctgggatggatgaaagcttggctggaggatctgagtgaggatctggggcctggggcttggagtgatattttctgtagctctttatgatgaggaagataaaggctatcagcagcagtgtcagtagaaccccagcacaaaaggcaaggattaaatgttt

SEQ ID NO: 3820 - DNA, 318 bp, Homo sapiens
ctgcatgcctctctgcctcctctgtctgcccaccagcctcctgcagtgtgctactctgctctgtgactgctcctcatgcagctcgcagccatgtttcctctctgcttcttgatttgcttcagctccttctagtgccttgaaactgaagctggcctgtagttgggatcaaagatggagggagaggggagattgtactatggatagtgtagggcaagaagtgaattcttacactggaatgataaaaggaacctgcttcctgagtttcttaaaattgtgtctggaactcagatttgcactgcctagtatagtagctgctgg

SEQ ID NO: 3821 - DNA, 294 bp, Homo sapiens
ccaggaagtagtcacagcgagacacagcctgcacctctgcaatgttaagcaggtaactctgctcctctaccacttgactattggacttctcaacttcagccaaagagcctgtgaagaacttccgagagcgagccagctcatcctggaccctgcgctcctcatgcccatactcctggagaactgctttataccttgcctgaaggtccttggagacaccttccaaggctgccttccgccgctgcagctcccccataagttcccgcagacgagttaacttctctccaaagtcccgac

SEQ ID NO: 3822 - DNA, 211 bp, Homo sapiens
ctgctttgctttctctttgcccaaatctgaagccaaaacaagaaagtgggcatccaggactgcttctcttgctcgggacacttcattaaacagagtgttagcctcttcaaggacctctgttaatttgtcaccggcattcagtatgtcctcacggttttgttggacggagttgatgagcgcccggtactgatggcggatctggcggcacagg

SEQ ID NO: 3823 - DNA, 208 bp, Homo sapiens
ctgggaagtctggcaaagatccagtggcccacatatccctgcttgtcttgtcccctctcaggaggatgtgttggctttcaaagctgatgtccaagtggaagagccactgcagagtggagaagcaccgaaccaaacccaacacggcatccagggacaaaccgttctcactgaggttcaaggactgcagagctcccagccctgggagcag

SEQ ID NO: 3824 - DNA, 283 bp, Homo sapiens
aaagctgcctttctggtgagtactgttttatacttttatatattataattttatcttctaaaattaactgaaataggacactttgattaaagaggtgagcactctgaatttctacatctttggatattacttgaatcaagaatattagaaaattattttaccacctggcatttcccttttaatttgctagttcacttttttctgaccttcacttaacagactataaatacaaaaactttgaacacataaattatttcattttggtgagatggaataaatgttt

SEQ ID NO: 3825 - DNA, 351 bp, Homo sapiens
cctctggaggctcgggactggaggcaaagcccaggagaggtgggagacaggagctcccgactgtcagaggcatggaaatggaggctgagtcctggagaaactccagagcggagtctgagactagcagagtctcgagagcaaagccccaggagaaaagaggtggaaagtagactgagcccaggggaatctgcctaccagaagttgggcctgacagaggcccataaatggagacctgactccagagagtctcaggaacagagtttggtacaactggaggcaacagagtggaggctgaggtcaggagaagaaagacaagactactcggaagaatgtgggagaaaagaagagtgg

SEQ ID NO: 3826 - DNA, 460 bp, Homo sapiens
  unsure (438): n=A,T,C or G
  unsure (447): n=A,T,C or G
  unsure (460): n=A,T,C or G
aaaaacgaaacaaagttatggggttaatctcctacacaattcatttacttcatttgaatgttagagctactcatgattatttgtgtttctaatttatagtttaagtttatttgtaaaaagttaaaagagagtgggtctctgtggctctcactgatgttcactctggcatccttcagcatttttcttttttcatttcataattgtaggtcattagcatgcatatcgagtttgcccttacgtggtgggagttcaaacacacaaagacccactctttgcacaaaactgttctcgctggtttggaataggctcccgtgcttttctaatgttattgcagcatggatgtccattacagaattcagataaaatttgctaatgttctgctatgatgtttgatctcatcttaatcacagtgagctcttctatagctcaatatgcggnttgccctcnagtgtgcactgtn

SEQ ID NO: 3827 - DNA, 415 bp, Homo sapiens
ccaattgaaacaaacagttctgagaccgttcttccaccactgattaagagtggggtggcaggtattagggataatattcatttagccttctgagctttctgggcagacttggtgaccttgccagctccagcagccttcttgtccactgctttgatgacacccaccgcaactgtctgtctcatatcacgaacagcaaagcgacccaaaggtggatagtctgagaagctctcaacacacatgggcttgccaggaaccatatcaacaatggcagcatcaccagacttcaagaatttagggccatcttccagctttttaccagaacggcgatcaatcttttccttcagctcagcaaacttgcatgcaatgtgagccgtgtggcaatccaatacaggggcatagccggcgcttatttggc

SEQ ID NO: 3828 - DNA, 337 bp, Homo sapiens
cttcacggaggttactgtgtgagacgaaagacagttcactgttcatcactggaaatactgtacgtgctactgaaaaacaaggattttattgaggatctatcttgggatcccatggctttctttactgggctctggggccccttcacctgtgtaagcagagtgctgagccatcactgtttcagcaccactgggagtctgagtgcgattcagaagatgacgcgggtacgagtggtggacaacagtgccctggggaacagcccataccatcgggctcctcgctgcatccatgtctataagaagaatggagtgggcaaggtgggcgaccagatactactgg

SEQ ID NO: 3829 - DNA, 153 bp, Homo sapiens
cctgaggtcacctggctaggaattcatagggcaggatttaatccgggtgcctgagtccagaaccttgactctgaagccctgttttgagctaaatgcagcagcagcataaacagcccgttttgtgcctcaaaaggtgaacagtgggaggcacag

SEQ ID NO: 3830 - DNA, 473 bp, Homo sapiens
  unsure (473): n=A,T,C or G
ccgacgtctgtgggttctggagcaactgccctcctaaggtctgtccttagcagggaccttcccctgactcatgaatgctggaatcaaggaccccaacaccataatcatcaaggtgatacatctgtccttcattgtcatgtgcttcacaacagagtaagtgctggcacacagggtcccaggctgggatggcccatgtgtggatggtgcttccagtaacgaggtggggcacacttctacctggggcttgaaactcccagtgggacaagaaaacccagaccccactcctcaccccttccctacctgagctcttcctcctacacatcacaacagccaccacagctcctaggacagctaggacagccaggacagccaggccagcaacgatgcccacgatggggatggtgggctgggaagatggctctgggaaaggaggggaaggtgaggggccctgacccccaacctcagccctgacn

SEQ ID NO: 3831 - DNA, 227 bp, Homo sapiens
ggccagtggaactgtacagcttggagaaaatggcaagatctgttgggttaaagaggaatgaagccttttaattcagaaatggggccagtttagaaagaattatttgctgtttgcatggtggttttttatcatggacttggcccaaaagaaaaactgctaaaagacaaaaaagacctcacccttacttcatctatttttttaataaatagagactcactaaaaacaaa

SEQ ID NO: 3832 - DNA, 265 bp, Homo sapiens
ctgaaacgcatgacctcgtgggtcctgaactgacctctggtcacaacacccagggcctggttctcccattgggtaaatcttcagaggaacggatggagaggaacgcagtggcttgctttttctgctgatgctgcggaacttccttcagggtcacatggtgaaccaagagagcctggtgcagtgccaggggcctgccatcatcggggccctcctgcgaaaggtcccaagctgggccatggacatgaacgtgctcatgtccgcccag

SEQ ID NO: 3833 - DNA, 329 bp, Homo sapiens
  unsure (113): n=A,T,C or G
ccaatacggctatgggtgtaggcagctttcagaggaaattagtggtctgggcttgcctccagctccccaggggcagccccagtagctacactgtccagacagcacaagaccangcttggtgtcacgtccatccgagcgctgcctcagggatcgataaagtttcactgcagaaagtctccactgcggtatgctgacatctgccctgaaccttcaccctacagcattacaggctttaatcagattctgctggaaagacacaggctgatccacgtgacctcttctgccttcactgggctggggtgatccttggtgcctttgtttccacaagg

SEQ ID NO: 3834 - DNA, 194 bp, Homo sapiens
ccagcttatgaggcagatggtctcagttacaacttcgctgctttcccaaactcctgcagccctcctgagtccgacttccgttgatagcaaggcactgggtggcagcaacctttttttctagtagttttttcccagcagttttccatttctccacagtatccttttcatttagaggagcttaataaatgcttttt

SEQ ID NO: 3835 - DNA, 159 bp, Homo sapiens
cctgtgcagtcttaggctatctgtgctttcatttttcttcacacggtggcaggtctacactgcccagccccaggggtgggccttcctcacctcttccctcttgattttcagtctcagcttttccagtcccctcccccaaaccagcaatagcagaagcag

SEQ ID NO: 3836 - DNA, 328 bp, Homo sapiens
aaaaccaccgacagcccttgggttggcaagaaggcaggagtatgtatgaggtccatcctggcatgagcagtggctcacccaccggccttgaagaggtgagcttggcctctctggtccccatggacttagggggaccaggcaagaactctgacagagctttgggggccgtgatgtgattgcagctcctgaggtggcctgcttaccccaggtctaggaatgaacttctttggaacttgcataggcgcctagaatggggctgatgagaacatcgtgaccatcagacctacttgggagagaacgcagagctcccagcctgctgtggaggcag

SEQ ID NO: 3837 - DNA, 212 bp, Homo sapiens
gggaggatggcctaagcctgagaaattgagactacagtgagctgtgactgcaccacttgcacttcagcctgggtgtcagagtgagaccctgtctcaaaaagaaaaaaagaaacagttacttcttgtcttatacaagtcattccagcaaacagaaaaagtgtgaaagctgtcaacctctttaggctgaagaatcctgattcccaaatctgtgg

SEQ ID NO: 3838 - DNA, 356 bp, Homo sapiens
ttttttaagaaagacatctggattgtagggtggactcgataacctggtcattatttttttgaagccaaaatatccatttatactatgtacctggtgaccagtgtctctcattttaactgaggggtggtgggtctgtggatagaacactgactcttgctattttaatatcaaagatattctagagtggaactcttaagaccagtatctttgtgtgggctttaccagcattcacttttagaaaaactacctaaattttataatcctttaatttcttcatctggagcacctgcccctacttatttcaagaagattgcagtaaaacgattaaatgagggaacatatgcagaggtgctttt

SEQ ID NO: 3839 - DNA, 272 bp, Homo sapiens
ccacagaaaaatgggcagttaacattccttttactttagttttgagggagggggaatggagagagggagagaggacacagggaaacttacagcaaccattttcgctgtttatatttttcttgaggaagaaaacaaacgcacaaatcctggtgttaggaatagtttaagcatatatcttcagtattattcttccaggaccaaagtaagtcctgatgcaggaaatgagtgagtttcacagcttttggagcccttactccatccaggaagcccag

SEQ ID NO: 3840 - DNA, 205 bp, Homo sapiens
ctgtggtggtgccttttggagaagagcagagatacacatgccatgtacagcatgaggggctgccgaagcccctcaccctgagatgggagccgtcttcccagtccaccgtccccatcgtggggcattgttgctggcctggctgtcctagcagttgtggtcatcggagctgtggtcgctgctgtgatgtgtaggaggaagagctcag

SEQ ID NO: 3841 - DNA, 168 bp, Homo sapiens
ctgccatgtggcagcagcaggagctactagaatattctcagcacaggaatgaggcttccttggtttccatgtctgtaagggttactgatcacttaccttcttctctttcagacttgaaatctgtagacatttctttattgatatggcaaattgcttgcagatattttt

SEQ ID NO: 3842 - DNA, 251 bp, Homo sapiens
aaagaagacagcgtctgctttgaacaggccctttctgagattagcctcaccttaatactctttgctctgcaataggccaatcaatatccacatctatatccacactatgttcagctcgcatttcgtagtatgccatttttccaccctgcaagtaacccatctctatcaaatgtcttttagcaaaataaaatgagccattttcatataattctccatcccagtcttgtcgacgaggccgtttagctggattt

SEQ ID NO: 3843 - DNA, 409 bp, Homo sapiens
  unsure (361): n=A,T,C or G
aaaatggtttgaaatgtagggaggttttgtctgtttgtgtgaagaatattttgcttcctttgggaagttctggggtttagaaacctttcttctgcctgggcgggtgaggaggttggcctctggccttggacctgcctctggatgttgactgggggaacggagttcagcccgcctgtggtctgcggatgccggattctaggctgtgaattctccacccactgatttgggtggatgtaagtgagtctccctgtcccctctttctctcctcatgtgtgaacataaaggtactcatgcatcacaggactttcctgtaggtgctgatgtctatacaagcactttgctgttataaaggactgctganctgttgaagtcagtaactctttctgtcttcctgtatgtaaaataaaat

SEQ ID NO: 3844 - DNA, 232 bp, Homo sapiens
tgagagttcctgtgctgtgtggaattcaacactaatctgctgtaagtatggagctgggtatgtggaacatttgcagggaagtttgtttctccgcttgtttttccaggggtattcgagatgacattgaagaggaagatgaccaagtgagttcctatgcagtatttctatcttttatttttatccacaaagtctatactggggacaagctagagcttgccttcactcaaaatgg

SEQ ID NO: 3845 - DNA, 103 bp, Homo sapiens
taaaaaaatgaaagctagacaatagctgcaattttttgttaacaaagcaaatcacttcaacgtgaataggagtaatctcatctctgcacctccatggacctca

SEQ ID NO: 3846 - DNA, 190 bp, Homo sapiens
  unsure (51): n=A,T,C or G
  unsure (58): n=A,T,C or G
  unsure (110): n=A,T,C or G
  unsure (116): n=A,T,C or G
  unsure (120): n=A,T,C or G
  unsure (135): n=A,T,C or G
  unsure (146): n=A,T,C or G
  unsure (180): n=A,T,C or G
aaaggtatccgggagattggcagtttgtaatacaagaattatgtgcccccnagaaggnttctggcctcagtgtctctatctgtctaatgggcagcagatcagacaagggnctgtcngctnttgacagggttcaanggcatctcctntaaatgactcactgtctctggagaaatatgtgancattttcaca

SEQ ID NO: 3847 - DNA, 287 bp, Homo sapiens
ctgccgttgacagaaggaaagattgtccattcggggggtgcccgaacgtcgccccttctccggcccagaacctttttgtaagttacaccctcacgttctgctccttccacttctgcaaactttccagggttgggtaggcaaaaaggcggcttcgctgaggactgtttactgctttaggtttttttggaattcaaaactgttaactgctgacatgaatggtgtgctatgacctagttatacaagacaaagatggattccaagtcataaggaaaaatccagatcttttt

SEQ ID NO: 3848 - DNA, 244 bp, Homo sapiens
ccttggtgaccatcagtttcagatgcaactcttacagcggagtcttggaatcatgcaaacagtgaagggatttttttatgtttcattacttcttgacattctgaaagagataactggaaagttccttgattcagaaaacagattcagatgaagaagttgcaatgctgttggacacagtccagaaagtatttcagaaaatgttggaatgtattgcacggagcttcaggaagcagccggaagaagg

SEQ ID NO: 3849 - DNA, 232 bp, Homo sapiens
ccgatatggctgagatcgagaaattcgataagtcgaaactgaagaagacagagacgcaagagaaaaatccactgccttccaaagaaacgattgaacaggagaagcaagcaggcgaaatcgtaatgaggcgtgcgccgccaatatgcactgtacattccacaagcattgccttcttattttacttcttttagctgtttaactttgtaagatgcaaagaggttggatcaagttt

SEQ ID NO: 3850 - DNA, 330 bp, Homo sapiens
  unsure (239): n=A,T,C or G
  unsure (284): n=A,T,C or G
  unsure (305): n=A,T,C or G
aaaaaaaagatccaagatgggcattatattcattgtatgtttacaaattcttacattttagttattcttcagcaaaaaatccagatggatgtttttttcagaaagtgttgaatgggtttacaaagtttttttgtaaggaacaatattgcaaattactaaaattgtatttttataggctgtttgctcttttgtggatattgtgcctgtcaggattcttgaagttttttttttatagtganataatggagttggtcttagccgctgcaggagcccttcttttctgnggattcatcatctatgacacncactcactgatgcataaactgtcac

SEQ ID NO: 3851 - DNA, 175 bp, Homo sapiens
ctggaaatgcagaaatcacccgtcttctgcttctctcatgctagtagctgtagactggagctgttcctatttggctatgttggaaccctcccagtcccagtaaaatttttcatttggaaaacagaagatgggaaaaaaacacagaagtcactgatccattgcaatagtggaattc

SEQ ID NO: 3852 - DNA, 353 bp, Homo sapiens
ctggcacgtgctcagactcggcatgagaacaaaaccggaacagtgctttcccacgtgcccctgcctcccaccctggccctgaacagtaagtccagaggcagagacgtggggcaagtggaaaaagaatctctgcaatagctagcctcagcacaggaagaaacacttccacccatccacaaaatctgggctgaagttctagatgcatatggcctacctttgggtatgaaccttctaataccttgtgatctgtctcagtggcgtctggcagaaaagctccacgaaaggggcaaagggacagaagagcaggcagtggcagtttccaggtaacagtgctgccacccaggtgaccatgg

SEQ ID NO: 3853 - DNA, 401 bp, Homo sapiens
  unsure (17): n=A,T,C or G
  unsure (26): n=A,T,C or G
  unsure (103): n=A,T,C or G
  unsure (114): n=A,T,C or G
  unsure (198): n=A,T,C or G
aaggaattggacagaancttcttcanaagatgggctacgtccctggacggggcctcgggaagaatgcacagggtatcattaacccaattgaagccaagcaganaaagggaaaangtgctgtgggggcttatggatccgagcgcaccactcagtccatgcaagacttccctgtggttgactcagaggaagaagctgaanaggagtttcagaaggagctgagccagtggaggaaagacccaagtggaagcaagaagaagcccaaatactcttacaagaccgtggaagagttgaaggccaagggcaggattagcaagaagctcactgctccccagaaggaactttctcaagtcaaggtcatagacatgacaggccgggagcagaaggtctactacagctacagt

SEQ ID NO: 3854 - DNA, 341 bp, Homo sapiens
  unsure (199): n=A,T,C or G
  unsure (297): n=A,T,C or G
  unsure (334): n=A,T,C or G
cctgggccccggtcacgtcgccaaccatcttcctgtccctagacttcacggagtaggcgaatgctatgaagcccagacagcaccagttcaagaagagggtgttgaacagggaccagacgacatggtcgggcacggaggtctcgctgtggatgttgatcacggtggaccttggaaggatggtgctggggggtgcccccancacagccacctcatgttcctccttgtgcatcttctggctttggggaaggaagtgttgagtgaaggtttgagaagtgtggttttctgcgtggagcgaanggccgctgtggtgtccggatgctgggacggtgctcanttgagac

SEQ ID NO: 3855 - DNA, 218 bp, Homo sapiens
ccattgggctgggagcaggcggggccgtgggggccgggggcctttccccctgcaggtggtttctgtcggaggaccagctagagggcgtccaagaggagttatttccaccccagtgattagaacatttggaagaggtggaaggtactatggcagaggttacaaaaaccaggcagcaattcagggcagacctccttatgctgcttcagcagaagaagtgg

SEQ ID NO: 3856 - DNA, 417 bp, Homo sapiens
ctgtccaacttgcaatgacttccatggacttgtgcagaaaatcatggagctacaggatattttagccaaaacatcagccaagctgtctcgagctgaacagcgaatgaatagattggatcagtgctattgtgaaaggacttgcaccatgaagggaaccacctaccgagaatttgagtcctggatagacggctgtaagaactgcacatgcctgaatggaaccatccagtgtgaaactctaatctgcccaaatcctgactgcccacttaagtcggctcttgcgtatgtggatggcaaatgctgtaaggaatgcaaatcgatatgccaatttcaaggacgaacctactttgaaggagaaagaaatacagtctattcctcttctggagtatgtgttctctatgagtgcaaggaccagaccct

SEQ ID NO: 3857 - DNA, 186 bp, Homo sapiens
  unsure (171): n=A,T,C or G
ctgaggcgctgtcctgggcagcctggttctgtgtgtgtggcctcaaggggccagagtgaggccggcttcctcctgggctcagtgcccctggatgggaggtgggcatgaacaggagaggcttccgagaatcagagtgtgctcagccaggaaaggcggaggccacctattcangaaacggggctgcag

SEQ ID NO: 3858 - DNA, 194 bp, Homo sapiens
ctgagggtgagtcctggagctccctgtgtcaactcaagcaagccacttagcaattctgggcctcagtttccccatctggaaaagggaggtcctcagggtgttgccatcaaaagatggttgtaatgtttcaatatagttccgcatattacacattcagcacagacccgggcatcggagcagtcccgaggcaccag

SEQ ID NO: 3859 - DNA, 306 bp, Homo sapiens
ctgcaggtcttgcacagacaaaaacaaaaaacaaaacccagaaaacaaaacaaaaaaccacaaaagaaagtttactacacaaaaccagtttctgataaagattctcctccccctcattactccacagtgaggatgataaggcgaggaatcccgccccaagagtcagaaaacattccaaacaccaaattctcatgcagaatggggctttagataggagctgggtattactgggagtgagatggtaaacctggttagcttgtctagggcgcaagaatcagtgacagttcaaacactggaatgttgcag

SEQ ID NO: 3860 - DNA, 168 bp, Homo sapiens
aaggctcctctgtctaccgcatcttcaagcgctggcaggcagtgaaccagcagtggaaggtcctaaattatgacaagaccaaggacataggaggagatgcagggggagggacggcagggaagtcaggccccaggaactcacggacgggccccacctctggggccacga

SEQ ID NO: 3861 - DNA, 333 bp, Homo sapiens
taattgagtattcagtaaacactgtgctcatctgctttttcctggcctccctccatttcctcctccctctccctctgcccttgcacatctgctttccttgtagcaaggggaagttgattgttggcccctgccttgcccagatgtggagtgtgaattcagcattctcccagagaatgagtgctgcccgcgctgtgtcacagacccttgccaggctgacaccatccgcaatgacatcaccaagacttgcctggacgaaatgaatgtggttcgcttcaccgggtcctcttggatcaaacatggcactgagtgtactctctgccagtgcaagaatgg

SEQ ID NO: 3862 - DNA, 311 bp, Homo sapiens
  unsure (13): n=A,T,C or G
  unsure (84): n=A,T,C or G
  unsure (95): n=A,T,C or G
  unsure (209): n=A,T,C or G
  unsure (233): n=A,T,C or G
  unsure (268): n=A,T,C or G
  unsure (270): n=A,T,C or G
  unsure (280): n=A,T,C or G
aaagcttctgggngtgcctttcaaattttgaacaagctgccttgtctaaacatcaatttctactactctgtagccttaaaatgngctctatttanatccacaggacccttctactggtgatatgaaaaacagaatacagaaattaagagaatcactttttactcaacaattaggggaagtaagtcaaagccctcctcttgcgacagcanatttcctgcgggccacctgttcancgccttgataggggatagggtgatcaaggcactcncnaaaacagttnattcaggtatggaatgtcagaattcctttgg

SEQ ID NO: 3863 - DNA, 194 bp, Homo sapiens
  unsure (1): n=A,T,C or G
ncagaagccctacaagaagatgaaagggccggaggtcatggccttcatcgagcagggcaagcggatggagtgcccaccagagtgtccacccgaactgtacgcactcatgagtgactgctggatctacaagtgggaggatcgccccgacttcctgaccgtggagcagcgcatgcgagcctgttactacagcctgg

SEQ ID NO: 3864 - DNA, 417 bp, Homo sapiens
  unsure (2): n=A,T,C or G
  unsure (12): n=A,T,C or G
cncggcagccgncaaggaagaccagcctgcctctggtcggttcctggcgctctgcgtttcgtgaccttgtccagtagaaggctatttaattttcacaactgcttgaattttgacatacaagatgaagcaagatgcctcaagaaatgctgcctacactgtggattgtgaagattatgtgcatgtggtagaatttaatccctttgagaatggggattcaggaaacctaattgcatatggtggcaataattatgtggtcattggcacgtgtacgtttcaggaagaagaagcagacgttgaaggcattcagtataaaacacttcgaacatttcaccatggagtcagggttgatgggcatagcttggagcccagagactagacttgattcattgcctccagtaatcaaattttgtacttgag

SEQ ID NO: 3865 - DNA, 269 bp, Homo sapiens
tggtattgctgtgccagaggggaggggatgaggggctctgcgaggaaggagaggagggtcccatcctcagatacagcagtgtgcggtgagaagaccccagtaccgcgtattgtagagattgaggtggggagagaggaagtcagggagaggcgcctgtggccccaggggcaactgaccacgaatccccttcccacccaagccttgtcctgacggtgtgcgtctcccagacccaggccaatgccagggccatccacaggctccggaagcag

SEQ ID NO: 3866 - DNA, 328 bp, Homo sapiens
  unsure (12): n=A,T,C or G
  unsure (15): n=A,T,C or G
ccaagcccaggntanaaaggtgggcagactaatggtgggaatagcctgagaagggaaggccattcattcatttattgagcacctatcattcaactattcacccattcagcatttattgagtgcctactatgtgccaggcactgggcgaggctctggggacgcatgcatgaacaagattacaccctggcttctttcaagccctggatcgaggctcatcagtttttgaaactccgtctagaagcctgcaggagaggtgggaaggctggacgtgctgtccccacccagtcagcggattggggttaagagtgagtaagtgatcactgctcag

SEQ ID NO: 3867 - DNA, 485 bp, Homo sapiens
  unsure (11): n=A,T,C or G
ctgctttctcntccgcaaaaactacgctgcttctctttgtcctcttcttggacctccgcagcttgacctcaggcagggtgctccccggggagatcggttcctcctgctccactctcggcgtcttgggtgatgctaattccaggtcaaagctctctgaggtaggcttgctgggggtgctgcagtcagaattcatggaagccagagagatgatggacatctgtctgtatgagcgcagcatagacctgggacggcccactctcctgtcgtcaaagtcaggcatctctcggacaccgtactccttctccaccttcattttcaggttcttgaaacattcctccatccggtcatggaagggtcgcaagttatctgacacccttttctcatggatcttaatcccagctcccaagaaggggatctgccatgcaatcaggtccttgaggtgggtcagcttgtcctggtcctcagggtggcccctgacatactct

SEQ ID NO: 3868 - DNA, 312 bp, Homo sapiens
  unsure (12): n=A,T,C or G
ctgcagaggttngtccagtggctaaaagaggcagaagaggagtcatctgaagatgactgaagtcacactgcctgctcctttgggtgtgattgagtgccctcctggctcctgggctgggacaagtgaggaactagctgtagagggatgagtgaccaccatccaggctgagactgaaaggagcagaggctggaactacagtattctttcccctgctagcaaccatgtgcctcccatcctgactgtggagttgggatgtggaagtggggctggaacaaagcttctgccaagggaggagctaagcaggcccggcag

SEQ ID NO: 3869 - DNA, 278 bp, Homo sapiens
  unsure (157): n=A,T,C or G
  unsure (230): n=A,T,C or G
  unsure (233): n=A,T,C or G
  unsure (253): n=A,T,C or G
  unsure (260): n=A,T,C or G
tgtaaccagtgtgtgttgagaaggaccaacaccaaaccaccctggggaagggggacagggaaacatttaacacagacgatgatcaggatttgccccaaaccaccccaagagagaggactgagtggaacaaaaaagtgacccccagaacctctcttantgtgagggtgggtagaataagaactgacacacctgcccgggcgggcgctaagggcgaattccaacacactggnggnccgtactagtggatccagcncggtccnagcttggcgtaatcatgg

SEQ ID NO: 3870 - DNA, 269 bp, Homo sapiens
cttcgaaccatggaccaggcccccaagtccctgatggcctcagaggaggagtaaatgtggggacctagaggaggagctgaaaattgttaccaacaacttgaaatccctggaggcccaggcggacaagtattccaccaaagaagataaatatgaagaggagatcaaactgttggaggagaagctgaaggaggctgagacccgagcagagtttgccgagaggtctgtggcaaagttggagaaaaccatcgatgacctagaagagaccttgg

SEQ ID NO: 3871 - DNA, 453 bp, Homo sapiens
agattgaacacaggtgacctggtatagatacacactgtactgtgggccagaaccatggactacattttaagccatgttgtgggcccttcctgcctacagaaaaggacacttgagtggagtcacacttgggttgcctaatttattaccttaactagaaacattctaagtatgggagcctgttctggaggatagcttctaaaccaaatctaaaactatctttgcacacaagtgttgtgaagaggtaagcaggggatcagagctccatcttctgtgaccacttctccagggactgccacctatagggctcaggttggtaccaacagccctgcatagtagagtcactgtcaatcatcttcccacttgtaagcaggaagacaaaaagtctcatgaaatagaaacgaaaacactgaacatggccttcatcgtcctaatgccacaagtttcctgggatgg

SEQ ID NO: 3872 - DNA, 436 bp, Homo sapiens
  unsure (237): n=A,T,C or G
  unsure (372): n=A,T,C or G
  unsure (378): n=A,T,C or G
ctacctaccaagggtgaaaactatattcacagaattggcagagggggtcgatttgggaggaaaggtgtggctataaactttgttactgaagaagacaagaggattcttcgtgacattgagactttctacaatactacagtggaggagatgcccatgaatgtggctgaccttatttaattcctgggatgagagttttggatgcagtgctcgctgttgctgaataggcgatcacaacgngcattgtgcttctttctttgggaatatttgaatcttgtctcaatgctcataacggatcagaaatacagattttgatagcaaagcgacgttagtcgtgagctcttgtgaggaaagcattggctttatcctctttanagttanactgttggggtgggtataaaagatggggtctgtaaaactttctttcttagaaatttat

SEQ ID NO: 3873 - DNA, 471 bp, Homo sapiens
  unsure (10): n=A,T,C or G
ccagttgctntaagtggattggatatggttggagtggcacagactggatctgggaaaacattgtcttatttgcttcctgccattgtccacatcaatcatcagccattcctagagagaggcgatgggcctatttgtttggtgctggcaccaactcgggaactggcccaacaggtgcagcaagtagctgctgaatattgtagagcatgtcgcttgaagtctacttgtatctacggtggtgctcctaagggaccacaaatacgtgatttggagagaggtgtggaaatctgtattgcaacacctggaagactgattgactttttagagtgtggaaaaaccaatctgagaagaacaacctaccttgtccttgatgaagcagatagaatgcttgatatgggctttgaaccccaaataaggaagattgtggatcaaataagacctgataggcaaactctaatgtggagtgcgacttgg

SEQ ID NO: 3874 - DNA, 234 bp, Homo sapiens
caggagtttggtagaggagtgatctaggtgaggggaatggaaggtgcagagaccagagctgagagggcctgaggcactttccagagcgtggggaggggcctccaccaaggcgagaagggctgcaggtccagatcaccagcgtttgtagacagtagtgtggcgcttggagtttacctgagggccagtggagctccagggacctatcaggacggggacctgtggggactgggaagg

SEQ ID NO: 3875 - DNA, 247 bp, Homo sapiens
agtgggcctcctactccccagcacaggtgcaggaggaactctggaagcactgctctctgtcagtgatacagcttccaaggtgttcttgagtagcagacattgtccctcagaaggggtgaccccacgggcatgcgcaccctgttccagcgggggccttttttgtagatgggcttgacggagccaggagcccagcgcgtcaggtaccggttgagttggggtttgctcttcggaacaactccttcaggaa

SEQ ID NO: 3876 - DNA, 272 bp, Homo sapiens
aagcacaacattctctacttcctcacctacgccgacgagtacgccatcggctacttcaaaaagcagggtttctccaaggacatcaaggtgcccaagagccgctacctgggctacatcaaggactacgagggagcgacgctgatggagtgtgagctgaatccccgcatcccctacacggagctgtcccacatcatcaagaagcagaaagagatcatcaagaagctgattgagcgcaaacaggcccagatccgcaaggtctacccggggctcag

SEQ ID NO: 3877 - DNA, 311 bp, Homo sapiens
  unsure (12): n=A,T,C or G
ccactaccgggntggacctcctccttcccccagcactccactcagggaaaatcaattccatcaaaaacaattgattttaccacctacaaatgggcaacatctacactccagtctcttcccactcacagactgtgcctcctataagcctggtatctcagaactctgagagtgggcttccccatggataccagggctcccaggccgggccactttacctaagtaggtgttgtccttctcatacagagctataatctcctgccaatccttcatccgctgtgaagagtatcggccaaaaatattcttcgtggagg

SEQ ID NO: 3878 - DNA, 175 bp, Homo sapiens
  unsure (11): n=A,T,C or G
ccctcccctgntcagaatctgataccaaagagacagggcccgggcccaggcagagagcgaccagcaggctcctcagccctctcttgccaaaaagcacaagatgttgaggtgagcagggcaggcccccggggaggggccagagttttctatgaatctatttttcttcagactgagg

SEQ ID NO: 3879 - DNA, 327 bp, Homo sapiens
gctactttattgcaacaactctagcaaattaatgcacaaatggcagaatggtatttttcaacttttatgagaaaagtaaaggcagttatagtagaagagagcatcatgagtcgactgtgctcagatagggctatttgcttttccccaactatgctccatacttttttcttttcatatgttttttttgagtcggggtcttgctctgctgcccaggttggagtgcagtgtcatgatcatagctcactgtaacctcgaccttctgagcttgagtgatcctcctgtctcagcctcccaagtagctgagactgcaggtgcatgccaacacag

SEQ ID NO: 3880 - DNA, 230 bp, Homo sapiens
acgtgtatgcaaatgagtgatggataaggatgagtcttggagttgcgggcagcctggagactcgtggacttaccgcctggaggcaggcccgggaaagctgctgtttactcatcgggcagccacgtgctctctggaggaagtgatagtttctgaaaccgctcagatgttttggggaaagttggagaagccgtggccttgcgagaggtggttacaccagaacctggacattg

SEQ ID NO: 3881 - DNA, 256 bp, Homo sapiens
caagagacgtctctgaagccaccgttcctgattattcagaggcagggtccacagtgagtgactcggtggggctggaggaacccagggtgacccagagggggctctggagcgggtccctaacatctgaaaaagtcctcccagggaactcggagctggaacttccaggcagcttcgggggtgacatttgtatccggccagccgagcggggaaaggagaccttgtgtcctggcaacagggagagccgggactgggatgg

SEQ ID NO: 3882 - DNA, 315 bp, Homo sapiens
aaaaccacctccacctctaaccttgggtaaaactgggcttagtcgctcagttagttgtgacaatgtcagcaaagtaggtcttcctagtccaagtagtttagttccaggaagcagcagccaactaagtgggaatggaaatagtggaacatcaggacctagtggaagtactaccagcaaaactacttcagaatccagcagctctccctcagcatcccttaaaggcccaacttcacaagaatcacagctcaatgctatgaagcgattacagatggtcaagaagaaagctgcccaaaagaaactcaagaagtaatgtgg

SEQ ID NO: 3883 - DNA, 261 bp, Homo sapiens
ctggtaaaggtgactgtacagatgcgcattttccttttggtataaatggtccacagcactaactggtaaggcttattgtacagtatattgtcagtattcttctggttcagcataccttatagttcatatataacctgtattaattgtatagattgtgcattaaaagctgttaccaagttgtcagaacataagagcgaaaacaaggtcatatgtaatattttgtttgtaagtatcctttgtatcatagcaaaggaaatgttt

SEQ ID NO: 3884 - DNA, 295 bp, Homo sapiens
  unsure (54): n=A,T,C or G
  unsure (88): n=A,T,C or G
  unsure (100): n=A,T,C or G
  unsure (172): n=A,T,C or G
  unsure (178): n=A,T,C or G
  unsure (201): n=A,T,C or G
  unsure (212): n=A,T,C or G
  unsure (229): n=A,T,C or G
  unsure (235): n=A,T,C or G
  unsure (262): n=A,T,C or G
  unsure (273): n=A,T,C or G
  unsure (278): n=A,T,C or G
ggtgcctaccaacaagatggtgatgctgtcctgcgaggctaaaatctccctcantaacatgcgcatctactggctgagacagcgccangcaccgagcagngacagtcaccacgagttcctggccctctgggattccgcaaaagggactatccacggcgaagaggtggaacangacaanatagctgtgtttcgggatgcaanccggttcattntcaatctcacaagcgtnaacccngaagacagtggcatctacttctgcatnacctcaagganccccnagctgaccttcggggaa

SEQ ID NO: 3885 - DNA, 297 bp, Homo sapiens
  unsure (12): n=A,T,C or G
aactaaatacantgttggtcttgcctgtccttcaaaatcaacaacagattgtctctcggctccagggaggtgtcatttctatagaaattagaagctttctgatttctagatgaggttttacaattgtttcttacagtcatgtgcactaagtactctttttgtaagcagaggtggctggctctgcagccttaaggccattttttaagtcaccacgtctagaagtcacatgaactctgctcagcaataatctgttctcagaacagacttttcaacctgctgccggatttctccattcag

SEQ ID NO: 3886 - DNA, 147 bp, Homo sapiens
  unsure (30): n=A,T,C or G
  unsure (96): n=A,T,C or G
  unsure (122): n=A,T,C or G
ctaagtttgctgggggccttcatttctcangaccaaaggtggaaggaggtgtgaaaggaggtcagattggactccaggctcctgggctgagtgtgnctgggcctcaaggtcacttggaaagnggatctggaaaacccacattcccta

SEQ ID NO: 3887 - DNA, 184 bp, Homo sapiens
  unsure (122): n=A,T,C or G
  unsure (131): n=A,T,C or G
tgagaacaccttggatgcctttctcttgcaatgtcctccatgtccatgtaaaatccagtccttccaggccctgcctggctctaaacctcatccccttcgagggccatctgctgtggacagtngagctgtgnaaccttcagatttcccacacattacagcaaatgcaaatacacatagaaatcag

SEQ ID NO: 3888 - DNA, 286 bp, Homo sapiens
  unsure (18): n=A,T,C or G
  unsure (23): n=A,T,C or G
  unsure (155): n=A,T,C or G
atgggccaccaccagtgngacancaggacatcctaatatatggatcttgatttttaagtttcagtatctgaacttcgtaaattagtaacttttagctgggaaagtatagcatgaaaccagaggttctcagaatgactgtaagatagcttacattncctctttttgcctttatctccccaactaaaatacaatggggaagaagtctgcctatgatctttgaatgagctttttaaggaagaaatattatatattgtttgttaaagtttattgaaataaagaatcattt

SEQ ID NO: 3889 - DNA, 234 bp, Homo sapiens
  unsure (13): n=A,T,C or G
  unsure (47): n=A,T,C or G
aaagatgtggaanatggggtacaattaaaaccatgagagttgtgcanggaacagccgtagggcctgtttgcaccttcagatattgcctgctcccaaaaattcagacccccagatgcagggcaagacaataagaaagggtgagtgcaagcaaggagagcctcctgctaagaggctgaggtcccctctggttccaaggatgggatgtcagccttgaccttccggggtctgcagtgg

SEQ ID NO: 3890 - DNA, 218 bp, Homo sapiens
aaatgaaagccctttagtctgtactgaatcctttaatcatctccctccatctttttttttttttctggtcacagcgattgaacaggagaagcaagcaggcgaatcgtaatgaggcgtgcgccgccaatatgcactgtacattccacaagcattgccttcttattttacttcttttagctgtttaactttgtaagatgcaaagaggttggatcaagttt

SEQ ID NO: 3891 - DNA, 438 bp, Homo sapiens
ccaactaaatcatggcctgtctgcttacccattcaatgtgctgggaaggggccaatgatttcttaaactgtttcctagagcaggggctctaaaaccctgggtagcagaggactgtggtccaaaccaagccaaaagaaacaggctggggtagggaagcatggtgactgcctggcagaaaaggcaaactctgggccccatagggaaaagtgcattctttgcacctcagagatattgcagaaccagtgttaacactatgagactttgttaggaggggaaaaaataaaaccctggaagaatctttcacctgaactcaacttgactggagttcagtccaccagtctcaggggaagggggaagcacctagctccacagcagcactgagtctggccctcccgccccatctccccagcccctctcagcaactaggccaggcttcag

SEQ ID NO: 3892 - DNA, 576 bp, Homo sapiens
  unsure (508): n=A,T,C or G
tcaaaaatacctattactttagattaacatacttttcctaagagcttagcatttgctaaattgtttcctctaaaattctgctcatctggaccagtgacagttgaatctcagtccttccactgtcagagagtactgagagagcacaccatatctgctctgctcaggaactgaaaagtttatccagtaataagattatggactgccagtctggcaatgcaatatgaatccatgttgagcttgacagatgttagtctctgcaccagtagtagctaagaaatctgattggttagcagccaatgagcaatttctcacatactgccacaataaactaaccacagaaatggaaaaattttttttcctacattaaaatgaaaatatctcataagcacattatctcaagtttttcctgagagggctactcaaagagatacatatatatatatatagcaagttcgatctgaattacataatcagcgagactcaaagtacaatcatcacagaagattgngaattataagcagcattatatcaaattaaaacttgtactagcaaagaatttccttatatatcaagctc

SEQ ID NO: 3893 - DNA, 187 bp, Homo sapiens
aaagaaagaaaagaggaggactctcatacaactctgcatgaaacaccaacaactgggaatcactatccgagcaatcaccagccttgaaaggcagcagggtgcccaggtgaagctggcctgttttctaaaggaaaatgattgccacaaggcaagaggatgcatctttcttcctggtgtacaagtcttt

SEQ ID NO: 3894 - DNA, 310 bp, Homo sapiens
cctcggccgagcccgccggccagcctgagaagccaggctggctgctggtgaatgtgaacgctccgggtaaggctcggtggctgctgcggtcccagacccttcaccggcccttgggacccagggctaggcgtaacctgttggtgctgtcccccaaaacgcaggcttaagtccactccccgccctaagttctctgtgtgtgtcctgggggaccagcagcactgtgacgaggctaaggccgtggatatcccccacatggacatcgaggcgctgaaaaaactcaacaagaataaaaaactggtcaagaagctgg

SEQ ID NO: 3895 - DNA, 331 bp, Homo sapiens
ccacggtggggcagggtaccaccaagatccttcagtctgagctcagcgagtgtcccatctccacacttactgtgcacccggatcacggcctccagagagcggatggcattgaggttgggtttctgtttccagccttcttctgaaaggggatccacctatagaaaacagtacatcagccaccagtctctcagggacccacaggcccagctcactcccaccccaggggccccagccttctagccacaagcacactctacctaggccaggagatgctgcctggacctaacttggaacagaggctttcgcttcgcctaccttgtttcaggcttgg

SEQ ID NO: 3896 - DNA, 387 bp, Homo sapiens
ctgtggttctccaccacagagagaagaaaagggagggagatggagtgcgcaggtctgagaaggctttcattctggagcatctgcaggagcctgcaccatggcccagtagcacccctttttctccgtgagctgctggtgggttcccccctcccggatagcgcctccttccagaaagaggatgtggtcagcctgctccaccaggctgaggtgctgggtgatgagaagcactgagcgggagtaccgctcagggctttcgtacaggagctgctccacctgtaactggctgtttgcatccagggcactggtggcatcatccaggataagtacacacggtttccggatcaatgctcgggccaacgccactgcctgtcgctgaccccctgacag

SEQ ID NO: 3897 - DNA, 452 bp, Homo sapiens
aaaacttgctttgtttagaattcccacctcatttttccatggacaaaagtattctttatgtcctagtgcacttacaatttggtattacctgggagtgaaaagaaatattacagccatgcctaactgacttcttgaggtaagattgttctgtcagaaaaccctctcccagttcccctgcagcttttcaggaatccacatctctccagagctctttgttctcatgggtggcacctccagagtgaagaagatcctttgtcaagaagggaaacagaggggaaatgagagggtcctgcaggcagagctggaatcaacttccactctgcctcttgcaagctgtgtgaccctgggcacaatttctccttcctctggaaacctctgttttcttagatttggagcagggtggtcacactgaccttgcagagttctgagaatcagagacagaacataaaagg

SEQ ID NO: 3898 - DNA, 318 bp, Homo sapiens
  unsure (16): n=A,T,C or G
ctgccctctgtaaatnagaggtggggaaagcacccaccctagaagctctattgcccgaagattgtaaccctgaggagcctgaaaatgaagacttccacccttcctggtccccctcaagcctccccttccgcacggacaatgaagagggctgtgggatggtgaagacctcccagcagaatgaggatcggccccctgaagattcttccttagaactccctctggcagtgtgacaggcgctagaggtcctgcctcttacccattctctatttattcccttattttatctaacaccatttcaaaacaaaactgtagaagcag

SEQ ID NO: 3899 - DNA, 128 bp, Homo sapiens
  unsure (14): n=A,T,C or G
ctggttactttgtnaccattagaatggtaaaaatttaattaatgtaattaaattattgggagaaagcttaaaactttcgacaatactgctttgttaataacttgttacaaattaaattttatgttttt

SEQ ID NO: 3900 - DNA, 289 bp, Homo sapiens
  unsure (36): n=A,T,C or G
  unsure (54): n=A,T,C or G
  unsure (188): n=A,T,C or G
  unsure (190): n=A,T,C or G
  unsure (191): n=A,T,C or G
ccatgtccccagaattgaagccagagaatcgctcanatatccctgagggccggncgttatcaaaagagatgattaggacaggggcctggcctggcttctggtaataccagtgtacattgttactcccaatattgtttcccccacaggtaatcttggccgtctttcctggggccactgacactgagggngnntgagtcaacacataggaggtcacagagtctgtgcagtgagagaggaggccgaggaggagaacggtccaggccatggctgaggcaccaccagtgctgct

SEQ ID NO: 3901 - DNA, 452 bp, Homo sapiens
ctgggctgtgcctcggtctctatgcgcctcggtctctgtgcgcctcggtcccgcctcaagcaccgggtggcgtctccgctgtagtgttctgagttcaagttgcctcggaagtcccagttggggatacgctctcgcgcaccaggtacgcctggtgtttctttgtggtttttcggattctttttggggagtgcggggagtcacagttagaaggcggccgggtgttgctggaggaaagtgctgaggtccagagcgtagtccgagggctccgaagtcagattaaagggctcgaggacggcggacacaggggtgggcgccagggatgcggcgttaggggcgtcctctggaggcaggggcgccggcacaccctcttcagccatcaggatctggcagaagacgatggtgagcagcagaaagagaagccttttggctgggttcggttcctcgactggcag

SEQ ID NO: 3902 - DNA, 203 bp, Homo sapiens
ctgtcaagggcagcagattatcagcgcaaatccagaaaaaccctgtgcatcatcattcttatccttgtcattggagttgcgattatcagtctcatcatatggggattgaaccactgaagttataaaggagcacactgtcgcactacattgtctaaattatgtaggaagattcctgtaatcatgttttttttaattattatttt

SEQ ID NO: 3903 - DNA, 633 bp, Homo sapiens
  unsure (562): n=A,T,C or G
  unsure (622): n=A,T,C or G
aaaatgttttaatgtatatgtgttatgggtcataggtactcattagtatgcttcataatttattcacgttagatatactctttatagatatcaaatattacatattataatttcttaaaatctgctgtggtggaaataaatgaacacatgaagtctccctgaaagaaaatcagtgtttcttgggaagaaccaagattccctgacagaagctaccctatgtagaggacaaagtaggtcttcaataaatattagttggtttactgcttctcccaaggatacatctggagggtctgcattcctttctcattggtgccgcctgaccacagaactagctttttccgtgacatctaacctaaaccccgcagtcctaagtcctgacacgtatgacaagatgctgccacctggtggatacagaatagatttaatgaaatggctaggaagtctttcactctagttggtggaactggcaatagggtgagagggaagcaggaatgagaagacaaaaattaagaaacaggaaaaggaaggagctccatctctaatatggaggtaggaaaaaaangggactatcatctaaatgagactgaagagtccctagaggagaatggcttccctctccttncttctgagact

SEQ ID NO: 3904 - DNA, 294 bp, Homo sapiens
cctatgaggagtatgttttatctgttgggaatttagatgagcgggtatttcttggagaggatgctgaggaggaaattgggactctctcaaggtgtctgaacgctggttcaggaacagagactgctgaaagggtgcagatgaaaaacatcttacagcagcattttgacaagtccaaagcacttagaatctccacaccactaactggtgttaggtacattaaggagaatagcccttgtgtgactccagtttctacagctacgcatagcttgagtcgtcttcacaccatgctgacag

SEQ ID NO: 3905 - DNA, 225 bp, Homo sapiens
ctgccctccggtgggccggatctctagattcacattagacacagggactctctgtacacgtatctgagatctcaggctcctttttttgatgctgtgagtcactgtctccacctcacaccagtaagaccctgagtcttcagtccacatggcagggatctggagtctgggggacctgctccagcccaatccgagggtctggctatctctgaagagggagaattgcag

SEQ ID NO: 3906 - DNA, 268 bp, Homo sapiens
aaagatatatgaaaagggttttatttatttaacagacagacaatggaacaagcaaacaatgggagcaagtcctttgccaaaaggaacacagagggtcatgatgatgctactcctccaaggatttcagagttcccagacgcctagttttctgtctagttcttctggaagatgttattcttggggagcaataggtcctcgagtttggggctctttcaggttctctctccatttccccattctgcgctctaatctctctggttttccaagg

SEQ ID NO: 3907 - DNA, 219 bp, Homo sapiens
aaagcctaaaaatgccataggaggtcaccagtccttatgttgtactctgaattcctaggatttcaccttggaggtcacagcagtgctatgtagaaagaagaatgtactagggggagattattcttagaaaaggacagtactttggttggagtagaatcagtccacaccattcataacacaaacaccaggctctgtgggctgtgaggtggggagcagagg

SEQ ID NO: 3908 - DNA, 268 bp, Homo sapiens
ctgcctatcaaaacagtacaacttttctaggaaatgcaattggcaaagacacttacgatgctgagaagtacacaaggtgaaactgctccagtttttctcatagcagggtcagcaggaaagcaagtggtgcccctggtcccatctcacacaggtgagactgcaccgagaggtaacgtggccctcacagcccaccacgcctggccttcgcccaattctgaaacttcgtaggatagagctggaaagtgccacatggtgaagcgagatccag

SEQ ID NO: 3909 - DNA, 373 bp, Homo sapiens; identical to SEQ ID NO: 142

SEQ ID NO: 3910 - DNA, 285 bp, Homo sapiens
aaagtgccacatttggcagtacaaatgagtctgagtgtaatagcccagagatttatatatagttgaatgtctaaaatggtaaaatgtgccactgtgtcaagttacagtggcttatgtttttcatagtaattcaaatgaacttcctatttttgatagtaaatgtcatttaatagtatacttgccatttgagcctcactgcaaaattagtgcagaggagaaaacaatttttaatgtaatcttgattttacctcatatactgtacattccaaaaactctaaacttttt

SEQ ID NO: 3911 - DNA, 192 bp, Homo sapiens
ctgtggccccacgaggcaggacttcaataactcgcggcttgtcaatgatccgggccgttcggtttcccttttccacaatgccaacgatccacgcttggtgaccctctccgtacttggaggatttgatttcagaacaaaagcgagccgcctgttctcttggcagacaaatcagtaatcccccagaggtttcag

SEQ ID NO: 3912 - DNA, 308 bp, Homo sapiens
attctctcctgacggaagagtttttcaagttgagtatgctatgaaggctgtggaaaatagtagtacagctattggaatcagatgcaaagatggtgttgtctttggggtagaaaaattagtcctttctaaactttatgaagaaggttccaacaaaagactttttaatgttgatcggcatgttggaatggcagtagcaggtttgttggcagatgctcgttctttagcagacatagcaagagaagaagcttccaacttcagatctaactttggctacaacattccactaaaacatcttgcagacagagtgg

SEQ ID NO: 3913 - DNA, 535 bp, Homo sapiens
aaagagaaacttaaatcctgttgtattctttcaacacaagcagtgatacctctcagagtctgctcaaaagctcagctctgtggactccgtgacaaaatgtacgcgtccactgccgaccctcttggtttctgaaaccaacctttcttcctgctctcctctttaagagcaaaccccaacatgtataaggtcacagcaagtggtagccaggaaaagctgtgggacccctcatttgagtcacatccatatggcatggagaaagaaaacctctctgccagaaggaactgaactctggaagtcctaaggaaggtcaccatgctcagcagataggaaagcattgccaagggctgtccctcaagagcttagttttcttagggagaccagaaagacatcagatcctgactgccctgttttgctcaagttctgaaatgagtggcatgatgaagagctggtggagctgagggaaagagtcaaccatgtggggtggggtagtgaggaaggtgtatgaggaaacaaactgggccctgacgaaacaggc

SEQ ID NO: 3914 - DNA, 575 bp, Homo sapiens
gagcacggagatctcgccggctttacgttcacctcggtgtctgcagcaccctccgcttcctctcctaggcgacgagacccagtggctagaagttcaccatgtctattctcaagatccatgccagggagatctttgactctcgcgggaatcccactgttgaggttgatctcttcacctcaaaaggtctcttcagagctgctgtgcccagtggtgcttcaactggtatctatgaggccctagagctccgggacaatgataagactcgctatatggggaagggtgtctcaaaggctgttgagcacatcaataaaactattgcgcctgccctggttagcaagaaactgaacgtcacagaacaagagaagattgacaaactgatgatcgagatggatggaacagaaaataaatctaagtttggtgcgaacgccattctgggggtgtcccttgccgtctgcaaagctggtgccgttgagaagggggtccccctgtaccgccacatcgctgacttggctggcaactctgaagtcatcctgccagtcccggcgttcaatgtcatcaatggcggttctcatgct

SEQ ID NO: 3915 - DNA, 221 bp, Homo sapiens
aaaacattagatggtgctgaaaagccttctccctccctggatgaagcagtcaaacagacagctactctgcgcatacactccacgcattagcatgcgcgtggggctcagagcaacaggtgggagtttcagaagcattctggtttctccccactcctcacccctgcagcgcggttgcgtaaggtggcttgtaacaagacaactgcatttataaatttaatttt

SEQ ID NO: 3916 - DNA, 230 bp, Homo sapiens
aaatactgagctgggaggcagggaaggaagtagtggggctggcttaagggtatagccgcctcaggggagtcacccagcagcagtcacctggtaggtccagagagtgagatgggatcaggaactggcatagacctcagtcattggtcctcaagctgaggggtggaactgtagctgggcagggcccgggcctcccgaggtgcccatgtcccactgacccaaggacaagatgg

SEQ ID NO: 3917 - DNA, 373 bp, Homo sapiens
aaacacaacagaaatccattaatgtacgctgcagatttttttaagtagccttgaaaatcagcttcagtagttggagcagtgctgagctagaagtacttgtcatgttctctgttctctcaatgaattctgtcaaaacgctcagtgcagaaaattcagcgtttcagagatcttcagctaatcttaaaacaacaatcataagaaggcccagtcgatgacactcagggttctacagctctcccacatctgtgaactcgggtttggggatgttggttaagtttgtggctggtcctctggtttgttgggagttgagcagccgcagagtcacacacatgcaaacacgcactcttcggaaggcagccactgtctacatcag

SEQ ID NO: 3918 - DNA, 624 bp, Homo sapiens
  unsure (520): n=A,T,C or G
  unsure (574): n=A,T,C or G
  unsure (615): n=A,T,C or G
ctgtggtcaagtacacggatatgcatgtacaaggatatttattggtgttgcatataatgataaattattgagagttttctaaatgtacattttcctccttctggtagccatcttctctacgaagagtgactattgcctctttacccagaaatattggaaatgcaggaatggtggctgggatggaaaataatgatcgattcagtagaaggtcaagcagttggcgtattttggggtcaaagcagagtgaacaccgtccctcattacctcgatttattagcacctattcctgggcagatgctgaagaagaaaaatgtaaactaaaaactaaagatgactcagagccatctggagaagaaacagtagaaaggacaaggaagccaagtctttctgaaaagaaaaataatccatcaaagtgggatgtctcttcagtttatgacacaatagcttcctgggcaacaaatctcaagtcctccatcagaaaggctaataaggccctctggctctctattgcattcattgnactggttgcagctttgatgagcttcctcacaggccaattattccagaagtctgnggatgccgctcccacacagcaagaggactcatggacgtctntagaacata

SEQ ID NO: 3919 - DNA, 537 bp, Homo sapiens
cctcaggagggtgttggcaaggctggggcggggcctccaggctcttcccacaaaaggtgtggcgaggccagcaagtgtgggagagaggtgggaaggaggcagaaaggccatgcagagccagcgcatgaagccagaggcgcgttgcagacggcgctgggtacctaccgcctctgtctgctactctgcaaaatgctaccagcgcctgctaatcctgaccttcatgcccccaggtgaatcccacaaccatcctgaagccgggtttcctcattcctgataatgggattaaaaagaccttcctgggtgttatttgtgaggatttcataaaatagtgtaaaaatgctgactcatacccagcatggagaggccgctgggactattctgccatgactgtggtctcttggtttagagcatttagggccaaactgctggcatggttgaccctaagctggagattggaggctgctttaaccaggctgtggccctagaatctgtgggccatggcaaaaggatcctgaagaagtttccggccggcctctg

SEQ ID NO: 3920 - DNA, 412 bp, Homo sapiens
ccttacctgggaggccagacccatcctctccttaagccacaccctaactcatctctacatgctgggtggtgacaagcaaggacaccccaatctgcttggctccttggctggcagcagcacccacacatccctgcccaccacctgctcaggctccagatcccaaggaggaggtggaaggtgcctgccctccattatcaggcatgcaacatttattagaagccgcacagtctctcttgaccagtgttccgcatctgagccacaggatgcagaaaatgacttgagtgattctcgtcaattcttccaaggatggtatgtaactagtctcattctagaaagaagttaactcattatacacagtggatggcttaagggattagggcttcattctctcccagaccctggtagtaaaagg

SEQ ID NO: 3921 - DNA, 247 bp, Homo sapiens
  unsure (166): n=A,T,C or G
  unsure (203): n=A,T,C or G
ctgcgggccccttagcctgccctgcttccaagcgacggccatcccagtaggggactttcccacactgtgcctttacgatcagcgtgacagagtagaagctggagtgcctcaccacacggcccggaaacagcgggaagtaactggaaagagctttaggacagcttanatgccgagtgggcgaatgccagaccaatgatacccanagctacctgccgccaacttgttgaggtgtgtgtttgactgtgag

SEQ ID NO: 3922 - DNA, 229 bp, Homo sapiens
  unsure (7): n=A,T,C or G
ggaaaanggatggcaaattccctgtctttctggatccaaatcttacgattgctaggggcctggcagttctaaaaactgacttcgtggtcaagtagctttggagtcactgactgtctccagacgtccatttttgcacatgagaaatgaggatataatactacagaagaggcatcttacccaaccaatgcaccttacttctctgtgaaacacaggggatgctgggcgcagg

SEQ ID NO: 3923 - DNA, 543 bp, Homo sapiens
cctggcagcactggagggcaggcagggaaagtagggtgggtaacccagcctggcaaatgcacggcagctagaaaacctcttcaggttctggggtggctgggccatgagaggggaggccaggcagggctgtcaaggtaaccggggtcagatcatggagttgcctgccaggctccacaggagtgggggacagaagcagagcaacccagctaccagccgggccctgagctccctcagggtgaccagggaggagctgtgactggctggggaggcagggctggggccgaggttccccaggacgacaggagggagccaaggcactctaagaggtggaagaagaggaccagaagctggtgagtgcatcactggagcccataggagggctcctgactgtcctcaaaagcctcagacctcagtgtccactttctccatccaagaaatggggctgtgatctctgcttatgacagcacaagcttgcacagaagtggaggcgggaaataagcacaagtgtgccttcccagcccggcctgggtccaggcagaacag

SEQ ID NO: 3924 - DNA, 181 bp, Homo sapiens
  unsure (165): n=A,T,C or G
aaaagcaacaagaagaaaaccaaacaatgctgatagactcagaaaaggagtggggggcagtcaccactgctgggcgtggcatccgccttgggcctttctccgaccttctggtgtggccgccctgggggccaggccctcgccatcctccccatccttgttcctcancaaatggcattagcag

SEQ ID NO: 3925 - DNA, 482 bp, Homo sapiens
ccacaagatatgttctagagacgtccatgagtcctcttgctgtgtgggagcggcatccacagacttctggaataattggcctgtgaggaagctcatcaaagctgcaaacagtacaatgaatgcaatagagagccagagggccttattagcctttctgatggaggacttgagatttgttgcccaggaagctattgtgtcataaactgaagagacatcccactttgatggattatttttcttttcagaaagacttggcttccttgtcctttctactgtttcttctccagatggctctgagtcatctttagttctgtaaataaatgttgtttttaatatttgaaactagggataatatgctataattattcataaaatattgctgaatcttactgtaactcaagaggctcacaaatatttgttctgttttagggaaagttgataaatatctaactctaaaaatcaaatcaccagatttataattt

SEQ ID NO: 3926 - DNA, 168 bp, Homo sapiens
tttgaaattttctggcaggatcagtgtgtcaatctcctccaagatcttcataaactgctctattgtggcttttactctcctatcaagtttgcagagagcttcagcttgcaaatccttgggcagaaaaccctgctggattccagtaagctctttattcaactcttccag

SEQ ID NO: 3927 - DNA, 196 bp, Homo sapiens
aaaaattatgagttaatgctgcctgtgtctatggggttctgtcttctttgatagccatctattcatctggatcatgggaccctctctaatccctccaccaatcaaataagctattgctattggtttggagttgagatatcagtctcggaaacttctgaaaaatgctaataattacccaaggattatgtcaaatttt

SEQ ID NO: 3928 - DNA, 528 bp, Homo sapiens
ccagcacgctacaggggcttcctatgcgcttgggatacacaggggctggaggcttcccaggagtttgtcttgaacatctggaggtttgaatttgtcccactgaccttttctttcagcaagttcccctgaaatttgggctgctgcttgggtgaatatcccaggatgggggttccattctaggagtggactggcaggctgagcctcccatggagctgatccagccaggatacagagaaggggaggcaaaggctgagacagaaccagcttgagagcggaggcgcaactcttgtctcctggtggccttgagcatttcacaatagggggataaaggataggagcagaaaagtggggctgacttcagaaatggggtcctctagagctcacgggagggtgttagattggagtgggagcttagtggaggtgagccttagaggcaaaagtctccagaccaatccagggcccctcttctatccgggggcccctcttctatccagggcccctcttctgtctgggagcccctcttctatc

SEQ ID NO: 3929 - DNA, 520 bp, Homo sapiens
  unsure (351): n=A,T,C or G
ctaattcgggaaacgtgcaccttgactaattcggttttctgtggctacgagagcaggcttggcgggcggaggcgccagcggatgtctcatgcaaggatcgtctctgtggctaagcctcactttccgctccgcccgggtgctctctagagcccggtttttcgagtggcagtctccagggctgccgaatacagcagcgatggagaacggcaccgggccctacggagaagaacgtccacgtgaagtccaggagacgacagtcaccgagggggctgccaaaatcgcctttcccagtgccaacgaggtcttttataacccggtgcaggaattcaatcgggacctgacatgtgctgngatcaccgagtttgctcgcattcagcttggggccaaaggaatccagatcaaggttccaggagagaaggacacgcaaaaagtggtcgtggacttgtcagagcaagaggaggaaaaggttgaactgaaagagagtgaaaacctggcctcaggagaccaacctcgcacagcg

SEQ ID NO: 3930 - DNA, 519 bp, Homo sapiens
  unsure (20): n=A,T,C or G
  unsure (28): n=A,T,C or G
  unsure (75): n=A,T,C or G
  unsure (76): n=A,T,C or G
  unsure (92): n=A,T,C or G
  unsure (98): n=A,T,C or G
  unsure (108): n=A,T,C or G
  unsure (130): n=A,T,C or G
  unsure (138): n=A,T,C or G
  unsure (145): n=A,T,C or G
  unsure (205): n=A,T,C or G
  unsure (221): n=A,T,C or G
  unsure (253): n=A,T,C or G
  unsure (292): n=A,T,C or G
  unsure (304): n=A,T,C or G
  unsure (308): n=A,T,C or G
  unsure (358): n=A,T,C or G
  unsure (369): n=A,T,C or G
  unsure (405): n=A,T,C or G
  unsure (435): n=A,T,C or G
  unsure (459): n=A,T,C or G
  unsure (463): n=A,T,C or G
  unsure (466): n=A,T,C or G
  unsure (474): n=A,T,C or G
  unsure (490): n=A,T,C or G
  unsure (494): n=A,T,C or G
  unsure (497): n=A,T,C or G
ccaacacccacttctctggntgtataanacagggacctaaaaagggaaaggatgggaggaggatcatcctgcagnngatcatgtagggcttnatgctntaaatggttntgcatttccggagatgaaacangtctcttnaccacanaactactgcagatcatagccctatggtctggctggttttgtcaatctggcagttcagggncagtgcaaaggacatncccaacacctcaatcacacatacacagatggngatgattccgatatacaggaaattggaatgaaaccacantcttgctttcgnatancaaccctccacttttcgatctgaggggcaagatgctggtgggccactggnccaatcactcntgccatttataccacaacactgcagaaatgactggntggagtcccacgctgccttggtgctattgnctgagtggtaacggtggatgctgncggncanacccttanccacatactcattcancttntgntcatatacaaagagcaggatgg

SEQ ID NO: 3931 - DNA, 411 bp, Homo sapiens
ccaagtcgggaaggagccgtatatatgcatatgggattcctataatgtccagactgtgtctcttcttaaagatgtccatacacatggagttgcctgcctggcttttgactcagatggacagcgtttagcctctgtggggttggatgccaaaaacacagtctgcatttgggactggaggaagggaaaacttctggcgtcagccaccggccattctgacaggatttttgatatttcctgggatccatatcagccaaacagagtggttagctgtggagtaaaacacataaagttttggacactgtgtggaaatgccctgactgcaaaaagagggatatttggcaaaacaggggatcttcagaccatcctttgccttgcatgtgccaaagaagacatcacctactctggtgcttt

SEQ ID NO: 3932 - DNA, 532 bp, Homo sapiens
  unsure (10): n=A,T,C or G
  unsure (140): n=A,T,C or G
  unsure (265): n=A,T,C or G
  unsure (314): n=A,T,C or G
  unsure (331): n=A,T,C or G
  unsure (454): n=A,T,C or G
  unsure (525): n=A,T,C or G
ctgggcgtangtcacatcctggggggcttcagatgcagcagcctcagtgtccatctgcctgtcctcttccgcctgtctgtcctttgtgtccaggaattccccagacagtggggaaggaggagaggccatttctctcctangtctggagtgtttcacctcggcatacgtcactgcctgggggtcttcatcgtgtgggctctgctggagagagacagtggtgggggtgtccctgaatcctcctgaccccctggagtcaattttcctnactgttccccgggtgatccgattacatccctttcccgatggactctcanggacgccctaaggccgnggagggtctggccgctccctcgctgtggttctggcctctgctcctcactctgacgttgcccatttggctgcagcctcacgggccttcctgcaagagctcgctgctgcctgggggcctttgcanggttgtttcctctgcctgcaggggctcgtccatcagaggatcgtgtgccccactctgtccaggcttctcanatgacag

SEQ ID NO: 3933 - DNA, 390 bp, Homo sapiens
ctgaagtacaaaatttgattactggaggcaatgaatcaagtctagtctctgggctccaagctatgccatcaaccctgactccatggtgaaatgttcgaagtgttttatactgaatgccttcaacgtctgcttcttcttcctgaaacgtacacgtgccaatgaccacataattattgccaccatatgcaattaggtttcctgaatccccattctcaaagggattaaattctaccacatgcacataatcttcacaatccacagtgtaggcagcatttcttgaggcatcttgcttcatcttgtatgtcaaaattcaagcagttgtgaaaattaaatagccttctactggacaaggtcacgaaacgcagagcgccaggaaccgaccagaggcag

SEQ ID NO: 3934 - DNA, 550 bp, Homo sapiens
cctggcagcctggctggacagtcaatgtggagggcagtggtgagggccgggctggggcaggggcaggaggagagaagggaggccaccatggacagaagaggtccgcggccacaatggagctggagagaggggctggagggattgagggcgaaactcggagctaggtgggcagactcctggggcttcgtggcttcagtatgagctgcttcctgtccctctacctctcactgtcttctctctctctgcgggtctttgtctctatttatctctgtctttgagtctctatctctctccctctcctgggtgtctctgcatttggttctgggtctcttcccaggggagctgttccggtggaatgtttcggacctaggtggcctgggctgtggcctgaagaacaggtcctcagagggccccagctccccttccgggaagctcgtgagccccaagctgtatgtgtgggccaaagaccgccctgagatctgggagggagagcctccgtatgtcccaccgagggacagcctgaaccagagcctcagccaggacctcacca

SEQ ID NO: 3935 - DNA, 387 bp, Homo sapiens
atttttagtagagacggtgtttcaccatattggtcaggctagtctcgaactcctgacctctggtgactcacctgcctcagcctcccaaagtgctgggattacagacatgagccaccatgcccagcttacctcttcatggtttcattaatcagcaaagaacacctaatcctgacatccagctgttttttcctagctgccaagactgttgaggaagatgagagaattccagtactaaaggtattggcaagagacagtttctgtggatgttcctcatctgaaattttgagaatggagagaattattctggataagttgaattgggatcttcacacagccacaccattggattttcttcatattttccatgccattgcagtgtcaactagg

SEQ ID NO: 3936 - DNA, 270 bp, Homo sapiens
cctgcctagcttctgcatagcccggggctgggcggtccccgggagtgctgccacctcccctacactttcatcctgaggcaggatttgctagacgtcggcttgcctctcttccccagcaggagggcaggagtcactaagtgctgcagaaaagatccgcgctggagattgcccgtcccccccatgcctttccccagaaacagttgagagaatgggtagctggtgggaccagaccggtttcccagaggacaggaaggccaataaaaatatcag

SEQ ID NO: 3937 - DNA, 601 bp, Homo sapiens
  unsure (561): n=A,T,C or G
aaaaaggtctctctctttttcacaagctagaaagtatccttcgtatgatgaagattcaaattgcatcttattatcatgtcctgggacacttctctgaaagaatatgatgtcactttttgtatccttgatgttatcaggaggattcatttccttaaaggaaataattttgttctcacaggagagagttgaaattttctcacacttcacagagatagttacagccatacctctaggctggctatctttatacatacttataataaatatggtccggggtgcattatctctacagtcagaatcagtcatatcttcaaatagaggccgatttccttggtcaatgaagagaacttggtcattcaaatttcttatgactgataatttagattcaagcttgccaaagtaatcggattccaggttttcatcatcttcagctataaagtaaagcgtattgtcaataaatttcattgccacaaagttgatgcaattgtcttctactggttcagcagccatctttattcctgcgacaaatagtttgttgcgagaggaagcgatctggaaggnctgaggttcctttcctcttcccgaagctgtgtagactgca

SEQ ID NO: 3938 - DNA, 323 bp, Homo sapiens
gtgacaggagccgaagcagcagcgcaggttgtccccgtttcccctcccccttcccttctccggttgccttcccgggccccttacactccacagtcccggtcccgccatgtcccagaaacaagaagaagagaaccctgcggaggagaccggcgaggagaagcaggacacgcaggagaaagaaggtattctgcctgagagagctgaagaggcaaagctaaaggccaaatacccaagcctaggacaaaagcctggaggctccgacttcctcatgaagagactccagaaagggcaaaagtactttgactcaggagactacaacatgg

SEQ ID NO: 3939 - DNA, 222 bp, Homo sapiens
  unsure (7): n=A,T,C or G
  unsure (23): n=A,T,C or G
  unsure (33): n=A,T,C or G
  unsure (55): n=A,T,C or G
  unsure (71): n=A,T,C or G
  unsure (73): n=A,T,C or G
  unsure (90): n=A,T,C or G
  unsure (158): n=A,T,C or G
  unsure (183): n=A,T,C or G
  unsure (198): n=A,T,C or G
atgaatnaagagtttcctatggngaagttaacnttctaccattgcacataaattncgacgctctggccctnangtgcccctgaagcgaanttctggaagacggctgtgtgtgtacccccagcccatttctctaaagcacgtctgcacaattccaagtntgcttttctttttatgatgaggaangaaacaataacagtnatcattcagtagatatttgaattg

SEQ ID NO: 3940 - DNA, 430 bp, Homo sapiens
ccttaaaggagaccagggggaacctgggccctctggaaaccccggcaaggtgggctacccagggcccagcggccccctcggagcccgtggcatcccgggaattaaaggcaccaagggcagcccaggaaacatcaaggaccagccgaggccagccttctccgccattcagcggaaccccccaatggggggcaacgtggtcatcttcgacacggtcatcaccaaccaggaagaaccgtaccagaaccactccggccgattcgtctgcattgtacccggctactactacttcaccttccaggtgctgtcccagtgggaaatctgcctgtccatcgtctcctcctcaaggggccaggtccgacgctccctgggcttctgtgacaccaccaacaaggggctcttccaggtggtgtcagggggcatggtgcttcag

SEQ ID NO: 3941 - DNA, 172 bp, Homo sapiens
ccttgacttgcttgtaagatgattctcagagatcggctgagttaaaaaagatgacgacttgattaccaaagaaagtagggccaactttgacaaatctggctctgctgaccctgtcactcccagatgtagcatagactcctaaacagaacctcaagtctgattgaggataagg

SEQ ID NO: 3942 - DNA, 516 bp, Homo sapiens
  unsure (8): n=A,T,C or G
  unsure (36): n=A,T,C or G
  unsure (435): n=A,T,C or G
  unsure (507): n=A,T,C or G
aaatgacnaaactggaattatttcaacccggaaatnattgtttcaaatttccatggttaaaggtttgctcaagcaaatcttaaaacacaggtatgtatttcagaagatcaaccaaattcgagtttgcatcccattttgggtacattgtaaatagaaatttcaaaatcttcctcaaaaatatctgcatttgttttccagattcttgcaacccaaaacaaaacttcacagaaactctgcacaagagttggcagacagctaaaccttctccaaattgagttatggacaataaggtcttgattatagcagaattggaaggtctatttacaaacctgcacacagtgctgtgtaaattgggtgctggggcacattgattggcagggaaaggccagggaggcagttgaatccctggcatttttcaaagcttttttcctaggntcattattcctagaattttgaagcttattaagacattccctatcctatgtcatactctagagcactctagtnagaatcctg

SEQ ID NO: 3943 - DNA, 118 bp, Homo sapiens
  unsure (3): n=A,T,C or G
  unsure (24): n=A,T,C or G
  unsure (40): n=A,T,C or G
  unsure (41): n=A,T,C or G
ctngatgcctcatgaatcaacggnggagcacacacacgtnnatatcaatgagatggagtctcctcttgccacccggaaccgcacatcagtggatttcaaagacactgactacaagcgg

SEQ ID NO: 3944 - DNA, 219 bp, Homo sapiens
  unsure (9): n=A,T,C or G
  unsure (10): n=A,T,C or G
  unsure (23): n=A,T,C or G
  unsure (36): n=A,T,C or G
  unsure (42): n=A,T,C or G
  unsure (48): n=A,T,C or G
  unsure (123): n=A,T,C or G
tttgtgccnnaactggacctgcnggttggtaccaanggctgntgccanccagccggagtacaggtcatctccaaatttgctgaacttggcaaagctctggaaaacagccccggcctgggatgngagtgtgatgctgctgttccagggttcttggctaacgtggtggcccttgaccacattctccaagtcggggaattcctgggcaaagatcccttccag

SEQ ID NO: 3945 - DNA, 504 bp, Homo sapiens
ctgtctgtcatctgctgcgatccggcagcctctcttcactgctacatgtgctggaaggacaaataaataattgtggttgtgttcttaatggggacgagcagacacactgatctgaacatctggcccaagtgaagcatggcatatagtgcccttggaagaaaattaggcctcaaatgacagtagcattgaagtgtttgctgcagagttgagggaaacccccagccaccctcccggaatccgagatagggtggcacatctgtcctgacagacgaggagtgtaactgaaccaggaatatttcctccattcctgctctcccactgcacacagggtggtggcacattatccctctggggggtggggacgcctgttgttttggctcaatttgggtttgttggtcacatggagctcttccatttcgtttagctgaataatgagttgttcctagaggagacagcctgtctctccttgttgcccccaaagcccatgccctgccgtggtggcag

SEQ ID NO: 3946 - DNA, 393 bp, Homo sapiens
ccttctacaccacggaccgggtcatgactgtgtcctttcataagtatggagagtacttcccaggaactggggacctacgggatatcggggctggcaaaggcaagtattatgctgttgactacccgctccgagacgggattgatgacgagtcctatgaggccattttcaagccggtcatgtccaaagtaatggagatgttccagcctagtgcggtggtcttacagtgtggctcagactccctatctggggatcggttaggttgcttcaatctaactatcaaaggacacgccaagtgtgtggaatttgtcaagagctttaacctgcctatgctgatgctgggaggcggtggttacaccattcgtaacgttgcccggtgctggacatatgagacag

SEQ ID NO: 3947 - DNA, 452 bp, Homo sapiens
  unsure (255): n=A,T,C or G
ctgggctgtgcctcggtctctatgcgcctcggtctctgtgcgcctcggtcccgcctcaagcaccgggtggcgtctccgctgtagtgttctgagttcaagttgcctcggaagtcccagttggggatacgctctcgcgcaccaggtacgcctggtgtttctttgtggtttttcggattctttttggggagtgcggggagtcacagttagaaggcggccgggtgttgctggaggaaagtgctgaggtccagagcgtantccgagggctccgaagtcagattaaagggctcgaggacggcggacacaggggtgggcgccagggatgcggcgttaggggcgtcctctggaggcaggggcgccggcacaccctcttcagccatcaggatctggcagaagacgatggtgagcagcagaaagagaagccttttggctgggttcggttcctcgactggcag

SEQ ID NO: 3948 - DNA, 506 bp, Homo sapiens
  unsure (490): n=A,T,C or G
ctggagagggggcttacgacagtcgctcatgcagtgccaggacttccaccagttgagtcaaaatctgctgctgtggttagcgagtgccaagaaccggaggcagaaggctcatgtcaccgatccaaaggcagacccccgggctctcctagagtgtcggagggaactaatgcaactggaaaaggagctggtagaacgtcaacctcaagtggacatgttacaggagatttcaaacagccttctcattaagggacatggagaagactgtattgaagctgaagaaaaggtgcatgttattgagaagaaactcaaacagttacgggagcaagtgtcccaagatttaatggccttgcagggaacccagaacccagcctcacccctgcccagcttcgacgaggtagactcgggggaccagcctcctgcaacatccgtgtcagctccccgagcaaagttcagagcagtgagaactacagaaggcgaggaggagacaganagcagggtccccggca

SEQ ID NO: 3949 - DNA, 177 bp, Homo sapiens
ccacatataacattattttgagaaaggaaagaaagtgcatgccccaaaagggatgccttccttcaccttgcaggtagctggaactttgatagtggcagaaaccacaatggagtagggttcacagaaatggcctgtgaaacagaccctattcctagagagacagaggaaaaacctcag

SEQ ID NO: 3950 - DNA, 361 bp, Homo sapiens
  unsure (337): n=A,T,C or G
  unsure (346): n=A,T,C or G
cgggaaacacaggccattaacagcagcctgtccacgctggggctggttatcatggccctgagcaacaaggagtcccacgtgccttaccggaacagcaaactgacctacctgctgcagaactctctgggtggtagtgctaagatgctcatgtttgtgaacatttctccactggaagagaacgtctccgagtccctcaactctctacgctttgcctccaaggtgaaccagtgtgttattggtactgctcaggccaacaggaagtgaagacggatccagatctctgtgtgtgtgtgtgtgtgtgtgtgtgtgtgtgtgtgtgtgtgtgtgtccctatgtntatgtatcnggtgaggggtgggag

SEQ ID NO: 3951 - DNA, 446 bp, Homo sapiens
  unsure (14): n=A,T,C or G
  unsure (24): n=A,T,C or G
  unsure (25): n=A,T,C or G
  unsure (30): n=A,T,C or G
  unsure (52): n=A,T,C or G
  unsure (53): n=A,T,C or G
  unsure (60): n=A,T,C or G
  unsure (65): n=A,T,C or G
  unsure (66): n=A,T,C or G
  unsure (76): n=A,T,C or G
  unsure (78): n=A,T,C or G
aaacaaacaaacanacaaacaaannaaggntgggggagggagggaaagagannagctctncactnncctttgttgnantctcacagtataacagatattctaattcttcttaatattcccccataatgccagaaattggcttaatgatgctttcactaaattcatcaaatagattgctcctaaatccaattgttaaaattggatcagaataattatcacaggaacttaaatgttaagccattagcatagaaaaactgttctcagttttatttttacctaacactaacatgagtaacctaagggaagtgctgaatggtgttggcaggggtattaaacgtgcatttttactcaactacctcaggtattcagtaatacaatgaaaagcaaaattgttccttttttttgaaaattttatatactttatgatagaagtccaaccgtttttt

SEQ ID NO: 3952 - DNA, 393 bp, Homo sapiens
ctggcagatggaagcctggttctctttggcagcaacatgcatcacgttgtacctgcacccttcctgcacgatagtggggttgtctcctgagcctatcagataccgggggttgctccagataaggtcagaaaaggtgtcctcctctcccttctccacagctttccgaagcttggcggtgaggtcctgcgtgcggggatttttgtaactgttcgctcgctctttgttgactgtttctgattccgacaagcacaaaccatctttcaacctgtcattgctaaagagtggagctgttttcacaggagacagtggtaaggacgttttgcttggagaagggaaataatcacaaattcctctagcaaatttctcagcgtcttctctggtagaaaaagcttt

SEQ ID NO: 3953 - DNA, 621 bp, Homo sapiens
ctggtgaaggaactcaaggaggctttaggtattccagccgctgcctctttcaaacatgtcagcccagcaggtgctgctgttggaattccactcagtgaagatgaggccaaagtctgcatggtttatgatctctataaaaccctcacacccatctcagcggcatatgcaagagcaagaggggctgataggatgtcttcatttggtgattttgttgcattgtccgatgtttgtgatgtaccaactgcaaaaattatttccagagaagtatctgatggtataattgccccaggatatgaagaagaagccttgacaatactttccaaaaagaaaaatggaaactattgtgtccttcagatggaccaatcttacaaaccagatgaaaatgaagttcgaactctctttggtcttcatttaagccagaagagaaataatggtgtcgtcgacaagtcattatttagcaatgttgttaccaaaaataaagatttgccagagtctgccctccgagacctcatcgtagccaccattgctgtcaagtacactcagtctaactctgtgtgctacgccaagaacgggcaggttatcggcattggagcaggacagcagtctcgtatacactgcact

SEQ ID NO: 3954 - DNA, 295 bp, Homo sapiens
cctctgagcagaacgaggtaaatcttcactgttagctacaaagagcactgcatgaaagtgtgtgcaagatgactccatgaggttttctttttaagtttatgtatatttacagaaaagtgaaatgtgttggaagaataaacaccccttcttgtggacacttttagagaggagaatttgggctgggaaaaaaggagatcctttttatttttttgctgttctctactgtttgtcttttctgtagttaatattaatattaattgtattaatattctgactttaatattagaaacttttt

SEQ ID NO: 3955 - DNA, 295 bp, Homo sapiens
  unsure (164): n=A,T,C or G
  unsure (202): n=A,T,C or G
cctctgagcagaacgaggtaaatcttcactgttagctacaaagagcactgcatgaaagtgtgtgcaagatgactccatgaggttttctttttaagtttatgtatatttacagaaaagtgaaatgtgttggaagaataaacaccccttcttgtggacacttttanagaggagaatttgggctgggaaaaaaggagatcctttntatttttttgctgttctctactgtttgtcttttctgtagttaatattaatattaattgtattaatattctgactttaatattagaaacttttt

SEQ ID NO: 3956 - DNA, 319 bp, Homo sapiens
ctgtcaagtttccatgaacttacacttatttatgattgcgtttctgacctgagatgtatgctgcctgttattgcagtagcattagtttcagattcttttgccattgcaaagtaccccttataaaccagcaatgtcatctgtgaggaagcaaattctcaagtgtctgtcatttacttggttctttttctttgtggtcttcacccttataccctggaaaagtctgtaattaccttagccaggaagatagatggtcatggcaagcgcacagcaccagacttactggctcaccaagatgatggaaaaaggcagatgatttttt

SEQ ID NO: 3957 - DNA, 515 bp, Homo sapiens
ccatccctgagcttgaatagcagtgggttcagtgaaattctgtcttgcaataacatccatgacatttgcagggaaattggcttcataaaaatttagaactggcttcgggcagttgtgacctctaactgtaatttccttgcttcttctgtatgtttccacctcttgtgctgtgcgcctagccaaatcagggtgctcttgataaaaattcttctcaaatttaggcagctcatcaagattccacttctttttaactaatttctccccagggtttccaaacttctttccagataagggccctgccctacttcctccaaatcgaggtgcaccaaaccctcggtcccggccgcggtctcggtcactcgaataacccgacatggcgtcaatggttgcggttggcggggaacgaagtatatagaaaagcgtgcgacaagtcgctggaaatggcctcgatgacggcgaagccttgcgggggcggcagcggaggaaggacaccgatgacaccagccgaagctgca

SEQ ID NO: 3958 - DNA, 499 bp, Homo sapiens
ctgctcccggttcacgagggaggagtggtggtagcgatcccgagtggcgaagtctgcattctcctgggtgagctgagtcgtctccatgtcaaccttagccagggacggcgccaagatgatctgctcctgaggggaccgcaagctcctgcaggaggggagcaagagagacctcatccaccggaaaaagctgaagttggaggctgatccaaggtgaagccctggactggcccggccaatgtagaaatacacgatggcagcaacacccatgttaaccagggtatacacccactgtatcacaaacatgatgagaagggacccaacagcccccaacagggggacccaggggttgcacatgtgggtatagaaagaagtggatcttctccagacatcttgttcttggagcctggacttcaggaagaaatctaaaaaatagccaaagatttggctgccaaattgctatcaactctctactgttttttaggaaaatatacctatgagc

SEQ ID NO: 3959 - DNA, 349 bp, Homo sapiens
  unsure (32): n=A,T,C or G
  unsure (41): n=A,T,C or G
  unsure (60): n=A,T,C or G
  unsure (71): n=A,T,C or G
  unsure (75): n=A,T,C or G
  unsure (154): n=A,T,C or G
  unsure (160): n=A,T,C or G
  unsure (177): n=A,T,C or G
  unsure (190): n=A,T,C or G
  unsure (193): n=A,T,C or G
  unsure (224): n=A,T,C or G
  unsure (283): n=A,T,C or G
  unsure (315): n=A,T,C or G
  unsure (329): n=A,T,C or G
  unsure (331): n=A,T,C or G
  unsure (340): n=A,T,C or G
aaaagactattttactaaatttggagaggtcnttgactgtncaataaaaatggatcccancactggacggncaanagggtttgggtttatcctgttcaaagatgcagccagtgtggagaaggtcctagaccagaaggagcacaggctggatggncgtgtnattgaccctaaaaaggncatggctatgaanaangacccggtgaagaaaatcttcgttgggggtntgaatcctgaagccactgaggaaaagatcagggagtactttggcgagtttggggagatngaggccattgaattgccaatggatccaaagtngaacaaaagacgangntttgtgttnatcaccttt

SEQ ID NO: 3960 - DNA, 582 bp, Homo sapiens
  unsure (509): n=A,T,C or G
  unsure (515): n=A,T,C or G
  unsure (518): n=A,T,C or G
  unsure (524): n=A,T,C or G
  unsure (529): n=A,T,C or G
  unsure (553): n=A,T,C or G
aaactaccatggggagaaatgaccacacctatcaaaaaagcagtgtcaaactaatttacatttttatacagatcagatgtttatttagtattgttttcatatatgcattgagtatgtaaggacagagttagatgagcctctgaagacatctcatatactctgggctcccaccgtttcaggttcttttagtgtctcagaatttccagctaattcttcggtctgcatttcacatatttcaccagataaatggtttttctgttcttcttctaccattttctttcttagatctgcctctgaatatattgtcagtttcagtggtaaatcttcaacttttacaaaatcttcttcatcagacttttgacttatattaccagattctgcttcatagtcattcactaacactggagattcagtatcaggacttccagccagagagctttcaggagtttcctgagcagatttaacttctttgactctaggcactaagggttccatttcaggtaaacgtnacggcnaanggttangctgntgagttgaatcaacagtaggaggngactccttatgggcagcactatttacctg

SEQ ID NO: 3961 - DNA, 289 bp, Homo sapiens; identical to SEQ ID NO: 3644

SEQ ID NO: 3962 - DNA, 528 bp, Homo sapiens
aaaaatatatgattttgctccttttcttcccatgtgcatcaggcccactctacaaaggttgaatcctggcttgtctgagcccgtgtgatcccacggtcattccaatgtataagaaagtgggtactgggaacactctggaaacagtttagttgatccttctaaaggcacacaggagaaaggagtatccttttcctgcctttgggagttgttgtgaatgattaacaaacctaaagctgctgcatgggtcaccctaccatctcaggaaagctgacgtgctgtgtgtgatagagagatgagctacgaaattccaggatcactggtgatgacactggcctgctgagttgagcatccctggagatgcccagccttggatctatcggctatgtgagataatgggttaaagaaaaataaagccactagatgtaatttcctgttattagcagcagaacacatcttcactgaaatactcattccacacattttggttctaccttgtaattccacaccacgagtctcatataaaatgag

SEQ ID NO: 3963 - DNA, 295 bp, Homo sapiens
  unsure (8): n=A,T,C or G
cctctgancagaacgaggtaaatcttcactgttagctacaaagagcactgcatgaaagtgtgtgcaagatgactccatgaggttttctttttaagtttatgtatatttacagaaaagtgaaatgtgttggaagaataaacaccccttcttgtggacacttttagagaggagaatttgggctgggaaaaaaggagatcctttttatttttttgctgttctctactgtttgtcttttctgtagttaatattaatattaattgtattaatattctgactttaatattagaaacttttt

SEQ ID NO: 3964 - DNA, 341 bp, Homo sapiens
ccaccctcccacacgggatattctaagccgctgacaccatctaacttttctgaaagaaattaacaactcagccgatctttaccaggctaaaatcacagaactgggtcccctgaaagccaggctttcatgccacatccacagctactgctgtctagccaagtctataacatcttcttgcccttattaatacatatgttacataggtttacgtatgttaatccctaatgacttgacttaaccttgtcacagccaggcgcggtggttcatgccctacaatcccagcactttgggaggccaaaatgggtagatcacctgaggtcaggagttcaagaccagcctgg

SEQ ID NO: 3965 - DNA, 598 bp, Homo sapiens
  unsure (580): n=A,T,C or G
cacgtcgtgccaatggcccgctatgaggaggtgagcgtgtccggcttcgaggagttccaccgggccgtggaacagcacaatggcaagaccattttcgcctactttacgggttctaaggacgccggggggaaaagctggtgccccgactgcgtgcagggtgaggccgggattcgggggctgctgtccaatggaaatggcaggaaggtcgagcctacggccagaaggggggcttagcggaggcagagtcttggttccagacatccgcggagcaatctgagctgtccccaagtctccttctattaaatcctaccccgccctgccaagagcgctcttccttttaccaccttacccggatgatcttggaatctagttccttaaaacttctcactcccccagtaccattagtgtcttacaggatacgtgagttggtcagcaaatacatgtgctttccattgttacgggcgcggtggtgcaggggcaaatcgggactgggatttggtccttacccttaacgtggctctaagaccagaagggaacacctgacttctgttgacctcttcagttagctgcaggttaaagnctgagtgcttaccaagac

SEQ ID NO: 3966 - DNA, 344 bp, Homo sapiens
aaacatcatcttttcatagttttgatctgtttttataattcctgcattcaattcactggcaaaaactctatcattgaaagtgctggcaggaccacttcttaggctgtcccagttggcaaccatttctttcacccactctacccaggtgtacagacggagaatacctgcatctgccatggcttccacaaagttggcatcttctacagtgtcaccagcatcagccagagccaaacgcactccatctgctgaaaatttgtcaatagcttgggtcaaagtgaggaagttgcctgtggattttgacatcttctcagagttcaggaggagatgtccatttgctctcacag

SEQ ID NO: 3967 - DNA, 387 bp, Homo sapiens
  unsure (11): n=A,T,C or G
tatgtgcatantttcataaagcagacatttccatgaggaaaagaggatggtggtgaaaggggaggggtgaagggacatctccaagtcacagaggctgcaaaactcagcatgacttgtggacggagccacaggccacccagggcaacaacacccacataactcaccaagtggttaacggctctaaaccagggtcaacaggagaggggacaaaagtcactccttgattttgctgcagcttaaagataagttctacctcagcttatgctagcccttatggggcaaaaaagggaaagtcattctccccaagtccaggctgggccgtcaaacagggagtggggtgtcagccccagacctcaatgaggtccccagattccatgcccaggtcag

SEQ ID NO: 3968 - DNA, 458 bp, Homo sapiens
ctgtgaccttgccaaggagcagggcccatacgaaacctatgagggctctccagttagcaaaggaattcttcagtatgatatgtggaatgttactcctacagacctatgggactggaaggttctcaaggagaagattgcaaagtatggtataagaaacagtttacttattgccccgatgcctacagcttccactgctcagatcctggggaataatgagtccattgaaccttacaccagcaacatctatactcgcagagtcttgtcaggagaatttcagattgtaaatcctcacttattgaaagatcttaccgagcggggcctatggcatgaagagatgaaaaaccagattattgcatgcaatggctctattcagagcataccagaaattcctgatgacctgaagcaactttataaaactgtgtgggaaatctctcagaaaactgttctcaagatggcag

SEQ ID NO: 3969 - DNA, 433 bp, Homo sapiens
  unsure (160): n=A,T,C or G
  unsure (288): n=A,T,C or G
  unsure (317): n=A,T,C or G
gcggcagagacagaagagcggggtcggggccggctgaccaggaacctgggcgagcagcggcgggggcccgagggattctgaaggaagatttccattaggtaatttgtttaatcagtgcaagcgaaattaagggaaaatggatgtagaaaatgagcagatnctgaatgtaaaccctgcagggtattttccctaattctccatggtgcttcaatagcatgttattatcataaaaatgaacagttttgtggaatagatgaccaaataaaatgctgggactgaggaagtaangaatgaaataaatggaaattggatttcancatcctccattaacgaagctagaattaatgccaaggcaaaaaggcgactaaggaaaaactcatcccgggactctggcagaggcgattcggtcagcgacagtgggagtgacgccctt

SEQ ID NO: 3970 - DNA, 275 bp, Homo sapiens
  unsure (18): n=A,T,C or G
  unsure (23): n=A,T,C or G
  unsure (29): n=A,T,C or G
  unsure (36): n=A,T,C or G
  unsure (41): n=A,T,C or G
  unsure (42): n=A,T,C or G
  unsure (165): n=A,T,C or G
  unsure (237): n=A,T,C or G
aaactgagagaaattgtngatantttggntactttnggttnntgtattgtactcctttgtatgactcttctccaatttatctattatactatcggttgacaccagggttttatcaagtttggaatgtatgctactatgacattcttggcacctgtcctagaatanaatttttaggccccaggatatgctttttgtcaactttaagaaatgacaccaccaggccaagcacctgtaatnccagtactttgggaggccgaggcaggcggatcacctga

SEQ ID NO: 3971 - DNA, 222 bp, Homo sapiens
  unsure (80): n=A,T,C or G
aagccctttaagtaatgatataactagaaactacgtttcatctcaaaggaaaaaccacaggtgatatattctcatgcttnaggttaaaaacctctcttaaaaggctaggtttgcgaaagccttcctaaaattatgcttctgttgttactatcaatttgatattcagccagaaaaattaaaaataattattaatcccaaagcatactttcaaaatttctacta

SEQ ID NO: 3972 - DNA, 290 bp, Homo sapiens
cctgtaaagactttaagagaagaaacagcacctggactgtgagaaaaagagtctctgaagacatctgacctggacaggctgccatctcttatgattatttcctgtgtggctgtgaaggttaacgggataaagccctcactgtcagcagagagaagaatccagtgggaatcatgtagcatttcaatgagagaaaggccaaaagtctgctgaactgtactgagccttagtttaccatcacagagaagcaccgctcttttttcaacaacaggacctagataataaggtttctg

SEQ ID NO: 3973 - DNA, 321 bp, Homo sapiens
ccatttgacataaaggagacagcccctggtcccagcttgtcagctctgctgccgacttgctgacttatcaacttcctctaggtgtttccactccaccctggcctgctcagagcctcagtttacccctgcattaaaatggtggggggactggtcaaaggactcttatgtcactgcagtgtcccattctaggattgtctgaaggccagagtaggggttggggggagtgtggacaaaccccgcaaatcagagtggggaaggtgagtggtagagagggggtctctgaaggcccttggggctgacagggccaggcagcctccccag

SEQ ID NO: 3974 - DNA, 554 bp, Homo sapiens
  unsure (525): n=A,T,C or G
  unsure (526): n=A,T,C or G
aaatgtttacttccaagacatttacttgaaagttgaatgttttgatgttctgtcccatggggtccttattgtaatctagaccatcttgttctagatgggcacttaagccctgtttcttcatagtctgttatgctgtcatttggacctggatgcttcctgtttcttccagcaatttttgtttgtgttttttgttgttgaagagaggaacatttaaggagttagataaactggtaattttcagatgtgtagaaaattgcataggtggtgaaagccaatgccataggctctgaaattttactatttcctacatcaggaaatgtgtaccaaaagtgctaaaatgccaagaataattttgagtatctaaagatagataaatcttttcatctgagtggaaatggcattatgactttatattctcatggttttccttgtaccttgaaattgagcatcacttgaattggagccccagaagcaaggttaaagtgagttactactgagtttctggtgttcctaacttatcccttnnggtatatatgtagaagataacaaagcag

SEQ ID NO: 3975 - DNA, 442 bp, Homo sapiens
ccaacatagtgaaaccccatctctactaaaaatacaaaaattagccaggcatggtggcgggcgcctgttatcccagctacttgggaggctaaggcagggagaattgcttaaaccggggaggcgggggttgcaatgagctaagatcgtgccgctgcattccagcctggttgacagagtgagactccgtctcaaaaaaaagaaaaggtagcattaagcctggtatgttttattttcctgtttgttagaaacctagattcatttttaatcttcaccagcatcacatttgaaaatagtgaattgggcagcttggcatttgtgctgaattccttataaggcgttgtgtaggagggaagattacatgattacaccaccagacccctgggtctttgatattaggagagcttggcatgtaaggagttggggagttgggcttgtctcattt

SEQ ID NO: 3976 - DNA, 569 bp, Homo sapiens
  unsure (539): n=A,T,C or G
ccttccagactcagaccagaccctctggtggtaaatggacattttcctacatcggcttccctgtagagctgaacacagtctatttcattggggcccataatattcctaatgcaaatatgaatgaagatggcccttccatgtctgtgaatttcacctcaccaggctgcctagaccacataatgaaatataaaaaaaagtgtgtcaaggccggaagcctgtgggatccgaacatcactgcttgtaagaagaatgaggagacagtagaagtgaacttcacaaccactcccctgggaaacagatacatggctcttatccaacacagcactatcatcgggttttctcaggtgtttgagccacaccagaagaaacaaacgcgagcttcagtggtgattccagtgactggggatagtgaaggtactacggtgcagggacttgcatgtcctaaagcactggctgaaggaagccaagaggatcactgctgctccttttttctagaggaaatgtttgtctacgtgctgactccatattttcctacttgnggcagcgactgcatccgacataaaggaaca

SEQ ID NO: 3977 - DNA, 411 bp, Homo sapiens
  unsure (386): n=A,T,C or G
ctctctgcctcttgctccctccccagttcccactctgcctcctaaacagcaatttctgccgtcctctcctgggctggtgttggaatcaccctctaaaccccttgcccctgctgatgaggatgagctgccgcctctgattcccccggaaccaatctctgggggagtgcctttccagtcggtcctcgtcaacatgcccacccctaaatctgctggaatccctgtcccaaccccctctgccaagcaacctgttacgaagaacaacaagggtacttgccttggtttgccgtgtgcatggtgtgtctgtcgtccacacccctcttgggcgctacccaccaatactaaccctgtgatgcgccgctttctccagtgaatctgcttgggcttgnatgtagaacatagaatgataatttt

SEQ ID NO: 3978 - DNA, 412 bp, Homo sapiens
  unsure (15): n=A,T,C or G
  unsure (25): n=A,T,C or G
  unsure (45): n=A,T,C or G
  unsure (76): n=A,T,C or G
  unsure (170): n=A,T,C or G
  unsure (179): n=A,T,C or G
  unsure (187): n=A,T,C or G
  unsure (226): n=A,T,C or G
  unsure (271): n=A,T,C or G
  unsure (272): n=A,T,C or G
  unsure (304): n=A,T,C or G
tgacattgataccanatctgaattntacaaacacattgtgctttntggagggtctactatgtatcctggcctgccntcacggttggaacgagaacttaaacagctttacttagaacgagttttgaagggtgatgtggaaaaactttctaaatttaagatccgcattgaanacccacccngcagaaancacatggtattcctgggtggtgcagttctagcggatatnatgaaagacaaagacaacttttggatgacccgacaagagtaccannaaaagggtgtccgtgtgctagagaaacttggngtgactgttcgataaactccaaagcttgttcccatcatacccgtaatgctttcttttttcctttattgccaatctttgaactcattcaactccaggacatggaagagg

SEQ ID NO: 3979 - DNA, 378 bp, Homo sapiens
cctgcagcacgtggggctgtatacgcctaacattgtggaggccactgagggggtggcaactgctggaggccagttcctggctccccctggggcatactaccagcagccaggaaaggagaggcagatccgagctgcagggcacgagcctcatctgcttgctcgacaggggatcctgctagatggtgataaaggcaagtttctgcttcaggtcttcaccaagtccctttttactgaggacactttcttcctggagctgattcagaggcagggggccactggctttggtcagggcaacatcagagctctgtggcagtccgtacaggagcaatctgccaggagccaggaagcctaaggatgcccagggctgggtgcagccag

SEQ ID NO: 3980 - DNA, 216 bp, Homo sapiens
ccaggctcaggccctggggtgaaaggagacaggtgctgccaagaccatacatcagtcatctggcagcagctcgagaagcatgtcctccacgccgtcaatcttgatgtggtacactaagcgccagaaactggagtctgaggatcggtatcgtccatcagggtagagctgtcacatgataggcagcaggcttgggcctatctgggtgggggtcatagg

SEQ ID NO: 3981 - DNA, 349 bp, Homo sapiens
ccaagtgtttgtgttacaggttccaaggagcaggggcctcgacaaaggaagggagcagccccagcagagaagaaatgtggagcggaaacccagcacgaggggctagaactcagggtagagaatttgcaggcggtgcagacagactttagctccgatccactgcagaaagttgtgtgcttcaaccacgataataccctgcttgccactggaggaacaggtggctacgtccgtgtctggaaggtgcccagcctggagaaggttctggagttcaaagcccacgaaggggagattgaagacctggctttagggcctgatggcaagttggtaaccgtgggccgggaccttaagg

SEQ ID NO: 3982 - DNA, 277 bp, Homo sapiens
ccaatgagttcaaaaagcacgtttgcagggcttcctgaatgccgtcgaggcatggcttcatgagggccatcgcgggcaccccgatgtctctgtgattccctggcaggctgcgtttctcaatactgagaccctagtttgctctgacttctaaatgagctctctcatccttcatcagaaggataaggaacctggcctgcactctttgggttaaacatgggtagagaccgtctcaggatgaggacctcttggggaaagtacaaacctctgctccctgtgg

SEQ ID NO: 3983 - DNA, 447 bp, Homo sapiens
  unsure (435): n=A,T,C or G
aaattgtaaatggagctaagtccaagaaagtacttgaagctctcttccagcgagcttaattgcgtaatccctgttgtcctccagggtaagctgacacgtctacataactggttttccacaggcatcttcagttattgcttgtcaggtggactgttttggatttaaccatgtaatccatgggaccaattgagagtcagctacttttataggcatcaaagtattctcagacacctttaatatctttatgaaaacttaatttttggccttttatcaatatgtcataacagcattctgaagtcagacattgttaaattgagctattaaactaatgagttttatgtaagttatatggtcttaatttggtacttgtaaatagcactagttagactctttagaatactccaagagttagggcagcagagtggagcgatttanaaagaacatttt

SEQ ID NO: 3984 - DNA, 288 bp, Homo sapiens
ccagtcctggcgcagcacccccagccgcagcaggcactgcttcttggctgtcatcacaaagtagtgggtgtcgtccttgtagtacacaatgttctccagatcaatgcctgggggtacagggcaggggacagtagatatgtctcctgataatgcatcaccttccctaaacatcccaacatggcctgacctctgagctgggatcccagcttaggctgcggtgagtgctccacgcatagaaccccacgagtcctgatgacacaaacaaccatctgtcccaggcccaggagg

SEQ ID NO: 3985 - DNA, 504 bp, Homo sapiens
gtcacaccaagcccgttcacaccaagatcgtgaacatgcctgatcacgtctgaagggcacgtgaccctgttctgaagtggcctgcagctcccgtggccctcagcaaagccaatggacgtgtactctgcttcctccaggaagccctccccccgctcccccctctggtagacacgtcttgtggttggtgtccacaaggaagttcctgattagcctcggagctgcccgatggcctctccactcctggcacatggcctgctggctggcctggggcagaactacagagggccggagctggagatgtggtctctgggagtcactctgtacacgctggtctttgaggagaaccccttctgtgagctggaggagaccgtggaggctgtcatacacccgccatacctggtgtccaaagaactcatgagccttgtgtctgggctgctgcagccagtccctgagagacgcaccaccttggagaagctggtgacagacccgtgggtaacacagcct

SEQ ID NO: 3986 - DNA, 443 bp, Homo sapiens
atgaccacatggatgatatggatgatgaagatgatgatgaccatgtggacagccaggactccattgactcgaacgactctgatgatgtagatgacactgatgattctcaccagtctgatgagtctcaccattctgatgaatctgatgaactggtcactgattttcccacggacctgccagcaaccgaagttttcactccagttgtccccacagtagacacatatgatggccgaggtgatagtgtggtttatggactgaggtcaaaatctaagaagtttcgcagacctgacatccagtaccctgatgctacagacgaggacatcacctcacacatggaaagcgaggagttgaatggtgcatacaaggccatccccgttgcccaggacctgaacgcgccttctgattgggacagccgtgggaaggacagttatgaaacgagtcag

SEQ ID NO: 3987 - DNA, 503 bp, Homo sapiens
ctgggcacaaccctcaccctggtctgtcatgcctgtttttcctacactcagcggcaaagctgcaggagcagggctgagcctggaatagcccttcctagtcccctcttctcagcccactacccatccatcagtcaccagccgtcacctcccctcccgtgctccaggctgggggagggagagcccagtggtggatccagcctgaagtcctgccctctctcatctgtctggaaaggaggtagcacctttttcgggaaacgggttagggagtaaagactgcaccctacatggtcctggtggtgggggggataacagtaaaggaatttgcaacgttttaatgccatgcctgatttttgggtcaggagtggtgacttgggtaaccacttggcgggggggcctgggattccctgctgtgtgccgtgataacagcaaatggtgataaggagaaagccaagacctgtggcctgatgcagggctgggggcggggggtgatcacttcagcaggc

SEQ ID NO: 3988 - DNA, 214 bp, Homo sapiens
ccaagttgggccgcttggtcaaggacatgaagatcaagtccctggaggagatctatctcttctccctgcctattaaggaatcagagatcattgatttcttcctgggggcctctctcaaggatgaggttttgaagattatgccagtgcagaagcagacccgtgccggccagcgcaccaggttcaaggcatttgttgctatcggggactacaatgg

SEQ ID NO: 3989 - DNA, 387 bp, Homo sapiens
gcgcctgctccccggacgaaatccgcggaccgggctttaggttcgccggaatcccacgctcccgacttctgcttccgggtcggagccatggcggtggcaaattcaagtcctgttaaccccgtggtgttctttgatgtcagtattggcggtcaggaagttggccgcatgaagatcgagctctttgcagacgttgtgcctaagacggccgagaactttaggcagttctgcaccggagaattcaggaaagatggggttccaataggatacaaaggaagcaccttccacagggtcataaaggatttcatgattcagggtggagattttgttaatggagatggtactggagtcgccagtatttaccgggggccatttgcagatgaaaatttt

SEQ ID NO: 3990 - DNA, 104 bp, Homo sapiens
  unsure (4): n=A,T,C or G
  unsure (12): n=A,T,C or G
  unsure (23): n=A,T,C or G
  unsure (24): n=A,T,C or G
  unsure (32): n=A,T,C or G
  unsure (39): n=A,T,C or G
  unsure (77): n=A,T,C or G
ccantgtccatncacagttgccnngatgtggnaggccancgtgtggaaatggatcctggtgagatccgaggctctgnttttactcctcccatgttctttcaaga

SEQ ID NO: 3991 - DNA, 315 bp, Homo sapiens
  unsure (92): n=A,T,C or G
  unsure (105): n=A,T,C or G
  unsure (198): n=A,T,C or G
  unsure (202): n=A,T,C or G
  unsure (250): n=A,T,C or G
  unsure (302): n=A,T,C or G
aaagtaaatacagcttttagatataaatctttcaaaggttttctttgaagagctgtgaggtgactatttcagatttgatgaacagtaatttngtcagtaaacttntcaaaaaaccaatccaagaaagaattgttttctttttccctccatgtggtcggtttcattcttaaggaaggtctgatgcagtaagaagatgcntttnacaaacctttacacaagtttgtgaactgtcaactaaagacaccacctntgatgtggatggtttcattcaatccatgttcgaccagctttatatcttctanatcgtctttaatg

SEQ ID NO: 3992 - DNA, 509 bp, Homo sapiens
aaaccttaagaaccacataatactatataatgcttttctgtacaaatctcaagaaacactttcattcattaaaacatcatgaaaatccttaaatgtgttaaatggaaaaaaatgaaaccatgaacaaaaaagctatacatgtaggtgcatatttatctcctcctgagttgggagaaatctttctaagcatagaaacaatggtagcaaaagagaagaatagatttggctggattaacaataaaaaatttctgccagaaatatgaaaattcaatttagacaaaattcaatataaacaaaattaatatagacaaaggtggtaaacaggtggttctcagagaagataaatacatgattatttaacataaaaagaaatgttcaatgtttctagaagacaaataattacaaacctaaacaaattgtatatttgttagattggcataaattataataatccaacattgagttaggtggaatataaattggtaaaatatttctggaagacaatttgg

SEQ ID NO: 3993 - DNA, 228 bp, Homo sapiens
ctggaagatggccgcactctttctgactacaacatccagaaggagtcgaccctgcacctggtcctgcgtctgagaggtggtatgcagatcttcgtgaagaccctgaccggcaagaccatcactctggaggtggagcccagtgacaccatcgaaaatgtgaaggccaagatccaagataaagaaggcatcccccccgaccagcagaggctcatctttgcaggcaagcag

SEQ ID NO: 3994 - DNA, 215 bp, Homo sapiens
ccagaacttcctatactatgttgaataggagtggtgagagagggcatccttgtcttgtgccggtttccaaagagaatgcttccagcttttgcccattcagtatgatattggctatgggtttgccataaatacctcttattaatttgagatacattccattgatacctagtttattgagagtttttagcatgaagggtgttgaattttgtcaaagg

SEQ ID NO: 3995 - DNA, 396 bp, Homo sapiens
  unsure (143): n=A,T,C or G
  unsure (365): n=A,T,C or G
  unsure (366): n=A,T,C or G
  unsure (372): n=A,T,C or G
  unsure (381): n=A,T,C or G
aaagctggctcaagactggcccaggcataatactgtcaatctaaaggtaaccggcaacatcaaaaagtacatctcaaaagaatcaggcttaaagataaacaggagaactggaaatatctaagagtaagaagtgtaaacaatanaaaagaggtagggtttagggttctcatcttgggatttccccaggtcttcaagcttctatccttcctgggttctgggtcatgggcctccagattccggccgttagtcttgagatacctttttcgcttgggtcctctatccatctaggtaggctttgtgacaggggccttccatccttgggttgtaggtcttccagctacaaccctgggctaatcttaggtcgnnggcctngtgtcacangtctcagttcttagg

SEQ ID NO: 3996 - DNA, 281 bp, Homo sapiens
ccaccataagtcctgatacaaccacggatgagctgtcaggagcaaggttgatttctttcattggtccggtcttctccttgggggtcacccgcactcgatatccagtgagctgaacattgggtggtgtccactgggcgctcaggcttgtgggtgtgacctgagtgaacttcaggtcagttggtgcaggaatagctgtggactgggttccaatcaggggctggctctccatatcatcgtgcaaggcaaccacactgactgtgtactcagaacccggtctgagg

SEQ ID NO: 3997 - DNA, 262 bp, Homo sapiens
ctgatgcggaaggagttcaccctggagttctcccgagaccggaaatccatgtccgtgtactgcacgcccacccgccctcaccctaccggccagggcagcaagatgtttgtgaagggggctcctgagagtgtgatcgagcgctgtagctcagtccgcgtggggagccgcacagcacccctgacccccacctccagggagcagatcctggcaaagatccgggattggggctcaggctcagacacgctgcgctgcctggcactag

SEQ ID NO: 3998 - DNA, 218 bp, Homo sapiens
ctgctctgatgctctgctccaggtcatggtaaatggctttgtagctaaatcagagagaaacgtggctcttttagaaggcaggggccagctaccctttgtcccagcccagtgccagccacagcaggtcccgtggtctctgccctctgtgagttggtttcacagacagagccagaacactcctcccttggctcaggtggaaggtcacgggccgccacgtg

SEQ ID NO: 3999 - DNA, 528 bp, Homo sapiens
aaaccggggtttgagaagtataataacttggatctgtttcggtatctcttaaatattccaggaccaattgacattccatctcgtttatgtaaagggaattttgatgatgatatgtttaaccaccaagttccttatttgtggctgatttactgcctttgtcatcctcttcaatcaagtattaaagaaacagtggaggcatatgaggcagcattaggggtggctatgagatgtgatatagtacagaagatatggatggattatcttgtctttgcaaataatagagctgctggatccagaaacaaagttcaagaattcaaattttttactgatttagtgaatagatgtttggttacagtccctgcccgataccccattccttttagcagtgctgattactggtccaactatgaatttcataatagggttattttcttttatttgagctgtgttccaaagacccagcattccaaaaccttggaacggttttgttcagttatgccagctaattctggacttgcattgaggtta

SEQ ID NO: 4000 - DNA, 182 bp, Homo sapiens
aaagtatattggaattcgtaactaaagtaataaataaatgcttgaaatatacccagtagaaacttatttttattatccaatccttttgataagaaatgcctctagtgttatgtacaaacttgatcttctttgaaatgtgttgtccactgcttttctgtttctgtcacagtagctataaacag

SEQ ID NO: 4001 - DNA, 311 bp, Homo sapiens
ctgaatatggaagagatctttttttactagagatctgcagaagaaacgcaatcttctgagcacaatatggaatctaaaggttttatcacttagttgttcatattatgaacctaaaaataatggcataaagtttggggatgccaggcatactttttcatgtttggtgttgagttattttacttttctaacccaacattccttggtgagaccattaaatccaaacacttgtcaccgttccttctcatagtcactctgggtcatcagcatgtcccagtcactgcagcaatgccttgtgtttgtttcattttttt

SEQ ID NO: 4002 - DNA, 505 bp, Homo sapiens
  unsure (439): n=A,T,C or G
ccagtatcgttttggtacttttgtacctctatctgactccatgcccctgcaagtgtaaaaccaagagacagaaaaatatgctacgccaaagcaatgcccattcatcgattctcagtcctggccccgctagtgatgcctccgctgatgaacggaaggcaggtgcaggtaaaagagtggtgtttttggaacccctgaaggatactgcagcagggcagaacgggaaagtcaggctctttcccagcgaggcagtgatagctgagggcatcctaaagtccacgagggggaaatctgactcagattcagtcaattcagtgttttctgacacaccttttgtggcgtccacttaatttgtgcctatatttgtatgatgtcataatttaatctgttcatatttaactttgtgtgtggtctgcaaaataaacagcaggacagaaattgngttgttttgttctttgaaatacaaccaaattctcttaaaatgattggtaggaaatgaggtaaagta

SEQ ID NO: 4003 - DNA, 460 bp, Homo sapiens
cctctctttatctctttcaggatttccttcattctgccgtttgtaggaggcaccaggacgcacggactctatggaaaggtgggcagggaggaattaacagcagcacctctgtgcccaagaggaacaagagaggaactcagaagtaggagtgatgagaacaggggcttctgagcattttctggtggccctaaactctttcctaccctactttcaagttgggctgcctgagcaatcaccagtgaaggggaataaataatgggagaaaaaaatctccatttaaggcaagaagccaaggggaactgtcaggataagaccagtcaaggataacaagggcagaaaggaatgagaaaaggttcatagaaagacaagacattgaaagttgaagacaaagatcacatcttattcatcactgaaagtacctagtcgaattctctccatccataaagctgacactggaagg

SEQ ID NO: 4004 - DNA, 324 bp, Homo sapiens
  unsure (10): n=A,T,C or G
  unsure (20): n=A,T,C or G
  unsure (27): n=A,T,C or G
  unsure (47): n=A,T,C or G
aaatcatgtntaataaatgnttgtatntaaatgcatatgtacagaancctatttcaaaaggaaatcaaagttgctagtaaaatgtttgagattacatttagaactaactgataatgcatatagattgtagaaaattttgtgatttgtttctgtgtgataagggaagctgttggtctttgaattcatttaattatgtcaaaatagttccccaaagatttaattttaagttgcttcttaaagagtaattttattttttatgtcatgtggcttcatattagtattgtgtgagttacatgttttgctttatattttataaaatttttt

SEQ ID NO: 4005 - DNA, 508 bp, Homo sapiens
ctgataacgttcacagccccatcctcagcacgtggattcgagtcaccgtgagaattccggtatctcaccctgtcctcaccttcagggctcccagggcccacactgtggtgggggacctgctggagcttcactgtgagtccctgagaggctctcccccgatcctgtaccgattttatcatgaggatgtcaccctggggaacagctcagccccctctggaggaggagcctccttcaacctctctctgactgcagaacattctggaaactactcctgtgatgcagacaatggcctgggggcccagcacagtcatggagtgagtctcagggtcacagttccggtgtctcgccccgtcctcaccctcagggctcccggggcccaggctgtggtgggggacctgctggagcttcactgtgagtccctgagaggctccttcccgatcctgtactggttttatcacgaggatgacaccttggggaacatctcggcccactctggaggaggggcatc

SEQ ID NO: 4006 - DNA, 397 bp, Homo sapiens
ccaccatcacagtccaggatgaagaggagtacagggtcctgtgagctgtttgaccactgttctaagaaagactatgtgtgcccaaaagcacataagcatctatgttgagagtaagtttgtatcctgcgttggtctcagaaagaacgtgaatgcttaagattttgaaagtacataatattttatactttgggagagagctttaagagtccctggaaatactttttaatttttttaacttaaaattcaagagactgaatcacttttctcattgattaaatgtaaagattattgagaaacctatagtaaatgaaatttgtaagatgttttctcaaatatatgctgtgcctgtacttatatacagtctttcaagagagatacaaacaaggcagaaacattt

SEQ ID NO: 4007 - DNA, 466 bp, Homo sapiens
ccacgttcctggccgaggacccgaaggttaccctgaccatcttcgttgcccgcctctactacttctgggacccagattaccaggaggcgcttcgcagcctgtgtcagaaaagagacggtccgcgtgccaccatgaagatcatgaattatgacgaatttcagcactgttggagcaagttcgtgtacagccaaagagagctatttgagccttggaataatctgcctaaatattatatattactgcacatcatgctgggggagattctcagacactcgatggatccacccacattcactttcaactttaacaatgaaccttgggtcagaggacggcatgagacttacctgtgttatgaggtggagcgcatgcacaatgacacctgggtcctgctgaaccagcgcaggggctttctatgcaaccaggctccacataaacacggtttccttgaaggccgccatgcagagct

SEQ ID NO: 4008 - DNA, 399 bp, Homo sapiens
ctggggactggtgcttgctgaaacccaggagctgaacagtgaggaggctgtccaccttgcttgactcactgggaccagcaaagcctgtctttggttaggctcgtgtacttctgcaggaaaaaaaaaaaaggatgtgtcattggtcatgatatttgaaaaggggaggaggccgaagttgttcccatttatccagtattggaaaatatttgacccccttggctgaattcttttgcagaactactgtgtgtctgttcactaccttttcaggtttattgtttttatttttgcatgaattaagacgttttaatttctttgcagacaaggtctagatgcggagtcagagatgggactgaatggggagggatcctttgtgttctcatggttggctctgactttcag

SEQ ID NO: 4009 - DNA, 325 bp, Homo sapiens
tgctgctctggctcccaggtgccaaatgtgacatccagatgacccaatctccttccaccctgtctgcatctgtcggagatacagttacaataagttgtcgggcctctcagaatatagatcggtggttggcctggcatcaacagaaaccaggcaaagcccctaatgtcctaatttatgcgacttccagtttagaagaaggggtctcattaagatttactggcagtggatctgggacacaattcaatttaaccatcaccagtctgcagcctgacgattcagcaacttattattgtcaacattattctgcatctcttcgcagttttgg

SEQ ID NO: 4010 - DNA, 494 bp, Homo sapiens
aaaggctacgttcagtttcctataggtgatattgttaggatctactagcaaatgatttggtaacctgacatctttgtattcatgtccaaaaaaattcttttataagaacaaaaatggtactcttagcctcattcactggagtattactaaaaagcatgatattcttactctattttgggtacattatgacagagaggttattattaccaactgtcagtagaactgaggcttcttgagtaaaggggattgaggtaaacctttggaagctggtgaatacatttcaagacacaacatggcacctgtgtctagctctatggtacaacatggtactatgacacatataatgggttgccagatggggaaggcagcttctctgcaactgagctgagatctcaaaatagacaatgtcaagatggaatgagaagggaaaaacagcatgtgtagacaggtagtgacaaaaggctaattaaggactgaaagaaaccagtggacct

SEQ ID NO: 4011 - DNA, 481 bp, Homo sapiens
ctgaaaagcatgcttgatatagtagagcatgatctcctcaaacctcacttgccctctgtcacttatttgagattagatggcagcatacctcctggtcagaggcattccattgtttcccggtttaataatgatccatctatagacgttctgttacttaccactcacgttggtggcctgggacttaatttgacaggcgctgacacagtagtatttgtggagcatgactggaatcctatgcgagatctacaagccatggaccgggcccatcgcattgggcagaaacgtgtggttaacgtataccgattgataaccagaggaacattggaagaaaaaataatggggttgcagaaattcaagatgaacatagcgaatactgttattagccaagagaattctagtttgcagagcatggggactgatcagcttcttgatctgtttactcttgataaggatggcaaagcagaaaaagctgacacctcta

SEQ ID NO: 4012 - DNA, 445 bp, Homo sapiens
  unsure (136): n=A,T,C or G
  unsure (372): n=A,T,C or G
aaatgaagaacttttccttgaattttttgttgtcttcgttggttcttggcttgctttttggcttgtttctttgcttttttctgtaagtgcttacttgttccagaaggaatatcacttctctcttttatgtaactgncgttatctttttcttcctcactatcttgatcttcatcctccactgtctttttcagatttttatcatttacacttttcttaccactctgatcatctaaaactgggagggacaaatcaaggaaagattcatgaaccaaggagacagttctgcattgatcacacatgatcatactagttagttcaccaccaaagatgcggtcaacaaaacttggcattgattttttcttctcataattnggtgttcttctgctctcatcccatccaataagtagcgaagcagctcctggctgtcttgctgctgatagccttt

SEQ ID NO: 4013 - DNA, 539 bp, Homo sapiens
ccaggtacagcagcatggcctccatgacctggtgcttcttcaccaccaggtggctgtccgtgcccagcccgtgcaggatgggcagcaccttctccgcaaagtgcagggggcgctctgcctcctccctctcgttgacctcaaagcaggtccaatagtccttctccctgatgcccacgttccggcgatccaggatctccagggtgagctcctcagcagtcatggatgctgggaccttgatatgctgctcagtctctgccttcttctcttccagatacactgtgcagatgaagtcaccggcatgctgggtcccactggcagtgccagccacgcgcatcttcacaatggcagtgatctcctcccgctgcttcctgagctcttcctcatccacactaaacaccaccacatagtggttaatgaggtcttccaccacacggccagccttgtagtcctgcccatctgtctggaagagcgtgggcccaaacacaattgccaagttgtgcacgttcatctggttcgtgtctgagaagcactgaacacag

SEQ ID NO: 4014 - DNA, 528 bp, Homo sapiens
  unsure (469): n=A,T,C or G
cctgggctggcgccctgtgtacagaaatctctggacaccgaatggtttcagacgccgagcaatggcctggcctatgcgccccagcccgatgatgccgacagtgctctgcgtgagtccatagccacacagccagaggggcttccacgaggtccagccaccattcttcacttcctcgatggcctccggcaaccggcggcaggtggtaagtagcggggagactgcgagttcggcggtggtatctgtcaggacatctggggtgtagccaactcggatcccacgcttcttgatttcatccaaagccaagtggtcgatgcccacagacatggtgctgatgactttgagattggcccctgcagcatccaggatcctcttgtccacgtggtcggagaggaggcagagcaggccgtgggcccccgccacacctcgctctagctccttggcagggatgggctcatccgagtcccactgntccacctcacagcctcggcgggtatcctgcgggtgacgaacaccttcatgagtcgcacc

SEQ ID NO: 4015 - DNA, 486 bp, Homo sapiens
  unsure (473): n=A,T,C or G
ccagtgggatggttaggctcaagtttgacaaaggcacctgccacagtaggcttgaataaagtgggtgagtcttagacctatcgaaaagcatactaacagggtgctgatagatgggccacataacaccccggaagatcagcagggccttgtgtaggctgctgcagcatttttttttttttttcttttttgagatggagtctcactctgtcgcccaggctggggtgcagtggcgccatctcggctcaccgcaagctccgcttcccaggctggggtgcagtggtgcgatcttggctcactgcaagctccgcctcctgggttcacgccattctcctgcctcagcctcccgagtagctgggactacaggcgccaccaccttgcccaactaattttttgtattttttagtagagacgaggtttcaccgtgttagccaggatggtctcgatcttctgacctcgtgatccgcctgcctcanactcccaaagtgc

SEQ ID NO: 4016 - DNA, 492 bp, Homo sapiens
aaaatctcccactttttaatgggacatgtccaggtaggaaaggacagattttatgtactgaaaatcttgaaactataaagtatgcattttgtctgactttattacattagataatttaggccactcctacctatttgcaattatattttttctgaaaaggatttcaatttaggtagccatttaagataacctttccaaatgctctgagaactagacattaatagttactggcctcagatatcagaacacaaatgcttagttacactggtaattactacctatgaggaagaaagtgtagtggaatctgacaattaatgagaatcaacttgcagggtctaaatgaataaacaaagaccaaaaataaggtgaaacatttccttcaagtatatattaaaaaactacacgaaaaaaattctacctgaaataaataatatttatacttttgtgccagtcttgaataattagaggaaaaaatgaagtaaacaaagaaac

SEQ ID NO: 4017 - DNA, 270 bp, Homo sapiens; identical to SEQ ID NO: 3318

SEQ ID NO: 4018 - DNA, 504 bp, Homo sapiens
aaaatattttgaacacttcttgttggattatatcagaggtgtgactacattttaacaaaagtggactttttaagataagtctggtcaaagaagtgcagaaacagtaagtcaatatgatagaaatagtaggtcaaaatatgatgtgttagttcaattaatgtatgaactcctgccaccatcaaaagacaaatattaaaaagctacatctttagtctagttctgtattttaccagaggcacatttagaagaaaaacaaaagggtcacccaaatactaaattgttttcaaccattacagtaaatagagccaaacctagaaatttcaaaaacaatccattttatattccagaaatctcctttatccatgtgctaatcatccagaacacaattttctaaaaatagtaagacaacagtttcacattaatcataacttttttaattaacaagtagtgaatcgggcactttaagatattgtttactacatactgaaataaacagatctgttt

SEQ ID NO: 4019 - DNA, 233 bp, Homo sapiens
ccttgagattttgctgcctggactgtaaatctggccgaggctgagaagagcaaacaaaggagcaactgtgggaactgacagctcaaggactctggcatcagggtaggcccttggctgactttctcaggaggtgctgtcggggctggtcttcccgccggccaccacatacatcttaaaattacagagggtgtgagtgaccctaagatggttcagcaggcactggaggaaggagg

SEQ ID NO: 4020 - DNA, 403 bp, Homo sapiens
aaagccagtgctctaagacctcagcttttatctcagaaccccatgggttccagaccaagagtacaggaaatcaaattgttgtcctgtctgtctatagcttggaacagggagctttgattactgactccggttccacacactgtaagatcaaaaaaccatctccacatttgaaagagatgtaaggtgtattcatagggatggtggctcaacaaatcaagcaaactggaatcaaggggagggggaagggaatgaaatggaaagggaggctgattcccttcccctgacttaccactaatttactaggctacctactttcatgagtaacctctcacagctacccagcacatgccacaatcctatgctcttgccttcttttatctgcactgtgtgaagggactctttt

SEQ ID NO: 4021 - DNA, 357 bp, Homo sapiens
ctggggctgaggatggagtccaagactgagaaatggatggaacgaatacacctcaatgtctctgaagggccttttccacctcatatccagctccctccagaaattcaagagtcccaggaagtcactctgacctgcttgctgaatttctcctgctatgggtatccgatccaattgcagtggctcctagagggggttccaatgaggcaggctgctgtcacctcgacctccttgaccatcaagtctgtcttcacccggagcgagctcaagttctccccacagtggagtcaccatgggaagattgtgacctgccagcttcaggatgcagatgggaagttcctctccaatgacacggtgcag

SEQ ID NO: 4022 - DNA, 307 bp, Homo sapiens
aaagccacagtaagttacaaaaggcaaattcatagatgctctttgaaagtgaatgtaactactatacttggtattctacttcccccacgcccccagaagtttttgatgctatagacactgatatatagtttgaaactctcactataaaattactaggctaagtctatcaagacttgaaagtttgttttgctgaggtaggtgaaagggtaatctctgttctttccaggtgactgcatctgcacaggcttccctgggaggacttcatcaacagcacagttacacatcaaagtcctttagctctccccag

SEQ ID NO: 4023 - DNA, 175 bp, Homo sapiens
ctgcagtgtccctttttatatcatgctagtgttgagacatacttgactaacttgggaacagttcgatatattgacgaccgtcaacttaagaaaatcaacagcttttggccccagcgtccaagtgaacttttcatggagtgcagaatctcaaatggacaaaatactttgtcttttt

SEQ ID NO: 4024 - DNA, 307 bp, Homo sapiens
cacaaagccaatgctgaggagatgaccaagtaccacagcgatgactacattaaattcttgcgctccatccgtccagataacatgtcggagtacagcaagcagatgcagagattcaacgttggtgaggactgtccagtattcgatggcctgtttgagttctgtcagttgtctactggtggttctgtggcaagtgctgtgaaacttaataagcagcagacggacatcgctgtgaattgggctgggggcctgcaccatgcaaagaagtccgaggcatctggcttctgttacgtcaatgatatcgtcttgg

SEQ ID NO: 4025 - DNA, 271 bp, Homo sapiens
aaaaataatattacattaagttttcctggtctaataaccaactttgagaagtacagtggaagggtatagaacttcctatatcttctatacttttaatgccaatttgatttttattgtgatgtgatatttaacagtatgctaaaaataaaattgactgaattgtatgattttgtccacaacattgaagtctctttttgctaaaatattacaaaatgaatccagtaaacactttccaatggcctaagttagagatgaattcaacttttttttt

SEQ ID NO: 4026 - DNA, 407 bp, Homo sapiens
ctgctcccggttcacgagggaggagtggtggtagcgatcccgagtggcgaagtctgcattctcctgggtgagctgagtcatctccatgtcaaccttagccagggacggcgccaagatgatctgctcctgaggggaccgcaagctcctgcaggaggggagcaagagagacctcatccaccggaaaaagctgaagttggaggctgatccaaggtgaagccctggactggcccggccaatgtagaaatacacgatggcagcaacacccatgttaaccagggtatacacccactgtatcacaaacatgatgagaagggacccaacagcccccaacagggagacccaggggttgcacatgtgggtatagaaagaagtggatcttctccagacatcttgttcttggagcctgg

SEQ ID NO: 4027 - DNA, 443 bp, Homo sapiens
tttctataaagaaaagaagtttaattggctcatgattctgcaggctgtacaggaagcatagcacccaaatcactgggctttggggatggtctcagggagctttttcaatcatggtggaaggcaaaggggaagcaggcacatcatatgacaaaagcaggagggagagagagagagtgtgtgtgtgtgttggagggaggtgccacacttttatatgaccagatttcatgagaactcactatcatgaagatagcaccaagccataagggatcagcctccatgatccaaacacctcccaccaggccccacccccagcaatggggattgcaattcaacatgacatttgggcagggacaagtatacaaactgtaccactggcctgatgaagacacagcccatggtgcctacaaattctcactacctagtaggcaattaatattggaaaa

SEQ ID NO: 4028 - DNA, 525 bp, Homo sapiens
aaatacaaaatagaatgttatatatcttgtagacagtcaaatatttgatgttttatgggacataatcatttgggaagtttttgttgtaaatgaagagttagtttgttgctattaatttgtttgacacataagttcattcctaaaagttagagatgttacataaagaagggttgaggactttatttcagaagtcatttaattttttctttattttctttcagattttgtatggtttattcagaagtgccaaatttcagtgaacccaacccagattatcgaggacagcagaacaaaggggcacagagtgaacagaagaataattccatgaatagtaatatgggtacaggtacatttggaccagtgggaaatggtgttcacactggccctgaatcaagggaacaccagttttcacatgctggcagaagcaatggccggggacttataaatccacaactacaaggaacagctagtaatcaaacagtgatgaccacaataagtaatggcagggaccctcggagagccttt

SEQ ID NO: 4029 - DNA, 330 bp, Homo sapiens
ctgaactattgacaagttttccttaataaggcaaaatccccaactgtgatagatgcataacggtagccgctccacttaagcagtacagtttaacccgccaccattcgatgtcttaacatgttccaagaagaacaatgtcatcttggttttaaggtgatgcatcttgtttttttctgatagaaaaagaataatgtgctttttattctcctagagatttggtgtctgtgaatggttgtagctctgtgacatttaccatacatttctcagcttccacccatcaatttgctgagaaaaaaaggtatgctacaaatcgcagcaatagagcacttt

SEQ ID NO: 4030 - DNA, 493 bp, Homo sapiens
  unsure (456): n=A,T,C or G
ctgctgccatttcatggtgaagctcttggatgatgggactttcatgatccccggggagaaggtggcccacacctcgctggacgccctggtcaccttccaccagcagaagccaattgagccgcgcagggagctgctgacacagccctgcaggcagaaggatcccgcaaacgtggattacgaggatctcttcctctactccaacgcagtggccgaggaagctgcctgcccggtgtctgcccctgaggaggcctccccaaagccagtcctgtgtcaccaatcaaaggaaaggaagccgtcagcagagatgaacagaataaccaccaaggaagccacttcctcctgccccccaaaatcccctcttggagagacccgccagaaactctggaggagcctcaaaatgctccccgagagaggccagagggtccggcagcagctaaaaagccacctcgccactgngaacttgtcgtcactcttggatgtccggagatccacg

SEQ ID NO: 4031 - DNA, 240 bp, Homo sapiens
aaaagtattgtgttttatttctttatttcaccaccatttatatgtatgaactatgatcaaggcttgcctatgtcctgtggagcaaggccaagaaatatgctttatattggttatttgatcttcagcatcagattatcactattgcagaggtgggcaaaaccatgcaaaaagaagaggaagtatatttgcattaatggcattaaatgaagtacagttgaagctgcagagttttaccagtgg

SEQ ID NO: 4032 - DNA, 285 bp, Homo sapiens
ttcagattctgtctctgcttccgaaagggcagggccttctagagcaaggcatttttcagagcaccccagcacatctaaaatgaatgctcaagaaactgcaactggaatggcgtttgaagaacctatagatgagaagaagtttgaaaagacagaagatgggggagaatttgaagaaggtgcttctgaaaacaatgctaaggaaagtagccccgaaaaagaggctgaagaaggctgccctgaaaaagaatctgaagagggctgccccaaaagagggtttgaaggcag

SEQ ID NO: 4033 - DNA, 499 bp, Homo sapiens
aaacccatgagtttatgccctgggctccttagcccacaatagtgtaataaaagtgccccgggctggtttgtgcttatttctgccattgtccctcccacgttcccagagaggtcattctttttggtccaactcttgctgtcctttcttaccacctgtgcaccccacttggagcagtgggaggaaatctgggtttgtggccccacaaaggctgtatatgtaaagatacacctatgtatgtggtggaactcacctttacacacaactgcagcttttccttggagtctgtaccaggtggtggttatggggtctgaaccaaaggatagcagctcttcattcctcttctgacatgtgcatgctgctccccccagccctgggctttcctgaattgccaagcctggtgcctttccaaaggactagcagggcctgtggtggagccagcagaaccacaggagagtgccctgcctgtctcagtggaagtgtattattgttttaaggatag

SEQ ID NO: 4034 - DNA, 615 bp, Homo sapiens
ccttgcctcagatccaaggtcactcggaagaggccatgtctaccctcaatgacactcatggaggaaatgctgagagaagcattcagatgcatgacacaaggtaagactgccaaaaatcttgttcttgctctcctcattttgttatttgttttatttttaggagttttgagagcaaaatgacaacacccagaaattcagtaaatgggactttcccggcagagccaatgaaaggccctattgctatgcaatctggtccaaaaccactcttcaggaggatgtcttcactggtgggccccacgcaaagcttcttcatgagggaatctaagactttgggggctgtccagattatgaatgggctcttccacattgccctgggggtcttctgatgatcccagcagggatctatgcacccatctgtgtgactgtgtggtaccctctctggggaggcattatgtatattatttccggatcactcctggcagcaacggagaaaaactccaggaagtgtttggtcaaaggaaaaatgataatgaattcattgagcctctttgctgccatttctggaatgattctttcaatcatggacatacttaatattaaaatttcccatttttt

SEQ ID NO: 4035 - DNA, 254 bp, Homo sapiens
aaagcgctgatcctgtttatttggcaggaaaacgagacaatccagcagcccaggagggacaggtggacttaatcctcctcctcgtcgtctccagccccagccccaccctggcccttcttggcattcttcctcttcacgcggcccgggcggccacccccgtagggagagcgcagagagaagtcgacgtgcttctgggaatccaggcggacaatgaaggacgggatgttcaccacctgcttgcggaccctgtccag

SEQ ID NO: 4036 - DNA, 360 bp, Homo sapiens
ctgttgtgagaaagccttcagcagcaagtcataccttctagtgcatcagcaaactcatgccgaagagaaaccctatggttgtaatgaatgtgggaaagacttcagtagtaaatcatacctcattgtacatcagagaattcatacaggagagaaactacatgaatgcagtgaatgcaggaaaacattcagtttccattcacagcttgttatacatcagagaattcacacaggtgagaatccctatgagtgctgtgaatgtgggaaagtcttcagtaggaaagaccagcttgtttcacaccagaaaactcattcaggacagaaaccatatgtgtgtaatgaatgtgggaaagcttttggttt

SEQ ID NO: 4037 - DNA, 242 bp, Homo sapiens
ccaagaaggatgtccacatgcctaagcacccggagctggcagacaagaatgtgcccaaccttcatgtcatgaaggccatgcagtctctcaagtcccgaggctacgtgaaggaacagtttgcctggagacatttctactggtaccttaccaatgagggtatccagtatctccgtgattaccttcatctgcccccggagattgtgcctgccaccctacgccgtagccgtccagagactggcagg

SEQ ID NO: 4038 - DNA, 373 bp, Homo sapiens; identical to SEQ ID NO: 142

SEQ ID NO: 4039 - DNA, 504 bp, Homo sapiens
cctcgaggagtcaatttgcctctgtgtgcctcagtggagacaagtgggaaaacatggtcccacctgtgcgagaccccctgtcctgtgctgctcactcaacaacatctttgtgttgctttcaccaggctgagaccctaccctatggggtatatgggcttttacctgtgcaccagtgtgacaggaaagattcatgtcactactgtccgtggctacaattcaaaggtatccaatgtcgctgtaaattttatggcactatttttattggaggatttggtcagaatgcagttgttgtacaactcataaatactaactgctgattttgacacatgtgtgctccaaatgatctggtggttatttaacgtacctcttaaaattcgttgaaacgatttcaggtcaactctgaagagtatttgaaagcaggacttcagaacagtgtttgatttttattttataaatttaagcattcaaattaggcaaatctttggctgcaggcagcaaaaacag

SEQ ID NO: 4040 - DNA, 410 bp, Homo sapiens
aaaatgttcatgtagaaaattaatgaactataggaatagctctaggagaacaaatgtgctttctgtaaaaaggcagaccagggatgtaatgtttttaatgtttcagaagcctaactttttacacagtggttacatttcacatttcactaatgttgatatttggctgatggttgagcagtttctgaaatacacatttagtgtatggaaatacaagacagctaaagggctgtttggttagcatctcatcttgcattctgatcaattggcaagaaagggagatttcaaaattatatttcttgatggtatcttttcaattaatgtatctgtaaaagtttctttgtaaatactatgtgttctggtgtgtcttaaaattccaaacaaaatgatccctgcatttcctgaagatgttt

SEQ ID NO: 4041 - DNA, 405 bp, Homo sapiens
aaacaggccgagaagaacgtggagaagaaaattgacaaatacacagaggtcctcaagacccacggactcctggtctgagcccaataaagactgttaattcctcatgcgttgcctgcccttcctccattgttgccctggaatgtacgggacccaggggcagcagcagtccaggtgccgcaggcagccctgggacataggaagctgggagcaaggaaagggtcttagtcactgcctcccgaagttgcttgaaagcactcggagaattgtgcaggtgtcatttatctatgaccaataggaagagcaaccagttactatgagtgaaagggagccagaagactgattggagggccctatcttgtgagtggggcatctgttgaactttccacctggtcatatactctgcag

SEQ ID NO: 4042 - DNA, 349 bp, Homo sapiens
ctgacaatctatgggggcgggggggggggcgcggcaaaaaagcaatgatggaccttggctgatccccccgacccctttcttaacaatataggtagatgtctatcgtcagcttgcctctttgccaagacctagggggcggctctgccatgagctgctgtgtgctgccctccccaccttcagcacactcatctacacacacacaggtagcacccacctcgatgagaccgccttgctctggcctgccccaaccctggaagttgaaaacatagaaccatttatttctgcttctactctctgtgcccatgtcttgtccacgaaactttgctgaacttccaggaccttacacctg

SEQ ID NO: 4043 - DNA, 373 bp, Homo sapiens
ccaaaactgcgaagagatgcagaataatgttgacaataataagttgctgaatcgtcaggctgcagactggtgatggttaaattgaattgtgtcccagatccactgccagtaaatcttaatgagaccccttcttctaaactggaagtcgcataaattaggacattaggggctttgcctggtttctgttgatgccaggccaaccaccgatctatattctgagaggcccgacaacttattgtaactgtatctccgacagatgcagacagggtggaaggagattgggtcatctggatgtcacatttggcacctgggagccagagcagcaggagccccaggagctgagcggggaccctcatgtccatgctgtgtcctg

SEQ ID NO: 4044 - DNA, 368 bp, Homo sapiens
aaatttccaaccttaagtgaatttgtggaccaaatttcaaaggaactttttgtgtagtcagttcttgcacaatgtgtttggtaaacaaactcaaaatggattcttaggagcattttagtgtttattaaataactgaccatttgctgtagaaagatgagaaaacttaagctttgttttactacaacttgtacaaagttgtatgacagggcatattctttgcttccaagatttgggttgggggcactaggggttcagagcctggcagaattgtcagctttagtctgacataatctaagggtatggggcaaggatcacatctaatgcttgtgttccttatactctattatatagtgttattcatgattcag

SEQ ID NO: 4045 - DNA, 289 bp, Homo sapiens
catttagcaagttggttttggttttttcttctttacaaaatatttttatttttgttacccttatgtttatggtttagatttctttggccttatcaagcttttcttattttgtcttcaacaaagttaaatccagcatataaaacaagatttctacaaactgggtatctttttaatactttgtttccaaaggatgcaaggtgttgtaaaccgactgtccaagttactgaaacctgggggaatgctgttatttcgagactatggaagatatgataagactcagcttcgtttt

SEQ ID NO: 4046 - DNA, 309 bp, Homo sapiens
gtcggagccatggcggtggcaaattcaagtcctgttaaccccgtggtgttctttgatgtcagtattggcggtcaggaagttggccgcatgaagatcgagctctttgcagacgttgtgcctaagacggccgagaactttaggcagttctgcaccggagaattcaggaaagatggggttccaataggatacaaaggaagcaccttccacagggtcataaaggatttcatgattcagggtggagattttgttaatggagatggtactggagtcgccagtatttaccgggggccatttgcagatgaaaatttt

SEQ ID NO: 4047 - DNA, 132 bp, Homo sapiens
ctgtgagccaccctgcccggccacttttgtatgatttctaatgtatttgtaatttacctaacaaattgcctaatctgctatgttaatgtatttatgaattaaaataaatacgactgcaaaaaaaaaaaaaaa

SEQ ID NO: 4048 - DNA, 456 bp, Homo sapiens
  unsure (160): n=A,T,C or G
  unsure (386): n=A,T,C or G
  unsure (388): n=A,T,C or G
  unsure (405): n=A,T,C or G
  unsure (413): n=A,T,C or G
  unsure (414): n=A,T,C or G
aaataaataggagtacactgtaaaataataaaagtatattgtatagtaaatacataaatcagtaatatcttttattatcactatcaagtattatgcactgtacataattgtatgtgctagacttttatatgactggcaatgcaggtttgtttacaccagncatcaccacaaactcatgactaatgtattgtgccacattacaatgtcgctaggtaacaggaatttttcagctccattataatcctatgggaccaccatcatatatacagtccatcattgaccgagatgtcattaagaggtacatcaacagaaataatgtatattatgtacaaaaataaatgaattaaaattaaatgaatacttgataaatgacaagttataaaagncnatttctgattctaaaanatacatgnnaatattttttctacagagcatggaaaatacattagatgttat

SEQ ID NO: 4049 - DNA, 435 bp, Homo sapiens
cctgttgaggagaaactgaggccagccctggcggagacctagcccagcggggtaaggagggtgggggaaaactgggtctgaaggaatgagggccccctccctctgggctttcctcctagagggcctcagtccctcctgctggctgggctgcacgacccccaatccttgctcccctaacccggaggagggggccagaccagggagggcagtggacagggagcctgggggagttggggagcgcagggcagggtccatggtgtgcagagggggtggcagccacctaggtggtcagttcctggcagcgatgaccacagagagtgccacaccccccaaggcaacagcagtcgccccaaacagccacttccatgggatggactgtggataaaaaggaggggagagaagggtggagggaggtcaagactggcctctggggcc

SEQ ID NO: 4050 - DNA, 206 bp, Homo sapiens
  unsure (77): n=A,T,C or G
ccaccccagtaactgacctgctctcctgttggagctctacatgggacaccagctcccatgcatttatccctcttcanacctcactggtgagaagctgggcttctgggtccccatgctgcttcatcccacctcccaaccctgtcttcaggcccactgctgatcccagtctagaaccacagcaccgcccccatcctgcatgaagaagg

SEQ ID NO: 4051 - DNA, 163 bp, Homo sapiens
  unsure (123): n=A,T,C or G
ctgtttgccggcaaatatcagacgctgctggtcaggtgggataccctccttgtcttgaattttggccttgacattctcaatggtgtcactgggctcgacctcaagggtgatggttttgccagngagggtcttcacaaagatctgcatgtttgcgtcagctcgg

SEQ ID NO: 4052 - DNA, 379 bp, Homo sapiens
ctgatggagatgactctactgcaaaaatgacaaccagcaagaaagcgggtggtgcccgtttcctccctggggaccctcagagggccaggccattctcttccttggtgtgactgcggatccagggtaagaagtgtgagactctcgtgtagacgcctggcttgtccttcagggcacatccacggccccagctcacaattccagtcaaagtcatgcggccttggagggaacagacgaggggtccccctgagtctccctggcaggaatctgttttccactgtgggtcagcagcacacagcattttggtggtgacttcagagccgtagtagtggggctgctgacactcccggtgggaaatcagcttcacaacagtcattttcag

SEQ ID NO: 4053 - DNA, 373 bp, Homo sapiens
ttgaactctctgagataaacggagatgcagggtcaaactacataaatgccagctatattgatggtttcaaagaacccaggaaatacattgctgcacaaggtcccagggatgaaactgttgatgatttctggaggatgatttgggaacagaaagccacagttattgtcatggtcactcgatgtgaagaaggaaacaggaacaagtgtgcagaatactggccgtcaatggaagagggcactcgggcttttggagatgttgttgtaaagatcaaccagcacaaaagatgtccagattacatcattcagaaattgaacattgtaaataaaaaagaaaaagcaactggaagagaggtgactcacattcagttcaccag

SEQ ID NO: 4054 - DNA, 382 bp, Homo sapiens
ctggccctgattgcgggcacggcagtcgtgggtgtggtcctggtcctggtggtcattgtggtcgcagttctctgcctcaggaagcagagcaatgggagagaagcagaatattcggacaaacacggacagtatctcatcggacatggtactaaggtctacatcgaccccttcacttatgaagaccctaatgaggctgtgagggaatttgcaaaagagatcgatgtctcctacgtcaagattgaagaggtgtttggtgcaggtgagtttggcgaggtgtgtcgggggcggctcaaggccccagggaagaaggagagctgtgtggcaatcaagaccctgaagggtggctacacggagcggcagcggcgtgagtttctgagcgagg

SEQ ID NO: 4055 - DNA, 306 bp, Homo sapiens
ccactggcatcgcagcttcctgtctgtttatatattgaaagttgcttttattgcaccattttcaatttggagcattaactaaatgctcatacacagttaaataaatagaaagagttctatggagactttgctgttactgcttctctttgtgcagtgttagtattcaccctgggcagtgagtgccatgctttttggtgagggcagatcccagcacctattgaattaccatagagtaatgatgtaacagtgcaagattttttttttaagtgacataattgtccagttataagcgtatttagactgtgg

SEQ ID NO: 4056 - DNA, 255 bp, Homo sapiens
ctgccctgtggtttcacatgataaggcactacttccaaaatcttccacttccacaaaacatctgtttcccagaagacctgagaagcatattccaacaggcggacacgcccgaccctccccaacttaaaatccacaccaatggcagcaccgtgtggaaagtgagacattcgttcagtgacctggggtttttctgggctgttggagcagccatagcaaatggcaagttctgctgtctgggctgctgtggttctctgg

SEQ ID NO: 4057 - DNA, 332 bp, Homo sapiens
  unsure (224): n=A,T,C or G
  unsure (299): n=A,T,C or G
  unsure (301): n=A,T,C or G
  unsure (312): n=A,T,C or G
  unsure (315): n=A,T,C or G
  unsure (324): n=A,T,C or G
aaagaactaatttgtaaattatgacacaaaattttattaacaaggaaatatccattaattgactactacagtaaaaactttataatgcttgtatcatgaagaaagaccttccttttccttatatattaattgaactacataggcttgctgtacattttgttattcatgttataagaattctagattccattgcttttgaaatatgtttctttttaggaactaanagtcaacttatagtttgatttctgttttatttgtactgtgtttctgattttgtgggtttctaaataaaaagatcnancccaccacttncantatactgtnttctattt

SEQ ID NO: 4058 - DNA, 229 bp, Homo sapiens
  unsure (13): n=A,T,C or G
  unsure (15): n=A,T,C or G
cattatgggtaangnggggttgggcggggctttaattccatccagataatgctggatggcttgggaccacttggcagtccttcgctgcttttctgtgctgcagtggctatggagtgagcaaggctcctcagggagctatttctataggaagcacaattctggacggtatggctggggaagcgtaaagagggttaacaaggataagaaacctccaccccttccccttcag

SEQ ID NO: 4059 - DNA, 567 bp, Homo sapiens
ccaggctggtcttgaactcctgacctcgtgatccacccacctcagcctcccaaagtgctgggattacagacgtgagccactgcgcccggcccagctagtctatatctttcaagtgggaaatgtaatcagttcccattcaaggttattactgataggtgaggacttattcttgccattttgttaattgttttctacttgttttgtgcatcctttgttcatttcttcctctcttattggttatcattgtggtttggtggttttctgtagtggtaacatttgattcctttctttttctcatttgtatctgctccaccagtgagtttcatgttttcatgatgcaaatatcagccttttgctttcagatgtagaacatgttaagcatttctcgtagggctggtatagtggtgatgaatgccctcagtttttgcttggctgggaaagactttattactctttaatttttgaaggacaactttgccgagtatagtgttcttgcgtgacagttttctttttcctttagcacttttaatgtattatcacattctctcctggcctgtaaggtttctg

SEQ ID NO: 4060 - DNA, 309 bp, Homo sapiens
ctgcacttactcactgatgggaaaagttctttgagttacacagtttcaaacaggaacagccaggagactggggacttaaatcataactattgtataaataatgggagctgttccctgagctaaacgccgccctttggcagaggtagagccttttggcagagggaggcaggagaagagtgtgggaagtgaagaagttcctgaggtgacaaagtgaattgcaccggagagaaggggggataaagctgcttcccagaaactaggacagcaacacctggctggtccccgaggacgaggacgggacaagaaagg

SEQ ID NO: 4061 - DNA, 469 bp, Homo sapiens
ccatcatgtcgcgcacagccagcatcagcctgttcaggccctggttgcggttcagacccccagccactccttcctcgggcctctccccctccatggtatagtttggcaacagtgaccggaagaagagagcaatggtgtttccatggctgataggacttagcctctctggcctgacgtaggagtagattgtgtccgaaggaggcagaggatcaaaccccatcacagactgcgtggtcacgtccgggggcagggcagcgacggcttccttgatctcagagaggatcacatggcggtggatattcctgggtgcacgctggtagagcaccttccgccggttctcacaggcttccacggccgggtccccggcgtccactgcttgcagaacctcgtggacgttctcctccagccagctcatggtggcgggctctttccagagaaagtgtgacctcccaaggtacaggttcaccag

SEQ ID NO: 4062 - DNA, 281 bp, Homo sapiens
  unsure (7): n=A,T,C or G
  unsure (68): n=A,T,C or G
tccatanctataaaaatcgttacggccaggatatgccggaacagaacactccccactggggtcctcanccttggatgtcagctcggcccctcaaggggtccctacacctggaagctgattccactcatcagtctcgagctgggcgcatgtggagttgatgtggagttgtagctgactggctggtggggtcagcctggcctcccagtgtggagcatgggcaccagcctcactgcgtggtcgccctagggcatatgctgcgggctgttgtggcattcctgtgg

SEQ ID NO: 4063 - DNA, 111 bp, Homo sapiens
aggctgcagcagcccttgtgacagggctgtggtcacccttagctagcactgacaagatctccatcatctcactctccatcagggtgctggcaatctccctcgaggacctcg

SEQ ID NO: 4064 - DNA, 234 bp, Homo sapiens
ctgaaaatccatcagtgccagcataccaatgaacctctattcaagtgtacccaggaaggatgtgggaaacactttgcatcacccagcaagctgaaacgacatgccaaggcccacgagggctatgtatgtcaaaaaggatgttcctttgtggcaaaaacatggacggaacttctgaaacatgtgagagaaacccataaagaggaaatactatgtgaagtatgccggaaaacattt

SEQ ID NO: 4065 - DNA, 171 bp, Homo sapiens
ctggacgcacggaggccacactgagtatgtcatcaatctgccgactgttgaagttggacaggcccagcgcctgcaccagccccttagccaccagtgcctccagagccttccaagtctccttgtagtgggtggagtcgtagcatatagtcccatcagcattcttggggaagg

SEQ ID NO: 4066 - DNA, 568 bp, Homo sapiens
aaaatgcattttcccttgtcctgtctttaactagatatacatgcttatatttatagtgggtttcacagactataaaattgaatgtatgaaatttttatttatatcagtgcttttaataatgaagatatttttggagtaatggtgctgtcttgtagcgagttattaatcatagtaagatttttttctcttcatttgctttttttgtttcatattaacaattttttttttacacggacacaaccctctgacagtctttccaaatattaaaatcatttgaatatgtatgctgtgatctgaacactgctcaagccatcaagcagtcttcatacagtttgcattataaaatctcattaaattctccaagaaaaaataagttgaagaattttatttcctgaccatgcatcccctggatttctgagtttcagttcagattgtagatgacaatataagctgccttccgaaattgtcaacatctgaatgttaagtccattttccccatggaagaagcccgtagttccatgaagtatggattaccatttgtatttttcactaacagtaaatgtatttt

SEQ ID NO: 4067 - DNA, 389 bp, Homo sapiens
aaaagaaattcagaaactaagcggttggagaggagcattggaaatagagggggatgctatgagatgggggttgggagcagagaagaaactgcaggagggcaaagtgtaactagcaatataccttctgtgatgctccagaaacacatgtctgctaagattaacttgattggagtttcttatgaaacaggctgatcatcaagatttttaactcaggtttcagtgaaaaaattggaaacttttacaagaaagatttgagaagtagaaggcaggcagcaaattttccagatattatgcttgcatttcaaattcctgtttcaggcttttcaagtaggcatgcacattcccaaagccatgatatttggctaaatacacaaggaccccagtcgcac

SEQ ID NO: 4068 - DNA, 425 bp, Homo sapiens
ccttcctccgcttccgctgcacctcttccttgtctgggggcagaggaaaatgagattgagcccagttattgtgtcatgcctcaggggcccttcccagaagagccctcagggccggctcctaggaagcacctcctgggaccctcgcacttctgacttggctcatgcatccccacatctagctcttgggaccttcttctagcccagcctggccccccgccagcaccctgaggtcctcagcccagctccaccttccaccagagggtaataggtgaactgtttggaatcagacacgtcccctcctcgcttgcgtttcagttgcagaaacactgttacaggccgctcaatcttcatcttgtgataggggggtgtccggaacacaatggcatactgtttatgcacatctgtgggagagaagtccccaaagg

SEQ ID NO: 4069 - DNA, 361 bp, Homo sapiens
ctgaagcccaagaactgctgatacactgcagatgagaaaacatttgctactctcccagctctggcctttcttaagctaaatgatgatcacaacaatatagatcacttgttctataaaacaattttggcttacatgtatagcaagctgcactgccagcatttacatttgcaacaacatttcaatcccttttttgactctagaggttgcaactcttcagctttattggttcagcaatttagtcccaaattctcatgaaaaatttacactttttaatccagcatttattcccttgaaatgagttactacacctatgtaaatttttttaatgtttgaaccccaaagataaaataaatacattttt

SEQ ID NO: 4070 - DNA, 486 bp, Homo sapiens
aaaagagtaaaaaatggttttctggttccaagatggctgaataggaacagctccagtctacagctcccagcatgagtgacgcagaagacaggtgatttctgcatttccaactgaggtactgggttcatctcactggggcttgtcagacagtgggtgcagaccacagagtgtgagctgaagcagggtggggcatcacctcacctgggaagcacaaggggctgaggaattcccttttctagccaagggaagctgtgacagatggtacctggaaaatcgggacactcccaccctaatactgtgcttttccagtggtcttagcaaatggcacaccaggagattatatcctgtgcatggcttggagggtcctatgaccacagagcctcgctcactgctagcacagcagtctgagattgaactgcaaggcagcagcaaggctgggggagtggtgtctgtcattgctgaggcttgagtaggtaaacaaagtgg

SEQ ID NO: 4071 - DNA, 527 bp, Homo sapiens
  unsure (476): n=A,T,C or G
gacaaaatggcgaagatcgccaagactcacgaagatattgaagcacagattcgagaaattcaaggcaagaaggcagctcttgatgaagctcaaggagtgggcctcgattctacaggttattatgaccaggaaatttatggtggaagtgacagcggatttgctggatacgtgacatcaattgctgcaactgaacttgaagatgatgacgatgactattcatcatctacgagtttgcttggtcagaagaagccaggatatcatgcccctgtggcattgcttaatgatataccacagtcaacagaacagtatgatccatttgctgagcacagacctccaaagattgcagaccgggaagatgaatacaaaaagcataggcggaccatgataatttccccagagcgtcttgatccttttgcagatggtaattctttcccacttttctataagtattcagaaatttatttgtattaagttgnctttagccctttgattttttttggcatgcttctgaatttgcttttcttttt

SEQ ID NO: 4072 - DNA, 342 bp, Homo sapiens
ctgatactgtataagacaaagccaagatgcaaaattaggctttgattggcactttttgaaaaatatgcaacaaatatgggatgtaatccggatggccgcttctgtacttaatgtgaaatatttagatacctttttgaacacttaacagtttctttgagacaatgacttttgtaaggattggtactatctatcattccttatgacatgtacattgtctgtcactaatccttggattttgctgtattgtcacctaaattggtacaggtactgataaaaatctctagtggataatcataacactctcggtcacatgtttttccttcagcttgaaagctttttttt

SEQ ID NO: 4073 - DNA, 400 bp, Homo sapiens
ctgccgcaatttccatgccaggatatttttccgcaaatcagtcggttgaaattcagaggggtcagaatgactcgacctgtccttcaatgttgataataaatgtctcagccaaaaaccttccttgagctgccatgcttttccccttgacctgcacctcttcccctaaaacttctgcagggaagcccctggcggaggcgccattgaaagcatggtcttgccagtggctggcaaggcggttttgttctgctcagtttctggagagggttggatgcgtcccctgccatccagccctccccgcttgaggccagcactgagtctgggacactcagcgggaagggggctggcatcgccagcgacccacacattcctcacgtagcttctgctcccaggaaggtagttt

SEQ ID NO: 4074 - DNA, 131 bp, Homo sapiens
caggacttaagacaaatgggactgatgtcatcttgagctcttcatttattttgactgtgatttatttggagtggaggcattgtttttaagaaaaacatgtcatgtaggttgtctaaaaataaaatgcattt

SEQ ID NO: 4075 - DNA, 116 bp, Homo sapiens
aaaaagctgatacttgacaagattttggatgaagacttatatatcaatgccaatgaccaggcgatcgcttatgtgatgctcggaaataaagcccaaactgtactaaatggcaattt

SEQ ID NO: 4076 - DNA, 229 bp, Homo sapiens
ccacatccctgcatttatttgtccgggaatagtggcattcctaatttagtaaaataaaagaatagactgtaaaattatgctgacctataattatacctataggatcaattaataaacatgtcaggttaatatctactgtagcaatgtggtagtaaattttctttgggtattaaatataaatgtgtacatataaataattttggtatattagtcataatgtatatatttt

SEQ ID NO: 4077 - DNA, 324 bp, Homo sapiens
aaatttcataaccagcctgtttagattccagtcttcctagctatatcacatatgccttgttgatatgctctttctgctttctttagacttaatgtttgacgggggtgggggtgtctggaagaacaggaaaggtggggatcctaaggcagattaaaggactccctccaccccactacagcctcccataactctagtcatccctctcatagtacaggactgatttctctgtgtctgtttgtacacacaaatgtgcatacagacataaattcccccaccccataccaaggtggttacctagcaggaatgagcgtaggtggctgctgg

SEQ ID NO: 4078 - DNA, 337 bp, Homo sapiens
aaatgagaatacagctttacttaaatgaaaatcccaatgtttcttttgggtgtagacctcattctttccttcatagaaagaactgtaaactcagtaaattcttaatctcttgtataataatcggatgagagccaagcattttcttaaagatcctctaaaaagaatggctttggaatgactagaaaacatttgtggagtgtgggagctatgcttgcattatttgcttaattcatgtgcttggatgttgtgctttcagtctattcaacaatatttaatcaattattaaattttcttagagacatacacttaaatgaagcattttaattgagtatttttt

SEQ ID NO: 4079 - DNA, 267 bp, Homo sapiens
ctgggctggcgccttagctgtctgctgcactgcggccaccgtgaaggcctgtttcagggtcatcataatttcatcaaccagagcctcatttgtgcactgaaacacgtaacagacaaaatgaaagccgccacctccggaagactcccgacagataaacccaaagtggtccacgtgtctgatgccctgagagcaaaaggatatctccttaaaatttttctccaatgctattttttggtgtcaggactgatgaggtaaacttcagactgg

SEQ ID NO: 4080 - DNA, 268 bp, Homo sapiens
  unsure (199): n=A,T,C or G
  unsure (262): n=A,T,C or G
  unsure (267): n=A,T,C or G
aaagcttcttgttttaattaaaaacaagcacatattaacagccacatgtgaatgccaaatgattaaaacaaaaaaacaaaaacaagagccatctacactgcagctagggaaagcaaacttcttggcttaagagaagtgagggatgtgtgtacgtgtgtgtgtgtgtgtgtgtgtgtgtgtgtgtgtgtgtgtgtttcanaaaagccactccagtctgggaaaataaaagcacagaccatttctaatgactggttttgtttcnccagna

SEQ ID NO: 4081 - DNA, 568 bp, Homo sapiens
aaagcaattggaagagcatatgaacacgggccagctagcaggattttcacatcaaattagaagtctgattttgaataatatcatcaataagaaggagtttgggattttggcaaagaccaaatactttcaaatgttgaagatgcatgcgatgaataccaacaatatcactgagctagtgaactatttggcaaatgacttaagtttagatgaagcttcagtcttgataactgaatattcaaagcactgcgggaaacctgtgcctccagacactgctccctgtgaaattctgaaggtaaagctgatggaaagttcttaggttctaacttgacattgtttatattcctagggccttaaaattgacaagccttttctagtgttctggagataaatgtatttttatgtgtaactgtaatttttatattttactttttgtgttagagagttctaaactagaaatcaagagaccacagttctaatctcagccctgccactgggcagcaaagcctaatgtgggcttagtcttcagatctggaccccatggtctctcaggtgctttccagcattacca

SEQ ID NO: 4082 - DNA, 410 bp, Homo sapiens
cctgctccattccaccctctgggggaggcgcccaatccccttgcgaccggtcatgaggtcttcccagctcaggactccagggcacctcccctcgggcctggtcaggaagcagcacctgagggtggatgttctcagaggatacagacggaacaccttccaggttctcaaatttctcttctcctgttgtctcagtctcccaagctctctctgcatatcctccacaagggtcaccgcttcttcgccgctctccggatgcagctcctgcaccctgctctggatctcctggggcaggatggtcaggaactgctctaacaccagcagctccaagatctgctccttcgtgcgcatctcaggccgaagccacccatggcaaagctcttggagccggctgagggcttcccggggaccag

SEQ ID NO: 4083 - DNA, 262 bp, Homo sapiens
ctgttgactcagattcggcattttaattacattgtttccaagtatgatattctgagagtgtctatagcacttagtgtctgcttcatataaactaccagttattatatatttatgatgcaagtagttttccaaatgtggtgaaagtctgagtctttttatccccatgggtaaaatctgaatctggctctctgtgtctctcagtgcttgtttattactggtcagagagtaaattcttgataaaagctgttgacttggctctcac

SEQ ID NO: 4084 - DNA, 546 bp, Homo sapiens
ccatacctaggactagcccgatctgtgtgtcagccactgacccattttaccagtgaggaaattgaggctcagagaggttaagtgacttgcctgtggtcacacagggaacaagggcagagccagaatgtcaacggaggagtgtacaccctttcaactacgctctgtgcgcaatgtttaaccggagcctcgtgtattcatttgtaagtcacagaaaataattatatttacagggggaatctaaagatttcaggggacaacctgtagactgactctcatttagcaggggcccaataagcgattatgcccatccacttgagcttgtactgacgtaactactctcctcatgactaccactcaaagaatatacaaaggacctctcattttcccagaaataacctctctatatgaacaggcacagccaatgtggaatggccttatgtctactgagcacatcacatgcacagctcttcatttcatccccacactaatcatgtaatacaggcatgactgtccctatctgacagaggaggaaacagggtagagttt

SEQ ID NO: 4085 - DNA, 525 bp, Homo sapiens
ccactacgataagcaggtagctgggttttgtagtgagcttgctccttaagttacaggaactctccttataatagacacttcattttcctagtccatccctcatgaaaaatgactgaccactgctgggcagcaggagggatgatgaccaactaattcccaaaccccagtctcattggtaccagccttggggaaccacctacacttgagccacaattggttttgaagtgcatttacaaggtttgtctattttcagttctttactttttacatgctgacacatacatacactgcctaaatagatctctttcagaaacaatcctcagataacgcatagcaaaatggagatggagacatgatttctcatgcaacagcttctctaattataccttagaaatgttctcctttttatcatcaaatctgctcaagaagggctttttatagtagaataatatcagtggatgaaaacagcttaacattttaccatgcttaagttttaagaataaaataaaaattggaaataattgg

SEQ ID NO: 4086 - DNA, 318 bp, Homo sapiens
tgttcctaaaataaaccatttattgaaaaaagaacctttttcttaaatttcagtaatcagccttttgcattacaaacctgcagcttgccaacaacaacaaaaaaggtaaaggtttcacagtcagtgcactcaacaaacaggagattaaaaacaaggtatgggacgcctgataacactacaacttcttttgaacctagaaaggtcaaaacactacgctgatgtcacggttctcagtcgcgcgagacacggaggagacagaggcgatggtccgtgtacagtagtaatggcacttaacatgcagcttctttaacctcgtgg

SEQ ID NO: 4087 - DNA, 542 bp, Homo sapiens
aaactccaaattcctttatcgaagcagctatctgctaatattactgaatggcaagtctttggaaatgatagttaaccgaaaatgcagaaagaatcatagcaactaatgataatgacgggtaaaggatagaaaataaaatttttagccacaggttgtggttacagcatccaggccatcaccgacatctcggcagggctatgccgccacttcgtattaaacgtctactcctccgagaatgcccttattaaattaagtgcaaagtaaggcatcccaccccagacagagggatccacattctttaatcatgatgcgggccactgtaacagggagatggatgcaggacgcagacggggtggggcgcccaagcgacgcacttagacggtgatctgttggttttctctgaaaaatgatctctggtgtgaggcacaaatatctggaaacatccggaagacctggtctggcggcggctcctcgggggcctgcatcacagagccggctccacagctcttcccagcctcttctgccagttgccggacatacag

SEQ ID NO: 4088 - DNA, 549 bp, Homo sapiens
  unsure (509): n=A,T,C or G
ctggcagctcacattttacattagagagtggggtccccacattttacattacagagcggggtccctgagctgcaggaggagagcctgcagggctcttgggtagaattgcacttttgcaataagggaaacgggagcaatgtttcagcctcagtttctatttataatactgacacaaaaagaatattgctggatacatagcatggatctagatagagcagctccaggagttctcacggtgacagcccccctcactcacagacaccatgtgatactaatagggcttagacacaaagcactgaattcccaaagcattgaagagaaagacagctctcagtctgagtaaaaccgtattgagagaagaaaagaggttgaaagaatcttaaagacaaattcagattacatgtaacattggtcaaattgaccagaaaatattcttccaaagaagttcttctctaaacaccaaaagtgcacagctactctcagcatgagaaatacaagtattatgaganagagggcttattctgagcagaatttccatctctgctgctc

SEQ ID NO: 4089 - DNA, 275 bp, Homo sapiens
ccttcttggagcccctgggcaccctgggctactgtggggctgtgggcctgttacccccaggcgcagcagctccctccggctgggcccaggctccactcagtgacacggctcaagtctacatggagctgcagggcctggtggacccgcagatccagctacctctgttagccgcccgaaggtacaagttgcagaagcagcttgatagcctcacagccaggaccccatcagaaggggaggcagggactcagaggcaacaaaagctttcttccctccag

SEQ ID NO: 4090 - DNA, 248 bp, Homo sapiens
caccaactatgaggcgggcaaggatgactatgtgaaggcactgcccgggcaactgaagccttttgagaccctgctgtcccagaaccagggaggcaagaccttcattgtgggagaccagatctccttcgctgactacaacctgctggacttgctgctgatccatgaggtcctagcccctggctgcctggatgcgttccccctgctctcagcatatgtggggcgcctcagtgcccggcccaagctcaagg

SEQ ID NO: 4091 - DNA, 555 bp, Homo sapiens
ccagcagtggggcaagacaggtattttagatagggcagcaagggaagacctcgtgactttggagtgaaaatgtgaaagaagcaaaggaattagtcatgggggtgtctgcagagagagcatttgggggagagaaaaccacaaacgcaaatatgtcagaagtgagcctggcattttcaaggggcagcaggaggccacgtggctggagctgatgcccaacagggagagaactaggaggctggtcctggcgtcctcggtcctagttgatcacacagccttgtcagtcatgatggactcctcatgaaaaggagggcaacttctctgaagctcttataacaacttctcatcaaaggcatctctcacacaagcaatgcgctgccctactttgctattctggaccttgtcatcacatcataagcaggcgatccattatccgtacttactaggctctactggagttccacagccggcacagaaaaaattctgggctgccaccacaaggtccctcctgaatacgaaaaataatactagttacatttcagagaaggccaatggcac

SEQ ID NO: 4092 - DNA, 539 bp, Homo sapiens
aaatgtgagaatttcaagcagtaaaattactcaaaagtctactggatttaacttacaagttcttcagtggtaatctgttcaaaagaattattttagagttgttaggtatacttttgatgtggttgatatttctggtatccaagaagaaatctcccaagatcctacctaactttttgtaactaaagcagcatacatacacagggagtgggaaaatgtctagactggtgagtacacatgccaacatttttccagaattttctgcctccctatacggcttgagtaaggggtttagagattttagactatacttgggaatttgtctatttcttttgcagttctgtcaatttttgtatcatgtattttgaagcatttatgttattatgtacataaatatttaggactgttatgttttcttgattaattgaaccctttgtcactataaaatgacattgtatattgctggtaatatttttgctatgaaatgtactttggtattaatacaaccactcttcctcagccttcttttgtcaagtgttagt

SEQ ID NO: 4093 - DNA, 598 bp, Homo sapiens
  unsure (547): n=A,T,C or G
  unsure (588): n=A,T,C or G
ggaggccacatgctcctcaaagctgttgatgcgaggctttttggtgggttcggggctggctagcggggtgacactattgcgtctcatgagcgggttaggtcccttctttgcatcctctgacctctcccggtatgtgcagacggactccacgttcaggtagatggattccacacggcagccataagcgacaggcgtcagtttcaggacggtgtgaagagggcatttcaggtagggcatctcctctgcactcttatccaggaagtaggcaagcaggcagcgcaggacggcctggtggcagatgaccagcacattctcctgccgctccagctccatgatcactggctccaagcgctggaccaggtcctggtaggactccccggtggggtagcggtaatagtacttgtcctgctcccgcagcgcatactcctcagggtaggtgtccctgatctcctcgtaggtcagctcctcacagacgcccgcgtcgatctcattgagcgccttccactgctcgtagggcagccgcagcgcctcggcccgtctggatggngctcttcagccatcaccatgtcacccacaccagcagcgggnaagtctgttc

SEQ ID NO: 4094 - DNA, 241 bp, Homo sapiens
ctggtggagcactacacctcagacgcagatggactctgtacgcgcctcattaaaccaaaggtcatggagggcacagtggcggcccaggatgagttctaccgcagcggctgggccctgaacatgaaggagctgaagctgctgcagaccatcgggaagggggagttcggagacgtgatgctgggcgattaccgagggaacaaagtcgccgtcaagtgcattaagaacgacgccactgcccagg

SEQ ID NO: 4095 - DNA, 458 bp, Homo sapiens
aaaaatcagcggccgggcgcagtggctcacgcctgtaatcccagcactttgggaggccgaggcaggcggatcacaaggtcaggagatcaagactatcctggctaacacggtaaaaccctgtctctactaaaaatacaaaaaaattagccaggcatggtggcaagcgcctgtagtcccagctactctggaggctgaggcaggagaatggcgtgaacccaggaggcagagcttgcagtgagccgagatcacgccactgcacttgagcctgggcgacacagcgagactccatctcaaaacaaaacaaaacaaaattagctgagcatggtggtgtgtgcctgtagtcccagctactatggaggttgaggtgggaggatcgcttgagcccatgaggcccaggttacagtgagccaagatcgtgccactgcacttcagcctgggtgacagaaagagaccttctc

SEQ ID NO: 4096 - DNA, 332 bp, Homo sapiens
aaatagaaaacagtatattgaaagtggtgggtttgatctttttatttagaaacccacaaaatcagaaacacagtacaaataaaacagaaatcaaactataagttgacttttagttcctaaaaagaaacatatttcaaaagcaatggaatctagaattcttataacatgaataacaaaatgtacagcaagcctatgtagttcaattaatatataaggaaaaggaaggtctttcttcatgatacaagcattataaagtttttactgtagtagtcaattaatggatatttccttgttaataaaattttgtgtcataatttacaaattagttcttt

SEQ ID NO: 4097 - DNA, 434 bp, Homo sapiens
aaatttttgaagggtacccatcaacaagccaaatattcgccggttcctttgctttccctttcatccatattttgatcctggataaggtctctacgtgtgcgctctttggaggtagctacaactgaagactgcaatgctggctttttaacatcatcatcctccgggtcgctttcctggcgtgattctcttctggtccgacgctccccgcccagcctactgactgccccttcaaggtctctctgtttggctgggggtcctcctccactatctgagaatccacgcctcagtaataaactaccacgtcctctacctccaccaggaccagaaagggccagcaatctggcttggatgggcctcacgtcattcggatcccgcccggtgagcttgcgaatgttctcatccacgttcttaagactctctttggccttttccag

SEQ ID NO: 4098 - DNA, 373 bp, Homo sapiens
ccaccctgaccatcaacagggtcgaagccggcgatgaggccgactattactgtcaagtgtgggatcgtaataatgaccatgtcgtcttcggcggagggaccaaactggccgtcctaggtcagcccaaggctgccccctcggtcactctgttcccgccctcctctgaggagcctcaagccaacaaggccacactggtgtgtctcataagtgacttctacccgggagccgtgacagtggcctggaaggcagatagcagccccgtcaaggcgggagtggagaccaccacaccctccaaacaaagcaacaacaagtacgcggccagcagctatctgagcctgacgcctgagcagtggaagtcccacagaagctacag

SEQ ID NO: 4099 - DNA, 573 bp, Homo sapiens
  unsure (540): n=A,T,C or G
  unsure (546): n=A,T,C or G
ctgcacccctggtttcagctcttctaactgtgaaagccccatccaaggctaacattcgagaggcacagggctgccaagggtttcttctgcccacttagtccccagtggctcaggctccttccttggaagttccctggggtaggtgaggcagaggcagatctccgaggaacttgactgactgagcaacgaagaccctctctgagttttcctcccaaggtcttagggtggcttggcagtccccaccccctcacactgtctcagggtctctaccctcaacaagattagattccttttagccagaaagagtagtgagaggctgccaattgggtacacctggggctttcagggctggagtgcccagagcctcctgaggtcagagttcagaggttaaggtatgtcaggggatggaaaaggagcagatgaccccatttgacctttaccagcgaggtctgagggtcctgccttcaagtgcagagcccccaacacattcagatggggctggacagacacaaagctacagggttcccctgaggggcagangctggnaagggccgccctcccactcagccctca

SEQ ID NO: 4100 - DNA, 424 bp, Homo sapiens
aaagtaccttctggtgaaggcaaacccaacaagcttctacagaaatttagtataaaaagtttagtgtgatgaaaactatattaccaactggaatgaagtacaataaactactaacaaacatactaacttgctacatatactaactaaaataaattagaattgtcaagttaataccactacccaaaataccagagatccaatatgtgcctatccataatgaagagttctttaattgtttagctccataccttccactaggcacaaatatcaaaggtcattccgcaaagccgtccatgcatcagtatcacatttgtgcaaaggcagatttatcagataaattctttgcaacttctgagggcttcaattaagtaacttaaaactatgaacttaccaactatgtagtaatttaatcaaagaatgtttt

SEQ ID NO: 4101 - DNA, 255 bp, Homo sapiens
cctgctgtgtctttgactcttgatcagagccagtcacaggcttctttggaagcagtagaagtcccttcaatggcctcatcttggggtgggccacatttttctccagaacataaagaactgtctaactccccactcagggagaacagctttggatcacctttagaatttagaaactcaggcccacttggtacagaaatgaatactggattttcttctgaggttaaagaagatttgaatggaccgtttcttaatcag

SEQ ID NO: 4102 - DNA, 572 bp, Homo sapiens
cctcgagctcccttcagcgaggcaccttacgcatggaataggaggtttcacccacctgaaaccttctaaatacaatatcaatggtgaaaaaccaaaaacaagagagaaaataaaaacaagatcattagtaaaagttcaacaaagcaattgaaattctttggatgtctattacatatgggaatgaggacagtctcaagtctgtaatatgggaaacatgcagaagggagagggttaatcagggctattgcatacagcagggatttttgctggaagaaaggctcttcattttctacaaagacaacttaattttgcttccatctactaggaatatgctggcttgaattttcaaatgcactgattacaaaagaaatacattgcatttcactcaagagtattttcttgtttactaagttctcacaaaaaaacagaataacatttttcaaactaggtgtctccagagctctgaaataaagaagtcagcaacctaaggcaggcgcaatgtctcagcctaaaccgatctctaaagctgcagtgaagtgcaattcatgttagctgtccgcttggtggggtga

SEQ ID NO: 4103 - DNA, 548 bp, Homo sapiens
cctttctgaggcagcagcaagcagctccaaacctccgaaagcttatttatgggacagtgacagaagataatgaagaagaagatgatgatactctagaagagcttggagggttgtttcgtgtcaaccagcctgacagagagtgtaagcacaaggctgactctttggactgctccagatttcttgtggaggccccccatgactgggatttagaggaggttatgaacagtatcagagattgcttcgtgactggaaagtgggaagatgataaagatgcagccaaggtcttagcagaagatgaggagctctacggtgactttgaagacttggaaacaggggacgtgcacaagggaaaatcaggccccaatactcagaatgaagatatagagaaagaagttaaggaagaaattgaccccgacgaagaagaaagtgccaagaaaaagcatttggataagaagagaaaattgaaggagatgtttgatgcagaatatgatgaaggagaaagcacatattttgatgatcttaaaggagaaatgcagaaacaagcacag

SEQ ID NO: 4104 - DNA, 261 bp, Homo sapiens
ctgtggactccacctggggccccaatacaagagcacccgtcaccccggcctgggttttttcagggccccttgggacacagggctcaccatggagtgctgtaggtccaggctatggagctggcagcaggctttggctagcatgaccagagcgtcagcagtcacaccgtggcagccggagagcttgaggaaagtgagccgaggacagcactcacctaccagacctgcccgggcggcgctcgagccctatagtgagtcgtatta

SEQ ID NO: 4105 - DNA, 353 bp, Homo sapiens
ctgccatttgcaaaaacaaggaaaaaaatccgaaactttcttttgttgcactgacagggtctgtacttttttttttctttttgagtcaggactatggagccgagtagttgatcttttaatatagccgtgtttacttgtattaacttacagttaacataggaaaaatacaagtaaggatgtgagaatttgcattttaatgggaaattttcaacccttaatctgaaaacagaagacagtcttaatataaatgtactgtgaagaatgctattgatgtttatggtttctgattacttttcaaattttgatgtttttttgccagttggcttttcttaaatgaaaacactgttccattt

SEQ ID NO: 4106 - DNA, 368 bp, Homo sapiens
ctgccggcgggtaacggtgaaaatggaccggagaaggcttcgcccaaagacatgagtggtttcgtagcgggggaggctatcacagctctggggcacgtggcagtaacagagccatctggtgtaattgaccttgtaggtagccacgtcctcagcctgagacctctgccgaaactgggcaggtgtctcaagcttccagtagttaaggcagagcaagaacatctttgagagctcgaacatcgtctgccgctcccggggagccaggtgactaaacttgtactgcacaaagttcagcacaccctgctcaatattaggtttctcaaatggagggctgcccagggacccctccaccacaggccgggtcatctgca

SEQ ID NO: 4107 - DNA, 373 bp, Homo sapiens
ccaacatggtgaaaccctgtctccagtaaaaatacaaaaaatagctgggtgtggtggtgcatgcctataatcccagctactcaggaggctgaggcaggagaattgcttgaactcgggaagcagaggttgcagtgagccaagattgtgccactggactccagcctgggcgacagggcgagactctgtctcaaaaaaaaaaaaagggaaaagaaaatgtagatttccattgtccaaagtgacagcgggaggatgggtcttgagtttctcaggttggagaagcagctccacgaaggtcctgagcttgggtccactgtacatgggacagctccaaaagaggaaggtcccagcactgcatctagtagtgaggcatcag

SEQ ID NO: 4108 - DNA, 247 bp, Homo sapiens
ccagtgactttatgtctggacctcagtttattcatgtgaaaaatggacatgataacaatagtcattagatggtagggttttgatttgggggctggaagagatgctgtgtatagtgtatgggcctaaagtaggcactccatgcatgagaactagcatcactgttcattaatttttaatttattttaggatggtctagtctatgcagtcgagttctcccaccgctctggccgtgacctcattaacttgg

SEQ ID NO: 4109 - DNA, 305 bp, Homo sapiens
atgatctggatagagaagatgaagttagattactcaaatatctctttactctaatccgtgctggaatgacagaagaggcacaacgactctgtaaacgccgtggtcaagcatggagagctgcaacacttgaaggctggaaactgtaccatgaccctaatgttaatggaggaacagaattagaacctgttgaagggaatccatatagacgcatttggaaaataagttgctggagaatggcagaagatgagctttttaatagatacgagagagcaatttatgcagctttaagtgggaatcttaagcag

SEQ ID NO: 4110 - DNA, 332 bp, Homo sapiens
aaagaactaatttgtaaattatgacacaaaattttattaacaaggaaatatccattaattgactactacagtaaaaactttataatgcttgtatcatgaagaaagaccttccttttccttatatattaattgaactacataggcttgctgtacattttgttattcatgttataagaattctagattccattgcttttgaaatatgtttctttttaggaactaaaagtcaacttatagtttgatttctgttttatttgtactgtgtttctgattttgtgggtttctaaataaaaagatcaaacccaccactttcaatatactgttttctattt

SEQ ID NO: 4111 - DNA, 423 bp, Homo sapiens
  unsure (10): n=A,T,C or G
  unsure (15): n=A,T,C or G
  unsure (24): n=A,T,C or G
  unsure (45): n=A,T,C or G
  unsure (47): n=A,T,C or G
  unsure (48): n=A,T,C or G
  unsure (127): n=A,T,C or G
  unsure (189): n=A,T,C or G
  unsure (222): n=A,T,C or G
  unsure (225): n=A,T,C or G
  unsure (279): n=A,T,C or G
  unsure (392): n=A,T,C or G
  unsure (403): n=A,T,C or G
aaaaaagtanttgcngggtttgtnaagattctttccactttttgncnnattaaatattttataaagtcatatgacatatacatatgatgacttttctgcctttctgcacagttagaaagtcattcangaaagacaatgataccacaaaacaacactcagagaatgcacattccacagcactgacatgtntcatctatggtcctggtctacaacatccgccgnggnctaaacacacactatggctgttattaaacaaaacatcccatttctacttacttnaatcagaaggaggatgaagctgctgctaacatttcgataacatatctgattctatcaagtgaaactacactgaatttaatgggggtactggctgacagatcaaacttaagttntagacagtctngtctaaaataatagaggttt

SEQ ID NO: 4112 - DNA, 318 bp, Homo sapiens
aaaacaatccttaactagctagcaggacatttactttggattctgcataactgcaaactgacatatttgtaaagctaaaaatcagttttaatacatgattaacagaaactctcatcatgctcattactttaactattgccctttcaatcgctatagaaatatcacttaatccaataagcttgatttcaatagtccaggaagaaaaggtcaaaaaggcacaatgtgaccttagctgacaagaataaccatcctgtctcaagtcttttgtcagtccctggcatgaattacaacattattttcaaaataataaaacatttt

SEQ ID NO: 4113 - DNA, 533 bp, Homo sapiens
ccatcaatttgtcctccatccatgtgcttcagcgccttctcggcttcatctggattctcaaactctacgtacgcatagcctttggacagatggggatgcatcctttccacgggcatgtcaatcattttaattttcccataggtggaaaatatctccatgatgtgatcctttgtcacattccgggtgagtctcccaatgtgcactttggtgggcttaggagatgggctccgccttttcctctccttttcatctcttttaggtggtttggatttggagcgggagcgcctcctgttgtcgtgtctgcgccgagaaggacttggagagccagaagagctgctagagctggagctgcgggaggtgctggagcttcctgagcggctggatgctgaggaagagctggagccactgcttgagccagtgctggtgctggagcctgagctggaagtcgagctggaccgagacctggtactactgctaccactggaagcgctgcgcctctttcgggttttgtcccggccgcgatccttctcact

SEQ ID NO: 4114 - DNA, 133 bp, Homo sapiens
  unsure (5): n=A,T,C or G
  unsure (16): n=A,T,C or G
  unsure (23): n=A,T,C or G
  unsure (40): n=A,T,C or G
  unsure (58): n=A,T,C or G
  unsure (63): n=A,T,C or G
  unsure (73): n=A,T,C or G
  unsure (112): n=A,T,C or G
gcctncaccttctcanaactgcntagggcgtgagctttgntggtgatgtgacctccanaacanactgtgagcngatttttttctttaatcctgagcctatgcttgctgctgnccttcttgactttcaactagg

SEQ ID NO: 4115 - DNA, 83 bp, Homo sapiens
  unsure (60): n=A,T,C or G
  unsure (70): n=A,T,C or G
  unsure (71): n=A,T,C or G
  unsure (75): n=A,T,C or G
ttttttttttttttttttctggaaggttctcaggtctttatttgctctctcacattccangaattgactnntttnattaatcc

SEQ ID NO: 4116 - DNA, 452 bp, Homo sapiens
ctgagaattaactactgacagtatccagcacttctggaacacgcggtacagctctttggctaatagttctgcagaattgaagtctggctcataagtgacactgaaatgtaagagatgcaaatactggaaaactatattcatgaggagtatgttcagggtcttcctgaggttttcaactgttcttcccagcccccaaaactcagaagaggctgtcatatgagatgacgcatgaatcactcaccaggcatcttactcaacatggctcctgcatgttcaataaataaagcatcttttatttactgagggcgctaagacttagaggtgtggtgaaagagcactggctttagagtcagaagacctgcattcaagccctacttctacctcacagccttcgtgtcccgaagcacatcctatatatgagtctcaatttttatgtctataaaatgaggttt

SEQ ID NO: 4117 - DNA, 375 bp, Homo sapiens
cctaggtgatgtgactctcctgccttggccctgccttcaggaaaaattgtgatgtgactctgggtttattacctagatgatgtgactcttgtgttctgcatgggcaagcccaaaggggtcattgtggcatatctctgggcacatcaaagaagtggtgtaatttttctctcattccaggactctagtctcagtagggattgtgacatatcactgggcccataacctatgtaatgtgattctagtatcctgcttgggccctgcttacaggaaagattgtgacatttggctgggcccatcacctagttaatgcgactctccttttcttcctgtgccctgccctcagtggagattgtgacaaatttctgggccaatcag

SEQ ID NO: 4118 - DNA, 453 bp, Homo sapiens
ctggagtccttctacatccagacgtacccctgagcagaaggctctggtgattggtggagaggcttgtatgtggggagaatatgtggacaacacaaacctggtccccaggctctgagaggaagagagtgggattgctacccacattttaatgaaggtggagctgagccgtagaactctctgggagccatccaacctggctgtggctcataacaaggcccagagcaggggctgttgccggaaggctgtggagcaacaagttgacatctgacctgacatttgcctatgaacgtttgtcacacttccgctgtgagttgctgaggcgaggtgtccaggcccaacccctcaatgtaggcttctgtgagcaggagtttgaacagacctgagccccaggcaccgaggagggtgctggctgtaggtgaatggtagtggagccaggcttccactgcatcctgg

SEQ ID NO: 4119 - DNA, 285 bp, Homo sapiens
aaacatggctcacatcccttttagaaagttatggcagggaagcaagtagagagcaggtggtaaactgaggattggtgcctacattggtacctacagtgggtcctacagtcatttttgtgcggatcaggagatgaggtgaagagaaggaaagcttctcatttgcataatgccttgaaatgaccctaggtttctagcgggcaccgagaaaccagagatgccccttgttgtctgtctgggagatccaaggagacatctggcagtgttgagaagagatgaaggtgacag

SEQ ID NO: 4120 - DNA, 455 bp, Homo sapiens
  unsure (8): n=A,T,C or G
  unsure (13): n=A,T,C or G
  unsure (17): n=A,T,C or G
  unsure (38): n=A,T,C or G
  unsure (70): n=A,T,C or G
  unsure (151): n=A,T,C or G
  unsure (157): n=A,T,C or G
  unsure (174): n=A,T,C or G
  unsure (181): n=A,T,C or G
  unsure (197): n=A,T,C or G
  unsure (200): n=A,T,C or G
  unsure (401): n=A,T,C or G
  unsure (416): n=A,T,C or G
  unsure (417): n=A,T,C or G
ttacttangatgnttgngatctgccgaccttgctatanatgccatgttaccaatgatttcctgtggtggnggcttgccattgtttactctcttatttaccaacttctggcctaagcatgacagtgggcaccttcccccagccctggctggncccagngcctgtgttctgtgttngaaaggntttatatatatataanatnacatatatatgtagaaatatatgtaattttgggggccctgttccttgcacattttacagttacctcatttttcccatgtatgtatttgagaaaatgctaatatatagagaaaaaaatggttcttaaagcttaaatgtgtggttttttccattccatgggattcacattggtttgtagcatttaacataactagtatgttgnattatatatatgtgnntactgattgaaatttttaacagatttgtacttttttta

SEQ ID NO: 4121 - DNA, 251 bp, Homo sapiens
gttcccgagaggctcctgaaggtggtgaagcgggtcttggtggcagtcaatgtgaagtctgtggctgaggcactgcaggacctgctctttgagcgggatgaagagtacctaatggactgtgactggcggtgggaccctgtgcacaccaaagggtccatagtccgtggcctctattatgaggaggtcagactaaaccgcctgctctgtttggaccctgtggactactttgctgaacctgagtgtgagtttgg

SEQ ID NO: 4122 - DNA, 432 bp, Homo sapiens
aaatattaattttctcttaatttcgtgtttccttgcacataatagcactgcccctaacttcagagatgctgattgcagttaaaaaatcaaaaagaaatgatgtgaatcagaaaataccatgttgtattgaaagcaaatcaaatagtgtaaacaccatcaccagaactctgtgcgaacaagctcccaagaggagggcagcttgtaacttacaaagactgttagagaactcagagcatcagagcataaagcatgtgggatccaaagagacacatttggaattccagtttggggatggtagttgcaagcacctaaacagtttgccaaggaatgtttctcctgagtttgttccttgtgaaggtgaaggaggctttggtttgcacaagaagaaagacctactcagtgataatggttctgaatcacttccgcattcag

SEQ ID NO: 4123 - DNA, 218 bp, Homo sapiens
cctggagtcccgacagccggtctgccaggcacccgcctccgcttcctactgctgcttgcattccgccggctggctgggttccttctgtcaatgaaaaagacaaggcttgtagagagcaaagccagctccattcaccaattagctccaatcaacaatgaaagccaagactgaatgagttcattctcattgaaaaaaatggttactgcaaatatactttt

SEQ ID NO: 4124 - DNA, 295 bp, Homo sapiens
gtcgggattaggtgaaagtacgtagttgtctttcgtaagttaaaatgataattgggccgaaacttactgccttacctaaaaggcagcgcagtcaggatattggtaggtcgggggcggctttggaaacccttaagtttacaagcatgcgcggacttgagtgctcattaggtcgccgggcgtccacgtgcagccctggaccctgaaccccggcgtgcgtgggccgtgggccctcggggaaaggttccgtgcactcggggactccggtgaagcctgttcagccgtctgtgtcatgtgg

SEQ ID NO: 4125 - DNA, 309 bp, Homo sapiens
  unsure (239): n=A,T,C or G
  unsure (243): n=A,T,C or G
ctgttactcctcagggatttgggatgccccttgggggattcttgggaatgacccatcacaattcctcaatctgcacttttgtgcggagattcccttggtcacttttgaaatgaactcagatgtgtttggagatagctgtgccgtttttgccttctttccctcttgtagggaaaccttcgcttattcccccaagttgctggcaggtgtgctgaaaatttggcaatggactcaaggctganctanaagaggaatttctcatttttgtggttgacaattagggggtggaaaggcaaggcaaaccatctgcag

SEQ ID NO: 4126 - DNA, 321 bp, Homo sapiens
ctggaggtagcatttaacttgctgtcgaatcttctggaagcaatccacgataggaacagttggaatagtatgaatccgacttaatatatccagagctacattgaccagtccttgtttccgggcgatttttccatactggatgatcgctgaagctgatgcatgaaccccaagcatagcgttatttgaactgggatcatgctgagagctattctcataggcagttacaatcgcctggtaatgatgctgcctccacatgaagatgctgctccagtgggacaagtcgtcagacacgatgggcagtcggttcctccaggtcttcac

SEQ ID NO: 4127 - DNA, 577 bp, Homo sapiens
ggagcacggagatctcgccggctttacgttcacctcggtgtctgcagcaccctccgctccctctcctaggcgacgagacccagtggctagaagttcaccatgtctattctcaagatccatgccagggagatctttgactctcgcgggaatcccactgttgaggttgatctcttcacctcaaaaggtctcttcagagctgctgtgcccagtggtgcttcaactggtatctatgaggccctagagctccgggacaatgataagactcgctatatggggaagggtgtctcaaaggctgttgagcacatcaataaaactattgcgcctgccctggttagcaagaaactgaacgtcacagaacaagagaagattgacaaactgatgatcgagatggatggaacagaaaataaatctaagtttggtgcgaacgccattctgggggtgtcccttgccgtctgcaaagctggtgccgttgagaagggggtccccctgtaccgccacatcgctgacttggctggcaactctgaagtcatcctgccagtcccggcgttcaatgtcatcaatggcggttctcatgctg

SEQ ID NO: 4128 - DNA, 586 bp, Homo sapiens
ctgctcaactcgctctgcacagcagtcaaagccatctcttcggcggtgcgcaaggcgggcatcgcgcacctctatggcattgctggttctaccaacgtgacaggtgatcaagttaagaagctggacgtcctctccaacgacctggttatgaacatgttaaagtcatcctttgccacgtgtgttctcgtgtcagaagaagataaacacgccatcatagtggaaccggagaaaaggggtaaatatgtggtctgttttgatccccttgatggatcttccaacatcgattgccttgtgtccgttggaaccatttttggcatctatagaaagaaatcaactgatgagccttctgagaaggatgctctgcaaccaggccggaacctggtggcagccggctacgcactgtatggcagtgccaccatgctggtccttgccatggactgtggggtcaactgcttcatgctggacccggccatcggggagttcattttggtggacaaggatgtgaagataaaaaagaaaggtaaaatctacagccttaacgagggctacgccaaggactttgaccctgccgtcactgagtacatcc

SEQ ID NO: 4129 - DNA, 452 bp, Homo sapiens
ctgcaacagcagagcaaggccagcaagatcctcattgtagactgggacgtgcaccatggcaacggcacccagcaaaccttctaccaagaccccagtgtgctctacatctccctgcatcgccatgacgacggcaacttcttcccggggagtggggctgtggatgaggtaggggctggcagcggtgagggcttcaatgtcaatgtggcctgggctggaggtctggacccccccatgggggatcctgagtacctggctgctttcaggatagtcgtgatgcccatcgcccgagagttctctccagacctagtcctggtgtctgctggatttgatgctgctgagggtcacccggccccactgggtggctaccatgtttctgccaaatgttttggatacatgacgcagcaactgatgaacctggcaggaggcgcagtggtgctggccttggagggtgg

SEQ ID NO: 4130 - DNA, 545 bp, Homo sapiens
ccagggcgactggcggataaggtcttgtgcgtggcctcgaggcttaaaagtagcagtggggctttgtgaaggacaaaatggcgatggcgggccgtgtaggtcccccttcctatgatgaggaccttttcacagacctgtactgagctccgtgaggataaataactctgaggagatgggccctgcaagcctcttgcttagccgtctgttcagaaaatagcgttttcgaaatgccctgagttgacctaatgtcttattgggctcctgtctgcaggatttacgcgcacgttggaaccgaagagagctctgttgttgcagtaagttcttacggccatttcttaatctctgctctttcgttgagtgtgtggaagttgctacggggatgattttacgaactgaactctctctttctgatggattagtggagaaaacagaaaattctgagtagcactgtactgtacgcaacaaatgtcagggccctattgatttgtctgaggtgttagtgaagggtgttattttttcagatgttcagcccacaagagcttact

SEQ ID NO: 4131 - DNA, 580 bp, Homo sapiens
ctgaaaagcatgcttgatatagtagagcatgatctcctcaaacctcacttgccctctgtcacttatttgagattagatggcagcatacctcctggtcagaggcattccattgtttcccggtttaataatgatccatctatagacgttctgttacttaccactcacgttggtggcctgggacttaatttgacaggcgctgacacagtagtatttgtggagcatgactggaatcctatgcgagatctacaagccatggaccgggcccatcgcattgggcagaaacgtgtggttaacgtataccgattgataaccagaggaacattggaagaaaaaataatggggttgcagaaattcaagatgaacatagcgaatactgttattagccaagagaattctagtttgcagagcatggggactgatcagcttcttgatctgtttactcttgataaggatggcaaagcagaaaaagctgacacctctacttctgggaaagcaagtatgaaatcaattcttgaaaacctgagtgatctttgggatcaagagcagtatgattcagagtacagcctggaaaattttatgc

SEQ ID NO: 4132 - DNA, 483 bp, Homo sapiens
aaaaaatctggcttgttacaggcaaattcacttgccacaagctgtccagtctaatcgacaggattccgattcctgaacagtgtcattcgaatcagaatgtcagagctgagtctgctgttctgacttaaggaacaacttgactcagtctcttgatggctggagaatgcacatcctagctgtcactggggctacaggcaggtcagtgagcacgctaaaattttccttctcaattacacttcaaatagcaggcatattactcgtataagatgctatctgatgatactaacctttctgctggtaccctcccactgctcctaaagccacaccttaatatacattctggtgctgtgtactaatgtagttccactgtcaagtcttaacattcttcaaaccagtgtctggggttgatagactatttgtttgacatggcacaatgttttgaattgggtgggaatcttttcccccagttagaaaaacagattt

SEQ ID NO: 4133 - DNA, 409 bp, Homo sapiens
atggtatttcattaaactgttgcatacccagttagcacagtaggtggggagtctgcttcatttctatcattccatttttctgattaaactgtcaaatctgtcattgcatatgccatcgttttctagcaaaatcccatgattggctataaacgttttgtaagaagtcactctccttgaaaatactgaacatagctgtataggtttgtgattattagagaatatgttaataaaacttcttgtaacggctaactgccacctaaaatatgctgggttttctgttgtttgagtgtgttagagaaatttgaatgtttttgtcagttacgagtcagccgtaattagattagtttaaggacaggtcaggattagagaagagttgtttttgtgttttgttaatgtctgagtgattttt

SEQ ID NO: 4134 - DNA, 231 bp, Homo sapiens
cctcccaggaacagaactcggatccgaaaagcccagagaagctagagctgcccctccaacactctcggatccacatggtctgtgttctctagacccccctgcatgttagcggtgttctctctctgtggactgactgtccttctcagtgaacatgtccacccgacagctcctgagtttatatcatctcaaccctcacaacccacagaggctgtgtctcctagtcacagcttt

SEQ ID NO: 4135 - DNA, 541 bp, Homo sapiens
  unsure (519): n=A,T,C or G
ccagtacacccatgaatttgatggagatgaggagttctacgtggacctggagaggaaggagactgcctggcggtggcctgagttcagcaaatttggaggttttgacccgcagggtgcactgagaaacatggctgtggcaaaacacaacttgaacatcatgattaaacgctacaactctaccgctgctaccaatgaggttcctgaggtcacagtgttttccaagtctcccgtgacactgggtcagcccaacaccctcatttgtcttgtggacaacatctttcctcctgtggtcaacatcacatggctgagcaatgggcagtcagtcacagaaggtgtttctgagaccagcttcctctccaagagtgatcattccttcttcaagatcagttacctcaccttcctcccttctgctgatgagatttatgactgcaaggtggagcactggggcctggaccagcctcttctgaaacactgggagcctgagattccagcccctatgtcagagctcacagagactgnggtctgcgccctggggttgtct

SEQ ID NO: 4136 - DNA, 395 bp, Homo sapiens
ccatcagtccccaatttccccgaggtaagataggacgacaaaatgggacaagatatttgaagtgaggtcagtccaatttggatatcatagaagaaaagaaataggatgtgctaggttaagcctgagatggtatctgggaagtcacattcatgatgtgaactgaaagaacacaggtgctacagtgcagaccaaaacccagcctgactcgacccaacagggtcaggtgtggatctgtgagtagtgctcactgagcccccacgagcagtgtctggcagggcaccgctgctccatagtgtgcttttagaacctgccagaggagctccagcaataggaccacgtgccccattcatcggaatcagggtcctatattcactgagttttccatctcaggacag

SEQ ID NO: 4137 - DNA, 292 bp, Homo sapiens; identical to SEQ ID NO: 29

SEQ ID NO: 4138 - DNA, 332 bp, Homo sapiens; identical to SEQ ID NO: 4096

SEQ ID NO: 4139 - DNA, 387 bp, Homo sapiens
ggcgagggcgctggccgagaggtgctcggcttgtagcaggtcccgcactccagcctctcgctgccagggtttgctctctgcttgtcctgggctgaggtgtccatgacggagtcatccaaggaggaaaaaatctgttccgggtgagcccaggccgccccggatatgcgatggctgaggagcagacaccagggaccacactgaggttgggtttcagaccaagatactggattctcctagttaagataaagagctttgggtgcctgacagtgaaaatggtgtaatctgcgttaacagttcacagcttgaaggcatgacaattaaagaacacacatggacttgtggcacatggaaatgtgcgcacagaaaaaggaaatctataattctttt

SEQ ID NO: 4140 - DNA, 417 bp, Homo sapiens
ccagcacatagcgatataactgacgtaaatgctgccagtcttaccaaagactgttcccttttagccaccggagatgattttggtttcgttaagcttttttcatatcctgtcaagggacagcacgcaagattcaagaagtatgtggggcacagtgcacatgtcactaacgtgaggtggctgcacaatgactctgtgctgctcacggtgggcggcgctgacacagccctgatgatctggaccagggagtttgtggggacccaggagagcaagctggtggacagcgaggagtcagacaccgacgtggaagaggatggaggctatgacagcgatgttgctagagaaaaggccattgactacaccaccaagatttatgctgtgagcatcagggaaatggaaggcaccaagccacaccagcag

SEQ ID NO: 4141 - DNA, 481 bp, Homo sapiens
gtgtgcccatctccttgaggaagcccactctatttttggtagcatgacgggccactgagaggtggaaagggcacaagaaccatgagatctcctggaaatgcttccctgggaaggcaatttcatgaatgaggtcttccaagcaaatgacgccaaacttccccaggtgctcctcaatcactgtattgtctgtcagagggatggtcttattcttgaccttggcttgtccacgtttcaaaatgagttctcggacagacttcagatttggaaatccccaggtcacataaggttccactatacgcagcatttttagattctggggggtgacttttacaaagacaccactaaaaattttctttaggcgaagtcttgcaatggttctctgcaccagtaaactcacgccgtcaatcctcaggacttcagcacgtatgcctgaaaaatctcccaacactggtgaacgcctttcacatctttcaggtctcag

SEQ ID NO: 4142 - DNA, 503 bp, Homo sapiens
aaatggtctctacaacaaattgtcacttgttgggttcaattaagtgctcattgtataagtgcacatggtacaaatcaacaccagcttataggattgtggaaagaattaagagatgaatttagtgatcttatataccctgtcagttggtcatattgtggaagagctctacaaaacttactgtactgttaactccaagattttcttccaataacagggatgctagccagatatttaataatcaaagaccaaaaatggcagtttaatttttctacccaatatcctatggcatatgaatgatccaaatttgaagctccaaggataggaaaaagcttacttgtgcctgtcctagacaagtactagagtttatattgaaatcaaaacttctaaaaataaaaatcagtaagattaattttactcatttttctaacacgagtcagtatgcttgaagttttcattgtatttgatgtcatgtaaatttactgtaaaaaataagaaaaaatttt

SEQ ID NO: 4143 - DNA, 304 bp, Homo sapiens
  unsure (188): n=A,T,C or G
  unsure (199): n=A,T,C or G
cctacagacttatttcttcttggacacacccacggtgcggccacggcggccagtggtcttggtgtgctggcctcggacacgaaggccccagaagtgacgcagccctctatgggcccgaatcttcttcagtcgctccaggtcttcacggagcttgttgtccagaccattggctaggacctggctgtatnttccatccttnacatccttctgtctgttcaagaaccagtctgggatcttgtactggcgtggattctgcataatggtgatcacacgttccacctcatcctcagtgagttctcccgcc

SEQ ID NO: 4144 - DNA, 554 bp, Homo sapiens
  unsure (526): n=A,T,C or G
ccacagcccatgcgaaggcccgcatgagcaagactgtggacctgcaggatgcagaggaagctgtggagttggtccagtatgcttactttaagaaggttctggagaaggagaagaaacgtaagaagcgaagtgaggatgaatcagagacagaagatgaagaggagaaaagccaagaggaccaggagcagaagaggaagagaaggaagactcgccagccagatgccaaagatggggattcatacgacccctatgacttcagtgacacagaggaggaaatgcctcaagtacacactccaaagacggcagactcacaggagaccaaggaatcccagaaagtggagttgagtgaatccaggttgaaggcattcaaggtggccctcttggatgtgttccgggaagctcatgcgcagtcaatcggcatgaatcgcctcacagaatccatcaaccgggacagcgaagagcccttctcttcagttgagatccaggctgctctgagcaagatgcaggatgacaatcaggtcatggngtctgagggcatcatcttcctcatctga

SEQ ID NO: 4145 - DNA, 559 bp, Homo sapiens
  unsure (547): n=A,T,C or G
cctttatatgtaaataacaaaatagtgattttaattcatatagatgtatttgtttatctaagtatgcttttatactctctgctatatttttgtatcaattaagtgtgcctggcagcatgaagaaagtcagtacaacaatggtttctctctgttgtgtaaaactgaagttggaagtgggtaacccgacaatggcacagcagcttcacaagatcctgagggatcagcctcctcctttcgtgctgcctcactaccctcagtccttggcttctgcctcagagtctaagatggctactttagatccaggcaccaagccctcatcattacatcatctcattccaagaaaaaaaaagaagcaatgacaagtattccctctccctgtaaagacaccccctagaagtccaaagtaacatttctctttccattctttgttacgaatgagactggaaaatacagtgtgtatttgggaggctgtatgcctagctaaaaatcaggaggcttattactaactaagaaggaagaatgtgatactgaaggtcaactggcaggntttgccacagtg

SEQ ID NO: 4146 - DNA, 556 bp, Homo sapiens
  unsure (529): n=A,T,C or G
ccacgtttcttgggtttggtggcaatgctgctcgacagagatacgaagacagaatatttgccaacaccattcaaaagaacaggctcctgggtaaacagactggtctgactcctgatatgccgtacttggacccctgcctacccctagacattaaagatgaaatccagcaaaatggacaaaccatatacctacgagggactggagactttgacctgtgtcgagagactatccagcctttcatgaataaaacaaacgagacccagacttccctcaatggggtctaccagcccccaattcacttccagaacagtgaattctatggcttctccgaattctactactgcaccgaggatgtgttacgaatggggggagactacaatgctgctaaatttactaaagctgcaaaggattattgtgcaacaaagtggtccattttgcgggaacgctttgaccgaggactgtacgcctctcatgctgacctccacaggcttaagtatcagtgcttcaaatcggcctggatgtttgaggngtttcataggggcttttcgtttcctgt

SEQ ID NO: 4147 - DNA, 161 bp, Homo sapiens
  unsure (35): n=A,T,C or G
  unsure (61): n=A,T,C or G
  unsure (101): n=A,T,C or G
  unsure (107): n=A,T,C or G
  unsure (121): n=A,T,C or G
  unsure (131): n=A,T,C or G
  unsure (133): n=A,T,C or G
  unsure (136): n=A,T,C or G
  unsure (146): n=A,T,C or G
  unsure (152): n=A,T,C or G
  unsure (156): n=A,T,C or G
tgatggttactgagtcggcacctatgacagctaanagagctttcttaaagactgcctcagngtcttcttggcttttggcaccttcactccactctgcccangaaatncacaatggcagacnaacctggggntncangtgcacaaangcttcntcanaaagc

SEQ ID NO: 4148 - DNA, 440 bp, Homo sapiens
  unsure (17): n=A,T,C or G
  unsure (18): n=A,T,C or G
  unsure (19): n=A,T,C or G
cagtttccatgtatatnnngtctatattatgtttgttattgagaaataggcatttttgggaagaaagaatttggcattttggaaataatcagaaaattaaaaaatgcacacaccactttcccattcttctccccaccccaacccctacccctatcctcaaatgcttagctagtgaaatattaaaatgttgtaatagaaattggagtcaaggtctccttgctgaagagaccatctattttcagagactggaaggagagagaacaaaccaatcaagagtcattggtttgttgcctctattgttttatttctgacctgcgcaaatagcttttgaagtggagatatgctagttcttggcaactaatacttttctgggcatgcattttatgaaataataggtatgtatctgcctcattcttttaggctatgtgtttctctagttt

SEQ ID NO: 4149 - DNA, 174 bp, Homo sapiens
aaataaaatgtttctaactagatttttgatttgtgttcaatattaacacttcttaatttgatatatttgagagtcagacattataattgttaaccttattcatacatacctacattcagaattgaaaggtgttggttaagtcttgaacatcactattctatgcataaaacttgg

SEQ ID NO: 4150 - DNA, 319 bp, Homo sapiens
cttccggcctcgagtctcgctcaggctcggttttaccccggagtctattcgaagggggctgctacgtcagcgcgtctcagcgtaagacggcgctattccgctgtaacagcttccggcgggtcctggatgttgatgtcctgcatctaacgcggtgtaacccccgaagccgagcgagctccggaggaatttcagtatctgctacggtaacttcatcagcccgccaagatggcgatgcaagcggccaagagggcgaacattcgacttccacctgaagtaaatcggatattgtatataagaaatttgccatacaaaatcacag

SEQ ID NO: 4151 - DNA, 544 bp, Homo sapiens
ccaaacagaaagcagctcctgaagccaagaaacagaaagtggaaggcacagaaccgactacggctttcaatctctttgttggaaacctaaactttaacaaatctgctcctgaattaaaaactggtatcagcgatgtttttgctaaaaatgatcttgctgttgtggatgtcagaattggtacgactaggaaatttggttatgtggattttgaatctgctgaagacctggagaaagcgttggaactcactggtttgaaagtctttggcaatgaaattaaactagagaaaccaaaaggaaaagacagtaagaaagagcgagatgcgagaacacttttggctaaaaatctcccttacaaagtcactcaggatgaattgaaagaagtgtttgaagatgctgcggagatcagattagtcagcaaggatgggaaaagtaaagggattgcttatattgaatttaagacagaagctgatgcagagaaaacctttgaagaaaagcagggaacagagatcgatgggcgatctatttccctgtactatactggaga

SEQ ID NO: 4152 - DNA, 557 bp, Homo sapiens
ccacatttgtgaccatcataaaagctaagtggtatttctgtgtagtttccgtctggaactgctttcccattcccgggaacccatagccgggccagccagggtcccgaacacaggcccaaagtttattaaaccccgatcataacctccagcaggcatttcatttaatactgagcttagttcctgctgggtaaggcattccgaggtaaccagggccctctgggcaccccctcaaaagccagctcttcgagggtgagtactccttgtttctactgtgagtcgcgtcttgattttccctttctttgatgtctcagtgtgtgtcccaaacacctgcatctcatggactgtttgtgcccatgcccagttcctggcatgccaggccctgggctcaggtgcacaactgactctctttttcactccctaggggaaccccctcggaaggggaagggttgggtgctgacgggcaggagcacaaagaagacacattcgatgtgttccgacagaggatgatgcagatgtacagacacaagcgggccaacaaataggtatgttcacaggcc

SEQ ID NO: 4153 - DNA, 430 bp, Homo sapiens
aaattatgaaaactaaggcttttgtgactgtttagcttcctgctttcttaagctacctgatgggttctgtatcctttcagactaggccatttaactgatttgtggcttgaaggaatttcacttccttgggtgctggtaccttattcacagcagatggtcatgcttagaaaaccctgcttcagggtcagtgactgaaaaaccaggggtgccatgccagtgcctttgtcagggctgttttctgcttaaccactttctcagaataatgcagaagaaacccagtccgctaccttttgagtgtgtgggaagataagtaagtgttcaggtgggaatggtagttgcctctcgcatcagggtttgcatggagaaggaagaggtgcacactcctgccacagagattcatgtctttgatgtggcaatgtctctgcgtggt

SEQ ID NO: 4154 - DNA, 437 bp, Homo sapiens
aaatgtgttctatcaaacacctaccttggcttcttccaagcgacccagggctttgagcaggttccccaggtcactgcgaacacagtacaaatcaggattgtactgaagagcagagacgtaagcttgtactgccccttccatgtcacccgctgctaccaaggcggctgccaggttaatatgaccatcgatgaaatcaggtttgagacgcaatgcatgtcgataatgctcaattgcctcctgcaactgccctctttccttgtacacattccccaaattcgaataagcttctgccagaagggggttctgtttaattgccagagtgctaaagtgagcagatctgtccagccttcgacactggaagtgtatagatgaaagtaataaaagcacaccagtattgtctggctcttgtctccagagctgcatgcagtgtctctcag

SEQ ID NO: 4155 - DNA, 147 bp, Homo sapiens
ctgacatattattatatctatgggatgaattaataagcatgtcagattaatatctactgtaacaattagatagtaaattttctttggatattagatataaatatctaagtagaagtaatttcaatatactagtaatgacaaattttt

SEQ ID NO: 4156 - DNA, 475 bp, Homo sapiens
  unsure (14): n=A,T,C or G
ctggtggttaacangtggatcgtcatgttcagtagtttatacattatgtgagaagtaacgttctgattctttttcttacacagaattggcagagggggtcgatttgggaggaaaggtgtggctataaactttgttactgaagaagacaagaggattcttcgtgacattgcgactttctacaatactacagtggaggagatgcccatgaatgtggctgaccttatttaattcctgggatgagagttttggatgcagtgctcgctgttgctgaataggcgatcacaacgtgcattgtgcttctttctttgggaatatttgaatcttgtctcaatgctcataacggatcagaaatacagattttgatagcaaagcgacgttagtcgtgagctcttgtgaggaaagtcattggctttatcctctttagagttagactgttggggtgggtataaaagatggggtctgtaaaatctttctt

SEQ ID NO: 4157 - DNA, 417 bp, Homo sapiens
  unsure (18): n=A,T,C or G
  unsure (20): n=A,T,C or G
ccatcttcattgagaagncnaaagatggacagattctgcctgtaccaaacgtggttgtacgagacgtggcctgtggcgctaaccacacgctggtcctggactcccagaagcgagtcttctcctggggctttggtggctatggccggctgggccacgcagagcagaaggatgagatggtcccccgcctggtgaagctgtttgacttccctgggcgtggggcttcccagatctatgctggttacacctgctcctttgctgtcagtgaagtgggtggtctgtttttctggggggccaccaacacctcccgtgaatctaccatgtacccaaaagcagtgcaggacctctgcggctggagaatccggagcctggcttgtgggaagagcagcatcattgtggccgccgatgagagcaccatca

SEQ ID NO: 4158 - DNA, 353 bp, Homo sapiens; identical to SEQ ID NO: 327

SEQ ID NO: 4159 - DNA, 143 bp, Homo sapiens
  unsure (100): n=A,T,C or G
  unsure (113): n=A,T,C or G
  unsure (117): n=A,T,C or G
  unsure (124): n=A,T,C or G
  unsure (129): n=A,T,C or G
aaaattcgtttttgcaataatgacaaatgccctgcacctacccacatgcactcgtgtgagacaaggcccataggtatggccccccccttccccctcccantactagttaattntgantaattgnattgncagaaaagtgatta

SEQ ID NO: 4160 - DNA, 318 bp, Homo sapiens
cctgcagagctgctgaggagtttgtcaatgtctactacaccaccatggataagcggcggcgtttgctgtcccgcctgtacatgggcacagccaccctggtctggaatggcaatgctgtttcaggacaagaatccttgagtgagttttttgaaatgttgccttccagcgagttccaaatcagcgtggtagactgccagcctgttcatgatgaagccacaccaagccagaccacggtccttgttgtcatctgtggatcagtgaagtttgaggggaacaaacaacgggacttcaaccagaacttcatcctgaccgcccagg

SEQ ID NO: 4161 - DNA, 397 bp, Homo sapiens
  unsure (154): n=A,T,C or G
  unsure (211): n=A,T,C or G
  unsure (245): n=A,T,C or G
  unsure (246): n=A,T,C or G
  unsure (247): n=A,T,C or G
ccatctttggttcaagaggctacaactgaggccttgaagctttgcttttgtccactggctgttcttttacaagctttgttacaattcaaacgcaaaatgggggcaagagagacacggcgtcttttggaaagagtggtatatcagcctgggtatnccaaatctattgcatcaactgcacgttggtacctactgagacacttatatgccaaanatgactatgagcttattgacgtgctggtaaacannntgccaaaactcatggagatacaagagcattggaactgaatcagagattgtcctcacaataacattggattattttatagtaaggaagcaaagaaaaagctgtaagaatgaagcaatgaatcaagacttctacccaaagcaacattttttt

SEQ ID NO: 4162 - DNA, 566 bp, Homo sapiens
ctgaatgagcacccagaggcatgaagataacctggagcctatttcctggcaatgcaaattgtggctgctgcataactacaaattgtgtatcaagaaactacatagtttcaaggcttaaaaattacccagatttgggggagtatgggtggtgagaaaaggctgaaaggaatggacagagcatgtagacaaaggaagggaaaggaaaaggagacagtttcctgatttcatagcaactcaaagataacatgacccaatgacaggaaaatggagaacgtataaaaagcatccaaatcccctaaacaagatgacttctcctagctagcaggaataatgctactctgaacatacatagttcacaggtaagggaactgacccttcctgaaagggcaaaggcagggtaaggaagaatgggaagagaagaatacaaatgttttttaagatggaattgaaagttgaatataataaaaagcccagtacatctcacctgcagaagagtctacaggcatgttcctaaaggcaaataggactttctatcatatgtatgagaactaaatcaaagcttaaaa

SEQ ID NO: 4163 - DNA, 212 bp, Homo sapiens
  unsure (15): n=A,T,C or G
  unsure (18): n=A,T,C or G
ctgaaaagatctgtnttnaattctgcaaatctttattgagtgccaactatttgctgggcacaggctaggcactgattctgctggttctgagaaacataaatggtaccatagggaggtgtttcctcctaagtggcaggaggatgtttgctgggagttaagtgaaccaattcctcctctgcttacaccacgtgggggtaggtccagaactcagg

SEQ ID NO: 4164 - DNA, 370 bp, Homo sapiens
cagcccacggtctgtactgacgcgccctcgcttcttcctctttctcgactccatcttcgcggtagctgggaccgccgttcagtcgccaatatgcagctctttgtccgcgcccaggagctacacaccttcgaggtgaccggccaggaaacggtcgcccagatcaaggctcatgtagcctcactggagggcattgccccggaagatcaagtcgtgctcctggcaggcgcgcccctggaggatgaagccactctgggccagtgcggggtggaggccctgactaccctggaagtagcaggccgcatgcttggaggtaaagtccatggttccctggcccgtgctggaaaagtgagaggtcagactcctaaggtgg

SEQ ID NO: 4165 - DNA, 438 bp, Homo sapiens
ccacctaagcacacagctaagattacagaaccaggactcgataaattcgagcccaacaaactgaccaacccaggacagagcctagtcatcctgactccctcctccccaggccacacttctaaaggccagtttgctcaccgactctctgagtggtagtagggaggccacgagaggccggagcattaccagttggagccagatggcgaagagttgggcgaggcccagactggcgtatagcacttggcattccttggaagcctggtgaagagaaaaattgcacatcattgagaagtgatgtggaccagaacctaggctgtgcctcagagtggggaagaaggaaaggcaggggagaccaggacaggtatatcctgggctgtcaattactgttccccaccacctaccttgaggtctcccaccttgctgccagcgtggattagg

SEQ ID NO: 4166 - DNA, 461 bp, Homo sapiens
ccaaggtcaagaaacagctccgggacctggaggccaaagtcaaggatcaggaagaagagctggatgagcaggcagggaccatccagatgctggaacaggccaagctgcgtctggagatggagatggagcggatgagacagacccattctaaggagatggagagtcgggatgaggaggtggaggaggcccggcagtcgtgtcagaagaagttaaaacagatggaggtgcagctagaggaagagtatgaggacaagcagaaggttctgcgagagaagcgggagctggagggcaagctcgccaccctcagcgaccaggtgaaccggcgggactttgagtcagagaagcggctgcggaaggacctgaagcgcaccaaggccctgctggcagatgcccagctcatgctggaccacctgaagaacagtgctcccagcaagcgagagattgcccagctcaagaaccag

SEQ ID NO: 4167 - DNA, 521 bp, Homo sapiens
ccactgtccttgcaggtactatgcctggctttcgataatcttttgctcagaaactcatgctcaaaagagttcaggatctctgaggtaaggccaactttatgtgtgctggtgcagaaggctataagctcgcctaccattccctcctcattctgtccatactgaacacaaagctctaccaatttctcaattagagcctcctcgcagtctaggccgaagatctgcagctcctccgccagccaaataccttcaactgagaaatgtcattgagcgactccaggaagctaagcactcggagttatatatgcaggtggatttgggctgtaacttcttcgttgacacagtggtcccagatacttcacgcatctatgtggccctgggatatggttttttcctggagttgacactggcagaagctctcaagttcattgatcgtaagagctctctcctcacagagctcagcaacagcctcaccaaggactccatgaatatcaaagcccatatccacatgttgctagaggggc

SEQ ID NO: 4168 - DNA, 372 bp, Homo sapiens
aaacgtgggagtggggtggggcaggagaaatttccttaaaccagcgtttctgccaatagccacttcctggggaaccatctctacctggatggttgaggtttcaaaactagattccagcaaaatgaagacaaggcaaactatgaactggaaaaagtcagtagaccactcaccgccaagggttgagagtcttaatagaaaagtgtgcttagaagatgacaagcaggaaagcaggctaagcgtatgagtgggcgacctccagtgaagagatgcgaatggtcatccgcacagggaaaaaatatcagcctcacaattgctacatagagcatgtgggagcccatggattcggacagagctcccacacaaggcccaagg

SEQ ID NO: 4169 - DNA, 373 bp, Homo sapiens
  unsure (285): n=A,T,C or G
  unsure (286): n=A,T,C or G
  unsure (289): n=A,T,C or G
ccaccctgaccatcaacagggtcgaagccggcgatgaggccgactattactgtcaagtgtgggatcttaataatgaccatgtcgtcttcggcggaggaaccaaactggccgtcctaggtcagcccaaggctgccccctcggtcactctgttcccgccctcctctgaggagcttcaagccaacaaggccacactggtgtgtctcataagtgacttctacccgggagccgtgacagtggcctggaaggcagatagcagccccgtcaaggcgggagtggagaccaccnnacnctccaaacaaagcaacaacaagtacgcggccagcagctatctgagcctgacgcctgagcagtggaagtcccacagaagctacag

SEQ ID NO: 4170 - DNA, 247 bp, Homo sapiens
  unsure (175): n=A,T,C or G
ccagtaaacaaattctaaacctaactgcctattaaaagaggaactagattttcttaagagacagataaacccaattcctccaaggagtttgaggcatggtggtattgttgaggggtgaggagtgggaggaagttgcttttcacaacacctatggaatagttcacttataaatcantctcctgacgtatatggcggcatctcctaaggtgcctagtccctttggacccctgcattaaccactacttaa

SEQ ID NO: 4171 - DNA, 283 bp, Homo sapiens
aaacttgctaaacaattttcctctatcttaaatgctaaagtcaagttgcttttgacttaattcacacaagtttctggatgtataacatttgtccacctagtaattagtcttatacataaaatttcccttagctttaatttggctcctatcagtggggagttttggaattgaatcataactttacattatcgcccttccttcaaaataatgtcattaaccatatgaatgctgaagaactgcatatttgcagagcaattacttctgtgaaagagaaataattttt

SEQ ID NO: 4172 - DNA, 406 bp, Homo sapiens
gcatgcaccacacgtggctaatttttttatttttttgtagagtcagggtctcactgtgttgcccaggctggtctctaactccagggctcaagcaatcctcctgccccagcctcccaaagtgctgagattacaggcatgagccaccgtgcccagcttgtttattcttttattatctcttttctgttggactactagactataagcttcatgaacacaaggatattctactttgtcttaatgtaccttaatacactccatccctaccacagttcctgggatatattaggtgctcagtaaatatttcctgaatgaacatataaattctgtgcatctactgattattaaattgttttgtgatgaaaaggtctgatgaacgatatcataaggtaaatgctgaatttgattt

SEQ ID NO: 4173 - DNA, 547 bp, Homo sapiens
ctgcgtctgtctgaatggtgcgtgaaggctctcagaccttacacaccattttgtaagttatgttttacatgccccgtttttgagactgatctcgatgcaggtggatctccttgagatcctgatagcctgttacaggaatgaagtaaaggtcagttttttttgtgttgattttcacagctttgaggaacatgcataagaaatgtagctgaagtagagggggcgtgagagaagggccaggccggcaggccaaccctcctccaatggaaattcccgtgttgcttcaaactgagacagatgggacttaacaggcaatggggtccacttccccctcttcagcatcccccgtaccccactttctgctgaaagaactgccagcaggtaggaccccagaggcccccaaatgaaagcttgaatttcccctactggctctgcgttttgctgagatctgtaggaaaggatgcttcacaaactgaggtagataatgctatgctgtcgttggtatacatcatgaatttttatgtaaattgctctgcaaagcaaattgata

SEQ ID NO: 4174 - DNA, 355 bp, Homo sapiens
gtggccttgcagggggggatgtcgtggatgagcagggccagcaggaagaccttgaggaaaagctgaaggagtatgtggactgtctcacagacaagaggtacccctggctgccagccaactcctacacccagctccaagtgtgatcaagggagggctggcccatatgaccccccttctcgacctcccccagtgccaagacccggcagggtgctcttgagagcctgcgcctggccctagcgtcccgcctactccccgacttcttgctggagcgccgcctcacgctagccgatgccctggaaaagtgcctcaagaaagggaagggcgagtaacaagccctggctgctgctgtgctagg

SEQ ID NO: 4175 - DNA, 319 bp, Homo sapiens
ctgaaggaagtttccgtggaagaaagaccacccgttagccgagcagctccccagcctgagaaactgcagaagaacaatatcaccaaaaaaaagaaactggttgaggagctggctctagaccacgtgtttggctacagaggtttcgactgtcgaaataacctgcattaccttaatgatggcgctgacatcatcttccacacagcagcggctggcatcgttcagaacctctccacagggagccagagcttctatctggagcacacagatgacatcctctgtctcacagtgaaccagcaccccaagtacagaaacgtggtgg

SEQ ID NO: 4176 - DNA, 443 bp, Homo sapiens
  unsure (135): n=A,T,C or G
  unsure (315): n=A,T,C or G
  unsure (324): n=A,T,C or G
ccaaatcttttgggagccccaatagagcttatacacatcaggttgtaaccaggtggtatcgggcccccgagttactatttggagctaggatgtatggtgtaggtgtggacatgtgggctgttggctgtatattancagagttacttctaagggttccttttttgccaggagattcagaccttgatcagctaacaagaatatttgaaactttgggcacaccaactgaggaacagtggccggacatgtgtagtcttccagattatgtgacatttaagagtttccctggaatacctttgcatcacatcttcagtgcancaggagacnacttactagatctcatacaaggcttattcttatttaatccatgtgctcgaattacggccacacaggcactgaaaatgaagtatttcagtaatcggccagggccaacacctggatgtcag

SEQ ID NO: 4177 - DNA, 173 bp, Homo sapiens
ccaggctagtctcgaacccttgacctcaagtgatccacctgccttggcctccctaagtgctgggattacaggcatgagccaccacacctgtccgacagtgtagcaactttctaaaactgaaaaatctcaaaggagatcattggaactgacttgttcatttattttttgttttt

SEQ ID NO: 4178 - DNA, 567 bp, Homo sapiens
ccacaagaaagacctacaaagaccacatgggaggaaaaagaaacatctgtaaagactgaatgcgtggcaggagtaacatctaataaaactgaagttttggaagaaggaacatctaagatgatcacatgtcctacaaaaaaacagctacaaaagcaagtacacatggtaagatgcttgagtgaactttgtagagtttattggcactttgggttccctagtggaaatagtgtggtatgggagtagtcgggaatggcttgaatgtctagataaggcaagcttgggcaacacattttaatagtgtagaaatgagtagatcttattctataggccctggaaaaattcccagaatacttctggctgtaaatattagatgaactaactaacaattgctaaaaccatagaaaccaaagtttttttggtggtacagggatattataggatctcactctgccccccacccccattattagttgtgctatcggcagtgttttgtccatgtctcctttcttggttggctaattagcaacagctccaatcatcatgctaactcaagacaatatctgaagg

SEQ ID NO: 4179 - DNA, 510 bp, Homo sapiens
aaatgtcccttcagttgtaagagacaattgtgtgaagagccagtgtcagaatcgtgtgtgtgctcacatgcgtgcaagttactctagcaggagggaatccaagaagccactgagacatcctcattctgtcccttctgtctaggtgaggtcccagcttgaagagaaagaaaacaagaagttccctgtgtttaaggccgtgtcattcaagagccaggtggtcgcggggacaaactacttcatcaaggtgcacgtcggcgacgaggacttcgtacacctgcgagtgttccaatctctccctcatgaaaacaagcccttgaccttatctaactaccagaccaacaaagccaagcatgatgagctgacctatttctgatcctgactttggacaaggcccttcagccagaagactgacaaagtcatcctccgtctaccagagcgtgcacttgtgatcctaaaataagcttcatctccgggctgtgccccttggggtggaaggggcaggattctgca

SEQ ID NO: 4180 - DNA, 509 bp, Homo sapiens
ctgactgttggatgtgtccattgtcgccagtttggctgttgcccggacaggacaggacctccattgggcgcagcagcaggtggcaggggtgtggcttgaggtgggtggcagcgtctggtcctcctctctggtgctttctgagagggtctctaaagcagagtgtggttggcctgggggaaggcagagcacgtatttctcccctctagtacctctgcatttgcgagtgttccctctggctttctgaaggacagcagactcttgagtatactgcagaggacatgctttatcagtaggtcctgagggctccaggggctcaactgaccaagtaacacagaagttggggtatgtggcctatttgggtcggaaactgcatgtttcagaaagtttgtctctttttcctactcattatttgaagaagagagagcctgtggggatagccttatcttggtccacaggactgaagtgaagtcacttgggaaggggagacagaggatgagcggcgtctgtgt

SEQ ID NO: 4181 - DNA, 503 bp, Homo sapiens
ctgttcagactctagtaggcctcggtttgctgatctatgagcgatactggtttgtgtgtagccaaaaatccctacagaccagtggttgtcaggcgaggaaagttttataccccaggacatatttggcaacacctgagaacctttttgtttggcaccactcaggaagacgcgttactggcattgaggcaagggacagtgctgaacatcccacaatgtacaggacagcctcacagcaaagggtgacctggccccacatgtcagtagtgcagaggttaatccctgctctagagacaacacagggatcatgggacacaagtcactagccctggaccagccactgctcaagaggccacgtgcaatccacggcattcatctgtccctcttcctccactgttcagcacttgtcgtcaatctggaagctgctaagagcctgtctgtcactggcagagaaagagcagaccctgtgccggctgcaaaggccttgagttgcaggaaagtccagg

SEQ ID NO: 4182 - DNA, 526 bp, Homo sapiens
  unsure (452): n=A,T,C or G
  unsure (470): n=A,T,C or G
gcggtgcgacgaaggagtaggtggtgggatctcaccgtgggtccgattagccttttctctgccttgcttgcttgagcttcggcggaattcgaaatggctggcggtaaggctggaaaggactccggaaaggccaagacaaaggcggtttcccgctcgcagagagccggcttgcagttcccagtgggccgtattcatcgacacctaaaatctaggacgaccagtcatggacgtgtgggcgcgactgccgctgtgtacagcgcagccatcctggagtacctcaccgcagaggtacttgaactggcaggaaatgcatcaaaagacttaaaggtaaagcgtattacccctcgtcacttgcaacttgctattcgtggagatgaagaattggattctctcatcaaggctacaattgctggtggtggtgtcattccacacatccacaaatctctgattgngaagaaaggacaacagangactgtctaaaggatgcctggattccttggtatctcaggactctaaatactctaac

SEQ ID NO: 4183 - DNA, 384 bp, Homo sapiens
aaaattacacatcaagagatgataaaaggaataaagaaatgtacttccggagggtattatagatatgatgatatgttagtggtacccattattgagaatacacctgaggagaaagacctcaaagatagaatggctcatgcaatgaatgaatacccagactcctgtgcagtactggtcagacgtcatggagtatatgtgtggggggaaacatgggagaaggccaaaaccatgtgtgagtgttatgactatttatttgatattgccgtatcaatgaagaaagtaggacttgatccttcacagctcccagttggagaaaatggaattgtctaagccaaaagaaagtctaattatatacagagataaagctaaacgtaattattattt

SEQ ID NO: 4184 - DNA, 338 bp, Homo sapiens
ctgaaagcatgctttgttcatacaggtgtttataaccttggaactcctagggtatttgccaagttatcggaccaagttacagtgtttgaaacaagtcagcagaattccatgcctgccctgatcatcatcagtaatgtgtgacaacttggaaatttgtactgaaatccacaataatcagtttttgctggatgggttttacagcagtatttgatatacctaacttgttatggaggttgattgatatctgatccctgcaaaatactttgacttgtcattttgttgatgatgcaaagcacgttggactgagaatacttaacattctttttctgtatttcttt

SEQ ID NO: 4185 - DNA, 539 bp, Homo sapiens
  unsure (523): n=A,T,C or G
ctgatggagaatagctgaaaggtggaaagactttaccaaggaaggtctatataataggttaccacctaagaaatgaaacaactttctgaaagcccgggaaggagatgctctcctgagctcctcatgctccacaaggaggtcaaaatcaccaccctctttcagccactattttaagtttgaaataaacagcaagcttcctgccaccttgagtcttcctttgatgtgcactccctgcaagcaggtaagcagaggtcatctagattaaataggcacagaactcagatttactttctggacctcagcctctttattttaagtagaaataataatacaatatctaccttagagagttctagtgtgtattgtgctagcatagtgcctgacataaagtagggttcaaaattagaagatattttctgctttctttttctgaccatcatcttccttaatatcaaagccgtgccaccaaaatagtgccaccacagacaaggtaatctctagggtataaagtggggtgatctanagagagtaagcgagcc

SEQ ID NO: 4186 - DNA, 261 bp, Homo sapiens
aaaccatctggtttttaagaaatttggtaccaaaaattgatgagtagaggcaaaaatgccccttcatctttctctatatattttccagttgaaaacaaactaagaagtcctttaagaatttataatccgttccccattaacttaatttagcttttccatcactgttaatgatcagagtaacaaagtgtgaaaaataagaaaccatcattgatgttaattaacacatttagatgggccagttaaaacagcttcataagtttt

SEQ ID NO: 4187 - DNA, 514 bp, Homo sapiens
aaagcagtaagtcttaggtatacttacagtatgtctgtaagtcttatatactcagagaactccagccctgcctccttctagctgtgtgaccttgggcaagtgtctcaaattctctgtgcctcgaattatctgtgtctcaaattatctactctgtgagataaggagaataccacctaactcccaggcatgttgggaggattaaagctttcttacatgctctactgcatgaacagggcccagaagggcatctgtgttaggccccatccaagtgtttctgatctggttgacccccagacccccactgagaagcaccacagtgtgctatcaggtacctgtctaaaccagggcagaggaacgagcacacccctaaccacagccatcaaagggagcggcgactgaaggcaagaagtcatcttctagagactgtatattgtgcactaagtaatacttgtgcactaatgagtaatacacggtcctgggctgtcctgggtacacgcaggcacccagtacacgg

SEQ ID NO: 4188 - DNA, 232 bp, Homo sapiens
aaaaacaaaccttgaaatcagtttctcaagttaaaattctgatggatgtcacaaatagtaaggtcttccttactgagctctgtcatctgttttggcttttatgcatactgtgatttgggaggctgctgctcaacattctagcccatttccagagtgttccattattctaggacatggctgtcatgggagtctgcacaaggcaactaatgctctagatttaactgcctttttt

SEQ ID NO: 4189 - DNA, 457 bp, Homo sapiens
aaaaaactaaagtgactggcactaagtgaacttgagattatcctcagcttcaagttcctaagataagggctttcttaagctttcaggtgtatgtatcctctagatgtagacaataatgtcccatttctaagtcttttccttttgcttctccttaaattgattgtacttccaaatttgctgttatgtttttttcctaatactgtgatctatctgatctgcagacaagaaccttgtctctgttgaagagcatcaaggggagattatgtacacattgaaactgaagtgtggtgttactgacggaatgtgcagtaactcctcagatatctgttaaggcatttcccagatgtgatgccagccttcttacctgtactgaaagatgcttagcttagaaaaaaacaaaacagatgcaaaatcagataattttattttgtttcatgggttttcttatttacttttt

SEQ ID NO: 4190 - DNA, 285 bp, Homo sapiens
cctgggatgcagggagaaaggctgaccacaagttgagacaagatacagaaacaaacaaaaacagcagaaagtccgatcgatggtgtaagtgttgtgttcactgcttagggtgcaggtgagcttgatcgaggctcccagtaaggcagatgtagacgggggctgagtcagcacaggcagagcacagagacctgtggagaaaatgaagggcagtaggtagaaggagacccaggccatggttggagggacttccaagagctctattcgagactgcccagtggaacctgg

SEQ ID NO: 4191 - DNA, 294 bp, Homo sapiens
  unsure (160): n=A,T,C or G
  unsure (182): n=A,T,C or G
  unsure (232): n=A,T,C or G
ctgaccaacgagaaggtaggcgatgtggtgctacccccgtgggccagctctcctgaggacttcatccagcagcaccgccaggctctggagtcggagtatgtgtctgcacacctacacgagtggatcgacctcatctttggctacaagcagcgggggccanccgccgaggaggccctcaatgncttctattactgcacctatgagggggctgtagacctggaccatgtgacanatgagcgggaacggaaggctctggagggcattatcagcaactttgggcagactccctgtcag

SEQ ID NO: 4192 - DNA, 478 bp, Homo sapiens
  unsure (168): n=A,T,C or G
  unsure (426): n=A,T,C or G
  unsure (432): n=A,T,C or G
  unsure (443): n=A,T,C or G
  unsure (455): n=A,T,C or G
tgacaggaaaagcagcaatgacaagattacttaagtcttgtgaaataacacttctcttccttgacctgctgcttcccttttttaccacacacacacgcacacataccacagccctttgagactgaaagcagctctattgagaatagtagtgtcaactgtattatgtanaaattctaaagtttttgggattatttcatagccctgaccttgctacttctctccactttatgtggcaggtttaatctcaggtctccctcatacacttctcagcctcagcacctaaccctcacacaacactccagtattgatgcagtcaatcttgtataacattttttgaatgtccaatgtgcaaagcacgatgttggaaattatacagaggtgaataagacaaaaactcttgctctcaaagatgtcagtctttttctntgcaangataacacatntagagtaaaatncataaaggggacttaattttacc

SEQ ID NO: 4193 - DNA, 147 bp, Homo sapiens
  unsure (42): n=A,T,C or G
  unsure (104): n=A,T,C or G
  unsure (124): n=A,T,C or G
gcacgttggaaccgaacagagctctgttgttgcaatgttcancccacaagagcttactggtgaaggaatgggacaagacccatctttatgcaaagccagcgttncagtaatgttccagcatctnataatctatcctggggaattcag

SEQ ID NO: 4194 - DNA, 505 bp, Homo sapiens
aaaaggggtagctcactaaaaatacagcttagcgtaaaaagaaaaaaagacttcagggcaagaggatcctattatctttatgaaaacactgtgcagaaaagtccacagccacttaccctagagtaaagccagctcattaagcagccagcttcctacgctgagaggctctgcctcatcagtcagcccaggcgggaagacttcatgaatgctctgggatggacaccaagctactggaaggggaaatggttttccaagtgtccctgtatgttgctagcagaatggggagaggtctaattcctaatcacatttaccacttaggcccaatggcctggtctgatgagtgagacatctagtgaaatcgatcacagtctgacgcacacactgacaatcatatggaatcatttgaaatgggatctatcacaccatggtccttaatcgttccagtctattgccgcaggaagacacccgccagctcctgctctgggtggggtcaggctggtgagca

SEQ ID NO: 4195 - DNA, 375 bp, Homo sapiens
  unsure (355): n=A,T,C or G
ccattcccccagccttctccatgacgtaggccatggggttgcattcgtacagcagtctcagctttccattggggctcttcttgttagcggggtacagaaatatccctccgtagaccagagtgcgatgaacatcagccaccatggagcccacataccgggtcccataaggagctgaattatctggggggaacttcttcctctggatgtactcagtgacggcagggtcaaagtccttggtgtagccctcgttaaggctgtagattttacctttcttttttatcttcacatccttgtccaccaaaatgaactccccgatggcctttttagacaaggaaggaaaggtggagagatgacnagcgcactgggtcccccagg

SEQ ID NO: 4196 - DNA, 225 bp, Homo sapiens
ccagcagctcgctgatgtcctgcaggcggctcatgttggggaacttctcctggagcagcttcttcatcccgcgactcgcgcccacaggaacaactttgatgctatagtggcggaagtccagctcctgggagtcggggttgtagtcgatgaggaggcagcgcttgatggtgttcaggttcaccttgtgtacgttgatggaggggaacaggttctggaacatggtgg

SEQ ID NO: 4197 - DNA, 248 bp, Homo sapiens
ccatcttctctttcagggacaggctggcctgacatggaaggtgaaacaaggcagcagcccctgcctccaggagaactctgcagactgcagtgccggggagctgaggggtcctgggaaggagctatggagtcccatccagcaggttacagccacatcctctaaatgggcgcgatttgtcctgccacctagaaaaagttcacatgtggacagtgagcagccaaggtctcttcagagggaccccaggccag

SEQ ID NO: 4198 - DNA, 516 bp, Homo sapiens
  unsure (480): n=A,T,C or G
  unsure (498): n=A,T,C or G
aaaggcaaatctttactccttaaagaaaaaatacaaactgtggtatttttaagagatcgttatattttacataatataaacaaaatcactaatgcatctatatgcttggtttccttaaactacaatgaaccacagaatgggtgaaaatgcatttactttttggtggcaaataaacatactggaaaaaacacgtaacacatagcatgcctttttttccttactgtctacacacaggaactgacataaccaagttttaatagccgccacctcctcttccctgtccaaagtagccagttccataggcccccctaccacctcctcgctggaatcccccagatcctctgtagcctccactaggccctctgtagtctcctccagagttgcctctaaagccacctcgggaaactcctctatagcctccaccaacacctgcaccatatcctgcccgaaaggagttggcgctgccaccatagcctccgntaccatagcctccactgntatagccaccgccatagc

SEQ ID NO: 4199 - DNA, 362 bp, Homo sapiens
  unsure (19): n=A,T,C or G
aaatgtgctgcattttatnacataaaagtagttagtaaaaagatatactactaattttaatttaattttaactaaaataaaagatattttcactagaatgcagaatattcctctgaacacttccctcatacatcattcaatattataaattaaacacaaagagcctctccacttagatttttatcatgcatcctacattgtaatgtctttactcttccatagaaaaggtaaaaaatattgcccacctaacaaaaaagaatgtctcatatctttgatgaagcagcaattgatcacatgctttcacatgtgaatagaatgaaaagcatgaagtaatttgagttgaattacatcattcacttttt

SEQ ID NO: 4200 - DNA, 345 bp, Homo sapiens
aaatataatttaagaacccctccaagcaccggcgtccgtttctgggttccaccaccaactaccgcccttttcactacctcaccccacaccccttcataggacacagcttgggggtcccaggcggggtccggggatgtgggatgaccaaggcactgttctggaaacagacatgatgatgggcccctgtttcaacttgggcaaaggaggccatagtgaaacaggttccctccaacacaaagttatgacaaggacggtagaaaaacaaaacgaagaaacaaaaagggaacggggagaaaaattaagaccaaaaacaaaactcaaaaaccttcaatatgaaggcagcag

SEQ ID NO: 4201 - DNA, 495 bp, Homo sapiens
ctgcactgggagagctgagagcctccatgacagaccccagccagcgtgatgttatatcggcacaggtggcagtgatttctgaaagactgagggctgtcctgggccacaatgaggatgacagcagcgttgagatatcaaagattcagctcagcatcaacacgccgagactggagccacgggaacacatggctgtggacctcctgctgacgtctttctgtcagaacctgatggctgcctccagtgtcgctcccccggagaggtgaaggcgcgggcagctccctgagtggtggggctcctctgggtgccacctcttgctgggccaagtctgcagaccagggactcatgagctcgtctccgcaggagcatgcggcgatgctgagtttcatcaaataggacgcagcagaagttgggaagcactgcagaagatgggttgtcttccagaaagaccactgttttggggaacagctcggctctttcttcggccgctggtggttg

SEQ ID NO: 4202 - DNA, 455 bp, Homo sapiens
ccaacagtgccacctgttgatgacgaagagatgctacacttgagtcctcagccaccacagccccagaggtaatgattgtgacctgaaagacaaaaggaggtcttccattccacctgcagtatactctccctccccacaatccaaataaacatccctccaattaaggtgctgggaacaacccagaagagaatggataaaaccgtatgggtcagattaattagcctgaggctcagagctaagtaaggctgggtttcctcccaacttagagcccaatttaatttagggattttgaatcacagaaggacagagctgtaaaaaattccaaagatattttaatcccctcacttgaaaatggacagaagtccatggaaaagtgatttgcctaaggttgcacaacaaatcagggttgaattgagatttagaaagtgtctcttgacctccattcaactgctttt

SEQ ID NO: 4203 - DNA, 465 bp, Homo sapiens
aaaaaacaaaaaattaaaaattacccaaattccttattagaaaaagagacaattacctggttctacttaggatctgtgtatgttctaagtctttctctcctttagaaaaaaagagataatctgattctattttggatctgtgtacattctaagtctttctctcatttagagaaaaacattctcaagtctatagaagaggaaaaaaaattaagattaggaccaacatttcaagctgccttttggaaagaaaattaaaaacagaggtagatggttaattattagtggccaagttactcaggtgactaattttttcttggtacacattcaccaaaattttatacttgaagccaaatagtaaataactttaggagtagagagtaatacctagcagaagttattttctttatgtcaaagaaaagtaatagaagcaaaccaggcttacgacccctgttaaggagatgattg

SEQ ID NO: 4204 - DNA, 396 bp, Homo sapiens
  unsure (387): n=A,T,C or G
ggcgctccgggcctggaatccctacgcgtccctttgggtttagcacgatgagctcaatcggcactgggtatgacctgtcagcctctacattctctcctgacggaagagtttttcaagttgaatatgctatgaaggctgtggaaaatagtagtacagctattggaatcagatgcaaagatggtgttgtctttggggtagaaaaattagtcctttctaaactttatgaagaaggttccaacaaaagactttttaatgttgatcggcatgttggaatggcagtagcaggtttgttggcagatgctcgttctttagcagacatagcaagagaagaagcttccaacttcagatctaactttggctacaacattccactaaaacatcttgcanacagagtgg

SEQ ID NO: 4205 - DNA, 79 bp, Homo sapiens
ggatcacttgaggtcgggagttcaagaccagcctggtcaatatggtgaagcctcatctctactgaaaaaacaaaaattt

SEQ ID NO: 4206 - DNA, 162 bp, Homo sapiens
  unsure (20): n=A,T,C or G
  unsure (21): n=A,T,C or G
  unsure (22): n=A,T,C or G
  unsure (39): n=A,T,C or G
  unsure (89): n=A,T,C or G
  unsure (94): n=A,T,C or G
  unsure (105): n=A,T,C or G
cttttttttttttttttttnnnttttttgatgtataaanaggtttaattgactcacaattttgcaggctttataggaaacatggcgctnacgtntgttcaccctntcgggaaacctgaggaaggttaaaatgatggtgggaggtgaagggcatgtcacatgg

SEQ ID NO: 4207 - DNA, 523 bp, Homo sapiens
  unsure (232): n=A,T,C or G
  unsure (319): n=A,T,C or G
  unsure (346): n=A,T,C or G
  unsure (509): n=A,T,C or G
aaaaatgtagagtttattcatggagcatgccattgaggtttggatggtggcaggtaaaacagaaaggcaagatgtcatctgacattaggctacttataaataaatgtttatctagcttttatttcatgccctaatgaataaaacatgcttggaaaaagaaagtaacaagaagtagtggtatcatactttgtgggtttttttgggtttttttttttttttttttttttttganacggagtctcgctctgtcacctaggctggagtgcagtggcatgatattggctccctgcaacctccacctcccaggttcaagcaattntcctgctgagcagctgggactacaggngcgcgccactacacccagctagtttttgtatctttagtagagacagagtttcaccatattggctaggttggtctcgaactcctgacctcaggtgacccacccaccttggcctcccaaaatgctgggattacaggcatgagccaccgtgcctggcccatacttntataaattattatc

SEQ ID NO: 4208 - DNA, 420 bp, Homo sapiens
ctgtagcctctgcaagtgaaaatccaggccgacttgcagtcattggactgatgtccaagtgcaatcaccatacagcagctacaggcagggctggctgatagggagtatgggagaaggacacgctcagatgaaaacatgcatgcaacgattttcaccactgaacacactgttttctgtgatagaaactgtcggccctgctgggggacaagatattcacggcctcactagccagtgtgatgccaccagggcagcctgcccctgatgctcctttgttacctgctaaagaaggaccataaggtaaaaggcaccttaccttatggagtgagcccagaccccagggaaaagcttgggtagaacaatccaaggggcagcctgggtgtgagaatccagcccaagctagctgctctagaagcctggagg

SEQ ID NO: 4209 - DNA, 266 bp, Homo sapiens
ccttttgatttgctgtctaattctttagcatctcctcctgctggacttccatttttctgttgtgctacaagtgcattcaaaataatttttgttgccccagaccttggcagagtaacatttgtaagaaatggcaagttatttttcttggcaaatgcctgacttgtttctcgcctcttcctgaggaagcccccttctggaaacaaaacaatccattttcgatctctgctcctgtaattattttctaagtgcttcttgagaagcagcag

SEQ ID NO: 4210 - DNA, 552 bp, Homo sapiens
  unsure (510): n=A,T,C or G
ctggaccagagtgagaagtctgggtggggagggaggctgggaactgtcattgccctcaaacctccagtttgcagaggtctgtggggagctagacatttcttaaggaggtgagtgaagttaggattgcatttggtggaactgagggagattccaattccaactgaagctagaaggaagggcagacagtattcctgaacatgtgggaaatatcaagcttgaacctgttagttgaaggtaatactttagttgctactggtgcaaggtctgccagaggctggaggtggagatggaggcatgagagcagagttgagggtaacactatgggagccagccctgactcttaggctgccctggcctccagcatacactggacctgaggaggaagcatccctggagttcctactgacagactacgaggcagtgtgtggccgcagggcccggctggagcgcgaagtccaaggagccttcctccgcttcatggcctgtctgctcaagggctaccgggtcttnctgcgcccactcacccaggccccctccgagggagctcgtgat

SEQ ID NO: 4211 - DNA, 278 bp, Homo sapiens
aaaaacatctattgcacatctaccatgtaggaggaatgtgctcacactggagaacagaaaaaagttttcaatcttcattacctgcccatgaggggcttagtctagctgggaaggaaagaaagaaccaatcaaaaggagtttagtgccacaggagcacagcaaggagagaccaaactgcccaggattcaaggaggatcatccagagatctgtcagggggtttcctctaggtccccttcgtttgtctagaaggccacacaaataaagaaattagattttt

SEQ ID NO: 4212 - DNA, 497 bp, Homo sapiens
ccaggcgagcagggccagcaccaacagcgaaaagtcttggtgacagtgtgtgccctcgatactatgtgacaggaatggctctttacctcctgaacacccatatatacctcagtctaataatgaggaaaaaaaatcttaattcaggggtagaacaaaagacctgaccagcagccaaaactgtcaaggtcaacaaaacaaagtctaagaaaccatcccagcaggcagagcctagagcagcaactaaacgtaatgtggtgctctggacagatcctgggacagacaagggacgtcaggtaaaaattagagaaatccgaataaaatgtgggctttagttaatgaaatatatcaatactggtttattaattgtgacaaatgtcccataccagtgtgagatgctaataataggggaaacagtgtggagtgtatgggaactccagatactgtcttcacaatgttttttgtaaatctaaaactattctaaaataaaagatttgttt

SEQ ID NO: 4213 - DNA, 365 bp, Homo sapiens
aaatctgacttccaagtggcacccctgccgacggtcaaaacgccccctctcctggtgtgtgccctccatccccgcttcctgggggcagccggtttcttgctgtctggacaacagagctctgccaatgccacttatctcgcccgtccaggactttatcaccaactgtcctacttccgactccagcaaaggagcgacagcgagcacgtctgtgcttggctgtgactaacagggcctctgaataaagtgaaaataatcccactttaagctgcaagaggaaagacccacagaaggaaagtccttcacggacggagacccaggatcctgaaatgcagtgcgtcccttcaacgttctgagaataaaaattt

SEQ ID NO: 4214 - DNA, 524 bp, Homo sapiens
aaactaaatatataaatctataatgttaaacatatgttcattaaaagcatagcactttgaaattaactatataaatagctcatatttacacttacagcttttcatttgatcaggtctgaaatctttagcacttaaggaaaatgactatgcataattatacctgaccatgaaaaaaataagtacctcaaatgcatgcatttgcactggtgattctaactgcacaaatctttgtgccatcttgtatataggtattttttacatgggttgacatgcacacaacaccattttcattcagtatgaaccttgaggctgctgccatttttccacttaaccaaaccagcctgaaggtgaacctcgaaacttgtttcataaatctttcaaaagttgttttacatcaatgttaaaatttcaaaatgctgcagggtaatttaatgtataaaatattagtaagaaaaagtatgtattgcatacttagtagaatagatcacaacatacaaattcaattcagtgcatgctttaggtgt

SEQ ID NO: 4215 - DNA, 318 bp, Homo sapiens
  unsure (25): n=A,T,C or G
  unsure (27): n=A,T,C or G
  unsure (63): n=A,T,C or G
  unsure (65): n=A,T,C or G
  unsure (80): n=A,T,C or G
  unsure (88): n=A,T,C or G
  unsure (92): n=A,T,C or G
  unsure (148): n=A,T,C or G
  unsure (165): n=A,T,C or G
  unsure (173): n=A,T,C or G
  unsure (202): n=A,T,C or G
  unsure (215): n=A,T,C or G
  unsure (230): n=A,T,C or G
  unsure (244): n=A,T,C or G
  unsure (272): n=A,T,C or G
  unsure (295): n=A,T,C or G
  unsure (298): n=A,T,C or G
  unsure (302): n=A,T,C or G
  unsure (311): n=A,T,C or G
ttttttttttttttttttttttttngntggaaaccaacattttattgagcactcctgctcctngnaatctattccagtanattcttcnccgngggcatcacatatcacacaggggtgtgaccagcactccccctgctacctgccgtgngggcaggggcaggagtnaatggctnttcctgggcacaggccacagttaaccggngacaattgcaganccataggaattcatnttttaaaaaaaacnaaaactggaataaaaaaaaaacaaaaancctgagtataaaacctcagcagngtnccancactatctnggggttt

SEQ ID NO: 4216 - DNA, 599 bp, Homo sapiens
cctactatcagaaccaaccaatcaaaatgtccacttaactaagcagtgagcttaaaactgaaacttaaaactgtccatttaagtaagcagtgagcgtaaaactgatttacatcctagtgtaacctcattatcttgtgcagacaaacagtttacaaagtgtcaggccaggaccgcattttgagtagcaccggtacagaggaagagctcaatgatgagattctagatgagtacttcccaagctatctgtggtgaaaggccaatttttatttctaaaagaggtctacactgtgtaaataggataaaaatgaattataagaaaaataaaactaaaatataaaacaagtcctaaatttttatttttagcttcagacaaaattactccaattacaataaaagtttctgcttactcccaaataagcagacattctttagttataggaccagaatgagtctatgaactgactttcagtagcaatgttctgggcagtatcctgacgaagtatatgcttaaaattaaggtcaaacagcaaggttacagaagcttagtcctatgagaaattaacaatggaggcatataatatactagttaaccaactgag

SEQ ID NO: 4217 - DNA, 79 bp, Homo sapiens; identical to SEQ ID NO: 4205

SEQ ID NO: 4218 - DNA, 541 bp, Homo sapiens
  unsure (525): n=A,T,C or G
ccaggatggcctccatctcttgacctcgtgatccacccaccttccctcccaaagtactggaattacaggcattagccactgtgcccagccgaggctgtcatttttaaccggctctggatgactctgatgcagccatcctggaccttggctgtggtctggtaactggaacccagtgacgtaatcaggtgccatcgggggtcatgggaaagggggatccccaaggtctgaggtggactaggaagactttctgaagaacctgggtctgttagggcatcagccaatcaaggtacaagtaaatagaggcaaaatgagggtttgaactgtgagcagttggtcctggaaaagaaagaaaccaagagattatggggactcaatgggcttcttaagagagaataagttgaaatcaatgaccagaagaccctgatggaagtggaggagaatcatctcaggcaaactttttgtgtgccagtaacagaaaccctctttgtgtgatcacatgcaaagtataggatatttgcaatatanccatggggaggagtgc

SEQ ID NO: 4219 - DNA, 527 bp, Homo sapiens
  unsure (20): n=A,T,C or G
aaagatacaaaaaatcttgnatttttttttgtgtgtgtttacaagtagtaaatttattttcagaaagccagatttcttatatttgcataggcaatgaccagaaattcactcaataaatagtaagacaatgtaaactttatagaaaaaaaaaaaactcactcctctgaggcagagcccaaccttaggggtagagaggagtactgtaaataaatgttttaggagggaaataattccactcaactttcaacatttcaagtcttaaatccattggcagcatgtatagcaagtgggctaaaaagccagcctccaccaacagtccagcccacactacacatttcctttcgccaataaataccccagcctatgcttttagtaagaatcagcataggtaagcgcatgcttcaatgaaaaatagtcacaagcaaagagaataaaaccttttgtgacaatttcttgaaagctatgcttattaatactatgcagaatatttatatacagcaagaaaaagtttgttgcatttcaacttt

SEQ ID NO: 4220 - DNA, 511 bp, Homo sapiens
aaagcaatgttgtggatgtgtgaagagtttcccctctctctggtggagcaggtcattcccatcattgacctaatggctcgaacgagtgctcattttgcaagactgagagatttcatcaaattggaattcccacctggatttcctgtcaaaatagaaattcccttgtttcatgtcttaaatgcacggattacatttggaaatgttaatggctgtagcactgccgaagaatctgtatctcaaaatgtggaagggacccaggctgattcaggaactttcaggaccagcttcgaatggagggatcagccagacaaacacctatgacgcccagtatgagagggccatccaggagagcctcctcaccagcacagaaggcctgtgccccagcgccctgagcgagacaagccgttttgataatgacttgcagctagccatggagctctctgccaaagagctggaggaatgggagctccggctccaggaggaagaggctgagctccagcaagtcttacag

SEQ ID NO: 4221 - DNA, 458 bp, Homo sapiens
ctgctggataaggatgcctgaactttaatcatctttagcagaactttagctaataggtatcaagtgatcatcacttcttttcctcctccgacagcagatgcaggacaggaaggctgaggactctttctgatactcttctttgctactgcattccttcaggaattcctgcaaatccgtttcaggaaacccattctgttggaatttctttagaaagtacacaatgttgttaccttatttataaggcatgagaaattgctcttttgtcaacaaaccaagcccacctttgctaaaataaaactctcccacattgctagctcagatccaagaactgatatttacaatgatgaatcaatctgtcagtcccagaacaccaaggcagggccactgtgggaacagagaacaatccaaagaaaaacttcagaaagaaagcagagaagagccagggagaggtttttttt

SEQ ID NO: 4222 - DNA, 561 bp, Homo sapiens
  unsure (414): n=A,T,C or G
  unsure (417): n=A,T,C or G
  unsure (446): n=A,T,C or G
  unsure (506): n=A,T,C or G
ccttccctgaccattctctctaatggactgcatccatcattctcagtctaacacatacctcattttcttcatagaactcttcaatatctgaggtgttccaagtatttacttttgtgttatctcccctatcaaaatgaaatcactatacgagcagatacttttttcattgttactatgcacaacacctagaacagtgtctggagcatgtgttacacatatttgctaattgttagaattaacaaacgaattcagtgtgttctaaccagaaactgtaaactccccattttaatatgtagtctcatccatccttctttaccttttaccagggcttggtgtgtactttctaggctggtgaatgagggcctcaacaaggagtacagaaggagaattggaagtgaagttgcacaagccagnggntctatctattctatgatttttccccttgntctcagtataacagaaagttgcctttctgcccactctagctttttttggtcgaagggcangggtatgggtggcaggggtttggagaaagaggggagtcctcatcattttggcaat

SEQ ID NO: 4223 - DNA, 302 bp, Homo sapiens
aaaatgaaaagtgatcaaaagcaggtacattacaccctataccatattatgtatgggaatacatttcatatttctcaattatgatttgccaattttaccttctacattgagcccttctatggtccatgctcatcggctcaccaatggcatacactcaaaggattcctctttatgggtaactatctcaggacctgattttatgagctatgatttggtgcttgcagcatcttcagcactgtgtgtgaaaatgaaggcagtatttttgaatatttttctttgttgcagagataagcaggagtttt

SEQ ID NO: 4224 - DNA, 452 bp, Homo sapiens
  unsure (16): n=A,T,C or G
  unsure (17): n=A,T,C or G
  unsure (324): n=A,T,C or G
  unsure (327): n=A,T,C or G
  unsure (329): n=A,T,C or G
  unsure (350): n=A,T,C or G
  unsure (351): n=A,T,C or G
  unsure (353): n=A,T,C or G
  unsure (363): n=A,T,C or G
ctgtgctccattgaanngacttgtgaatcagccagtgtgatggctgcgacactggctaatggtggtttctgcccaattactggtgaaagagtactgagccctgaagcagttcgaaatacattgagtttgatgcattcctgtggcatgtatgacttctcagggcagtttgctttccatgttggtcttcctgcaaaatctggagttgctgggggcattcttttagttgtccccaatgttatgggtatgatgtgctggtctcctcctctggataagatgggcaacagtgttaagggaattcacttttgtcacgatcttgtttctctntgnantttccataactatgataattnnanacactttgcnaaaaaacttgatcctcgaagagaaggtggtgatcaaaggcattcctttggaccattggactatgaaagtctccaacaagaacttgcttt

SEQ ID NO: 4225 - DNA, 387 bp, Homo sapiens
aaagcattagctatgcttcatctgcatgctactatattttagaatctcatttttaggaattactatataaattgattacatattcttttgaagaacctcagtaataggaaatctatggcctctgagagtggatttactttttgataacagtcaaatcctatgactattgtgtaaaggtgaaggacccagctaggcaattctgcttggggttaaaataataataaatgtacctgaaaataaggaggttgacttcttatacagcagctacacaccagctcctcaaacacgcctacctcaggacctttgagcttaatgctctcactttgtggaatctttttatagcatgttctttttcactgatatgagttacaggtcacttaaaaaagg

SEQ ID NO: 4226 - DNA, 233 bp, Homo sapiens
aaattgtttcatatcaaaaaggtcaacatcttcacctggtcctttactcatctgaaaaacatcccaaactttctggtgctgatgaaattgcatataaatgatgtctaacagggcagcatcactgatacttgcacgcttttcctcacacagatggatcaagtgctgaactacagattcctttctctgtcggaaatttacagtctgcagttgattttcagacaaaaaatcccagg

SEQ ID NO: 4227 - DNA, 510 bp, Homo sapiens
cctagggaggccaggcaagaagcagaggacagtacgtctcggctctctgcggagtctggtgaaaccgaccaagatgctggggacgtgggtcctgatcccattcctgactcatactatgggcttcttgggaccttgccctgccaggaagcactgagccacatttgcagcctgcctagtgaggtcctgaggcacgtgtttgccttcctcccggtgggagacctctattggaacctgagcttggtgtgccacttgtggagggagatcatcagtgacccgctgttcattccttggaagaagctgtaccatcgatacctgatgaatgaagagcaagctgtcagcaaagtggacggcatcctgtctaactgtggcatagaaaaggagtcagacctgtgtgtgctgaacctcatacgatacacagccaccactaagtgctctccgagtgtggatcccgagagggtgctgtggagtctgagggaccaccccctcctccccgaggctgaggcgtgtgtg

SEQ ID NO: 4228 - DNA, 438 bp, Homo sapiens
  unsure (10): n=A,T,C or G
  unsure (11): n=A,T,C or G
  unsure (19): n=A,T,C or G
  unsure (20): n=A,T,C or G
  unsure (256): n=A,T,C or G
  unsure (343): n=A,T,C or G
  unsure (377): n=A,T,C or G
  unsure (378): n=A,T,C or G
  unsure (387): n=A,T,C or G
  unsure (389): n=A,T,C or G
  unsure (420): n=A,T,C or G
  unsure (429): n=A,T,C or G
ctacaatccnncactaacnntccatgtccagggtaaggatcgagatcgagaagcccacactgccagtgaaaaagctacgtctttactgcataaattagaggaagcaatttcggaacaacggaaccttcaaactataaatactgaattatcgaacacttgccaggcacttcagcagaagacaaggaaactgaagacaacaattgagtcacttcaaaaggagttcattgaaggggaacaccatggcttgctgtttcanagctttttagatgaggaatttcctcactatgattccctgtcctgcgcagatgcaattcaacaacctcttcaagaaaaattgaagcantgttgccacaaactatatggtggtcaagaagcannaatacatcnanacacccctgaccttgaaacatacgtgctggnacacacctntgctggatg

SEQ ID NO: 4229 - DNA, 427 bp, Homo sapiens
cctgcattgaggccaagcacgtgagggtgccccccacccacatgtgggtctgtgtgtgtgcgcgtggcgtgagagcatccccgccttgtgttgggtctgtgccccatggaggagggaggtggggtgtctcccccaagcacagcactcaactcttcacaggacaagtacatggcggacatggacgagcttttttctcaggtggatgagaagaggaaggtgagtgtgtgtcgcttgctgccgatggctggcaggtgctcgtgcagtgccccttttcagcctctgaccgtgtgcccctgtgccacagaagcgagacatccccgactacctgtgtggcaagatcagctttgagctgatgcgggagccgtgcatcacgcccagtggcatcacctacgaccgcaaggacatcgaggagcacctgcaggtgagg

SEQ ID NO: 4230 - DNA, 476 bp, Homo sapiens
ctgggggcgcagccgctgcccttccccggcatggacaagtcgggcgctgctgtctgtgaattctttttgaaagctgcctgcggcaaagggggcatgtgtccgtttcgccacatcagtggtgagaagacagttgtgtgcaaacactggctgcgtggcctatgcaagaaaggggaccagtgtgagttcctgcatgagtatgacatgaccaagatgcccgagtgctacttctactccaagttcggggagtgcagcaacaaggaatgtcccttcctgcacatcgaccccgagtccaagatcaaggactgtccttggtatgaccgtggcttctgcaagcacggtcccctctgcaggcaccggcacacacggagagtcatctgtgtgaattacctcgtgggattctgcccggaggggccctcgtgtaaattcatgcaccctcgatttgaactgcccatgggaaccaccgagcagcccccact

SEQ ID NO: 4231 - DNA, 258 bp, Homo sapiens
cctgggatgcagggagaaaggctgaccacaagttgagacaagatacagaaacaaacaaaaacagcagaaagtccgatcgatggtgtaagtgttgtgttcactgcttagggtgcaggtgagcttgatcgaggctcccagtaaggcagatgtagacgggggctgagtcagcacaggcagagcacagagacctgtggagaaaatgaagggcagtaggtagaaggagacccaggccatggttggagggacttccaagagctc

SEQ ID NO: 4232 - DNA, 254 bp, Homo sapiens
  unsure (105): n=A,T,C or G
  unsure (223): n=A,T,C or G
aaagtattggtgtttggagggaggcttataggaggaaagttggcttttagaagatcacatcaaggtaagcaactagttctatattctttttttgctgttgcttangaaaattttaattttccttttcttctgtagaaagtaaaatatgaattctggatattttgttacaagattatcctagtttttagagagctcaataatactaacacctcatgtatttcangctgcttcaggtctaattcaaccataaattt

SEQ ID NO: 4233 - DNA, 497 bp, Homo sapiens
ctggcttgtgaaatgagacaccttgaccaatatgctttgggtggacggtctcctacatgttcagtggaggccaccaggagcatccatgagcggggaaggggtccacacccttacatggcaagttgatacgatggggtgcttggtggatgggccatggaggtccgtgagctggaactgggcacacgccatcccagagggctcaggatgccccaggaaggaaagaagggcaacagactacacgattggacgtgtgtggttgactgggatgaagttggagggaggggcagggccttgcaggggattggtactgatcccagggaggaagtgttggggcttcatgaactaggatgaaaggaggcccctgagccatgacaaggggcacatccaggatttccgccaccctgaatttagtagagctagtaggccctggtcgtcactctgggcagggatgccgtcagccttgagggtcgccacccacctgtgtgttgccctctgtc

SEQ ID NO: 4234 - DNA, 366 bp, Homo sapiens
aaaggccgagaactggaaacagcctttcctccattttctgtgtattggtgatgggagtgataaccttttgggggagctttctaaatctcacagaagaggaaagtggcctgctctggcaggtatgtgcaagatacagtgtgtttcatctgttccggtgccaagaatgagcactgtactgtggcagttccctttggatttgtatgtgctctgggctcatgaagatattgcatcgtgagctgcagcagttgcactctttttcagtgacctaaaaatggcttatttccgaggaatgaaaggctgccatcattggctgtgggtgtgaaaaacctttcctagcttagagcatttgtatctacaatacatttt

SEQ ID NO: 4235 - DNA, 456 bp, Homo sapiens
cctcacactttcccatgaaaagggtgaatgtatataacctgagccctctccattcagagttgttctcccatctctgagcaatgggatgttctgttccgcttttatgatatccatcacatcttatcttgatctttgctcccagtggattgtacagtgatgacttttaagccccacggccctgaaataaaatccttccaagggcattggaagctcactccacctgaaccatggcttttcatgcttccaagtgtcagggccttgcccagatagacagggctgactctgctgccccaacctttcaaggaggaaaccagacacctgagacaggagcctgtatgcagcccagtgcagccttgcagaggacaaggctggaggcatttgtcatcactacagatatgcaactaaaatagacgtggagcaagagaaatgcattcccaccgaggccgcttttttagg

SEQ ID NO: 4236 - DNA, 408 bp, Homo sapiens
  unsure (16): n=A,T,C or G
ccagaggggccgtaanactggtacaagtttacaccataagaggcgacgtggtcagccacaatgtcttcacctccacaggggctcatcacggtggtcagggcaagggtccccagcatcagagctttgtttaggatcatcctcttcccaaggcagtcttagcagttgctgttctgagttgtagagcaattgtgaggacctcgagacaaggcaatctgaagacacccaaaccaaaccctgccaagtcaggttttggctaattagaaaaatcccctatgatgacacctcagttactagttgaagagtttgtattaagagccctggaaggagacagggcaatccccttgttgtgatgcagcctccactcagagtggacttgaggaaaatgttctagggatctctgctggtggt

SEQ ID NO: 4237 - DNA, 558 bp, Homo sapiens
aaaacataattcttgaaaggtatatgtacaggtatatatgaactcaaagcatgagaaatacaaagtatcaaataaaataaaaagagacagagagagtgatatttaccctccctaagtagaaaagtataaagctgtacctacctgataggaaataaccaacaaagagaggttttgccctccaaatggtatcatgttggggctctgtagcttttctttgcctttttttttgtcaaaaataatggaatggagaggctggaaaattgagaagagcagaaagagaaaattctcgtaggtctattgaaaagaaagttgaataaggagtgatttcaagagctaaggctcacacagcaagcagctaagagggactgcaaaggcttttgacaccaaggtggcctcaggtgaagagcaagtcccatatggatcccactgtcactggagtctctgcatacagtttcggttggaataaactgggaaagaaaaatgttagggatgcatagggaaagtgctaagaggaagaaaggagtgaggaaagctcaggctggctgtccaggcagacct

SEQ ID NO: 4238 - DNA, 370 bp, Homo sapiens
  unsure (47): n=A,T,C or G
  unsure (52): n=A,T,C or G
  unsure (62): n=A,T,C or G
  unsure (119): n=A,T,C or G
  unsure (141): n=A,T,C or G
  unsure (146): n=A,T,C or G
  unsure (151): n=A,T,C or G
  unsure (175): n=A,T,C or G
  unsure (176): n=A,T,C or G
  unsure (197): n=A,T,C or G
  unsure (234): n=A,T,C or G
  unsure (243): n=A,T,C or G
  unsure (245): n=A,T,C or G
  unsure (247): n=A,T,C or G
  unsure (257): n=A,T,C or G
  unsure (262): n=A,T,C or G
  unsure (266): n=A,T,C or G
  unsure (276): n=A,T,C or G
  unsure (284): n=A,T,C or G
  unsure (286): n=A,T,C or G
  unsure (326): n=A,T,C or G
  unsure (346): n=A,T,C or G
aaactatgaaggttgagaacacctgaagttttagtgttgaaatgaancatanacatactgcnaagttaattcaacatatcatttatttgaaacattattgtggtgttcatggtgattanaccatattgttaaacaatctanatgcnttttnatagttaaattgagcatttctgcnnaaatagaaagtcaaatgcctnatgtcttcacttataagtgggagctaaataatgtgtncacattganananattgtggagnaatanactntggagactcngaaaggtngnagggtgggattgagagatgagaaattgcctaatggctacnatgtacactatttgggtgangcttacgctaaaagcccaaacttc

SEQ ID NO: 4239 - DNA, 301 bp, Homo sapiens
  unsure (121): n=A,T,C or G
  unsure (126): n=A,T,C or G
  unsure (174): n=A,T,C or G
  unsure (264): n=A,T,C or G
  unsure (267): n=A,T,C or G
  unsure (291): n=A,T,C or G
ctggggatggtccccaaggttctggggaagcagctagaactggtgactctggagatgaggctgaaggtggccccaatgtttccgggaaatgagactgcttctggggtttgggattactaanagtancctttactgactcaggagatacaggggcaggtttctgtggttctgganaaggaacaggggcaagtttctgagactcacaaacagggactgattttgggggttcaggagaagaaacagaggcaggttttgaaggctcanganaaggaagaggtgtctgtagctcangagaaacaac

SEQ ID NO: 4240 - DNA, 367 bp, Homo sapiens
aaatggagctaagtccaagaaagtacttgaagctctcttccagcgagcttaattgcgtaatccctgttgtcctccagggtaagctgacacgtctacataactggttttccacaggcatcttcagttattgcttgtcgggtggactgttttggatttaaccatgtaatccatgggaccaattgagagtcagctacttttataggcatcaaagtattctcagacacctttaatatctttatgaaaacttaatttttggccttttatcaatatgtcataacagcattctgaagtcagacattgttaaattgagctattaaactaatgagttttatgtaagttatatggtcttaatttggtacttgtaaat

SEQ ID NO: 4241 - DNA, 373 bp, Homo sapiens
tttctagaatttggtgcaggaatatgtgttcatatccaggcaaacgggtgtgtttttatcttcagacaatgaaaccttctcctctggggctttgttgccaggaagattagaactaaatttatttttttcatttctgtcatgaaatcattccagatacctcttttcttctttccaaatggttttcacatgtgtttgaaatatttgtactttgaattgtcggattttccatgtcctcctttctcctttgtgcccagcctgagtcagcaccatcccgcattcagaacctcccagtgaaagggcagccttcattttgagaaggtggaaggtgttagggtttgggagacagctcatccaatctcccaagtctcatggt

SEQ ID NO: 4242 - DNA, 206 bp, Homo sapiens
aaatccagcagccaagtggtttcaacagactttctacttgaggtgaaaataataacactacaaacatatggcagagcttcgtacaagcatttcactcacagaggagtttatggtttcgaggatgtaggaaaagattttccaagtgtgaaaactaaatatatacaaaagcaatacattttgttattagttaaataaaatgtgtcttt

SEQ ID NO: 4243 - DNA, 368 bp, Homo sapiens
  unsure (156): n=A,T,C or G
ccatgtggtgagttcagggcccaaatcaagtagtaccagcaatcagggaactcctatctgttttgaatggattcacaccagccacaagcctggaaagatggtgtcacaatctacagtcaggcaggattctcctgtggagccctgggaagggatcancgatcactctggcattattgatggttcgcccagactcctgaacactgaccatcctccttgccaattagacatcaggctcatgaggcacaaagctgtctggattaacccccaggatgtgcagcaacagccgcaggacttgcaatctcaggtgccagcagcagggaacagtgggacccattttgtgacagatgctgcctctccctcaggccctt

SEQ ID NO: 4244 - DNA, 190 bp, Homo sapiens
  unsure (18): n=A,T,C or G
  unsure (20): n=A,T,C or G
  unsure (80): n=A,T,C or G
  unsure (85): n=A,T,C or G
  unsure (99): n=A,T,C or G
  unsure (100): n=A,T,C or G
  unsure (103): n=A,T,C or G
  unsure (110): n=A,T,C or G
  unsure (124): n=A,T,C or G
  unsure (127): n=A,T,C or G
  unsure (132): n=A,T,C or G
  unsure (145): n=A,T,C or G
  unsure (152): n=A,T,C or G
cctctattcaaaggcaananactctgggaaatgtaatcttcctctactggaaaaggaaaatgacactgtatgttctatancattnacttattataaggnnagncattganaacaatgaggttgnttngatanatcaaaaagaatnagaaatnccgctgggcgtggtggctcacgcctgtaatcgcaaaac

SEQ ID NO: 4245 - DNA, 373 bp, Homo sapiens
gcaagctggaactctttctgcaaatgactaagatagaaaactgccaaggacaaatgaggagtagttagattttgaaaatattaatcatagaatagttgttgtatgctaagtcactgacccatattatgtacagcatttctgatctttactttgcaagattagtgatactatcccaatacactgctggagaaatcagaatttggagaaataagttgtccaaggcaagaagatagtaaattataagtacaagtgtaatatggacagtatctaacttgaaaagatttcaggcgaaaagaatctggggtttgccagtcagttgctcaaaaggtcaatgaaaaccaaatagtgaagctatcagagaagctaataaatt

SEQ ID NO: 4246 - DNA, 375 bp, Homo sapiens
aaaaagctggatattgtggaagatagtatttatatagcttatggacccaatgggaaagcaactggcgaaggctttgtagagttcagaaatgaggctgactataaggctgctctgtgtcgtcataaacagtacatgggcaatcgctttattcaagttcatccaattactaagaaaggtatgctagaaaagatagatatgattcgaaaaagactgcagaacttcagctatgaccagagggaaatgatactaaatccagagggggatgtcaactctgccaaagtctgtgcccacataacaaatattccattcagcattacaaagatggatgttcttcagttcctagaaggaatcccagtggatgaaaatgctgtacat

SEQ ID NO: 4247 - DNA, 340 bp, Homo sapiens
  unsure (31): n=A,T,C or G
  unsure (76): n=A,T,C or G
  unsure (145): n=A,T,C or G
  unsure (315): n=A,T,C or G
  unsure (318): n=A,T,C or G
  unsure (324): n=A,T,C or G
ctgccccaaccactttgagggccttttccgntacaagagtatccctgtggaggacaaccagatggtggagatcagngcctggttccaggaggccataggcttcattggtaagggggcacctctgcccagaaatcccgaggggctncagaggagaggactgggggcacctgtctcctgggctgtgcacattccgtctgacaccactcccccatctcccttgcagactgggtgaagaacagcggaggccgggtgctggtgcactgccaggcgggtatctcgcgctctgccaccatctgtctggcatacctcatgcanagncgccgngtgcggctggacgagg

SEQ ID NO: 4248 - DNA, 178 bp, Homo sapiens
  unsure (12): n=A,T,C or G
  unsure (26): n=A,T,C or G
  unsure (106): n=A,T,C or G
  unsure (118): n=A,T,C or G
aaaattaagtanaacaaaaaacccancgcacctgttagagtcgtcactctctattgtcatggggatcaattttcattaaacttgaagcagtcgtggctttggcagngttttggttcanacacctgttcacagaaaaagcatgatgggaaaatatttcctgacttgagtgttccttttt

SEQ ID NO: 4249 - DNA, 262 bp, Homo sapiens
ctggcttgcctgctggcctgcttcctggagataggatgctcagacccaccgctgctcttcaggggtcgtggaaggaattaatgcacttccttctgtcccccaatctccgtccctttacgtgtctctggagctgagcaggtattctttttctttcttcatctcagtagagcttttacttttatccagcatttcttagctcggttggcaaactggatatttatgcacctgcatttcacaatccatctccaccgattattcctgg

SEQ ID NO: 4250 - DNA, 176 bp, Homo sapiens
  unsure (12): n=A,T,C or G
  unsure (29): n=A,T,C or G
  unsure (42): n=A,T,C or G
  unsure (72): n=A,T,C or G
  unsure (77): n=A,T,C or G
  unsure (83): n=A,T,C or G
  unsure (86): n=A,T,C or G
  unsure (95): n=A,T,C or G
  unsure (114): n=A,T,C or G
  unsure (132): n=A,T,C or G
  unsure (136): n=A,T,C or G
  unsure (168): n=A,T,C or G
aaatgggactgnaaatatgttttggtttntaagctatattancaaaatttatttttcaaaaatgcccactgngatgngaatgncanaatatattnttaagtgctttataactanttgtaaactttttttcanaagncttattttatacttgtgaaactgaacacaatnttgggaca

SEQ ID NO: 4251 - DNA, 373 bp, Homo sapiens
cctcaagtttcgggctgaagccaacagagtcccaaccagtgggcgtatcccaagatgaagaattttggaatacatacgagggtctgcaagaacagctcagcaggaatactcataaagagactgagcctgtgtatgagagggctgtgcctactcaacagattctagcttttcctgagcaaacaaacaccaaagactggacagtgacacctgagcacgtcttgcctgagtcccagcattgtttgtgctccccaaacctaaagtgatctcctgtctagagcaaggggaagagccatgggttcaagtatccccggagtttagggatagtgccggaaaatctcctacagggttaaagctcaaaaacgacactgaaaat

SEQ ID NO: 4252 - DNA, 302 bp, Homo sapiens
aaaaacaattcaacacacgtactgaaagttgctggtatacagtggtgagcaaataatagcagaccttcaggagcttatattccaaggacagggatggacattgataggagaatcacacaaacaaaacgcaaagtcacatcaggaagttctgggcagcaccttgcagaggtggtggttggatggaccatctgtagggagtgaagcaggagttacctgagtgattcggggaggaggggcccttcacatgtgcaaaggcccagcgcaggaagtgacgggagaggaaggccggggccaaactgcct

SEQ ID NO: 4253 - DNA, 376 bp, Homo sapiens
ccaaaccagactcttctctggtttgttcttcagaccacgaggtggaaccatctcttcaaaggagccctgccaccatcaccaaagctcacaccagaaaaaaccgccatttacacaacaaactgaacctgaaaaaggaacggaacatggtgcttccgccgtgaacaaaatcagcaagtgaatccgttttcctttcccgggctgttcgaaaaagattcggctagagaaaagggggcactgtgggcagcccgtaggggatggcctggagctgtggggcccgggctgagccctccctgccttttaactgcaggatgtaaactctatggaaatgtatagaacttcagtttctcccaaccctccacaacctcaactcttgaga

SEQ ID NO: 4254 - DNA, 365 bp, Homo sapiens
  unsure (10): n=A,T,C or G
  unsure (34): n=A,T,C or G
  unsure (134): n=A,T,C or G
  unsure (142): n=A,T,C or G
  unsure (210): n=A,T,C or G
  unsure (217): n=A,T,C or G
  unsure (222): n=A,T,C or G
  unsure (301): n=A,T,C or G
aaagaggttntttatacttttgtatttgaatagntatgtttcactgatgctgagccagtttgtgtgtgtgtgcatatatgtgaactgtaactgacaagatgaattactcagtttctctttctctaaagcttgtntgatgaanctggttggtcctttcagtgaacaaaaatatgaccccaaatctgtttgctctggcttttatttcttcangaagcanacttncacttaaatgccattttgtgattgtgtcaatcatacacattttatttacttcagagtttgaatagagagtacacatttnttctgcagatttatttcatgatgagtttgagttgcttagcagggcgtgtgggtcccgttgaagt

SEQ ID NO: 4255 - DNA, 376 bp, Homo sapiens
aaagccagtgctctaagacctcagcttttatctcagaaccccatgggttccagaccaagagtacaggaaatcaaattgttgtcctgtctgtctatagcttggaacagggagctttgattactgactccggttccacacactgtaagatcaaaaaaccatctccacatttgaaagagatgcaaggtgtattcatagggatggtggctcaacaaatcaagcaaactggaatcaaggggagggggaagggaatgaaatggaaagggaggctgattcccttcccctgacttaccactaatttactaggctacctactttcatgagtaacctctcacagctacccagcacatgccacaatcctatgctcttgccttctttt

SEQ ID NO: 4256 - DNA, 373 bp, Homo sapiens
aaaaattcttttaatagatcatgttattggcagtatttatataaaaaccatggatttagaaaggtatatttagctttattataatagatacgttactattttggaaatatatatattttcacacctgtagtactcttccccatttcctctgacactcatgcagaatgagatcaggcatatttgtggttgacatactctagatagcttttccaacaaatctttgaaaagcaatcttggaaaggaattcattaactaaatggggtaaaaggtttctttttctttgagagttaagtccttcctcaaaaaattttcttatgctccataaaattgaggtagaatattttcattattcttgcagctaagcaagacagcc

SEQ ID NO: 4257 - DNA, 378 bp, Homo sapiens
  unsure (157): n=A,T,C or G
  unsure (163): n=A,T,C or G
  unsure (289): n=A,T,C or G
atatggtggaggaaactatggtccaggaggcagtggaggaagtgggggttatggtgggaggagccgatactgagcttcttcctatttgccatgggcttcactgtataaataggagaggatgagagcccagaggtaacagaacagcttcaggttatcnaaatancaatgttaaggaaactcttatctcagtcatgcataaatatgcagtgatatggcagaagacaccagagcagatgcagagagccattttgtgaatggattggattatttaataacattaccttactgnggaggaaggattgtaaaaaaaaatgcctttgagacagtttcttagctttttaattgttgtttctttctagtggtctttgtaagagtgta

SEQ ID NO: 4258 - DNA, 372 bp, Homo sapiens
gatggagctcctattgtctatcatcactggctgcccagaatatttgtacaagtaaactgcactgccctgctgcccctgagcacacggacccgtccgaaccgcggggcagtgtgtcctgctgctccctgctgcggggactgtcctcagggtggtcctcacctctgcttccggcccctgtgtgcaaccctaacaaggccatcttcacggtggatgccaagaccacagagattctgatgtggtggaggccctcagcgaggagcacatggaggccgacggccacgctgcggtggtgtttggcacggtggtggacatcatcagccgtagtggggagaagattccagtgtctgtgtggatgaagaggatgcggcagga

SEQ ID NO: 4259 - DNA, 372 bp, Homo sapiens
  unsure (66): n=A,T,C or G
  unsure (91): n=A,T,C or G
  unsure (106): n=A,T,C or G
  unsure (149): n=A,T,C or G
  unsure (215): n=A,T,C or G
  unsure (246): n=A,T,C or G
  unsure (277): n=A,T,C or G
  unsure (284): n=A,T,C or G
  unsure (333): n=A,T,C or G
  unsure (364): n=A,T,C or G
  unsure (366): n=A,T,C or G
cttttaggctaagttacaaaattggggaagaggagctcataggtatattttcctaaaaaacagtanagagttgatagcaatttggcagccnaatctttggctattntttagatttcttcctgaagtccaggctccaagaacaagatgtntggagaagatccacttctttctatacccacatgtgcaacccctgggtctccctgttgggggctgtngggtcccttctcatcatgtttgtgatacagngggtgtataccctggttaacatgggtgttgntgccatngtgtatttctacattggccgggccagtccagggcttcaccttggatcancctccaacttcagctttttccggtggatgangnctctct

SEQ ID NO: 4260 - DNA, 376 bp, Homo sapiens
aaaaatgattacccaccaataacaaaattggcaaagtatatcttgaaatatagcttatgctcagacaaaaaaagtactactagcagacttacattaataagtcacagttttgaacagaaacatgtaaatactccaaggttcaaagtaccacatttagaaaatgttttgaattaaaaaagacaaaataagagtaccatggtttttaatactgatgaagcaaagtgtatccctcaacttcaaggtggcaacttgcttcgactgcttatttacagttagggtttttaggacaaaagtaaatttctagggtaaaaaagtcttcaaagagttgcttgcccaaattccatttggctagcaggcaataaggaaacagcaatga

SEQ ID NO: 4261 - DNA, 374 bp, Homo sapiens
aaaattagtcccctttatgcattttactctacatgtgttatccttgcaaagaaaaagactgacatctttgagagcaagagtttttgtcttattcacctctgtataatttccaacatcgtgctttgcacattggacattcaaaaaatgttatacaagattgactgcatcaatactggagtgttgtgtgagggttaggtgctgaggctgagaagtgtatgagggagacctgagattaaacctgccacataaagtggagagaagtagcaaggtcagggctatgaaataatcccaaaaactttagaatttctacataatacagttgacactactattctcaatagagctgctttcagtctcaaagggctgtggtatgt

SEQ ID NO: 4262 - DNA, 371 bp, Homo sapiens
ctgaaggtctgtgcgttctttctctattaggattatttcatccttcaacttggaaacaatcttcttgtcaggttttggtgcattttgaatagaatttagagcttgccttttatattcaagtttctcatttagttctcgcagtttgtttacagcaaaactggcttgttcattgatctgattggtaccatcatccacggcttcctcaccagcctcatctcttgggcccatctcatccttgttggaaatcatctgtgaggcatgtttttcttcctcttttatcaacaatttctcatacaggtcactgacaataaatgaagggtgatacctatcctttagggtctcataaacatcttcctggattttgtagaata

SEQ ID NO: 4263 - DNA, 370 bp, Homo sapiens
  unsure (56): n=A,T,C or G
  unsure (57): n=A,T,C or G
  unsure (151): n=A,T,C or G
  unsure (162): n=A,T,C or G
  unsure (239): n=A,T,C or G
ccaacatggcgaaacacctgtctctactaaaaatacaaaaattaggccgggcgcannggctcacacctgtaatcccaacactttgggaggccgacccagatgggtggatcacctgaggtcaggagtttgagaccagccttgacaacatggngaaaccccatntctggtagaaatataaaaaattaaccgggcatggtggtggacgcctgtagtcccagctacttgggaggctgaggcanaataatcgcttgaacccaggaggcagaggttgcagtaagccaagatcgtgcctctgcactccaacctgggtgatggagcaagactccatctccaaaaaaataaaaaatacaaaaattagccaggcatggta

SEQ ID NO: 4264 - DNA, 129 bp, Homo sapiens
  unsure (17): n=A,T,C or G
  unsure (24): n=A,T,C or G
  unsure (26): n=A,T,C or G
  unsure (35): n=A,T,C or G
  unsure (53): n=A,T,C or G
  unsure (60): n=A,T,C or G
  unsure (63): n=A,T,C or G
  unsure (95): n=A,T,C or G
  unsure (117): n=A,T,C or G
  unsure (120): n=A,T,C or G
ctgtggatgaacaccgngaacctnanttattgctngatattaaagaagaaatngaagatnaanaaaagacaattgaagattatattgataaaaanatgaatgatgctgattccactncanttgaagcta

SEQ ID NO: 4265 - DNA, 375 bp, Homo sapiens
  unsure (121): n=A,T,C or G
  unsure (294): n=A,T,C or G
  unsure (305): n=A,T,C or G
  unsure (327): n=A,T,C or G
  unsure (341): n=A,T,C or G
  unsure (348): n=A,T,C or G
ctggctcgatagtcgtaaatgaagagtgtgtccgaaaagactttgaatccagtatgaatgtagtacaggaaattaaatttaagtctaggatcagagggactgaagactgggctcctcctanatttcaaatcatatttaatattcatccaccactcaagagggaccttgtggtggcagcccagaattttttctgtgccggctgtggaactccagtagagcctaagtttgtgaagcggctccggtactgcgaatacctagggaagtatttctgtgactgctgccactcatatgcanagtcgtgcatncctgcccgaatcctgatgatgngggacttcaagaantactacntcagcaatttctccaaacaaacctgcc

SEQ ID NO: 4266 - DNA, 374 bp, Homo sapiens
tttgcttcttatgtctacaggaaaaagagacctgggcttagagtctgctgctgggaacggatgggatgtacatctctggctctcagagctggctcaccggcctcttccttttttcctccacatccagggcaagctggcctcattttttctgtctagggtggatgccttgagccctcagctccaacaggtaaagggcagggagggagagggagagcccggggatctgagcctggattgtctcttgctgctcctcctctagcttttctgtcctgccttcatatgcccatctgtgtccttcggcctcattgtcccatctcaggtttccctcagagctctctctgatctccatctcttttgggtgtcagtggggctgg

SEQ ID NO: 4267 - DNA, 374 bp, Homo sapiens
ctgggtctctgtccacccctctagggaggcaggactgagggaggctgggcgccccgtccctcctgcacttgctttccttcagtagggccctggcctcagcacaggtaacttcccccctcatttcagctcccagaggtctcttggttagtgcacttgaacccagccacccccaacccagaagctccaaaaagtgccaatgcctgggacccaccctgcagatactgttgtagttggtctgaggcacagcctggacttggggtttttttaaggttctgcatggggttctacctgctgctgtcacctggtctctgcagctctgttccaaagctgcagcctccaggaagccaccctgacttccccccacctaccttccc

SEQ ID NO: 4268 - DNA, 375 bp, Homo sapiens
  unsure (115): n=A,T,C or G
  unsure (124): n=A,T,C or G
  unsure (151): n=A,T,C or G
  unsure (158): n=A,T,C or G
aaatttagattacatttgagtgtgtaatgtagttgagcaaagtcattacgtttataaaatgtggcacattactatgggatagatgtttaatgtataaagaaataatatactcctntaagagtanttaaaaggcattacccaagttacctgnactccanactgagtattacctcatcaatgagcattttagtttattttttcatactttgtaaagctgttttgctaatctagagaaaaggccatacatattttgatttctctattaactgatgtgattacttcaattaaagtaatgtttataaaccacagtcattctttatatctaagttcccttgacccttttatacttataatttctaaggcggataaaagaga

SEQ ID NO: 4269 - DNA, 373 bp, Homo sapiens
aaatattgttaaagaattctcaaaggagtaaggttaatgagcaagattaaaatggcagcagcagatccaattgcgttttctttttcataagcctaaaagcatcgcggtgtgtttcagagctgcttcctctacaaattctgcatccacattgtcatgtccttcaaaaggatacagggcttgattggaggactctatatctgtcagaatttcaatgaagtagttcagaggcagaaattctacactgaacgatgacttgttaatcatagaattccgaggctgtttcttatagttctgaagcagtcgcgtcacgtggttccgcgaaatgatgttagaactcataggatgatcccaaagtctacaaatcttctgccca

SEQ ID NO: 4270 - DNA, 376 bp, Homo sapiens
ccaggctggttttgaactcatgaccttaagcggtctgcctgccttagcctcccaaaatgctgggattacaggcatgagctactatgcctggcctggtttgattttagagatagacaggctctgtgttgccctggctacagtgcagtggctgttcacagctgtgatcatggcacaccgcagccccaaactcaaggtgggctcaagctgtcttcctatctcagccttcctggtagctaggaccacaggcacactccaccacacccagctagttctaggtgttttgagtaagttagacacttggtgagctttgtgtataaaagactcagtgacctgcttagattaaaactagggcagtggaatgaaaaattctcatggg

SEQ ID NO: 4271 - DNA, 324 bp, Homo sapiens
ccaaactttacaggaagaatctcaatggcatattggcagatgaagctgggctgggtaaaacagtgcagatcattgctttttttgcccacctagcttgtaacgaaggtaattggggcccccatcttgttgttgtgagaagttgtaacatactcaagtgggagcttgaattgaaacgttggtgtcccggactcaaaatcctctcatatattggcagccacagagaactcaaagcaaagagacaggagtgggccgaacccaacagcttccacgtctgcatcacgtcctacactcagttcttccggggcctcaccgccttcacacgag

SEQ ID NO: 4272 - DNA, 372 bp, Homo sapiens
  unsure (237): n=A,T,C or G
  unsure (264): n=A,T,C or G
  unsure (321): n=A,T,C or G
tagggctgagatgttgggagccatcaatcaggaaagccgggttagtaaagcagttgaagtgatgattcagcacgtagaaaacttgaagaggatgtatgccaaagagcacgctgaattagaagaactgaaacaggttcttctgcagaatgaaaggtctttcaatcctcttgaagatgatgatgactgccaaattaaaaaacgttcagcttctctaaactccaagccatcttctctacnaagagtgactattgcctctttacccanaaatattggaaatgcaggaatggtggctgggatggaaaataatgatcgattcagtanaaggtcaagcagttggcgtattttggggtcaaagcagagtgaacaccgtcc

SEQ ID NO: 4273 - DNA, 359 bp, Homo sapiens
  unsure (306): n=A,T,C or G
  unsure (315): n=A,T,C or G
ctgtccccggcctgcagctctgggatgaggacagggcgacagggacttccgacctcctctcatagaaaaacgtgggtgctgcaccacccaaagtgaaaggctgaatttggaagtcccttttatcatacacattcagattgcctgtggaaattcagcaaaaatatgacatgcatttccattctatctgccttttaccttctcaaccttaaatcgactttcagttctgtgtcatgttttctcttctttttagaagacttctaatgacttgggaaaatacttttgaaggatgtgaaatggtgtttttgngtctgctgnttgttgagtatcggtattttcagccttggttccctgtggaggag

SEQ ID NO: 4274 - DNA, 364 bp, Homo sapiens
  unsure (327): n=A,T,C or G
ccacccaagaatcatagtagctcttcagttagctatcttgcaatctctgatataattctactatgtgaatagagtgaattccaattcttcatcaaaaagtgctggtggaggttgtcaggtgtgttccagtatagattcccaatccaacggccggcagatgggagagcagcagagatggaaattctgctcagaataagccctctttctcataatacttgtatttctcatgctgagagtagctgtgcacttttggtgtttagagaagaacttctttggaagaatattttctggtcaatttgaccaatgttacatgtaatctgaatttgnctttaagattctttcaacctcttttcttctctcaata

SEQ ID NO: 4275 - DNA, 253 bp, Homo sapiens
cctgggatgcagggagaaaggctgaccacaagttgagacaagatacagaaacaaacaaaaacagcagaaagtccgatcgatggtgtaagtgttgtgttcactgcttagggtgcaggtgagcttgatcgaggctcccagtaaggcagatgtagacgggggctgagtcagcacaggcagagcacagagacctgtggagaaaatgaagggcagtaggtagaaggagacccaggccatggttggagggacttccaag

SEQ ID NO: 4276 - DNA, 375 bp, Homo sapiens
aaaatacatttatttaactcacctgagttaataagctctgaatttcatgaaaattcacaaatgtgaatggcgatcacttaccttcaaacagtcttgtctttcatacctggtcctatgtgtttccactcatccattgtttcagtggtgaacgttcagtggtgaacgctctactatccaggaactgaaccacaacttctcattcaaggagagtggaagaaactagatgcatacttgccctggacatcaggctgtccacctaagatccacatccacaaaatcaggaagtttcccacttctgtgttgccttctccaggagttggtcccatagggtgacactgcatccacagaagcatcaaaagcacctgtgtccctgcc

SEQ ID NO: 4277 - DNA, 308 bp, Homo sapiens
  unsure (9): n=A,T,C or G
  unsure (26): n=A,T,C or G
  unsure (41): n=A,T,C or G
  unsure (45): n=A,T,C or G
  unsure (64): n=A,T,C or G
  unsure (69): n=A,T,C or G
  unsure (84): n=A,T,C or G
  unsure (98): n=A,T,C or G
  unsure (106): n=A,T,C or G
  unsure (167): n=A,T,C or G
  unsure (170): n=A,T,C or G
  unsure (214): n=A,T,C or G
  unsure (218): n=A,T,C or G
  unsure (226): n=A,T,C or G
  unsure (237): n=A,T,C or G
  unsure (267): n=A,T,C or G
gagatgcanaataatgttgacaatantaagttgctgaatcntcangctgcagactggtgatggntaaantgaattgtgtcccanatccactgccagtnaatcttantgagaccccttcttctaaactggaagtcgcataaattaggacattaggggctttgcctggnttntgttgatgccaggccaaccaccgatctatattctgagaggcccnacancttattgnaattgtatctncgacagatgcagacagggtggaaggagatngggtcatctggatgtcacatttggcacctgggagccagagc

SEQ ID NO: 4278 - DNA, 105 bp, Homo sapiens
aaacaaagaggtgacctaaatattttacattttgtaaatcctttggtacaggagataagtgggcacaagtgaggaatgatgtttgtacagcagtgatagtaatgg

SEQ ID NO: 4279 - DNA, 299 bp, Homo sapiens
  unsure (227): n=A,T,C or G
ctgtgagatggagaactgcagcctctgccgctgtggcagtgagaccgtgcgagcctcatccactctgcttttcacactctcctaccctgatggtagcaaaagtggtatacccttcagctcagttgggaaggctccccaaaatgtcctgtaatatcagggagagggtgctggggactaactgtgggtagaggggagaaccaggagtatagcatctaattttccctcanataaaactgggaagaactatgactttgctcaggtgctgaagcgaagcatctgcctggaccagaatacacagg

SEQ ID NO: 4280 - DNA, 337 bp, Homo sapiens
  unsure (82): n=A,T,C or G
  unsure (126): n=A,T,C or G
  unsure (173): n=A,T,C or G
  unsure (246): n=A,T,C or G
ctcttcttcagcacatgccaaagctgttcctcacggcctgtgagacaagagcatcttggatgtaggacaatggaagagttanatgccttattggaggaactggaacgctccacccttcaggacagngatgaatattccaacccagctcctcctcccctggatcagcattccanaaaggagactaaccttgatgagacttcggagatcctttctattcaggataacacaagtcccttgccggcgcanctcgtgtatactatcaatatccaggagctcaatgtctacagtgaagcccaagagccaaaggaatcaccaccaccttctaaaacgtcagcag

SEQ ID NO: 4281 - DNA, 356 bp, Homo sapiens
aaacagcaaaagaccaagaaataaaatttgagtcaattatttttcaaaatattctcaatgcacattatccttaattcccttattatagtgaaacatacaaatacagaaaaataccccatttaacaaatactagtgttaaatggttatttggcttaaaatctgagttaagaaaatcctttttagcaacctacatacagataagtagcaaactttattatattaaacaaattcattctgctaaaacatgtaaagaatttcatccatcatgtattctgatcccagtacaagtgtttattctcttaccgtcacgattcttatatgaaggaccaactcaaagagttgtcctagatataacc

SEQ ID NO: 4282 - DNA, 349 bp, Homo sapiens
  unsure (302): n=A,T,C or G
  unsure (325): n=A,T,C or G
ccagggggaggaagcagtgcagaagtctcataagccacccgctgccccgacgagtcggaactataccgagatccgggagaagctccgctcgaggctgaccaggcggaaagaggagctgcccatgaaggggggcaccctgggcgggatccctggggagcccgccgtggaccaccgagatgtggatgagctgctggaattcatcaacagcacggagcccaaagtccccaacagcgccagggccgccaagcgggcccggcacaagctgaaaaagaaggaaaaggagaaggcccagttggcagcanaagctctaaagcaggcaaatcgngtttctggaagccgggagccaagg

SEQ ID NO: 4283 - DNA, 328 bp, Homo sapiens
  unsure (80): n=A,T,C or G
  unsure (100): n=A,T,C or G
  unsure (108): n=A,T,C or G
  unsure (114): n=A,T,C or G
  unsure (146): n=A,T,C or G
  unsure (150): n=A,T,C or G
  unsure (222): n=A,T,C or G
  unsure (238): n=A,T,C or G
  unsure (266): n=A,T,C or G
  unsure (284): n=A,T,C or G
ccaggactgcgatttctagcgcgtgtcttcacattctatctctggggaagcaagacaaacaggctctacccatttccctncttttgtctccacaagccancacctaanatcctntgaatttgttcccatccaatcctgcaaacttncaanaagggcagtagataacttttcaaaagaaaaagaaattgcataaggtccctacataatactgaggctgaaacnagaaggggctgtccantgtaaaagcaaggcacttggggcagganccaggcaggtggcctgancagggtccctctcagtgagtcaacagtttgaggcgcgtaaacca

SEQ ID NO: 4284 - DNA, 371 bp, Homo sapiens
aaataacatgttaaatttgatgaattgatgacaaattgttttttggtaaactggtctttcagttgcttgtgcttgggtaagctgccctgcttctcctggtgagtggggtttatagtgaagacgccaggctacccagtggcactgaaagaggtggcaaaaccaattgtttctctcttctcactgcctgggccctgttgctggtgaattcaagttgcctggagactgtctcactggggatctggtgttttcctacaataaaacttctcactccagggtcctctcccatccgaggcatgcgtctagcatatctctaacagtctgtgcatttgtgatttatgcgatttcaaccaaaccttaaggctcttgggcag

SEQ ID NO: 4285 - DNA, 368 bp, Homo sapiens
  unsure (161): n=A,T,C or G
  unsure (246): n=A,T,C or G
  unsure (288): n=A,T,C or G
  unsure (295): n=A,T,C or G
  unsure (303): n=A,T,C or G
  unsure (306): n=A,T,C or G
  unsure (313): n=A,T,C or G
  unsure (331): n=A,T,C or G
  unsure (340): n=A,T,C or G
ctgagggcgacagaggatctaggctaacaggagagactccaggagtgggggcagatcccaaggcagcctcctgctccccagtggtgggtgccccagctctacctggtgtggcagggctgaggctccatgtgcatctgtgagcatgcgtgtgacaggtgcanagacgggggactggagggagacttttatacgttttgtacctttgtaaccagagagatgcttatgttatttttcagcttttctgtntcttggggggtttgaggctgggctgggagggggagggagatngaggganagatgcanttngaccccntttgggtcctgagcaaancctatgctnatatctctctccttcctggggtggactc

SEQ ID NO: 4286 - DNA, 363 bp, Homo sapiens
  unsure (6): n=A,T,C or G
  unsure (17): n=A,T,C or G
  unsure (28): n=A,T,C or G
  unsure (36): n=A,T,C or G
  unsure (39): n=A,T,C or G
  unsure (61): n=A,T,C or G
  unsure (65): n=A,T,C or G
  unsure (67): n=A,T,C or G
  unsure (78): n=A,T,C or G
  unsure (79): n=A,T,C or G
  unsure (137): n=A,T,C or G
  unsure (148): n=A,T,C or G
  unsure (152): n=A,T,C or G
  unsure (193): n=A,T,C or G
  unsure (247): n=A,T,C or G
  unsure (268): n=A,T,C or G
  unsure (276): n=A,T,C or G
  unsure (301): n=A,T,C or G
  unsure (309): n=A,T,C or G
  unsure (349): n=A,T,C or G
gagcanagatcgtgccnctgcactccancctgggcnacngagcgagactccgtctcaaaanaaananaaaaaaagagnncaagaccagcctgaacaacatggtgaaaccctgtctctactaaaaatacaaaaattanccaggcgcggnggcncgcgcttataatcccagctactcaggaggctgaggcagganaattgcttgaacccaggaggcaaaggttgcagtgagttgagatcgcaccactgncctccagcttgggcgacagancgagactncatctaaaaaaaaaaaaaaaatacngaaattanctgcctgtagtcccaactactcaggaggctgaggcagganaatcacttgaaccc

SEQ ID NO: 4287 - DNA, 372 bp, Homo sapiens
  unsure (9): n=A,T,C or G
  unsure (17): n=A,T,C or G
  unsure (92): n=A,T,C or G
  unsure (103): n=A,T,C or G
  unsure (113): n=A,T,C or G
  unsure (116): n=A,T,C or G
  unsure (179): n=A,T,C or G
  unsure (199): n=A,T,C or G
  unsure (242): n=A,T,C or G
  unsure (306): n=A,T,C or G
  unsure (335): n=A,T,C or G
aaagatatnagcctgtntgactacaaaggaaaatatgttgtgttcttcttttaccctcttgacttcacctttgtgtgccccacggagatcanctgctttcagngatagggcanaanaatttaagaaactcaactgccaagtgattggtgcttctgtggattctcacttctgtcatctancatgggtcaatacacctaanaaacaaggaggactgggacccatgaacattcctttggtatcanacccgaagcgcaccattgctcaggattatggggtcttaaaggctgatgaaggcatctcgttcangggcctttttatcattgatgataagggtnttcttcggcagatcactgtaaatgacctccctgttgg

SEQ ID NO: 4288 - DNA, 140 bp, Homo sapiens
  unsure (11): n=A,T,C or G
  unsure (13): n=A,T,C or G
  unsure (20): n=A,T,C or G
  unsure (35): n=A,T,C or G
  unsure (104): n=A,T,C or G
ctacatctgananaagcatnttatagttctgcttntggaccagaccatcctgggtttttctctgttctgctgaagggttccctccacgtgtccatcacctcggngaactcttgggagacctgggaagatgctggcctcac

SEQ ID NO: 4289 - DNA, 370 bp, Homo sapiens
cctcttccctgatggccgcgtcttcatggaagtaggagagaagactgtaaaaagcgaaaggcagcagcctggtgtgctgatccggggccacacggaggaggagccgccccagcctgaggtcactctctgtcaactgaaagagtgccagccaggatatcttcctcttctctaaacactcgaggattgctgcacaaacgtggaaagcctttggcaggtctgtggtgctatttgaggtcagatgtgacgacagcaggcccatcaaggagaagaagaaaaggaaaaccaatagctcctctctctcgcagtccagcttctttagctgcttcctgatgttttcttccctgacttgttgaatcgcaaagtgcagtgc

SEQ ID NO: 4290 - DNA, 375 bp, Homo sapiens
aaactggatttgttttgttttgagtttcaagtcccttttcactacaacaccgtccaaaactatctacctatctcttcttttttatccatctgcccgctgtattttaatgtcaatcctaattcagacaaatccgcaacttcatgatactggtaatttataataattcgtgatcattgctgttttgaaggaaaagagatgataaattctcttacggtttcaatcaggtaatggattttgttttacatctagttaggagaagaaaagtaagtgaaggaatcctctgatcatattgatcactatagaagcaaaagccaaatcagttcccttcattatcagtatttctcatgctgtacacaataaatttgttagactgag

SEQ ID NO: 4291 - DNA, 364 bp, Homo sapiens
aaaagtaagaagccacggcaccgctcaaattcattcagtgatgaaagagagttctctggaccttccaccccgacggggacgctggagtttgaaggtggggaagtgtctctggaaggtgggaaagttaaagggaaacacgggaagctgaaattcggtacctttggtggattggggtcaaagagcaaaggtcattatgaggtgactgggagcgatgatgagacaggcaagttacaggggagtggggtgtccctggcctctaagaagtcccgactgtcctcctcttctagcaatgacagtgggaataaggttggcatccagcttcccgaggtggagctgtcagtttccacaaagaaagagtagcagg

SEQ ID NO: 4292 - DNA, 375 bp, Homo sapiens
  unsure (38): n=A,T,C or G
  unsure (56): n=A,T,C or G
  unsure (61): n=A,T,C or G
  unsure (114): n=A,T,C or G
  unsure (136): n=A,T,C or G
  unsure (195): n=A,T,C or G
  unsure (260): n=A,T,C or G
  unsure (366): n=A,T,C or G
aaaaatctatttatttatcaaaacagtattggcacagnaattctcatattatcatnaaatnataaaattgctactttctgtactcaattctttagaatcctagaaattgcaaangcattcaatttaacaatattgnaaataacaatacaaaagaaagaactctgcatatttatggaaacattgttgatggtacanttctactgaaactcatacacatttcactatttaatttacatatggtcttgttgaaaaaaaccagnatgttttacttttttcaatttccttatgctaaaatacatgtaattctaaaggatatctcttaggtgttataaaaaccaaggaaggtccaccaccaagtcaaagttngagtcaaag

SEQ ID NO: 4293 - DNA, 373 bp, Homo sapiens
  unsure (123): n=A,T,C or G
tgaagatgtgggaggaaaagattgctcaaatgcgatgggaactgatgatgaagacaaaagaacacaccagaaagctttatcagatgaatgatctgtgtattgaaaagaagaaacttgattctnggttgaatacactacagaatcagcagggcaatgccttccagggccctcgggaagcagatgttgtggcaagagaggaggtcactgaattgatccaactccaggcggaaaggatttcggccttaaaggaggagattgctcttttgcgtaggaaaggcggtcttatcctcccacccattcagtctccacgagagaaagagatacagcccgcagacctttgagtttgctattttctcaaacccatacaagattt

SEQ ID NO: 4294 - DNA, 372 bp, Homo sapiens
  unsure (84): n=A,T,C or G
  unsure (87): n=A,T,C or G
  unsure (132): n=A,T,C or G
  unsure (255): n=A,T,C or G
  unsure (314): n=A,T,C or G
ccaacgtggtgaaaccctgtctctactgaaaatacaaaaattagccaggtgtggtggccgacgcctgtaatcccagctactcangancctgaggcaggaggatcgcttgaacgtgggaggcagaggttgcantgaactgagatcacaccactgcactccagcctgagtgacaagagtgagactccgtctcaacaaaaaaagaaaaagttataatgttttggggacttaaagattactgaagaggggataaaagtnaacactgcttacaaatacctgaacatggagagcacagtcaacacattcatgtggacagnacatgaacggatgtattaatacattacacagcttcttctatctgacctattcctcttg

SEQ ID NO: 4295 - DNA, 369 bp, Homo sapiens
ccacgtagatgaacttgtactgcgcctccgtctgcaccatgcccgagcgctgcgcccgcaccatctggatggtcttctggatgtcaatgtcacagtccaggcccttggtggagatgttctccatgagcatgtcgatgacaatgatggtgcctgtgcggccgatgccggcgctgcagtgcacgatgatgggccctgcgtgaggcagactttcctgccgctggttgatctggtccaggaagctgaggacacccccaggctcactggggaccccatggtcgggccagctcaggtactggtaatgccagatctcccgaatcaggtctccattgtccagcggggagacctgtaaggtacggagtttgtattcgg

SEQ ID NO: 4296 - DNA, 373 bp, Homo sapiens
  unsure (147): n=A,T,C or G
  unsure (232): n=A,T,C or G
  unsure (267): n=A,T,C or G
  unsure (351): n=A,T,C or G
tttttttttttttttttttaagataaggaatgtgtgtttagctttaatgtctattaaataggttggaaaaacaggccaagtgtagggacctgactcctgcaaagggcctaccgcagccctctgcactcaagcagcagccccatccanaccaggagtgtgttctgttctcctggcaggcagggctgataggtgtaggatggcgtctgtttcctttgcagtgtgggctggtcanaggagaaacagcaacttcctgctccttctcactgngtcgttggctcaccatagaccacgtcctgcattccctctgattctctcatggggagagccctggaccttctggtggtgtcccanctgggtgggttcaaggctgcta

SEQ ID NO: 4297 - DNA, 372 bp, Homo sapiens
  unsure (266): n=A,T,C or G
  unsure (324): n=A,T,C or G
  unsure (368): n=A,T,C or G
ccagtcacgaacatgttgcaagggtttatgatatggtttgagttgaaggctgaggttttctgaacaaatccatatagtgaaatattgctgagtttcttgagagagacgcattccttccattatctgctgcactgtggtattatttccatgcttcaattcaacagaacgatatgacccatccattctgtatattcgaactttttcatatggtttgttaattgcttccttcaacaattttgcagcttcttcccagttgttttgtttgntttcttcacaaatatttaatggagatcttccttgttggtctgttatatgtctatccgnttctgggtggtttaggagaatctgtactatttcagcatgtcctnctcc

SEQ ID NO: 4298 - DNA, 351 bp, Homo sapiens
ccagcgccagggtgcaggacctgatcgggctcatctgctggcagtatacaagcgaaggacgggagccgaagctcaatgacaatgtcagtgcctactgcctgcatattgctgaggatgatggggaggtggacaccgatttccccccgctggattccaatgagcccattcataagtttggcttcagtactttggccctggttgaaaagtactcatctcctggtctgacatccaaagagtcactctttgttcgaataaatgctgctcatggattctcccttattcaggtggacaacacaaaggttaccatgaaggaaatcttactgaaggcagtgaagcgaagaaaaggatccc

SEQ ID NO: 4299 - DNA, 370 bp, Homo sapiens
gctctgcgttctgtagtggcgctgcttgggcccgtggcggattgtaagctgctggttttgcggctgggaagagcggcgagagggttcggcatttttcgtcgggatccccgcaaggatgagtgctgccagagagtctcacccgcatggggtgaagcgttcagcctccccagacgacgatctgggatctagcaattgggaggcagcagacttgggtaatgaagagagaaaacaaaagttcttgagacttatgggtgcaggaaaaaaagaacatactggtcgtcttgttataggagatcacaaatcaacatctcacttccgaaccggggaagaagacaagaaaattaatgaagaactggagtctcaatatcag

SEQ ID NO: 4300 - DNA, 348 bp, Homo sapiens
  unsure (137): n=A,T,C or G
ccttcagaagttaaacgtgatcacttgtgctgggacagccaatagaggagtctgagatgatcatttccaaggagttcttcacagaggaggtagctttggagctgggctttgaggttgggcagtatttgaaacagtanagacggagcaaagaacccctgggcagaggaaacagtaagtgcaaggcataaagtgaaggtggagggtgttaccgcggggtgcactggttgcattacctcctggtggggtcagtcattcgctttcttttcctcctcaggaccagggctctttgaagatgaagaatgcccacaagggaacacaggcagaagatcagataagccaaagtcacag

SEQ ID NO: 4301 - DNA, 271 bp, Homo sapiens
cctcccagagaaggctggtgaccaggtcccaggcgggcaagactcagccttggtggggcctgaggacagaggaggcccaggagcatcggggagagaggtggagggacaccgggagagccaggagcgtggacacagccagaactcatcacagaggctggcgtccagccccgggtcacgtgcagcaggaacaagcagccactctgggggcaccaggtggagaggcaagacgccaaagagggtgcccgtgttcttgcgaaagcggggctgctgg

SEQ ID NO: 4302 - DNA, 371 bp, Homo sapiens
cctggtcccggctctctaggtccagggacattaaaaagtcagagtcctctgtggggagaaaagtgggtgaggacttgataagccctagtagatacttgtaggcccagttcttatctgcagatgggtgaccctcaacagtcacagagttgttttcactgcccacaaattcacagttttccaggacacacaggggcacgttgtgcaggaagatatgggtgtttttgaaggtacagaacttcacttggcaagtacccgggccatggacctggatgtgcccgttctcaaagttgcagttgtcaaactggacgtgacctgatgttgtcttatacatgatgggtgagaaccaggctggcgtgaagacgaggttgcac

SEQ ID NO: 4303 - DNA, 366 bp, Homo sapiens
cttttgagtcagataaccatcttgaattataggtgattaattttaacctggaacaatagtgtgttcttccaaatgtcatttcttactgaatgaagctgcttgatttatttgcttttgcaggcaaaccctgaagaactgtaaccagttgcatttacaaaatcataataacttggtttacttataactgaaattattcactgggctgtgcttacttttttctttttagattttgtggtggatgcaacccgcaagggtaacaaaattcgttttgcaaatcattcggtaaatccaaactgctatgcaaaaggtaggtacctttgacgtgagaattggaactcccttttcagtcctgtgatgatggacttg

SEQ ID NO: 4304 - DNA, 372 bp, Homo sapiens
ctgaggcataccgtgggaaagtttcccacaggctgattttctgtccatctcaagaacctgtatgttctcttctttccctttccccaggtgccccctgctgaatttagaaaagtaacaatatatcaatcaatttaaaaagggtagaatattttggaatgacgggttgtagtgttttctagagtgctttagttttgacattttatcagtattttccagaggtaaataaattttggaaggattattacttctctgttggggccctagagcaatttagtcttttatggaaaagctgactatctgggatcatatgctcagtttgtatatttgagatctgagagatcacgttctgaagtcttctcatatttagtacac

SEQ ID NO: 4305 - DNA, 222 bp, Homo sapiens
atgaaacagaattctatttgggcaagagatgcgcttatgtatataaagcaaagaacaacacagtcactcctggcggcaaaccaaacaaaaccagagtcatctggggaaaagtaactcgggcccatggaaacagtggcatggttcgtgccaaattccgaagcaatcttcctgctaaggccattggacacagaatccgagtgatgctgtacccctcaaggattt

SEQ ID NO: 4306 - DNA, 194 bp, Homo sapiens
  unsure (29): n=A,T,C or G
  unsure (49): n=A,T,C or G
  unsure (66): n=A,T,C or G
  unsure (67): n=A,T,C or G
  unsure (70): n=A,T,C or G
  unsure (98): n=A,T,C or G
  unsure (118): n=A,T,C or G
  unsure (131): n=A,T,C or G
  unsure (169): n=A,T,C or G
aaatattaaaagttaggtactgtaagtgntcttaaaacctgtaaacttnattctgtgggctagtgnnagngggacaaaatattcctaatgaaaggaantaccaattagttgatttgtnggtggcattcccnttttgggaaagcaatgtaaggttatgtctgtgtatgtnattcacacttaggcaagcatacaca

SEQ ID NO: 4307 - DNA, 585 bp, Homo sapiens
cctcggatgatgaagacagtgcccaccacaatgcccacgaggcccacagacaaccccagggcgcagaccacagtctctgtgagctctgacataggggctggaatctcaggctcccagtgtttcagaagaggcttgtccagtccccagtgctccaccttgcagtcataactctcctcagcagaagggaggagggtgaggtaactgatcttgaagaaggaatgatcactcttggagaggaagctggtctcagaaacaccttctgtgactgagtgcccattgctcagccatgtgatgttgaccacaggaggaaagatgttgtccacaagacagatgaggatgctgggctgacccagtgtcacgggagacttggaaaacactgtgacctcaggaacctcattggtagcagcggtagagttggagcgtttaatcagactgttcaagttatgttttaggacagcgatgtttgtcagtgcaaattgcgggtcaaatctaaattgtctgagaacaggcaaacaccagacagtctccttcctccccaggtccacgcagaactgctcatctccatcaaattcatgggtgtactgg

SEQ ID NO: 4308 - DNA, 308 bp, Homo sapiens
ctgctccagcatcttgtcacactcgtccagcacaaagtgcttcacattctttaggctgaagctcctattccgcacgagcgccaggatgcggcccggggtccccaccacgacatggggacagttcttcttcaacacttcttcatccttcttgatggagagaccaccgaagaacacagacaccttgacgctgggcatgtacttggaaaagcgctcatattccttgctgatctggaaggccagctccctcgtgtggcacatgaccaggaccgtcacctgtccgttgacaggctcaatctgctgtagggtgg

SEQ ID NO: 4309 - DNA, 522 bp, Homo sapiens
ctgactgtgaggccatcccacatgcttcatgtctccaaaatatacagacaaggggaagggccacattactgagggcagagaagaagcttaaccctggaatgagaattggaagggacaaatatccaaaccatatcaatgacggcaatgaacgaaggatacttgctcacattgtgtatactgctctttgaaaggatttcaaaaaccaaggtaaattttctaaaatgacctctgttgaacatctgacagcagtacttcctccttcctgaattctttaattccttggctcatgtgacagcatattctcctaattcttctgcttctctgcttctccatttttgttaaatactcctctttggatgttttgttaatcacgtatctttgcattaattttgccttttcaagatatttcattaaaatatgatttattactgagttcttttggtatcccccaaattttgcacctaagccaagtgcatcccctacatcaccctagtcccagccctcttttccattcttcctctt

SEQ ID NO: 4310 - DNA, 318 bp, Homo sapiens
aaagaagttttatgtccctgactctggctaaaattatctaatttccagatgcttttgtagatgactgaagtatttgtgagccacatattgggagttctagatttgagtgaatggcaggaaagggccatctccattgagatgattaagtgaaccaaactagttctcggaattctacagagaaggagggaatcagactgaggaagctgtgacataggacttgaagaccaaagactttgaaatttgcgagctgctcatgtgtgagttattatcactgctgtctttctattgagttacaaatctatatttttattgaagttt

SEQ ID NO: 4311 - DNA, 444 bp, Homo sapiens
  unsure (31): n=A,T,C or G
  unsure (34): n=A,T,C or G
  unsure (36): n=A,T,C or G
  unsure (46): n=A,T,C or G
  unsure (64): n=A,T,C or G
  unsure (69): n=A,T,C or G
  unsure (71): n=A,T,C or G
  unsure (100): n=A,T,C or G
  unsure (115): n=A,T,C or G
  unsure (121): n=A,T,C or G
  unsure (146): n=A,T,C or G
  unsure (164): n=A,T,C or G
  unsure (178): n=A,T,C or G
  unsure (184): n=A,T,C or G
  unsure (192): n=A,T,C or G
  unsure (213): n=A,T,C or G
  unsure (221): n=A,T,C or G
  unsure (251): n=A,T,C or G
  unsure (278): n=A,T,C or G
  unsure (292): n=A,T,C or G
  unsure (299): n=A,T,C or G
  unsure (315): n=A,T,C or G
  unsure (317): n=A,T,C or G
  unsure (385): n=A,T,C or G
  unsure (413): n=A,T,C or G
  unsure (417): n=A,T,C or G
  unsure (428): n=A,T,C or G
tttttttttttttttttttttttccaaagtntananaaagaacagngggcccaggggaccagcnctcancntacagaggacccgcgctggccctggtctntgagttccctcagtntttatngatcactatctctaccatctcgganaggaggatgtggccgganaatagggtaatagngggganagggtcancaggaaaacatgtgaacaaanatctctgngtcataaataagtttaaggaaaggtgctgngctttgatgtgcacgtacacaaacatntcagttcattaaanagcagtnttgccgccagcatgtntnacctccagccctaagggggttttctcctatctcagtaaacagaacatacaatcaggttttacaccaanacattccattaccagggacgagcagganacanatgccttcctnttatctgaactgcaaa

SEQ ID NO: 4312 - DNA, 372 bp, Homo sapiens
ctgatgcctcactactagatgcagtgctgggaccttcctcttttggagctgtcccatgtacagtggacccaagctcaggaccttcgtggagctgcttctccaacctgagaaactcaagacccatcctcccgctgtcactttggacaatggaaatctacattttcttttcccttttttttttttgagacagagtctcgctctgtcacccaggctggagtccagtggcacaatcttggctcactgcaacctctgcttcccgagttcaagcaattctcctgcctcagcctcctgagtagctgggattataggcatgcaccaccacacccagctattttttgtatttttactggagacagggtttcaccatgttgg

SEQ ID NO: 4313 - DNA, 332 bp, Homo sapiens
aaaagagctttccattgaagaagaaaacaggaaccaaaaaaaaaaaaaagcaaagagagagagaagacagcagataaatataggcaaatagaggtggaaaatataatcacgtagaatttagtatagtaaaggattatctctgaaaaacaaaaacagaaaactatcagagccaaataaagaaaaatggaaatgactggggaaaaccactcactaatgagttgaatgttcaagagaaactgagaaagagtactgcttatataaaaattatgtgaaattaaacaaaaatgtagtttagtaatgaatggtgtttaagcacttatggaatataaaat

SEQ ID NO: 4314 - DNA, 450 bp, Homo sapiens
ctggttctctcggagcttatatcgggccagcagctctgtcacctcctccttggtcatgacgacgtgctcagggactagctcgtgctccgtgatgttgatgagcagctcctgctgcagaaactgctccaggatgtacttgggggccatgtcgaccagggactgcttggcggagggtgtcatgccctgctgcaccacgatgagagcccgtgtgatgttctcctcctgcatgcgctggcagtacaccttgatggtcttgatgcccaccttgggctcctctggaaagaacacaaacatctggtcggtggggtcatcgttgtgggccaccagcacggtgaggtccgtgcgccgcggccgcccctcactcggcttgtccccaaattgggctttgaactcctccagggtctggtcaagctcgtcctgggtcaccagatagccacggtcgtggcacag

SEQ ID NO: 4315 - DNA, 420 bp, Homo sapiens
ctgtggcctggccgctcccaatgctgggggcttggcttggtgccccatccccttcctgactgagctctatgaaggactcttaaaaaaaataaaataaaatgcaagcaaagtgctttgaaagaagggaggacaccctattcctgctaaggggtagaggaagaaggtgaaggcagctaggtgcccataagagaaggctggcacaatcttcattcccgccagtgtgatttcagtctcaaaagatgagtatttggctgagaaatggaaggatactccaggccccctacggagttgtgctggggccatgctgagctgcccttgcaggcagccctgggtgctgggggcagacatgcaggacactgggaagagtcagaaccacaggtgggagggaatctcagagcccaggctccccactgagcttgg

SEQ ID NO: 4316 - DNA, 502 bp, Homo sapiens
ccttgcctcagatccaaggtcactcggaagaggccatgtctaccctcaatgacactcatggaggaaatgctgagagaagcattcagatgcatgacacaaggtaagactgccaaaaatcttgttcttgctctcctcattttgttatttgttttatttttaggagttttgagagcaaaatgacaacacccagaaattcggtaaatgggactttcccggcagagccaatgaaaggccctattgctatgcaatctggtccaaaaccactcttcaggaggatgtcttcactggtgggccccacgcaaagcttcttcatgagggaatctaagactttgggggctgtccagattatgaatgggctcttccacattgccctggggggtcttctgatgatcccagcagggatctatgcacccatctgtgtgactgtgtggtaccctctctggggaggcattatgtatattatttccggatcactcctggcagcaacggaaaaaaactccag

SEQ ID NO: 4317 - DNA, 365 bp, Homo sapiens
cctgcatccaaatagcaggtgaaggcacctggctgaccatcaatgccttccacattgtattcatcaccagtcacctccacttggccttcatagatcttgtccatgccaaacctattgagaagcctgcgggccagcagcaggccagtacaatatgctgcagcataatttgtcaggccaaccttcacaccatattttggcagttcgtgtgcatacgctgcgcagactatcatatccccctctatacgggcataagcaatctgacaaatgatatctctgtttgtcacacgaactatcatcctgtatttgggtgtgttgtatttatttttatcttgtatcaccaagcgtttccgagcataagaataagg

SEQ ID NO: 4318 - DNA, 409 bp, Homo sapiens
  unsure (74): n=A,T,C or G
  unsure (121): n=A,T,C or G
  unsure (125): n=A,T,C or G
  unsure (129): n=A,T,C or G
  unsure (133): n=A,T,C or G
  unsure (155): n=A,T,C or G
  unsure (167): n=A,T,C or G
  unsure (169): n=A,T,C or G
  unsure (171): n=A,T,C or G
  unsure (184): n=A,T,C or G
  unsure (198): n=A,T,C or G
  unsure (215): n=A,T,C or G
  unsure (223): n=A,T,C or G
  unsure (230): n=A,T,C or G
  unsure (244): n=A,T,C or G
  unsure (246): n=A,T,C or G
  unsure (275): n=A,T,C or G
  unsure (314): n=A,T,C or G
  unsure (328): n=A,T,C or G
  unsure (371): n=A,T,C or G
cctgaacaaggacctctgccctccctattcagacccttcgttgcctcacctggtcaatacaaccacttcacctntgaccgcaggggcaggggactagatagaatgacctactgagcctcgnctgnctgnctgnctggctggctctctctctctgnttggctctttgngngnctgacaggcgcanactgggtctctaanccttgttctgttctggncccctcantctgggntcttgtcggaacangnttgcccttgggttacgtgggttccatctnctggggaattgggaacaaggggtctgagggaggcacctnctgggagactttanaaggacccagtgccctcggggctgatgctcgggaatcacaganctgggacccaaagccaggatccagacccaaattgaggt

SEQ ID NO: 4319 - DNA, 193 bp, Homo sapiens
aaaaatcttttttccttaaaacaaaaacgattaaaaacttgggttttctaaagaaacttatattaatatgaagttacgaagatacacaaagctgaagtatctggaaccatttggctgcctgtagtcttcagcaagatcacaaagtactcaaaaactctttgaccttttcaaccagactttcatatttgtcttt

SEQ ID NO: 4320 - DNA, 509 bp, Homo sapiens
ccaattatttccaatttttattttattcttaaaacttaagcatggtaaaatgttaagctgttttcatccactgatattattctactataaaaagcccttcttgagcagatttgatgataaaaaggagaacatttctaaggtataattagagaagctgttgcatgagaaatcatgtctccatctccattttgctatgcgttatctgaggattgtttctgaaagagatctatttaggcagtgtatgtatgtgtcagcatgtaaaaagtaaagaactgaaaatagacaaaccttgtaaatgcacttcaaaaccaattgtggctcaagtgtaggtggttccccaaggctggtaccaatgagactggggtttgggaattagttggtcatcatccctcctgctgcccagcagtggtcagtcatttttcatgagggatggactaggaaaatgaagtgtctattataaggagagttcctgtaacttaaggagcaagctcactacaaaacccagctac

SEQ ID NO: 4321 - DNA, 156 bp, Homo sapiens
aaagcttatataactttattcagttgaaaatttattaaaccactagtatatgaaaggaattgaggtaagggctgggaaaaaaaataaggcataattcctgctctcaaagaatttaggatcttgagaaagacagagttcctacagggtggggaatgg

SEQ ID NO: 4322 - DNA, 320 bp, Homo sapiens
ctgtcctcccctcacaccagactggggagttcaggatgtgtggtcttctcttcgactacccagtggtcttggctgttcaaccgtactttctccagaaggatcagctcaatttgctgctcagatatttgggttaagcaaccatttggtatggagcaaactgcgagcaagcattttgaacacatggatttccttgaagcaggctgacaagaaaatcagagaatgtaatttataagaaagaatgccattgaattttttaggggaaaaactacaaatttctaatttagctgaaggaaaatcaagcaagatgaaaaggtaatttt

SEQ ID NO: 4323 - DNA, 308 bp, Homo sapiens; identical to SEQ ID NO: 3350

SEQ ID NO: 4324 - DNA, 335 bp, Homo sapiens
  unsure (309): n=A,T,C or G
aaatcctagcatcagaggtttgttcatatgtagcaggaggtcatctgaagtagcaggtcctccttttttagttttttcttaggggggtgggtgatagatatatggtgtgtcatagtcgtttgggagtctggcatcggaaacctcctttaatgcttggatttgtggttttgcaggtatgggcggagctgccattgccccacccacttctctggtagagaaagacaaagagttaccccgagattttccttatgaagaggactcaagacctcgatcacagtcttccaaagcagccattcctcccccagtgtncgaggaacaagacagaccgagatctc

SEQ ID NO: 4325 - DNA, 451 bp, Homo sapiens
aaaatttatgtatctatgtaagactggtgatagtaaatcttaaaacagtccagtggcaatctgctgctcagttaataattactaaaattcttggatccctgaatagaaattaaaaaaaaaaaaatacaagaggcagtagagtcaatacaagcttaatacaagcttagagtaaatacaagcttagagtcacttgatgactgttttactgttctccatattgtttttatttttaattaggccctaccatagtatttcacactaaaaacaaaggaattatattggctaatatagtctttgactcatttcggtatctcagtaaaagtaaactgtcttttcattgtttcaccagttggtggtgaaaatagcagtatgcatgcattatcactggtgtcacaaactgtaagctttgtaagttagcactttactcctatagctgatgtaatcaaacttt

SEQ ID NO: 4326 - DNA, 215 bp, Homo sapiens
aaaagagcgtgtttcttcggggcttgccgttcgttcgtttccagcctcaggaatttatggtcgcctttttgaatgaggtcacataatgagtatgactcctgaacagcttcaggcttggcggtgggaaagagaaattgatgagagaaatcgcccactttctgatgaggaattagatgctatgttcccagaaggatataaggtacttcctcctccag

SEQ ID NO: 4327 - DNA, 479 bp, Homo sapiens
ctgtaagagctggctgagctccatgacgatggacagtgaagatggctaccagacgtgtgtgtctgaggactccagcaggggtgccttcagtcggcagacgagtacagatgatgagtgctttatccccaaggagggggatgattttctgaggaggtcatcttcaaggaggaaccggagcatcagtaacaccagcagcggatccatgtctcccttgtgggagggcaacttatcaagcatgtttgggaccctgccccggaagagcagaaagggaagtgtccgaaagcaactcttgaaatttatccctggccttcatcgtgctgtggaagaggaagaaagtcgcttttgacggattgtggtgtcctttcaaattagcttatttcacaaatatctctagactcacccagatcccagcttggtgggaaagtgcagaagaattgcaaaactgacatcccatttcacagcaatagtgacctttattt

SEQ ID NO: 4328 - DNA, 411 bp, Homo sapiens
aaagtctcaagtaaaaaattttgaagaagattttatgagacagcagcgaacaattaatatgcaacagtctcaagtagaaaaatacaaaactcttttcgaagaagcaaacaaaaagtatgatggattacagcaacagttgtctccagtagaaagggaattagaaaataaaagaagactgcaaaaacaggctgcaagtagtcaaagtgccacagaggttcgcttgaatagagctctagaagaagcagaaaagtataaactggagataagtaaattaaggcaaaataacaaggacatagcaaatgaagaacacaaaaaaattgaagtgttaaaatcagaaaacaagaagctagaaaaacaaaaaggagaattaatgatagggttcaagaaacagttaaaattaattgatgtttt

SEQ ID NO: 4329 - DNA, 373 bp, Homo sapiens
  unsure (116): n=A,T,C or G
ctgacagaatagcatgttcattttagttttcagcactgaacataagtgggtcaacataaatgtttatacaaaatactgacttcaacaaaatacaaagcactttctttatctttcanaaactgaatatacacagcaagtttttttccaaaatattttcataggcaaaggattaaaaacgattttaattatacacatatggtcacaattttgccttaaaaagattgttgggaaatgtacataaggccgcttgtaaatgtacatcgtgttactgttatgtcttatgtccagaggaaaaaatgttatcatacagatttgctcttacttgggagtaggctattcaaaaatacagtactcttctgtacaaagaaaaaag

SEQ ID NO: 4330 - DNA, 418 bp, Homo sapiens
ccgccaagaggtggtgattgggagcccacaggcactggtcagaggccacctgctgctcctgctcctttgcaagcctctcaggacttgcgaggctcagaatgaatggatctggaacagggcttgcgagcctcagaatgaatggatctggaacagggcctgcgaggctcagaatgaatggatctggaacagggcttggtaaactgccaaggcacctggggactcgggagctctggcagggtcagcagaggaaggcagaaggcagggctgtctcacggcgtccccatcactgatgtcctctgctctcccctggcctttccagggtgcctgcggcagttgctggactttctccaccactggggccctggagtctgcgatcgccatcgcaaccggaaagatgctgtccttggcggaacagcag

SEQ ID NO: 4331 - DNA, 482 bp, Homo sapiens
ccacctctagatctgtgtttgccggtctagacgttatcggtgcacttccttgaagtgccaggttgcagcgatcccagagcgttgataacgtgatctgatccctaagttgagacctgtcttcctgtaacgcttccgaataagaggtccggtcgaaaagagttgaaagatacgaaattaggtggtcgttggaatcctgatcgcagtaaagtggtccttggtaactgctcgagtagaacatgtctgcatccgccaatagtccgctaatagggagggctgtgcgattaaaggcttccatcgattgggtagtgtccttcaagtgggtggcgaagagccagtcgggcatatgtcatgaaggtttctccgaccgattaatggtttgctgcttgactagcctagggaaataataataaaggtaaagtaaacttttttaatgacatatggggcacaaaataactggtgtcttgtaaatgttctgttttttt

SEQ ID NO: 4332 - DNA, 512 bp, Homo sapiens
ccacttgaccagggacttgcaaagttgttcctgtcacctgttgagagctcagacttccagccagggcctgagcactgaggggctggatggagcctgtcacagcttgtgcctgccccccaacattgacttggacagggaagaatgttatccctccattttcattggcaatacctagtgacagagaaaaaaagcatgaagaaaatgttgataataagaggttctccgggcagaggtttacaatttctgctctcccaaaccctctctccccatcactcctctgtcccctatgtcactctagccaaacctcgggtaacttttcaatacatgccacagagaaggaactcaatatccaactctgccttccttaccttgcacaggaatggttaccgtttgcccattgttggctgtgacagtgacggttgccatggtgaccaaagtctgtccaggaactggtgtgacagaaacagtctccccagatacattctgcacagggacagcattgactaggggct

SEQ ID NO: 4333 - DNA, 484 bp, Homo sapiens
  unsure (388): n=A,T,C or G
  unsure (407): n=A,T,C or G
  unsure (421): n=A,T,C or G
ctggagcagcagatagaagggacagggttgcacttataacaccactatcctcccagccctggttttatcatcatcatcgagaaaaatacaattaatcagcagtgatcaaaggtaagtctaaacattccatttaactaacttaaatgtgacctggtgtgccgtgtcattctataaatgacataacagaataagactcactttctaattcacagcctctggttcaatttcaagtaagcaaatacattttgctttggttttgcttacaatattctgggaaatgcaggctataaataatcactcaactgttttgtgggtcaacagaatcactactactttcagtttcgttgatgccatttatatcatgagctcaagcacacgggcgcttcanaaggcactataaagtttanttttgatgtggtgngatgttctgatctatcttgaaaggtaaagaaacccacaggattcagcgtcaagccaatccatg

SEQ ID NO: 4334 - DNA, 525 bp, Homo sapiens
ctgctcgacagcatatggcaccagcccattttcaatttgctgagcatcggccaaagcctgtatgcgaaagccaaggagctggacagagtgaaggaaattcaggagcagctcttccatatcaagaagctgttgaagacctgtaggtttgctaacagtgcattaaaggagttcgagcaggtgccgggacacttgactgatgagctccacctgttctcccttgaggacctggtcaggatcaagaaagggctgctggcacccttactcaaggacattctgaaagcttcccttgcacatgtggctggctgtgagctgtgtcaaggaaagggctttatttgtgaattttgccagaatacgactgtcatcttcccatttcagacagcaacatgtagaagatgttcagcgtgcagggcttgctttcacaaacagtgcttccagtcctccgagtgcccccggtgtgcgaggatcacagcgaggagaaaacttctggaaagtgtggcctctgcagcaacatgatgcccctgagta

SEQ ID NO: 4335 - DNA, 469 bp, Homo sapiens
ctggtgaacctgtaccttgggaggtcacactttctctggaaagagcccgccaccatgagctggctggaggagaacgtccacgaggttctgcaagcagtggacgccggggacccagccgtggaagcctgtgagaaccggcggaaggtgctctaccagcgtgcacccaggaatatccaccgccatgtgatcctctctgagatcaaggaagccgtcgctgccctgcccccggacgtgaccacgcagtctgtgatggggtttgatcctctgcctccttcggacacaatctactcctacgtcaggccagagaggctaagtcctatcagccatggaaacaccattgctctcttcttccggtcactgttgccaaactataccatggagggggagaggcccgaggaaggagtggctgggggtctgaaccgcaaccagggcctgaacaggctgatgctggctgtgcgcgacatgatgg

SEQ ID NO: 4336 - DNA, 467 bp, Homo sapiens
gcgagaggcgccggtgtttcgagccgtggcaccggcatcggctgacactgctgcctccagctagttatttcgtcctcttccgttcttcacccctacaccttggaggtgaacttctcacctgagggctgtaaagactcgtttgaaaatggagagccaagaaccaacggaatcttctcagaatggcaaacagtatatcatttcagaggagttaatttcagaaggaaaatgggtcaagcttgaaaaaacaacgtacatggatcctactggtaaaactagaacttgggaatcagtgaaacgtacaaccaggaaagagcagactgcggatggtgtcgcggtcatccccgtgctgcagagaacacttcactatgagtgtatcgttctggtgaaacagttccgaccaccaatggggggctactgcatagagttccctgcaggtctcatagatgatggtgaaaccccagaagcag

SEQ ID NO: 4337 - DNA, 256 bp, Homo sapiens
cggtgccagactcggaggcccccccagggtgggatcgtgccgactcgggtcccacgcagccacctctgtctctctcacccgctcccgaaacaaagagacccggacaggcagccaagaaagaaacgaaggaacctaagaagggtgaatcctggttctttcgttggctacctggaaagaaaaagacagaagcttatttgccagatgacaagaacaaatcgattgtttgggatgaaaagaaaaaccagtgggtgaattt

SEQ ID NO: 4338 - DNA, 308 bp, Homo sapiens; identical to SEQ ID NO: 3350

SEQ ID NO: 4339 - DNA, 347 bp, Homo sapiens
cctgccgggacggccttcgggcagtgatggagtgtcgcaatgtcacccatctcctgcaacaagagctgaccgaggcccagaagggctttcaggatgtggaggcccaggccgccacctgcaaccacactgtgatggccctaatggcttccctggatgcagagaaggcccaaggacaaaagaaagtggaggagcttgagggagagatcactacattaaaccataagcttcaggacgcgtctgcagaggtggagcgactgagaagagaaaaccaggtcttaagcgtgagaatcgcggacaagaagtactaccccagctcccaggactccagctccgctgcggcgccccag

SEQ ID NO: 4340 - DNA, 221 bp, Homo sapiens
  unsure (10): n=A,T,C or G
attaggacangggcctggcctggcttctggtaataccagtgtacattgttactcccaatattgtttcccccacaggtaatcttggccgtctttcctggggccactgacactgagggtgtctgagtcaacacataggaggtcacagagtctgtgcagtgagagaggaggccgaggaggagaacggtccaggccatggctgaggcaccaccagtgctgcttcc

SEQ ID NO: 4341 - DNA, 331 bp, Homo sapiens
ctgtttactgccagccagaagttcaggaagaacacagctccatctctctccagccggaaggacatggacctagcgaagtcaggtatcaagatcctcgtgcctaaaagccccgttaagagcaggaccgcagtggacggctttcagagcgagagccctgagaaactggaccccgtcgagcagggtcaggaggacacagtggcacccgaagtggcagcggaaaagccggtcggagctttattgggccccggtgccgagagggccaggatggggagcaggcccaggatacacccactagtgcctcaggtgcccggccctgtgactgcagccatgg

SEQ ID NO: 4342 - DNA, 300 bp, Homo sapiens
gagacgctctacgagaccatcataggctactttgacaaaggaaagatgtgggaagaggccataagtctgtgcaaggagctggcggaacagtacgagatggagatctttgactatgagctgctcagccagaacctgatccagcaggcaaaattctatgaaagcatcatgaaaatcctcaggcccaaaccagactactttgctgttggatactacggccagggattcccctccttcctgcggaacaaagtgttcatctaccgcgggaaggaatatgagcgaagagaagatttccagatgcag

SEQ ID NO: 4343 - DNA, 172 bp, Homo sapiens
aaatttagaaattcccacatgtttaagatatatgcccatcccctttttagagtaatcaaaatttctatcacagttcacatactggaatacatagtaaaattgagatgtgtccaagagattttcaatgttaattagctcattctaaatagccaatataaggtaacttctgttt

SEQ ID NO: 4344 - DNA, 177 bp, Homo sapiens
ctgcagctataacctcttcttcagctccagcctcagccccagctccaacccccatccttgcctcagtttcaaccccagcttctgtcaccattcttgcctcagcctcaattcccattcttgcttcagccctagcatcaacttcagctccaacgccagccccagcagcctcttccccag

SEQ ID NO: 4345 - DNA, 359 bp, Homo sapiens
gcaaatctgttgttaaattacttaaagaaaatttaacaatggcataggcaccttgtcaactaaatgattttcataaacaccaaaaagtagttaaaacttttgtatacataaccaaaaaaaaaaaaaaagaaaactgtacatttacagtatttgctgctgttcattccccaaaatacaattaggacataattggctattaaaaatttataaaatttaataaaaaactttgctatgaatgtagtgttacccacttttgcattaaattcaccttcataaatcaaaacatcatgactctcattcttaaattaaatgacccaaaattagaagttccaaaaaagttctgagaacaattatggttt

SEQ ID NO: 4346 - DNA, 263 bp, Homo sapiens
  unsure (12): n=A,T,C or G
  unsure (121): n=A,T,C or G
ttgacggggctnctatctgccttccaggccactgtcacggctcccgggtagaagtcacttatgagacacaccagtgtggccttgttggcttgaagctcctcaaaggagggcgggaacagantgaccgagggggcagccttgggctgacctaggacggccagtttggtccctccgccgaagacgacatggtcattattacgatcccacacttgacagtaatagttggcctcatcgccggcttcgaccctgttgatggtcagggt

SEQ ID NO: 4347 - DNA, 448 bp, Homo sapiens
ccacagctttagactcggcctcatgcacgcgggtgggtctcctatgccctcctcagtcttttttctggttgtcttgcttattttttaataaaactaaaccttaaaaatattcttaaaaacctaaaaaagccctttagatatttttaactgggcttgccattcatatatcggagactgtgtctgaacagtgttgcgctttcctaaccccggcaccgtcctgtccgtcccttggagcacttttcttcctgtgcgtcccgtgcttcctttgctcagttcacttctggctatttgcagcaaagaaggccgtccttttcaaggcgtcgcctcgcttccttgcatggatgaagaggagtgattgctacatgttcctttctgttcccgccgcccaatagagttatcttgttttggttatttcctttgtggcatcagcgtccccaagtgcggccag

SEQ ID NO: 4348 - DNA, 237 bp, Homo sapiens
ccttcccatcagcacagttcgtgaggtggctttactgaggcgactggaggcttttgagcatcccaatgttgtccggctgatggacgtctgtgccacatcccgaactgaccgggagatcaaggtaaccctggtgtttgagcatgtagaccaggacctaaggacatatctggacaaggcacccccaccaggcttgccagccgaaacgatcaaggatctgatgcgccagtttctaagagg

SEQ ID NO: 4349 - DNA, 478 bp, Homo sapiens
ccaagaacaaggcgtgtgccacagtcacgtagtgacacaggtcacatttgctttctgccagcagaagagactggactccagtgcaggggagtgtgcaaggacaggttctggggggtggaggcatctgtggacatcccagggcaggggtgagggccagaacatccctaggtcctgagactacagtttctccacatttagatcagacattctcttccaaggaaggaaaccaagagaggctggtgaaccgtctggtaatgacaagccctcacttttgcagccctcttggctggtccctcagcaggtcttccctatgagcctgcaaaggagacaggcaggaatgagttccatgttcgagatagggaaactgagggccagggagaggcagtgactcgcccgagggcacacggcagaatgcaggcagaggcagagtggccctgggcatcctgagtccagttctgggcactctgcacctcacagg

SEQ ID NO: 4350 - DNA, 413 bp, Homo sapiens
aaaagggagattttctgaagcattgtaatttcattgaaagtgtacttgtttcttgaaaaaaatttttgaacagtgaataatgatgtaatacaactttcaaatttctttacgctgttattttattcctattgtggtcacatgtgaaagcatgtgatcaattgttgctgcatcagggatattacagattcttttttattgggtattatgaccttttctataaaagaataaggacattaaaatgtaagatgcatgataaaaatgtaagtggagaggctctttgtagttaacttatattaagtaatgtataaggtgggggttctcatttgtataatcctagcctatgacttaatgttgatgttttgctttgtcttttggatggcctaacctacattaacatgttggcagaccatttt

SEQ ID NO: 4351 - DNA, 337 bp, Homo sapiens
ccaccctctacaccgatgaggcaggccaatttctgagtgtcgttcagagctgggggcaggtaggtcaggtgattactttccagggctagagtagctcaatcaagttcctaacgcttcccatcaacttgcctacctttagccgaggtcacaagctccagctcagaataggaggcacacatgcggcgtatgaggtcaatctgctccagggtgaggcgcagggcatcccggtcctgggtctggcatggcacataggctgaccagaactggggggaaggccagggtttggcttggatgggggctgctttggaggaccctggactgctcacagcctccacag

SEQ ID NO: 4352 - DNA, 411 bp, Homo sapiens
aaaggtacttcaaaagcttattggtgcttctgtttgttttatcccatccttatagtttttttctattgttaatagatgtttgtgaaaatagaaggagcactagttctagttcatgctttcttttgcttttccatagcttctaaaactaacagtgaaaatgatatattgaaacagtaaattatagatctataccagatttgtaattgtgtatttcattgctatttgaagtataaagtaatggttctgtataatttattgggaaggttgaatttccatagcttcaaaatattcaaatttttttgcatggatttagctacccttttcaaaatttccttttgatgaagtcattgactaaagcgtcattaaaacagaacaagaaaagaattccaaaaaccctccaaaattcctttt

SEQ ID NO: 4353 - DNA, 397 bp, Homo sapiens
aaattaaagtggaagaaaaggagctttacagttgatagtttcaactccctaaaataatgccaacaaggtaagcttgcatagaaaaaaaacttcaaattattactggctacatgcttaaaaaattagaaatgcaggtattataatcatagtgcaaaaccatggcagtttgtgatgtctattactgcctaaggttgagaaatagaccgtagtacctccagttatcacagtttctggtcttttaatcaattatttctgccaactagaagcaatatgtatgtaaagatgggcagcacacatctgctgtgctattaattaacgaagtttgaggtcatcaccaccacctaaattggaaccaggactagggtcttgttgtcttcttgccagttactgccagcag

SEQ ID NO: 4354 - DNA, 440 bp, Homo sapiens
ccagcctcgggtttcagaaaaagcgctggagccagcggaataccaaagccttgtttccccctggaaccggtttggtattatgcctggttgtggttcttcccctctacatttggtgttgacacatttctttaataagctttttccctatcctttttcctttcagtcctattgttaaaggtgtcttgggtccggtcttaaatcaatttggttgtgactctgggtcccagaaaaaagctgctatctcattagcggcttggtgtgttcgaaattcatatttgaaccacatagaaaacatacactaccagtaccattacttccctgcatatatatgtaaaaaaaaggaaaaataaaacaaatcacacagaacacagaggggctgctgaacaacgcagcatgagtgtaaatacattctctttcgggtcagacatttggcctgacag

SEQ ID NO: 4355 - DNA, 507 bp, Homo sapiens
aaatcctccaagggatgagaaccaacctctgaaaagggaatctggagactatcctttccaagtctgaactgggatgtgagctaacttttggattttagcagttatttctttgatgacctttccttcgtcatcaagttccaggcagcagttagtaaggctgaactttccgcatactccctcttcctgggctaggaggtagtctaaggccagtctattttgataaatgacatttctcatttttgtggcttgctgggcaagcagattcaaggcccctgcagtttcattggtaatgatttctagtactgcctgcaatcttataatgcggttaagcatgtaaactggggtgcggtatccccacattccatcttctgcccaggtggctgggccataatattgaattattctttcaggaggccattcactgtccttccaatctcctatagttatgcctcttttgcttttccttttagtttcatcatagatggggtatcctaaggcttctccctg

SEQ ID NO: 4356 - DNA, 147 bp, Homo sapiens
  unsure (80): n=A,T,C or G
  unsure (89): n=A,T,C or G
  unsure (115): n=A,T,C or G
  unsure (131): n=A,T,C or G
  unsure (137): n=A,T,C or G
ggtggtggagggaggattgggatgcctgaggagggtggagtaggtgctggggccaacacggaggacaaactgttggtcgngtccagctncgcaaggtcgatgaacgtgccttggntactgcactgactgtntccttncgagtcaggc

SEQ ID NO: 4357 - DNA, 226 bp, Homo sapiens
aaaaagaagacacttccatggcgaattgaattagcccaaactttccccccaaatgggacaaggtattacattttggagtttttcttcgagtcacaaactaaactccagatctctctgtccaaaatttcatcgcttaaagaaaaaaagttctaattacaggagcggatactgagctgaagaacttcccaatttgagttggttattcctactaaacgcagccacacag

SEQ ID NO: 4358 - DNA, 573 bp, Homo sapiens
  unsure (560): n=A,T,C or G
  unsure (563): n=A,T,C or G
ctgctcggaaagctctggacagatgcagtgaaggctccttcctgctaaccacatttcctcgtcctgtgactgtggagcccatggaccagttagatgatgaagagggacttccagagaagctggttataaaaaaccagcaatttcacaaggaacgagagcagccacccagatttgcacagcctggctcctttgagtatgaatatgccatgcgctggaaggcactcattgagatggagaagcagcagcaggaccaagtggaccgcaacatcaaggaggctcgtgagaagctggagatggagatggaagctgcacgccatgagcaccaggtcatgctaatgagacaggatttgatgaggcgccaagaagaacttcggaggatggaagagctgcacaaccaagaggtgcaaaaacgaaagcaactggagctcaggcaggaggaagagcgcaggcgccgtgaagaagagatgcggcggcagcaagaagaaatgatgcggcgacagcaggaaggattcaagggaaccttccctgatgcgagagagcaggagattcggatgggtcanatngctatgggag

SEQ ID NO: 4359 - DNA, 395 bp, Homo sapiens
ctgtttacccctgatcgtgcagcagtgcttgctgttccttagaattttgccttgtaagttctagctcaagttggggggtggtgatagacatttaagaagccatatatcttttcagaagtaggtgtgatgtactaaaagtttgagacactttctagaagtctcactatttaagttatgactagtattggatttttggcatgtctttgggtttcatgtttcttaacccaactgcctgcagggccttatggctgtcaggagcagttcttgggaattaaagtaattactgaagaagtattctagtgagaaaatgaatttatgactcagaagcccctaaagacatgggtactaagcaacaaaataagcagatgttaattaactgtaattttctcttacag

SEQ ID NO: 4360 - DNA, 576 bp, Homo sapiens
  unsure (495): n=A,T,C or G
  unsure (551): n=A,T,C or G
cagcattcgggccgagatgtctcgctccgtggccttagctgtgctcgcgctactctctctttctggcctggaggctatccagcgtactccaaagattcaggtttactcacgtcatccagcagagaatggaaagtcaaatttcctgaattgctatgtgtctgggtttcatccatccgacattgaagttgacttactgaagaatggagagagaattgaaaaagtggagcattcagacttgtctttcagcaaggactggtctttctatctcttgtactacactggattcacccccactgaaaaagatgagtatgcctgccgtgtgaaccatgtgactttgtcacagcccaagatagttaagtgggatcgagacatgtaagcagcatcatggaggtttgaagatgccgcatttggattggatgaattccaaattctgcttgcttgctttttaatattgatatgcttatacacttacactttatgcacaaaatgtagggntataataatgttaacatggacatgatcttctttataatttctactttgagtgctgnctccatgtttgatgtatctgagcag

SEQ ID NO: 4361 - DNA, 444 bp, Homo sapiens
ctggagggaagctgccacatctcctagctaagcagtctgacttacctgttgggaaacaaagggatattgctctaagattgattaggatgattgtagctagagtcttgaattctatctgtatacggcagagaaactttatagagtgtagagaggtgagcgaaaggatgcaaaagcactttgagggctttataataatatgctgcttgaaaaaaaaatgtgtagttgatactcagtgcatctccagacatagtaaggggttgctctgaccaatcaggtgatcattttttctatcacttcccaggttttatgcaaaaattttgttaaattctataatggtgatatgcatcttttaggaaagatatacatttttattatatagtgcttaataaaccaccccaaaatgatatcagttcttcccaacttgatctcattttggggtggttt

SEQ ID NO: 4362 - DNA, 353 bp, Homo sapiens; identical to SEQ ID NO: 327

SEQ ID NO: 4363 - DNA, 531 bp, Homo sapiens
ccagtgcttgtcctggcagtaaggctttcccctgtaacaagccagagccctccaaggtaccagactcttcttactacacaggtactaacaggctggcaggttagagttggtggagtctgaggagagatattttctctttgttgccaacatcctgtttaccaaaagtgtcaccccaccatcttccataagctgtgaaacaaaatcaatgaggtcactaacttagaagggaaagaaagttttctgggtctttgttttcttgatttggggtaatttatacaagggcatacaagttgattttaagatgtggaactgggaggtagactagtttggataagaactttgaaatgttccttgtggatccccatttctggtcatcaagatgtggatgtacatttcttaaaattattacatgctgcatctttcagcctggagactgtgcagaaacatgagaggtgatgacacactaattatgggaagcagaattactggctgatggcccctgaggctgtgtgtaacaaaatgacaggacag

SEQ ID NO: 4364 - DNA, 245 bp, Homo sapiens
aaagtcctatacttgcctgagatctagtgaattattttggtactccttttatgagaagtgaagttgcagagtttggcttctgcatgcgggtttaatgtgcttgtccccccgccccgactttcttaggtgcagtggagtagtgcataggtggtgcatcctgagggctcccgaggggcatcacctgcccagtggggaagtgagcctgctttcagttagaggcagggcctgtgattgttgggtcacag

SEQ ID NO: 4365 - DNA, 251 bp, Homo sapiens
aaaaggtccaagatgactgcagttttacaaaaatgggcagggtggaaagttgcaaacttcatgtgcttctggatatcaagatttgtttttatacaatagtcacagttaaaaacaccctgctggtaatacataattacactttattaaggtcataaaccagcaataaacaataaagcctatacaacttgtagttctacttaatcactgactggtacagctaacatgagataagtgaaaagttcctatggttt

SEQ ID NO: 4366 - DNA, 224 bp, Homo sapiens
aaaaatataagccccaaaaacaatgacacaaaattcatttggttaattcatgtaaaggaaaaaacagcaacaccaccacacaaacaggaaagtgggagtatgattaggaggggtgagatgaaaactattttacagtaacatttccaccaaaagactgtcctaagaacacgctgtcaatacagttcacagggaaaaagcaaatgtggtatttttttgtatttttt

SEQ ID NO: 4367 - DNA, 244 bp, Homo sapiens
  unsure (28): n=A,T,C or G
  unsure (72): n=A,T,C or G
  unsure (140): n=A,T,C or G
  unsure (141): n=A,T,C or G
  unsure (166): n=A,T,C or G
  unsure (179): n=A,T,C or G
  unsure (207): n=A,T,C or G
  unsure (221): n=A,T,C or G
  unsure (227): n=A,T,C or G
ctactaacgttgcttaacaaggatttanaaaaggaaatacattctctttgctggtataatggtataaatcanatcttcaaatctatgggaacgagtcatcttctctgtcctctatctcaagaaattagctcttttacagnngtttttatgaaatcttttctttcanttaaatcataagnaggataattttcatagacctttttgcanatctgtttcattgngacttnttccaagttagcactgg

SEQ ID NO: 4368 - DNA, 526 bp, Homo sapiens
ctgtagctaccttagtgacaaagtttaatcagcttcctgttgagctaaaaaaggaagtagagatgaaaggtgtgtggagcatgccatcaaaatactctgaagaaggagtttataacgttcagtacagtttcattaaagaagctgaacatcactgcttgttacatagcccaattcctgtgaactgccccataagattgctccatggcatgaaggatgacattgtaccttggcatacatcaatgcaggttgccgatcgagtactcagcacagatgtggatgtcatcctccgaaaacacagtgatcaccgaatgagggaaaaagcagacattcaacttcttgtttacactattgatgacttaattgataagctctcaactatagttaactagtatcacatgtttagttggtatgtaaactaatgtatccagaagattggaagagggataagaaatgaaagatcctgatactttaggtttttccctttcctctattttgtaaatataagatgagtattatttaatgatgt

SEQ ID NO: 4369 - DNA, 500 bp, Homo sapiens
ctggagcagcagatagaagggacagggttgcacttataacaccactatcctcccagccctggttttatcatcatcatcgagaaaaatacaattaatcagcagtgatcaaaggtaagtctaaacattccatttaactaacttaaatgtgacctggtgtgccgtgtcattctataaatgacataacagaataagactcactttctaattcacagcctctggttcaatttcaagtaagcaaatacattttgctttggttttgcttacaatattctgggaaatgcaggctataaataatcactcaactgttttgtgggtcaacagaatcactactactttcagtttcgttgatgccatttatatcatgagctcaagcacacgggcgcttcagaaggcactataaagtttagttttgatgtggtgtgatgttctgatctatcttgaaaggtaaagaaacccacaggattcagcgtcaagccaatccatgcccaggcacatcgcag

SEQ ID NO: 4370 - DNA, 542 bp, Homo sapiens
cctgtgttcaccctggtttattccagagtcacgtcagtcaatcacctctcatactgggcgtcataggtgtttgtctggctgatccctccattcgaagctggtcctgaaagttcctggctcctgctggactccagcagactttgctggatggcaaactgcattatctcgtaatcttcatcttgcaaatgcacatttctgccattgtcttgaacatagtaagattcgggaatttcaaacacagattgatcaacctcaaagtttgtgatgtgggaagctgaatcagcctgggtcccttccacattttgagatacagattcttcggcagtgctacagccattaacatttccaaatgtaatccgtgcatttaagacatgaaacaagggaatttctattttgacaggaaatccaggtgggaattccaatttgatgaaatctctcagtcttgcaaaatgagcactcgttcgagccattaggtcaatgatgggaatgacctgctccaccagagagaggggaaactcttcacacatccacaacattgcttt

SEQ ID NO: 4371 - DNA, 396 bp, Homo sapiens
ctgtcgccatgaagtaagcacgacccgtggttcccaatccgcttacatcctcgggcagaactcctctctgtcgtccctggcatggctgtagacaccctccctgatggactttcactttttgttgcagggtcgagctgtgcagttttagcgggtacaagatctaccccggacacgggaggcgctacgccaggaccgacgggaaggttttccagtttcttaatgcgaaatgcgagtcggctttcctttccaagaggaatcctcggcagataaactggactgtcctctacagaaggaagcacaaaaagggacagtcggaagaaattcaaaagaaaagaacccgccgagcagtcaaattccagagggccattactggtgcatctcttgctgatataatgg

SEQ ID NO: 4372 - DNA, 563 bp, Homo sapiens
  unsure (547): n=A,T,C or G
cggccgaggtaaaattctgagtgatccagggtatgacctagggaatgaactagctatgaaatactcagggttaggaatcctagcacttgtctcaggactctgaaaaggaacggcttcctcattccttgtcttgataaagtggaattggcaaactagaatttagtttgtactcagtggacagtgctgttgaagatttgaggacttgttaaagagcactgggtcatatggaaaaaatgtatgtgtctcccaggtgcatttcttggtttatgtcttgttcttgagattttgtatatttaggaaaacctcaagcagtaattaatatctcctggaacactatagagaaccaagtgaccgactcatttacaactgaaacctaggaagcccctgagtcctgagcgaaaacaggagagttagtcgccctacaggaaacccagctagactattgggtatgaactaaaaagagactgtgccatggtgagaaaaatgtaaaatcctacagtggaatgagcagcccttacagtgttgttaccaccaagggcaggtaggntattagtgtttgaaaa

SEQ ID NO: 4373 - DNA, 267 bp, Homo sapiens
aaatgcttccttcaaagaacaaagttgtttttggtgaaatacaatttttccatttttttctttaagtttctgaattacaattaattggaattttaatctactggttactgtgttggacagcatgggtcagaagaggagatgaaaaataacaaaaaattaataaatggtgataacagttgataaaaaagcaagcatgacattgatttagacaaatgtgattgttgagagtgattgtggaccactctccattagggtgttcaggaaagg

SEQ ID NO: 4374 - DNA, 214 bp, Homo sapiens
ctgccctcctccacctaaaccccttcgactcttctgctttgacaaagaaaatgacattggggaggggaggtgctccgcctcccagcttttctcaaaatagtcctatagatactggtaatctggaaatgaagaagtaattctgtctctgcacctacttttgcagaatgttcaaggaagtattctgtgttagtattaatgccaaaaagttgttttt

SEQ ID NO: 4375 - DNA, 145 bp, Homo sapiens
ctggaggtgctggaccgcgtgtttgagaggcagcactactcagacatcttcaccaccacagagcccatcaagcccgagcagaccacagagtattcagccatggcctcgctggctggtgggctggacgacatgaaggccaatctgg

SEQ ID NO: 4376 - DNA, 225 bp, Homo sapiens
ctgcaatactccctcttcagagatagccagaccctcggattgggctggagcaggtcccccagactccagatccctgccatgtggactgaagactcagggtcttactggtgtgaggtggagacagtgactcacagcatcaaaaaaaggagcctgagatctcagatacgtgtacagagagtccctgtgtctaatgtgaatctagagatccggcccaccggagggcag

SEQ ID NO: 4377 - DNA, 519 bp, Homo sapiens
cctttgaggcccagaacccagaccccaaagcgcctgtggtgctgctgagtgagccggcctgtgcccatgccctggaggctttggctactctcctgcgcccacggtacctggacctgctagtctccagcccagcttttccccaaccagtgggttccctgagtccagagcctatgcccctagagcgttttgggcgccgcttcccccttgccccagggaggcgtctagaagagtatggtgccttctatgtagggggctctaaggccagccctgacccagaccttgacccagacctgagtcggctgctcttggggtgggcaccaggtcaacccttctcctcctgctgtccagatacagggaagactcaggatgagggtgcccgggctggacggctaagggcacgaagacgatatctggtagagagggccagagatgcccgcgtggttgggctgctggcaggcacactgggtgtagcccaacaccgtgaggcactggcccacttgcggaacctgactcaggctg

SEQ ID NO: 4378 - DNA, 475 bp, Homo sapiens
ccagagccaggcggctcatcgagctctacaaggaagctgggatcagcaaggaccgaattcttataaagctgtcatcaacctgggaaggaattcaggctggaaaggagctcgaggagcagcacggcatccactgcaacatgacgttactcttctccttcgcccaggctgtggcctgtgccgaggcgggtgtgaccctcatctccccatttgttgggcgcatccttgattggcatgtggcaaacaccgacaagaaatcctatgagcccctggaagaccctggggtaaagagtgtcactaaaatctacaactactacaagaagtttagctacaaaaccattgtcatgggcgcctccttccgcaacacgggcgagatcaaagcactggccggctgtgacttcctcaccatctcacccaagctcctgggagagctgctgcaggacaacgccaagctggtgcctgtgctctcagccaaggc

SEQ ID NO: 4379 - DNA, 366 bp, Homo sapiens
ctgtagcttctgtgggacttccactgctcaggcgtcaggctcagatagctgctggccgcgtacttgttgttgctttgtttggagggtgtggtggtctccactcccgccttgacggggctgctatctgccttccaggccactgtcacggctcccgggtagaagtcacttatgagacacaccagtgtggccttgttggcttgaagctcctcagaggagggcgggaacagagtgaccgagggggcagccttgggctgacctaggacggccagtttggtccctccgccgaagacgacatggtcattattacgatcccacacttgacagtaatagtcggcctcatcgccggcttcgaccctgttgatggtc

SEQ ID NO: 4380 - DNA, 450 bp, Homo sapiens
ataaagcctaaagcaaagttagatttgggggttattcagccaaaattaccgttttagaccagaatgaatagactgcactgataaaatgtactggataatgccacatcctatatggtgttatagaaatagtgcaaggaaagtacatttgtttgcctgtcttttcattttgtacattcttcccattctgtattcttgtacaaaagatctcattgaaaatttaaagtcatcataatttgttgccataaatatgtaagtgtcaataccaaaatgtctgagtaacttcttaaatccctgttctagcaaactaatattggttcatgtgcttgtgtatatgtaaatcttaaattatgtgaactattaaatagaccctactgtactgtgctttggacatttgaattaatgtaaatatatgtaatctgtgacttgatattttgttttatttggctattt

SEQ ID NO: 4381 - DNA, 486 bp, Homo sapiens
ctgctccatgtccttcacctctgccagggcctcatcccggagaaggcccatctgctcgtggttgtagaaggggcaggctgcctgcttctcctgcctcctcctctttggcttctcctcctcagctcctttcttcttctctgagggtggcacaggcacaaagagagaaaacagagaggacagcaactgtccacgggcccgagagggggttgtgtaatgttgagacccacttccacagggtggggtctataagaccctcccaagtactgcctactgtgtctcatcggaacactgtaacgttttacttttgttctccagaaagagcccgtaaaatcatctccaagccaacgattcggaccagacgctcacccagagaataggaacactttttcccaaggagaggggactcagggaggaactggggtctcctctgccattctttctatgaaagacactgaatggtcttcagtcactgccacccctgcctca

SEQ ID NO: 4382 - DNA, 438 bp, Homo sapiens
ctgcagccccctggtgcccgcagcaaagcagacacttcccactgtccccaacaccagagggaggaaagtaaagaagcggacattgaagctagacctgggtgctacaagtgagatctacagcgactgttccacacaattgggggccctctcagcattctggggtggctagagtctctgtgtctctgggctttctcctgagtgttgtaccccatgctactgcgaaggtgaggacacggacactgagaaacaggagacttactgagacgtcactgatggtgatggctgagatgccttcccgatgggcgggcaggcgggtcacgtgggtgaggtggtccagatcccacaggatacaggtgcagtcctgggagccgctcaccaggaggctgaaggtgactgacgctgccaggcacgtgacagcctgtgtgtgtccatacaagg

SEQ ID NO: 4383 - DNA, 510 bp, Homo sapiens
  unsure (33): n=A,T,C or G
  unsure (66): n=A,T,C or G
  unsure (72): n=A,T,C or G
  unsure (74): n=A,T,C or G
  unsure (188): n=A,T,C or G
  unsure (264): n=A,T,C or G
  unsure (340): n=A,T,C or G
ccatacctaggactagcccgatctgtgtgtcanccactgacccattttaccagtgaggaaattgangctcananaggttaagtgacttgcctgtggtcacacagggaacaagggcagagccagaatgtcaacggaggagtgtacaccctttcaactacgctctgtgcgcaatgtttaaccggagcctngtgtattcatttgtaagtcacagaaaataattatatttacagggggaatctaaagatttcaggggacaacctgtanactgactctcatttaacaggggcccaataagcgattatgcccatccacttgagcttgtactgacgtaactactctnctcatgactaccactcaaagaatatacaaaggacctctcattttcccagaaataacctctctatatgaacaggcacagccaatgtggaatggccttatgtctactgagcacatcacatgcacagctcttcatttcatccccacactaatcatgtaatacaggcatgactg

SEQ ID NO: 4384 - DNA, 368 bp, Homo sapiens
cacagcatggacatgagggtccccgctcagctcctggggctcctgctgctctggctcccaggtgccaaatgtgacatccagatgacccaatctccttccaccctgtctgcatctgtcggagatacagttacaataagttgtcgggcctctcagaatatagatcggtggttggcctggcatcaacagaaaccaggcaaagcccctaatgtcctaatttatgcgacttccagtttagaagaaggggtctcactaagatttactggcagtggatctgggacacaattcaatttaaccatcaccagtctgcagcctgacgattcagcaacttattattgtcaacattattctgcatctcttcgcagttttgg

SEQ ID NO: 4385 - DNA, 193 bp, Homo sapiens
cctcaccgtgagaccttacaaagccggattccggcagagttcctctatctcgtcttgttgctgattaaaggtgcccctgtctccagtttttctccgtctcctgggacgtagcaggaaatcagcatcatggttgggttcaaggccacagatgtgccccctactgccactgtgaagtttcttggggctggcacag

SEQ ID NO: 4386 - DNA, 609 bp, Homo sapiens
aaaaaaaggcccccagggcaagttatttacagtttaattgccactgtcaactgatctggaccttgatcgggaccgggacctctggcgatccacagatgctggagacttagatctacttgaagaaccacgtttctggctcttctcaggcacgggagacctactaacagaacgggacttgctccggctccggctcctgctcctgcttcttgaccggctgtaagatttgcgactacgggaacgggatcggctacgagacctagaggaacttctggtccgggatcgagacctgcttcttgacctactgtgccttttgctgccttcaattaattttatttttctcccatttatttcctttccagaaagtttttcaatagcattctttaagtcaccataagaggcaaactcaaccaccccttcatttaatttaggtcggtgtgcatccgcaaacgttacttccccagcttgtctcatgaaatctttgagatccttaacacaagataattgtgttaagcaaagaagaggaaaggggacacacaaacaatcacatgatataaaaaaaacaagactactgaaagagaagatgttagataaagtacaaacatggcattt

SEQ ID NO: 4387 - DNA, 575 bp, Homo sapiens
  unsure (458): n=A,T,C or G
ccttattcctgcaatcaacagttgaacctcattttatccagcagaaggacctccatttcagacctcattggcaagaaaacaagcccatctcttctgaaagttaactgtttctttcaggaatgaggaaaccagctacattccttatggaaaggcttagatctcatttggagaaggtctttcaacctggtatctcctatttagcatcaaatgaagttggaggatcactcaaagtaagcgaccacttacaaccttcagcagagaccagcccttaggattcagagagatcattcacataactggtttctgacattttcattaacaacaacaggaaagaggcagttcccattacaaagcacttaaaattctagagataggggaatattccatcatggacattttttaagtggttattcactttaacttgaagtacaggttatctaccctgtattaaaagctgntgcctaaagacatctagtagtaccaagatgatgggatggaattttaacatcaggttttgtagccctactgaaaatttagcacgatcagcacaagtctagaaaccagactaccctgct

SEQ ID NO: 4388 - DNA, 397 bp, Homo sapiens
aaatatgttaaccagattaaagcatgcaaaagatccaatgataaagacattaaattaataatatgctaatagtatctaatttacccactatagggtctttatactctgtcacaaaaatattagtaaacatcaatttgaagttcggtgaacggacctgattcctgatttgtatatatgatatacccttgcatttatatggctaactttacaggctgtgttacagtacagttagaggaattggtataaatttactccccatactgcagtaaataatggttggaaatgattctcctaatttgctctgtgaactcagaatgcattaatgaattaacaacacaggtcactgagggaccaaaattcctcagtattcacattaacttttcccatgaaaagcttt

SEQ ID NO: 4389 - DNA, 471 bp, Homo sapiens
aaaggcattttggcattttggaataaagttacacaggtgcataccttatggaccaataatcccttgcctaaagaaacttttgcatatgtctatcaggaaacatgaataagaatatccagtgcagcattgtttacaatagtgaaaagctgaaaacaacttcaaaatatttatcttaggaaaactgattaaaaacctggaggaatctcagacacccaatattgagtaaaaaaggcaagtatgaaaaccatatataagataccaattttgtaaaagtaaaaacacttataattaaagaaattgttaaagagatatacatatatgtatataaacctattaaaaaaagacaatgggaaacaacaaaatcagattgatgctaccccggggatcaaggtaagtgattgaatagagaaaaactattcttggggctttgataatattagagatcttcttcataacctgggtggttccttt

SEQ ID NO: 4390 - DNA, 405 bp, Homo sapiens
aaaagtgtcacaagccacagtggagccatatacatgcagttcagcctgattttacccttattttcttctaatacagactccattacaattttggaccatctgcagagagtacagatacacaaaaccaaaacaagtatctatgataataaaatcttcagaaacttttcagacgtacctttcatggagccccctccctcccccgagtagaaccctaacagggacctcgtttgttcctgtgagtcctgccaggacttgtttaatgggtgcttggggttttggttttcctccttattcttcctcctcctcctcctcttcatcatcatcttcgtcatggcagtgtgtaatttcctggggggccagtgggaagaggttgggaggtttaatctcactaattgaccgtgtcag

SEQ ID NO: 4391 - DNA, 212 bp, Homo sapiens
ccatgagagtggagagctcaaccagtatagtgccaagtctggagaggtgttggtgaatgttaaggagcactcccggcagatcaacgacatccagttatccagggacatgaccatgtttgtgaccgcgtccaaggacaacacagccaagctttttgactccacaactcttgaacatcagaagactttccggacagaacgtcctgtcaactcag

SEQ ID NO: 4392 - DNA, 306 bp, Homo sapiens
ccaaaactgcgaagagatgcagaataatgttgacaataataagttgctgaatcgtcaggctgcagactggtgatggttaaattgaattgtgtcccagatccactgccagtaaatcttaatgagaccccttcttctaaactggaagtcgcataaattaggacattaggggctttgcctggtttctgttgatgccaggccaaccaccgatctatattctgagaggcccgacaacttattgtaactgtatctccgacagatgcagacagggtggaaggagattgggtcatctggatgtcacatttacct

SEQ ID NO: 4393 - DNA, 445 bp, Homo sapiens
  unsure (258): n=A,T,C or G
  unsure (304): n=A,T,C or G
  unsure (317): n=A,T,C or G
  unsure (329): n=A,T,C or G
  unsure (362): n=A,T,C or G
  unsure (364): n=A,T,C or G
  unsure (367): n=A,T,C or G
  unsure (376): n=A,T,C or G
  unsure (379): n=A,T,C or G
  unsure (383): n=A,T,C or G
  unsure (393): n=A,T,C or G
  unsure (395): n=A,T,C or G
  unsure (399): n=A,T,C or G
aaatgcattcattttacacttgtgagtttatcattgactttaagaggtagaaatgaaaaatgaaaattaaagctaaagcctttttatctattaatgcagatatattagaataagaatattttgggtttgtgtttattttttaatgaatttatgtttacttgatatggaaaattacgctttataggtggaaaagtagcaaataaagattaagtaaaagtaagtgaaaatgatggggaatatagtattggaattttatanctagttaaaacaataagtatcatctaatttgggtgtttattttgcngatgagaaaacanacctagaaccgnggcatgttttgcctgaaacatacagtgagttananacngggcctaanatngctnctagcatcanancaancccaagaatccatcagcaacctcagaccaacccaagaagataattt

SEQ ID NO: 4394 - DNA, 290 bp, Homo sapiens
  unsure (148): n=A,T,C or G
gtcaggacacagcatggacatgagggtccccgctcagctcctggggctcctgctgctctggctcccaggtgccaaatgtgacatccagatgacccaatctccttccaccctgtctgcatctgtcggagatacagttacaataagttgncgggcctctcagaatatagatcggtggttggcctggcatcaacagaaaccaggcaaagcccctaatgtcctaatttatgcgacttccagtttagaagaaggggtctcattaagatttactggcagtggatctgggacacaat

SEQ ID NO: 4395 - DNA, 447 bp, Homo sapiens
  unsure (368): n=A,T,C or G
aaatatatgggaggatgtgcgtaggttgtatgaaaataccaagtcattttatatcagggacttgcgcacccacagattctggtatctgtggaagtcctcggccactcccccgtggagacaggacaactgtgtgttgacagaagtcacatgggagaatgctcatagcagcccccacgcagtgacacaacctggaacaccgcccagtctgaccagcacagaaaagcagcacctgctgaattcatgccacgggggactccacagcagccaaaagagcgagctgtggctactgtatgatcagtggccccaccagtgatgcctcggacataacgctgagtccaagaagcctgagacccaaggggatagactgngggattccatttctgtagtattcagaaccaggccccactggtggacagtgttagaagttggaactgggttctcctctgt

SEQ ID NO: 4396 - DNA, 627 bp, Homo sapiens
  unsure (608): n=A,T,C or G
ccacctggtgagcagacctgagatgggatgggggacatacagaagagaccattacacgaggccccaggaagtaccctcagggcgttcaaacagctcaccctctcatccagctcactgagggctctggcctcttcaacatctgctccctaggacccctcccgaggctcgggcagcccctcatcctatatcccccacagcatgctaggttaccatttgccctctacccccattccacaggccaagggctcaggatcaccttgacccagcaagatcagcctcacccacttaccccacacagcccatggttggcagaacccctcctacaccctgaactctgacacagagaggcagccctggcccaatgtcaccagcacccattcctctcgctgccaatgacagtgacaagccaagcagcacgtgactagcacctgactcttgacatctgcaaggagcagtagcagagctgaccagccccctgggaatcaacatcaggcttctctacttttgtgccctctccctgccccacatggcccctagctcctgaaacagtcccagcaactgggctataaaggcccagaatcaaatctgagtatctagatgaggcttanaaatctaggtgctactcag

SEQ ID NO: 4397 - DNA, 262 bp, Homo sapiens
  unsure (148): n=A,T,C or G
  unsure (151): n=A,T,C or G
  unsure (160): n=A,T,C or G
  unsure (183): n=A,T,C or G
  unsure (205): n=A,T,C or G
  unsure (221): n=A,T,C or G
  unsure (227): n=A,T,C or G
  unsure (229): n=A,T,C or G
  unsure (234): n=A,T,C or G
  unsure (238): n=A,T,C or G
  unsure (248): n=A,T,C or G
  unsure (249): n=A,T,C or G
  unsure (252): n=A,T,C or G
ctgcccagacacatgggcttgtgacattcgtgaaaaccaaccctgtgggcttatgtctctgccttagggtttgcagagtggaaactcagccgtagggtggcactgggagggggtgggggatctgggcaaggtgggtgattcctcccangangtgcttgangccccgatggactcctgaccatnatcctagccccgagacaccatnctgagccagggaacanccccangnttggngggngccggcatcnnccntagctcacca

SEQ ID NO: 4398 - DNA, 323 bp, Homo sapiens
  unsure (240): n=A,T,C or G
  unsure (242): n=A,T,C or G
  unsure (261): n=A,T,C or G
  unsure (272): n=A,T,C or G
  unsure (273): n=A,T,C or G
  unsure (291): n=A,T,C or G
ccttcttcacattgtggcagaaactaacatcctttcaggaagatgggcactagggcaaaggtgcagccctcccaaaccccgggccctggtctcccaatctccaatatctccgcttctcaagccatatgtctctctcccacaaacagagacagccccttccctccagcattctctaccaagcccttcaaaccttgtcagcctgtctcatatgctggacttcccagctcctacccatcacanantacaaactgatccagccgntgaaggaggcnncagagaacactgaagggncccgagggcaccactgcacatcaaagcaccag

SEQ ID NO: 4399 - DNA, 316 bp, Homo sapiens
  unsure (161): n=A,T,C or G
cctgtcatgaataatcaccgttctcctttcgtctcgctcccctcgtacttctcgcctgtctgattctctaagttcatttcttggtggtggaggctcatttcttctggagtcactgaaatttttgggatatctttcgaagcttggatcttcccttcgtgcantaggtcgtgcttttttcccctcactttgaccaacaaagcgatcccgcctttcaaaagatgaagactgtactgctgaactctcaggaaacctgcctctctctcggtgatcaaagtcattaaatctgttctgttggcgagagtagtcggatccatgg

SEQ ID NO: 4400 - DNA, 243 bp, Homo sapiens
ctgttcttctttcagtcattccaactaaaacagacattttgcatagagagaataccagcccacttggtttcttgttttttattattggcgtcagctaggactatacgtggccttaaacgtcatgcactgatggacagaagagaaaaaaggatgaaaaaaaagacaaaggaggggaaagaggagcagcagtgaaaatttgtaataaaaactcttcttaatttataggtaagttttggcattttt

SEQ ID NO: 4401 - DNA, 493 bp, Homo sapiens
ctgcccagggcagcacagggcaggcaatgagtgtgagaccccacaatgcaacagacccttacaaaccccgcaaggccacacaccctgggtccatctgccctgctgtttcttcaggaaaaaacccagaatggaaatgctggagccccaggggctggagaccggggagaggtggcctgtaaggctgtcccatcaccatccccgcacgtcagaagcaccgtcacgttggaaaagaatgacgcttattccaccagttctgaagccagatgtcctcacaaccgaagcagccctgtttgtgcttgggctatgacttgagggtaattaaactgtcaaaacaccctccctactatttccattttcttgcagttggtgtcatttagtcactgcaggctgacagacttattacaggattgagacatgagaatgaacagtcagaaacctataaatgaactcaccacaaatggctgctggaaaggaagaaaactatctgtcgatg

SEQ ID NO: 4402 - DNA, 445 bp, Homo sapiens
aaaataggtgatcttgggcatgtaacaaggatctccagtccacaagttgaagagggcgatagtcgttttcttgcaaatgaagttttacaggagaattatacccatctaccaaaagcagatatttttgcgcttgccctcacagtggtatgtgctgctggtgctgaacctcttccgagaaatggagatcaatggcatgaaatcagacagggtagattacctcggataccacaagtgctttcccaagaatttacagagttgctaaaagttatgattcatccagatccagagagaagaccttcagcaatggcactggtaaagcattcagtattgctgtccgcttctagaaagagtgcagaacaattacgaatagaattgaatgccgaaaagttcaaaaattcacttttacaaaaagaactcaagaaagcacagatggcaaaagctgcag

SEQ ID NO: 4403 - DNA, 68 bp, Homo sapiens
  unsure (8): n=A,T,C or G
  unsure (10): n=A,T,C or G
  unsure (30): n=A,T,C or G
  unsure (34): n=A,T,C or G
  unsure (39): n=A,T,C or G
  unsure (42): n=A,T,C or G
  unsure (56): n=A,T,C or G
aaaaagananagagaaatggagaggttaantggnttccntanagttaaccaggtancaagctgggacg

SEQ ID NO: 4404 - DNA, 496 bp, Homo sapiens
  unsure (299): n=A,T,C or G
  unsure (347): n=A,T,C or G
  unsure (357): n=A,T,C or G
  unsure (406): n=A,T,C or G
ctgctttcacttctgcttcaacttcttctggcagcaactcagaaagcttggcagaggcatagttcttcctatcgccaactttctgtaaacatttgcagtatgttaaattatctgaaataatttttcctaattcagggaaatgccagccataccattctctacatcgcataatgtagttgtttagttctttatccaagtcatctaacaaggaaattgcctgaacaatcattgtgtctactttatcagcgctaaacttcaatctatatcgagacaggctgtgagccaatccaagacacatngctgccatttcacgtggttctaccccagggattaatccatccatttgngaacgaattnctctcataagttcattaacaacaggactatggatacaactgagattcancttttcctttatgacccctcctagtttagcatcagctactgccagcggttcatgggcttcttttactattttcttcagaacttttttcag

SEQ ID NO: 4405 - DNA, 418 bp, Homo sapiens
  unsure (35): n=A,T,C or G
  unsure (51): n=A,T,C or G
  unsure (110): n=A,T,C or G
  unsure (116): n=A,T,C or G
  unsure (118): n=A,T,C or G
  unsure (121): n=A,T,C or G
  unsure (128): n=A,T,C or G
  unsure (132): n=A,T,C or G
  unsure (149): n=A,T,C or G
  unsure (158): n=A,T,C or G
  unsure (166): n=A,T,C or G
  unsure (174): n=A,T,C or G
  unsure (298): n=A,T,C or G
  unsure (303): n=A,T,C or G
  unsure (356): n=A,T,C or G
  unsure (365): n=A,T,C or G
  unsure (367): n=A,T,C or G
  unsure (371): n=A,T,C or G
  unsure (380): n=A,T,C or G
  unsure (415): n=A,T,C or G
aaaaaaatgctggtctttattcaatataattgaanggtcacctagaaaatngaattgtgaattcagttccaaggtatttgtgtcttaaactatgaacaactttacttttntttcangncantttaatntatngttttaacagaaaactnacatatttngtttttgnaaaggaanccttaaaaatgtcatgctggtattgggctacaaccggaaaaatactgaaggtacacaaaagcagaaaggtaacatttagaaggatactgttttccaaacagggcaatgatgtgaatgatggtancatantatgtgtttcataaatttgtagaaaatattacatatggtataatcaggaattntaattggtngnttgnagtgtaaanaacttagacataaattttcaaaattacaagtgatntga

SEQ ID NO: 4406 - DNA, 565 bp, Homo sapiens
ggtaaagttatgtaaatatgtagctatgtaaatagctataaaataatatttacaattgtgaatagtatgtaaatagttgtgaacataactattgtgaataatatatgttatagttgtgaatgtaaatagtattcacaattgtgaatacaatgtaaatagctttcacaattgtgaatacaatgtaagtagctatgtaaatagtgaatacaatgtaaatagctatgtaaatagttgttatgctgattagggaataatgagaaggaaaaaaagtatacatattcagtacagatgcagtcatctttttttcccctcgaacatttttgatccacaattggttgaatccacagatggggaacacacagtcttggtaaatttaaccaacaaggagggtaaacgcatcccaacagggaaggtaaactgcacatccatcagtacctctagagggcatcactggtttatagctcaatacagtgactatatcagaataatggcctttagttttcctgaaagattaaattaggcttgctgttgttgaatgagataatcaaacatatgatgtaatttt

SEQ ID NO: 4407 - DNA, 597 bp, Homo sapiens
  unsure (583): n=A,T,C or G
  unsure (592): n=A,T,C or G
gcggcgtctcctccgggacgctgaggggcccgaggagaccgtgaggctctggcctgcagctcgcgccgccatggacgctgccgaggtcgaattcctcgccgagaaggagctggttaccattatccccaacttcagtctggacaagatctacctcatcgggggggacctggggccttttaaccctggtttacccgtggaagtgcccctgtggctggcgattaacctgaaacaaagacagaaatgtcgcctgctccctccagagtggatggatgtagaaaagttggagaagatgagggatcatgaacgaaaggaagaaacttttaccccaatgcccagcccttactacatggaacttacgaagctcctgttaaatcatgcttcagacaacatcccgaaggcagacgaaatccggaccctggtcaaggatatgtgggacactcgtatagccaaactccgagtgtctgctgacagctttgtgagacagcaggaggcacatgccaagctggataacttgaccttgatggagatcaacaccagcgggactttcctcacacaagcgctcaaccacatgtacaaactccgnacgaacctncagcc

SEQ ID NO: 4408 - DNA, 561 bp, Homo sapiens
  unsure (478): n=A,T,C or G
  unsure (509): n=A,T,C or G
  unsure (550): n=A,T,C or G
aaaccactccaacaactgctgtgaaggtcactgtgcagagaccctgggtaggggaggctggagccaggtgagtgtgacaggtcacagatggctctcaggccacctgccttcagctccttttgtttcgggttctagccagaagccctggggcctgtctcttgcctcttcttgtagcatgagacacccttgggggccctggggaagggaaggccagtggtgtggcttccctttcagcctagcaacgcccaaacccttttcctctacctggctccacttgtccccagatgctatctccaaattccaagtagcaaaattcctgggtttccccttcccagctcagagtcacttatggctggaatgtgggacaaactcttctaccagaaggtccagggcggttgcagcagctcaaaggtggggatgctggtgacattgactgggatggaaatgatggcccatggcagcccatgctgttccaganagcggcggatcatgtagccgtctcggccgancaggaggagggcggggatgtcagctgtgcgctgggtactgncctggatcatc

SEQ ID NO: 4409 - DNA, 121 bp, Homo sapiens
  unsure (45): n=A,T,C or G
aaatgttattaacatcaatacctactatttctagttaaaattcanatggagaagaaaaataatagctcccacgcattacatttgtaacttcaaatggtaagcctctcaggagctttccagg

SEQ ID NO: 4410 - DNA, 620 bp, Homo sapiens
  unsure (563): n=A,T,C or G
  unsure (584): n=A,T,C or G
  unsure (607): n=A,T,C or G
aaaggcaaatctttactccttaaagaaaaaatacaaactgtggtatttttaagagatcgttatattttacataatataaacaaaatcactaatgcatctatatgcttggtttccttaaactacaatgaaccacagaatgggtgaaaatgcatttactttttggtggcaaataaacatactggaaaaaacacgtaacacatagcatgccttttttccttactgtctacacacaggaactgacataaccaagttttaatagccgccacctcctcttccctgtccaaagtagccagttccataggcccccctaccacctcctcgctggaatcccccagatcctctgtagcctccactaggccctctgtagtctcctccagagttgcctctaaagccacctcgggaaactcctctatagcctccaccaacacctgcaccatatcctgcccgaaaggagttggcgctgccaccatagcctccgctaccatagcctccactgctatagccaccgccatagcctccaccactgtaactagaacctccccttctatatccgcttccattgncgtatcgggccatcttgggangacgtggaccatctccataccgngtactgccaatca

SEQ ID NO: 4411 - DNA, 265 bp, Homo sapiens
ccccttttaggtgttgcttgttcagtatctcaagcccagaaagatgaattaatccttgaaggaaatgacattgagcttgtttcaaattcagcggctttgattcagcaagccacaacagttaaaaacaaggatatcaggaaatttttggatggtatctatgtctctgaaaaaggaactgttcagcaggctgatgaataagatctaagagttacctggctacagaaagaagatgccagatgacacttaagacctacttgtgatattt

SEQ ID NO: 4412 - DNA, 233 bp, Homo sapiens; identical to SEQ ID NO: 4019

SEQ ID NO: 4413 - DNA, 460 bp, Homo sapiens
cctgaatctggaacatgccctggatccccccacctcagtcctcaagctttctggacccctgaagccaaggcagattctttctcccagcgtcatttctggggcaggaggaatctcttttctggtttacctgggccagacctaagaatagcaggatctctgaaaccacagggttttgatgtgtttttatcaagccaaatgtacaattgccaactgacactctggataattgagcacagggggtgccctcgtacattgtaccgtcactcccttctgaacagttggcagaccaaactgtttggaagctcagatactctggctcagggtaacacttttgttccccttacactcctcaactttccacctcagctagggaaagagaatgacagttaaggcttgacccaggattataatcgttagagcaagtgggagtttcagagacttaaggggcactgcagggagg

SEQ ID NO: 4414 - DNA, 350 bp, Homo sapiens
  unsure (9): n=A,T,C or G
  unsure (41): n=A,T,C or G
  unsure (101): n=A,T,C or G
  unsure (121): n=A,T,C or G
  unsure (154): n=A,T,C or G
  unsure (158): n=A,T,C or G
  unsure (160): n=A,T,C or G
  unsure (178): n=A,T,C or G
  unsure (237): n=A,T,C or G
aaaaatgtnattcctctgtacagtaaattacaaatctttanggatttttttgtaataagagaatttatatttgtaatggtctaagaatttttttgtaatgnggtatatagaattttaattnggagcacttataagctggtaagagagactatancatntnaattatcttggtttatgnttcagcatttcctctagaatttttgctctcaaatatgtgatttaatgaactaaaaacancactcatcagtcttgggaaatttgaactttgatcaacttaactaaagaaggaagggtagtaagaatttttcaaatacaaatatttgccaattcacagatgataacatttaagg

SEQ ID NO: 4415 - DNA, 211 bp, Homo sapiens
  unsure (50): n=A,T,C or G
  unsure (73): n=A,T,C or G
  unsure (85): n=A,T,C or G
ccaagcacaggtgtgtcagcttcttgctgacaaccaagacagcagcaagntccttgcaactggcttctgtaanacgacagttttncaacgacaacatctgcaggaagtgttttgggcgtgtcatggtcttgtacagcaacatggcaccctcatccaggagcacattggctgagagacgcaggtgcttcagggactggttggctttgaggac

SEQ ID NO: 4416 - DNA, 431 bp, Homo sapiens
  unsure (163): n=A,T,C or G
  unsure (314): n=A,T,C or G
  unsure (319): n=A,T,C or G
ccttccagggctgaccagtttgagtatgtaatgtatggaaaagtgtacaggattgagggagatgaaacttctactgaagcagcaacacgcctctctgcgtacgtgtcctatgggggcctgctcatgaggctgcagggggatgccaacaacttgcatggattcnaggtggactccagagtttatctcctgatgaagaagctagccttctgaacctcgcctgaagccagcctctctgccaagtcactcaggtcatgggcattgttcaagcctgagtggcagccgctcttgctcacctgttgaggaagggctggctnactgnccaccgtggcggcatctttaactggcctccactcaatgggaaactgactcgcctgtgaaagacacagtgggagagctgaaaatgaatcagaagctttatgtatatgattttt

SEQ ID NO: 4417 - DNA, 577 bp, Homo sapiens
ccaccacacccaattccttgctggtatcatggcagccgccacgtgccaggattaccggctacatcatcaagtatgagaagcctgggtctcctcccagagaagtggtccctcggccccgccctggtgtcacagaggctactattactggcctggaaccgggagccgaatatacaatttatgtcattgccctgaagaataatcagaagagcgagcccctgattggaaggaaaaagacagttcaaaggacccctttcgtcacccaccctgggtatgacactggaaatggtattcagcttcctggcacttctggtcagcaacccagtgttgggcaacaaatgatctttgaggaacatggttttaggcggaccacaccgcccacaacggccacccccataaggcataggccaagaccatacccgccgaatgtaggacaagaagctctctctcagacaaccatctcatgggccccattccaggacacttctgagtacatcatttcatgtcatcctgttggcactgatgaagaacccttacagttcagggttcctggaacttctaccagtgccactctgacagg

SEQ ID NO: 4418 - DNA, 472 bp, Homo sapiens
  unsure (137): n=A,T,C or G
  unsure (158): n=A,T,C or G
  unsure (284): n=A,T,C or G
  unsure (288): n=A,T,C or G
  unsure (303): n=A,T,C or G
  unsure (307): n=A,T,C or G
ccagggagcagcacgatccgtgtgaactgagttgggccctgggcagccagagccacacattccctctccatgggcctctgctgagacctatagggcttcacatgcatgcagtgcagtcccagggccagcagcatcancatcccctgggaacatgttanaatggcagtctcaggctctacacagacccactgaatcagtatctgtattttcacaggatcctcaggtgatccacaagcacatgaaagtgtgagaagcccttcctcttgctgaacagtttcctcatncaanctccttctcttccgntgtntcttagggaagccagaatacctcccggatttcctagggagtgcactggattttatgccagtttgattacccacagttttcttcctcattcattcattcattcagtcagtcagtcaaatagtaattgagcacctcctgtgttccagtatgtgttctgtctgcaccc

SEQ ID NO: 4419 - DNA, 432 bp, Homo sapiens
  unsure (172): n=A,T,C or G
  unsure (239): n=A,T,C or G
aaaactgataataatgctgaattatcttaagtgagatgttaagcccactttgttcttttaatgtaatggagcttatgggtagaagaccatgtctactaattacaaaaaaaaaaaaaaaccatgcattgctgcttttcctaccacttccagtaagaaaatgggtgttttgaanaaatcatttgccttgtcctcacggaatctgattaagccctggcctcttgattgtatagagtcattgngtatattccagttacctagatattcccttgagattttgatacaatttgagggaggcagaagtctgcagttgaagaaaaaaaataagtctgtttgtcatatttaagtagcctgtggctatttttatactgattttgatatcatgttcttttcatagtcgtattttgccaccgtaaacataaaaaaaaaaaaaaa

SEQ ID NO: 4420 - DNA, 284 bp, Homo sapiens
ctttctattagctcttagtaagattacacatgcaagcatccccgttccagtgagttcaccctctaaatcaccacgatcaaaaggggcaagcatcaagcacgcagcaatgcagctcaaaacgcttagcctagccacacccccacgggaaacagcagtgattaacctttagcaataaacgaaagtttaactaagctatactaaccccagggttggtcaatttcgtgccagccaccgcggtcacacgattaacccaagtcaatagaagccggcgtaaagagtgtttt

SEQ ID NO: 4421 - DNA, 321 bp, Homo sapiens
ctggcttccgagaggcaattctgtccttggaagccaggtttgaccatctgtaatcagccttgtgagaagtctcgtttgagggggccagggatggaacgggagggcgcatatcgtatgaggtatgggcattgtgttaagctgggggaagttgcagcttgtcctgaattacatggagaggaataaagtgggtgagtaggaggagccatttcatctgaaagcctgaggcccctctggtcccctcgataaaccccactggtgtcccaggccacaggtaacaggagaatagacatttaatgtcacagaatgtcagagcaggcaagg

SEQ ID NO: 4422 - DNA, 322 bp, Homo sapiens
ctgactaagagccctctggcacaaatggaagaagaaagaagggagcatgtagctaaaatgaagaagatggagatggagatggagcaggtgtttgagatgaaggtcaaagaaaaagttcaaaaactgaaggactctgaagctgagctccagcggcgccatgagcaaatgaaaaagagtttggaagcacagcacaaagaattggaggaaaaacgtcgtcagttcgaggatgagaaagcaaactgggaagctcaacaacgtattttagaacaacagaactcttcaagaaccttggaaaagaacaagaagaaagggaagatctttt

SEQ ID NO: 4423 - DNA, 456 bp, Homo sapiens
  unsure (323): n=A,T,C or G
  unsure (414): n=A,T,C or G
cctctgcgattttgaaggacaactgctgctaaggagtctatctgtgattggagggttgaaacagtattaggtaagtcttccaaactgtttgtaagatcttgtgagagggagcaatagtacatgagggaagtagaaagcccgaccactccggttccaactgcagtagtcattcctagtcgtactaggatgggtattaactgaacggccctgcattggcacacttgagtttttacagggataggtaggttttgtttcctgggacaatgtcgatttttgggcttagaaaaaccagagtacaggtaccagtccagttgatagggtancagaggtaggtggaggtaccgcacaggaagaatatgccttggctaggtaagtaaaattggttgtgtatgttaaaaagatgtgtaagcttgnggtctttgtatatccatgctcctagggtgcttgctaaggcag

SEQ ID NO: 4424 - DNA, 312 bp, Homo sapiens
ccagtcctggtgtctgagtgattcccagggcccagcaaagggaccaagtttccaggtcagcgacattggatgccttccctctgcctctgggagctatgggttggcatgcattggggtagagatccaatctggcctgaggctcactcaggacttcggggtgagaggaggggaggagctgagctgccttggctaatggggttgaaatttctgatcttaaactctccactgaatattctctcagagccctgaagacaaggggtaacaccccaaaatatggactcattttccactccaccttcattggccgagcag

SEQ ID NO: 4425 - DNA, 161 bp, Homo sapiens
  unsure (44): n=A,T,C or G
  unsure (73): n=A,T,C or G
  unsure (77): n=A,T,C or G
  unsure (153): n=A,T,C or G
cctatggaggtgcctatgatgtcatgagctctaagcacctttgnggtgataccaactatgcctggcccaccgnaganattgcagtcatgggagcaaagggcgctgtggagatcatcttcaaagggcatgagaatgtggaagctgctcaggcanagtacatc

SEQ ID NO: 4426 - DNA, 183 bp, Homo sapiens
  unsure (34): n=A,T,C or G
  unsure (43): n=A,T,C or G
  unsure (48): n=A,T,C or G
  unsure (50): n=A,T,C or G
  unsure (55): n=A,T,C or G
  unsure (66): n=A,T,C or G
  unsure (90): n=A,T,C or G
  unsure (93): n=A,T,C or G
  unsure (103): n=A,T,C or G
  unsure (108): n=A,T,C or G
  unsure (166): n=A,T,C or G
  unsure (179): n=A,T,C or G
  unsure (181): n=A,T,C or G
taactcaaaagctaataattaaaaatggaaccangtgagcagngcctnanatacntgcaaaacctntctgcacaaatgtgctccctgccntanaagacaaaanggatnggaatggagaagcctacaaccacccacgggtcctgacaaggctgacgggtggtaatcncaccttggaggcnangc

SEQ ID NO: 4427 - DNA, 145 bp, Homo sapiens
  unsure (27): n=A,T,C or G
  unsure (41): n=A,T,C or G
  unsure (92): n=A,T,C or G
  unsure (107): n=A,T,C or G
  unsure (116): n=A,T,C or G
  unsure (132): n=A,T,C or G
  unsure (141): n=A,T,C or G
ccagcatcacatccctctcctcattgngctcatccttgacnatgaagatcatgtcgaagcgcgacaagatggtgggcactggagtcaatgtngtcctcccccttcgnctcaccccngcggccgaacactganttggcagcngcca

SEQ ID NO: 4428 - DNA, 192 bp, Homo sapiens
ccaaaattgaaaggaaaaatttttttaaaatttctctaaatgtaggcctggctgggctttgaccttttccgtttttaaatcactcacagagggtgggacaggaggaagagtgaaggaaaaggtcaaacctgttttaagggcaacctgcctttgttctgaattggtcttaagaacattaccagctccaggttt

SEQ ID NO: 4429 - DNA, 612 bp, Homo sapiens
  unsure (611): n=A,T,C or G
aaacaaacactaggaatgtgctagttagggggagagataacgaggtggccacagaaatatccatcaagtagaataatctacatgcaaagactcatggtgagactgcattgttactgcaccaaagttaaagccatagctctcagagtgttctgccactgcttacctctttcttggcctgtttgatgtctccctcatccttgatgcctagtcctgaggtggaggccttctcagcctccattcggcttcccccagcccggccctccccaccttcattagtcttgaaggatgaatggctatcagagtcagcaaaaccaccttcactgacactattgcagctcaaccatgaggccaccttgttcttgggtgtctcttcggaggaaggtggattgcagccacctacagggattgagggaggaacaggaatatgtgggggtccaagatctggggggtgggagtccttggaagttgtctcagagagtccgttctctttctggccccgggtctgcctccgggtagcatagctccgccacactgaactggtgctgaagtcctcatccttacagaagttatcatctgagctatcatcattggactcttcagggtcctctgtnc

SEQ ID NO: 4430 - DNA, 411 bp, Homo sapiens
ccttgctacggcacattgtgaaggagttcaagagagagacaggggttgatttgactaaagacaacatggcacttcagagggtacgggaagctgctgaaaaggctaaatgtgaactctcctcatctgtgcagactgacatcaatttgccctatcttacaatggattcttctggacccaagcatttgaatatgaagttgacccgtgctcaatttgaagggattgtcactgatctaatcagaaggactatcgctccatgccaaaaagctatgcaagatgcagaagtcagcaagagtgacataggagaagtgattcttgtgggtggcatgactaggatgcccaaggttcagcagactgtacaggatctttttggcagagccccaagtaaagctgtcaatcctgatgaggctgtgg

SEQ ID NO: 4431 - DNA, 518 bp, Homo sapiens
  unsure (246): n=A,T,C or G
  unsure (252): n=A,T,C or G
aaaccaagaagaagagaagagaagaaatgccaatatattaaatgaaaaaattagggaagaattaggaaaaatcgaagagcaacaaaagaaaaagttagaagtgaagcaacttgaactcactctccgaatatacaaaatatggaattgaagactgtaagaagtaatttgaatcagctcaatcaatcgctggtaaaaattttatatttctaactttatttcatcaatattacttttaatatcccttcnatttantatgtattattcagaattatgataatgccgctataatatttaggtacaaacttttgtatatttcattcataagttttcatttctttcgggtatgtacctaggaatggaattgctgggtcataaggtacctatgcataaccttttcagcaatcacctcacagttttccaatgtgtgcactattttacttccccaccagcgatgtatgaaagatctaatttctctacggcctcaccagggtggagtgcggtggcgcactctcagctca

SEQ ID NO: 4432 - DNA, 427 bp, Homo sapiens
aaattaagaaaagtgaactatatgtatttgttttatacatttaaggcttagactcataaataatgctattgtttatgatttgaaaactttcaggcaaaatccaatttacatttttcccttccctagcaattacttttttccagcttcaactcttcttagttactaatactttgttgactctaaaaatgaaatcattcacaaacttttggtatatgatggagaatgaaaaactagagtcagacagctttaattgacattgtcaacacctccagttatcaggaatacatttttttactgccttaacctgtagtgcgtagaatatgcatcaatttcttgaaggagattcatgtttttataagaattttcatgtaattattgcaattgtggtcaaataaggaacgtttcctgcttgaaattatattgattt

SEQ ID NO: 4433 - DNA, 351 bp, Homo sapiens
aaaaaataacttaagaagcaagaggtccggccctttacttgtataaatacagcagcagaactagagtttcttaagacaacgtggagaagagtctgtgtttagcacctcaatcatcgatcttaacgttggaaacgtttctgatactgatggaagagtcttataagaaggtgaaatacttttcaagttcatccagcttttggcgactttgctaaaggaaagctcaaagtcaaaagttaatccatcttcaaagctggtaaaaatttatcaaactctttctctaggttaggcaaaaatgcatgcatagaacccataaattcagacttttcacagttttcggtacacctgtgcttt

SEQ ID NO: 4434 - DNA, 614 bp, Homo sapiens
cctttatatgtaaataacaaaatagtgattttaattcatatagatgtatttgtttatctaagtatgcttttatactccctgctatatttttgtatcaattaagtgtgcctggcagcatgaagaaagtcagtacaacaatggtttctctctgttgtgtaaaactgaagttggaagtgggtaacccgacaatggcacagcagcttcacaagatcctgagggatcagcctcctcctttcgtgctgcctcactaccctcagtccttggcttctgcctcagagtctaagatggctactttagatccaggcaccaagccctcatcattacatcatctcattccaagaaaaaaaaagaagcaatgacaagtattccctctccctgtaaagacaccccctagaagtccaaagtaacatttctctttccattctttgttacgaatgagactggaaaatacagtgtgtatttgggaggctgtatgcctagctaaaaatcaggaggcttattactaactaagaaggaagaatgtgatactgaaggtcaactggcaggttttgccacagtgtaaaaatcaggatttcatagatatacagaatttttgaataagtgactttacctcg

SEQ ID NO: 4435 - DNA, 560 bp, Homo sapiens
  unsure (167): n=A,T,C or G
  unsure (171): n=A,T,C or G
  unsure (310): n=A,T,C or G
  unsure (317): n=A,T,C or G
  unsure (334): n=A,T,C or G
  unsure (390): n=A,T,C or G
  unsure (449): n=A,T,C or G
  unsure (514): n=A,T,C or G
ccaacctgaaaccaaagtcctgggtccgcctcaagcggggcatctacaaggatgacattgctcaggtggactacgtggagcccagccagaacaccatctccctgaagatgatcccacgcatcgactacgatcgcatcaaggcccgcatgagcttgaaagactggttngccnaaaggaagaagtttaagcggcctccacagaggctgtttgatgctgagaagatcaggtccctggggggtgatgttgcctctgatggtgacttcctcatctttgaggggaaccgttacagccggaagggctttctgttcangagcttngccatgtctgctgtgancacggagggtgtgaagccaacactctctgagctggaaaagtttgaggaccagccanagggcattgacctggaggtggtgactgagagcacagggaaggagcgggagcacaacttncaacctggggacaacgtggaggtctgtgagggtgagctcatcaacctgcagggcaagatcctcancgtggatggcaacaagatcaccatcatgcccaagcatgaggacctc

SEQ ID NO: 4436 - DNA, 144 bp, Homo sapiens
  unsure (124): n=A,T,C or G
  unsure (135): n=A,T,C or G
aaatcataggggaaaagcagtcctgttctaaatcctcttattcttttggtttgtcacaaagaaggaactaagaagcaggacagaggcaacgtggagaggctgaaaacagtgcagagacgtttgncaatgagtcantagcacaaa

SEQ ID NO: 4437 - DNA, 526 bp, Homo sapiens
aaagagatatcaaaagtccctattttcatgagttccacatcacatattttgtgctttctttgaatagccaaaaaattttcttggggaaaatacgagagtaaaaccagagctaaggagctataagaatttggaatggcttcttgaaatcatgccgctccaagtatgtcataacctcgatcactcaaaaatacataactcccaaaccaagaatttctgagggcaaaagcacaccagcgtgtataggaaaggcaggggaagggatggaagggagagaaagagggaacaatgtagatttcctgttttataccaggaaaactaggccaaactcaatttaaatgaatagctccaaagcagtgcagtcagaaaaagttctcagtgtgacatagacttcagggaaacaacacgtcctgaaagaaacatgattcccctcaagccacaaaggattttctcatcaagtgttttcacctctgcattagatttggacacaagaagaggagagcatttactcaggtaaaaatagttctct

SEQ ID NO: 4438 - DNA, 560 bp, Homo sapiens
  unsure (301): n=A,T,C or G
ccaccagagaaatgcgaatcaaaaccacagtgagataccatctcacaccagttagaatggcaatcattaaaaagtcaggaaacaacaggtgctggagaggatgtggagaaatgggaacactttgacactgttggtgggactgtaaactagttcaaccattgtggaagtcagtgtggcgattcctcagggatctagaactagaaataccatttgacccagccatcccattactgtgtatatacctaaaggattataaatcatgctgctataaagacacatgcacacgtatgtttattgcggnactattcacaatagcaaagtcttggaaccaacccaaatgtccaacaatgatagactggattaagaaaatgtggcacatatacaccatggaatactatgcagccataaaaaatgatgagttcatgtcctttgtagggacatggatgaaactggaaaccatcattctcagcaaactatcacaaggacaaaaaaccaaacaccacatgttctgactcataggtgggaattgaacaatgagaacatatggacacaggaagggg

SEQ ID NO: 4439 - DNA, 212 bp, Homo sapiens; identical to SEQ ID NO: 2921

SEQ ID NO: 4440 - DNA, 522 bp, Homo sapiens
  unsure (122): n=A,T,C or G
  unsure (133): n=A,T,C or G
  unsure (164): n=A,T,C or G
  unsure (181): n=A,T,C or G
  unsure (186): n=A,T,C or G
  unsure (211): n=A,T,C or G
  unsure (401): n=A,T,C or G
  unsure (405): n=A,T,C or G
  unsure (451): n=A,T,C or G
  unsure (452): n=A,T,C or G
  unsure (454): n=A,T,C or G
aaaaataattatttttttaattgacagataacaattgtacatactcatggagtacatagtgatattttgatacctataatatatagtgatcagatcagggtaattggcatagccatcatctnaaacacttatnatttcttcgagttgggaacattcttgacttngggttattgaactttgnaaatnccatgtgattgacctaagttatgtnctatgtcaggtcctgatgattcaaggtcagaagtagtttgatgtcagggagtttaatgctgcccagcatgggtagaataaccttgttgcattacatgaccctatttccctgaccagagcagattgatcagggctggagttgggtcccaagctaagcttgtcatattttctctttcttgggaattgtgatngagnctaaaacagtttaattggtttgagataattacatgacctgaggcannanattgcaaactggtggcccatgggctgaagctggttcataaataagttgattctattttttttgccttt

SEQ ID NO: 4441 - DNA, 352 bp, Homo sapiens
  unsure (165): n=A,T,C or G
  unsure (284): n=A,T,C or G
aaaatattagcgaagctatcaaggggaaaaaaacacattttggcttaagtaaactacaaaaagccacaaatgctttgcaaactctgtcttaccttttatatgaaaataagcaaaatgtaatgtacatatttttatatttttatttaataagagatgcagacccanatttatttatttatttaattaaatatgttagccctccaactccacatttttttttaataggtatggtcctcttttaatggtctctgatcctttttaatgagtgccatacgccaatgatntgcctgcaggtttgtgagcattcttgggatgtcaggtgacctggtgtgttcctaacatttaccaatgg

SEQ ID NO: 4442 - DNA, 348 bp, Homo sapiens
ccttcagaagttaaacgtgatcacttgtgctgggacagccaatagaggagtctgagatgatcatttccaaggagttcttcacagaggaggtagctttggagctgggctttgaggttgggcagtatttgaaacagtagagacggagcaaagaacccctgggcagaggaaacagtaagtgcaaggcataaagtgaaggtggagggtgttaccgcggggtgcactggttgcattacctcctggtggggtcagtcattcgctttcttttcctcctcaggaccagggctctttgaagatgaagaatgcccacaagggaacacaggcagaagatcagataagccaaagtcacag

SEQ ID NO: 4443 - DNA, 505 bp, Homo sapiens
ccacgttcctggccgaggacccgaaggttaccctgaccatcttcgttgcccgcctctactacttctgggacccagattaccaggaggcgcttcgcagcctgtgtcagaaaagagacggtccgcgtgccaccatgaagatcatgaattatgacgaatttcagcactgttggagcaagttcgtgtacagccaaagagagctatttgagccttggaataatctgcctaaatattatatattactgcacatcatgctgggggagattctcagacactcgatggatccacccacattcactttcaactttaacaatgaaccttgggtcagaggacggcatgagacttacctgtgttatgaggtggagcgcatgcacaatgacacctgggtcctgctgaaccagcgcaggggctttctatgcaaccaggttccacataaacacggtttccttgaaggccgccatgcagagctgtgcttcctggacgtgattcccttttggaagctggacct

SEQ ID NO: 4444 - DNA, 449 bp, Homo sapiens
aaaacaaaagcaagttctttgttaggaattggtcaaaattcatctctttctttaagcccatcaactcccaggacggtttgagttactcagttacctaagcttgctattcatccaaatcattttctagagtcactgtataagggtctatgagtagctgtgtatgaataaatattacctgtctacctcaaaatacacatactgctgaagcattctgtacaaccgtgtgttatcacagtgcagttttaagtgtaacgttagaacttaggcattttcctgtgtggcggaataagaaaggattaaacagttacaagcctccaaattcaaataaaattaaatcacagttcagatgaaactgaatatcattgtaataatctcataatatacatttgtaactttgtagctatctttgaaatcacttgactttgcaatggtgctaagctgatagattt

SEQ ID NO: 4445 - DNA, 478 bp, Homo sapiens
  unsure (390): n=A,T,C or G
  unsure (391): n=A,T,C or G
  unsure (452): n=A,T,C or G
  unsure (453): n=A,T,C or G
cctgtgaggtgcagagtgcccagaactggactcaggatgcccagggccactctgcctctgccggcattctgccgtgtgccctcgggcgagtcactgcctctccctggccctcagtttccctatctcgaacatggaactcattcctgcctgtctcctttgcaggctcatagggaagacctgctgagggaccagccaagagggctgcaaaagtgagggcttgtcattaccagacggttcaccagcctctcttggtttccttccttggaagagaatgtctgatctaaatgtggagaaactgtagtctcaggacctagggatgttctggccctcacccctgccctgggatgtccacagatgcctccaccccccagaacctgtccttgcacactnncctgcactggagtccagtctcttctgctggcagaaagcaaatgtgacctgtgtcactacgnnactgtggcacacgccttgttcttgg

SEQ ID NO: 4446 - DNA, 375 bp, Homo sapiens
gtcaggacacagcatggacatgagggtccccgctcagctcctggggctcctgctgctctggctcccaggtgccaaatgtgacatccagatgacccaatctccttccaccctgtctgcatctgtcggagatacagttacaataagttgtcgggcctctcagaatatagatcggtggttggcctggcatcaacagaaaccaggcaaagcccctaatgtcctaatttatgcgacttccagtttagaagaaggggtctcattaagatttactggcagtggatctgggacacaattcaatttaaccatcaccagtctgcagcctgacgattcagcaacttattattgtcaacattattctgcatctcttcgcagttttgg

SEQ ID NO: 4447 - DNA, 407 bp, Homo sapiens
ctgcttcctgtctgtgacacctgggaagacacagtttgggcctacttccgggtgatggtggacagtctggtagaacaagagatccagacatcagtagtaactctggatgaaactgaagaactccctagagaatatctgggagcaaactggacgttagaaaaggtttttgaggaacttcaagctactgacaaaaagagagttctggaagagaatcaagaacattatcatatagttcaaaagtttcttatcctgggagacattgatggtttgatggatgagtttagcaaatggctttccaaaagcagaaacaatctacctggacacctgcttcgctttatgactcaccttattttgtttttctatactctgggactacagaccaaggaggaagtttctattgaagtttt

SEQ ID NO: 4448 - DNA, 481 bp, Homo sapiens
aaaataattactctcacacataattttttttatcatgtaaattctaaacaaacttctgaaggtataattacacaaattcttagcgatcacaaaagtagatgattgggctactgtgtcatttttctaactgtgttttgtcgataatatgcaaaatttaggaataatgtagaaaaatgatgtatttcaatacagcttacaaatgaaacttttttggcttcacaaagacatacttattatcataactgatacaattttcatactacagtgctcttttgctttataaatactcaagttattttgtgcgctgcttcaaattttacttttgtgcgtcgccttccatccccttagtacatcttatagtagctgtaagttgatcctgtgtttcttgaagctaaaacaaagaattaaaaaaaattacatttagaaatgacctaaatgtccatcagtagatgaatgaatcaacaaaatatatataaaatat

SEQ ID NO: 4449 - DNA, 501 bp, Homo sapiens
  unsure (29): n=A,T,C or G
  unsure (326): n=A,T,C or G
  unsure (347): n=A,T,C or G
  unsure (427): n=A,T,C or G
  unsure (429): n=A,T,C or G
  unsure (475): n=A,T,C or G
  unsure (476): n=A,T,C or G
tgcctcaaatcgtcgtagtgggaacgcanagcagcggaaagagctcagtgctagaaagcctggtggggagggacctgcttcccagaggtactggaattgtcacccggagacctctcattctgcaactggtccatgtttcacaagaagataaacggaaaacaacaggagaagaaaatggggtggaagcagaagaatggggtaaatttcttcacaccaaaaataagctttacacggattttgatgaaattcgacaagaaattgaaaatgaaacagaaagaatttcaggaaataataagggagtaagccctgaaccaattcatcttaanattttttcacccaacgttgtnaatttgacacttgtggatttgccaggaatgaccaaggtgcctgtaggtgatcaacctaaggatattgagcttcaaatcananagctcattcttcggttcatcagtaatcctaatttccattatcctcnnctgtcactgctgctaatacagatat

SEQ ID NO: 4450 - DNA, 302 bp, Homo sapiens
aaattctttatgcctcatcctctgagtgctgaaggcttgctgtaggctgtatgctgttaatgctaatcgtgataggggtttttgcctccaactgactcctacatattagcattaacagtgtatgatgcctgttactagcattcacatggaacaaattgctgccgtgggaggatgacaaagaagcatgagtcaccctgctggataaacttagacttcaggctttatcatttttcaatctgttaatcataatctggtcactgggatgttcaaccttaaactaagttttgaaagtaaggttattt

SEQ ID NO: 4451 - DNA, 581 bp, Homo sapiens
aaataccaggtactcattttcttgatttgaaagtttaacatgacttctaaggacatctcttcaaaaagaaagtaaacagggaatgaaggtggtgggaaaatcacttcacttcacccactatttcatgttgtaataagggccaccataaggatgccctcctcatagtgttcggttctgatcttcctcgagaacagtcacttggcgcactttaataatctggactgctccagatttgactttagatactccatggtatctagtctttatgatcagttgaatgatcagtgtttaagtctaaaaataatgctttcctgaaaatgtttatatttcattgctgtttccttattgcctgctagccaaatggaatttgggcaagcaactctttgaagacttttttaccctagaaatttacttttgtcctaaaaaccctaactgtaaataagcagtcgaagcaagttgccaccttgaagttgagggatacactttgcttcatcagtattaaaaaccatggtactcttattttgtcttttttaattcaaaacattttctaaatgtggtactttgaaccttggagtatttac

SEQ ID NO: 4452 - DNA, 467 bp, Homo sapiens
aaaaacatggagaggaatgattatcggacactgcgccaggggattatcgacatggtcttagccacagaaatgacaaagcactttgagcatgtcaacaaatttgtcaacagcatcaacaaacccttggcaacactagaagaaaatggggaaactgataaaaaccaggaagtgataaacactatgcttaggactccagagaaccggaccctaatcaaacgaatgctgattaaatgtgctgatgtgtccaatccctgccgacccctgcagtactgcatcgagtgggctgcacgcatttcggaagaatatttttctcagactgatgaagagaagcagcagggcttacctgtggtgatgccagtgtttgacagaaatacctgcagcatccccaaatcccaaatctctttcattgattacttcatcacagacatgtttgatgcttgggatgcctttgtagacctgcctgattc

SEQ ID NO: 4453 - DNA, 519 bp, Homo sapiens
ctgtgggcccccactctccacctgctctcctgctcaggttggggcagccaaagaccttctcttcctggggagagaggttagggagggaccattttttgattatttgagggtgtggttcagttgtaaacagtgtaaattttagaatttgtgttattgtgatggcaatgaccaactgcaaaatatttcccatttgccttgtaataacaagagcatgtactttacgcaattgaagtttttggaccctacttatttactttactttattaagaatagtaacatttgagcagagaagagttctaattttgcatcagagccaaaagtgaaaatgaaaggaactgacccatgaaggaacaggtgtgagctatttacttcattcctgcccatcctggttgatgttgagctcttgccctgcatcccactttcaaatgtggtggatgcctcacctaggaaaggccctcaccacgctggcttgctctgctcactaactgtacttacttctcttaatcccctatgaacact

SEQ ID NO: 4454 - DNA, 332 bp, Homo sapiens
aaatagaaaacagtatattgaaagtggtgggtttgatctttttatttagaaacccacaaaatcagaaacacagtacaaataaaacagaaatcaaactataagctgacttttagttcctaaaaagaaacatatttcaaaagcaatggaatctagaattcttataacatgaataacaaaatgtacagcaagcctatgtagttcaattaatatataaggaaaaggaaggtctttcttcatgatacaagcattataaagtttttactgtagtagtcaattaatggatatttccttgttaataaaattttgtgtcataatttacaaattagttcttt

SEQ ID NO: 4455 - DNA, 237 bp, Homo sapiens
ccaccgggggccgggatcggagtctcctctgctgggacgtgaggacacccaaaacccctgttttgatccactccttccctgcctgtcaccgtgactgggtcactggctgtgcctggaccaaagataacctactgatatcctgctccagtgatggctctgtggggctctgggacccagagtcaggacagcggcttggtcagttcctgggtcatcagagtgctgtgagcgctgtggcag

SEQ ID NO: 4456 - DNA, 451 bp, Homo sapiens
ccacacaggcaggcgccttccagtcttacaggtacatgtgaatatagggctctttcctcagctccatatgcaatagtcagcttaaactctagctctgactaatcctctaggagtaggtagtaacattttccactagtctcctgaggatggtttgatgtctctggagttgagtctatctcgagctagcaggttggcccctatgtaacatcttcactgtggaaagtgaagtccacaattccctgggaaaggatggaactgatttatgcagtccatgccccaccttttcttctacctccgccgcaactgaaatcccctttctgtggaattcactgcaaagctatgaagaaaacagaagcaaggacatctgattcctagggaggtctaatttttttaggctaaactactgcaattttctgtgtactgccatcagttatgaaaaagtttttttttt

SEQ ID NO: 4457 - DNA, 329 bp, Homo sapiens
  unsure (192): n=A,T,C or G
cctgaggtctgcggaaggtgggaggaggcagacaccctgcgtggcccatggtcggggcgtccacgccgaggccggcaacaaacgacagtatctcggattcctttttttttttttttaattttttatactttggtgtttcacttcatgctctgaatactgaataaccatgaatgactgaatagtttagtccanatttttacagaggatacatctatttttatcattatttggggtttgaaaaatttttttttacaccttctaatttctttatttctcaaagcagataattcttctgtgtgaaaatgttttctttttttaatttaaggttt

SEQ ID NO: 4458 - DNA, 517 bp, Homo sapiens
ccaagtgtctggatgaacgacagcatgcacaaaggaatgtgggggagagaagtcctgaccagtcggaacacacagatgggcacacctctgtccagagtgttattgagaagttgcaggaagaaaatcgactgttaaaacagaaggtgactcacgttgaagacctcaatgccaagtggcagcgctacaacgccagcagggacgaatacgtgagggggctccatgcgcagctcagggggctgcagatcccccacgagcccgagctgatgaggaaggagatctcccggctcaacagacagttggaagagaaaataaatgactgtgccgaagtgaagcaggagctggcggcctccaggacggcccgggatgctgcgttggagcgggtgcagatgctggaacagcagattctcgcttacaaggatgacttcatgtcagaaagggccgatcgggaacgggctcaaagtaggattcaagaactggaggaaaaggtcgcctctttgctgcaccaggtgtcctggag

SEQ ID NO: 4459 - DNA, 474 bp, Homo sapiens
aaaaatatttagattaaagccccctttaatgagtacaagaaaaactcttggcttgttagaagaaagtatattctttctagaatttggtgcaggaatatgtgttcatatccaggcaaacgggtgtgtttttatcttcagacaatgaaaccttctcctctggggctttgttgccaggaagattagaactaaatttattttttcatttctgtcatgaaatcattccagatacctcttttcttctttccaaacggttttcacatgtgtttgaaatatttgtacttcgaattgtcggattttccatgtcctcctttctcctttgtgcccagcctgagtcagcaccatcccgcattcagaacctcccagtgaaagggcagccttcattttgagaaggtggaaggtgttagggtttgggagacagctcatccaatctcccaagtctcatggtagatttgtgactgtgagagtttccggttt

SEQ ID NO: 4460 - DNA, 625 bp, Homo sapiens
aaatagcaacaattcacttgttcttttctattttatggacttatacatttcaaatatgaccatgttaacaaccaagtatgtacaatatttttaaggacaaaaataacaattatatacagtttgcaaagatcaaattctaaccatggacacctttcatctagtccaatgactgaagcctgtccaacgccagtaactcccagggactaaggccaaatgaagcctcaatgctgtatttacctttttcctttcacatgctttttcttaaagaaacatttacaatttacctgctttgaaactgtcaatagctatattaataatgttttgtgccacaaatcaaagtcctttcctactcaaaagctactgttaattgaaggcaatgttaccattgagatcaaattcagatgtctagatcccagatacctgggtatgaaatatgcaaatctgccaagagaaattagatatttttcttcttttcttttaatataacccactatataatagtgaactaaatatgtttgtttcatagaaacaacttacatttgccaatataaggcaaatggtctatgtacagatacatcaggactgcctaactgacagtgagtgttgctagccaggctccaagcta

SEQ ID NO: 4461 - DNA, 526 bp, Homo sapiens
  unsure (500): n=A,T,C or G
  unsure (515): n=A,T,C or G
ctgaggactcagagcaggagtaagggcacccctatcctccccatggctttgaaaagaagaaagaggggaaatttggagggatggtcaagttgatgattgaagagacaaagtagtgtaggaaaatctcaatgtttcttgcacagtcatttgttgaaaatgtgtcagcaagtacaagcccatcttaaactggcaatgagacatctgaaatagattatttaggccagggaggcagtattgcaaagaagaacatggctatcaacacttgtttgtctgactcagaggaataaaacatagtaaattttgccttagcgggccacccacattcattgggggaagaaacaattgaggtggggggaaaacagaacagatgaaccttcatggagtttcacaagagtccacatggttgtgtcccttattttcagaaaatgtgaaattggaaaatacgcacttgtgaaagctgaagatgtcacagaaatcttcagaggatttatttagatggncgtatcctccgctgncaactggatga

SEQ ID NO: 4462 - DNA, 392 bp, Homo sapiens
  unsure (212): n=A,T,C or G
  unsure (222): n=A,T,C or G
  unsure (259): n=A,T,C or G
aaattatctagaagttgccaaggtagctcagtcttgtgctgctcactttacagctttactctatgcagaaatctatgcagataagaaaagtatggatgatcaagagaaaagaagtcttgcatttgaagaaggaagccagagtacaactatttctagcttgagtgaaaaaagtaaagaagaaactggaataagtttacaggatcttctcttanaaatctacanaagtataggggagccagatagtttgtatggctgtggnggagggaagatgttacaacccattactagactacgaacatatgaacacgaagcaatgtggggcaaagccctagtaacatatgacctcgaaacagcaatcccctcatcaacacgccaggcaggaatcattcagg

SEQ ID NO: 4463 - DNA, 563 bp, Homo sapiens
aaacacatcctatatatcatgtcaatctggcaagaaatatgacttgctttttgctgagcttaattcagatatcagtaaaattaagtcataaaataatcatgtgtcatgtgactttggcaccctatagacatacttagttttaacttttcaaagtttggcctcctattagaaataatcatgtctcagatgagtaatgtctgtttccagggttcagaaaaggcaaactcatgaaatgccactgaaaagaactttcaacacagcatacttcatgtaaaagaaattgtttgtttgctttctttgtgtagatttctatttgtgttttatgtcatggaaatattccagaattaacagataatagtggtaaagtaatatgcagatagtctaaattcattttgagtttctaggtgtaagcagactaaatgttgcccagaatcagtgttgggttatcagtttatattaaatatactgagttgcccgttttgaaaatgcactttgaataatctcaaaaagatgtacaagttatacctgtaaaccacaaaagtgaagcctgaggcttctgttca

SEQ ID NO: 4464 - DNA, 174 bp, Homo sapiens
ctgcccctcctcccagcagctccagtgtccctgaggccgggggtccccccataaagaaacagaaggctgatgtgacactcagtgctctgaacgactccgatgccaacagtgacgtggtggatattgaagggctaggagaaactcctccagctaagaaactcaacttcgaccagg

SEQ ID NO: 4465 - DNA, 239 bp, Homo sapiens
cctcgccagcctcagtcaaatgtaacgttcctaggccaagccacgaattgcccaactgggtggtccggctgccctgctatctcacttgtttgtgtgcttattgtcaactctacctatgaggagtgagctcctaaaagcagagattcggccagcgcaggtagctcacacctgtaatcccagcactttgggaggatgaggcgggcggatcacctgagctcaggagttcaagaccagcctgg

SEQ ID NO: 4466 - DNA, 447 bp, Homo sapiens
ctggacaacccgtacatcgtgcggatgatcgggatatgcgaggccgagtcctggatgctggttatggagatggcagaacttggtcccctcaataagtatttgcagcagaacaggtattgtcaggtgcccccacacatctggaagctatcccctaagggacagggcccacccctggatgggccgagcagcctgatttccttgggaagccttcccaccctcctgtgccttcctttattggtccatactcagggaccttgacagagggacagggagacatagtctttggattcagctctgttagctctagttgttcagagaagaactcatttgacagttttgtcttttttttcttcctgtagtcattcagtcttggcctagtgatagactcagcctcagaatatcttgacatggaatctcctttctcactgggaagaacactttcttttt

SEQ ID NO: 4467 - DNA, 195 bp, Homo sapiens
  unsure (77): n=A,T,C or G
  unsure (104): n=A,T,C or G
  unsure (159): n=A,T,C or G
  unsure (166): n=A,T,C or G
  unsure (172): n=A,T,C or G
  unsure (177): n=A,T,C or G
  unsure (192): n=A,T,C or G
aaaagccgaggcacaggtatagctgggcacctggaagaagctctgccaaatggaatcctccttggcaggagtggtantgctaaggcgagcagagtgggctacangcaggtcctgcaggccctgggtagagctcatcctctgtctgtccattcctcccanaccccancgtggnggagnagacacaggcatagnaaa

SEQ ID NO: 4468 - DNA, 401 bp, Homo sapiens
aaagagttaaaagaaaagaagttaagaaaagaaaaaaacgtattttcttctgttcatttttatgagtacaggcaaagaataaaatatcccatgtacctctacaggatttagagttctggaatgctaaaaggcaacattttcctaacagccacaaactgaccattactgaccaatagagttataaggggaggtgtggctcagctcccaatataaagcaaaatcaacctttattaagtccgtatcagatgacctcctggtattcacataatataggcaacaggattttgaaatgacctacccctcattactattcactgatgctatgtataaaataagtcgactaactcttttctagatacacgttggttggaaacaaaaggttgtctgtatacaattttttt

SEQ ID NO: 4469 - DNA, 456 bp, Homo sapiens
ccaataaataggtcaaaataattcaaaagaattataaatgaaaaaaatataaattaaaaattaaccagaaacatacattttcaaattttggtgaatgtcataataaaggtcaacaaaggggaaagtgaggtaagttgtgtcacaactattatatataaaagaataatatgtaactactagaaaactattagcattataataaaatagtaactgtgttaaaactttaattcaaaaagttagtttcacagtcatttctactatgtaaaaatatacacaataaaaaacaaaaaactagcaagaaatttagacctaaagaagcttcagagatgcctcagaggtctcctcaattcccctagaaattaatctaatgcttttacaaacaaacagcacacacttttatttcagagattacatgaagggtgtgtgccagggacagtctggaaccggcctcctcac

SEQ ID NO: 4470 - DNA, 461 bp, Homo sapiens
ctgccccaggactgagtcaggccccgccttcactttctctttcttctcagtgctgcccttggagccctcgcagcccttcctcttcgagtcactcttcttgccctttgctctcctcccagaccgctctcgacacagatcctgttcaataagtttcatctgcaggtggaatatctgctcctggagtttgcagatggcgtgtttcgttctctcgcgccttgtcaccatgtagcacagatttctaaccctctctaggtcctgccgcagatgggtgaagagcttcaggcggcggtagaggacgtcctgctcctgctgggccaggttgtccacctcgtcggtcttgggggtcagcagcggctggttggcattggctttcctcttcagcttccagtactggtagatgaagtcgaccagtgcctcagccaggtccagccgctcagccacctcagccggctccaccagct

SEQ ID NO: 4471 - DNA, 316 bp, Homo sapiens
ccatggatccgactactctcgccaacagaacagatttaatgactttgatcaccgagagaggggcaggtttcctgagagttcagcagtacagtcttcatcttttgaaaggcgggatcgctttgttggtcaaagtgaggggaaaaaagcacgacctactgcacgaagggaagatccaagcttcgaaagatatcccaaaaatttcagtgactccagaagaaatgagcctccaccaccaagaaatgaacttagagaatcagacaggcgagaagtacgaggggagcgagacgaaaggagaacggtgattattcatgacagg

SEQ ID NO: 4472 - DNA, 402 bp, Homo sapiens
  unsure (31): n=A,T,C or G
  unsure (93): n=A,T,C or G
  unsure (197): n=A,T,C or G
  unsure (208): n=A,T,C or G
  unsure (239): n=A,T,C or G
  unsure (243): n=A,T,C or G
  unsure (297): n=A,T,C or G
  unsure (301): n=A,T,C or G
  unsure (312): n=A,T,C or G
  unsure (315): n=A,T,C or G
  unsure (330): n=A,T,C or G
  unsure (337): n=A,T,C or G
  unsure (345): n=A,T,C or G
  unsure (357): n=A,T,C or G
  unsure (384): n=A,T,C or G
  unsure (390): n=A,T,C or G
aaaaattgactttaatactttatgcaaatantgcctgtcccaaattctagcatgcacatggatctaccaacaaaaaaactaagttttcagtgngtgaacataaacttcaaattaaacctctgatgctttagcccatgtatcaattaccaacagattttcttcatcaatgtctgcagaccacattcatgatttctatnagacagaaatngagcagataaactatactgtatatgctgagnacanaatttgtgggaacataatgctgcaaatgaaagctacaaacactctgtaaatagnttanaaaaactagtnatngaaatcaccaaagtnccagctnataacggngttataagagtncactgttaactgaaaatgaaaaaaatnaatgtnttttttgagaca

SEQ ID NO: 4473 - DNA, 450 bp, Homo sapiens
  unsure (441): n=A,T,C or G
aaatttttcatattttttgaaaattaacatatatttattacagtgccaaatctcatgagtccctgtctcataatctaagaccaggctactctgaaagaggacagagttcactgcctaatccaacactggctgtagtgtaaatgcaacacaggtgatttttgccccagttccaaggctacctaactagctatgtgggccttagtcacccttaaaggaagatggttgcaactatgccagttagaacatttttctgctctgcttccacagtggcactcacaagaggaggacttgattttatagcttgtgtacaggagaatataaagttggcttcaaaggaggtaggataggtttggcatttttctcctcataatgtttcctaaagcatgaaaggatccttgatcagaagagtgctcagttctaatttctaaaatttgctggctnaatattttt

SEQ ID NO: 4474 - DNA, 502 bp, Homo sapiens
  unsure (118): n=A,T,C or G
  unsure (229): n=A,T,C or G
  unsure (262): n=A,T,C or G
  unsure (286): n=A,T,C or G
  unsure (321): n=A,T,C or G
  unsure (381): n=A,T,C or G
  unsure (383): n=A,T,C or G
  unsure (392): n=A,T,C or G
  unsure (427): n=A,T,C or G
  unsure (429): n=A,T,C or G
  unsure (461): n=A,T,C or G
  unsure (473): n=A,T,C or G
  unsure (486): n=A,T,C or G
  unsure (491): n=A,T,C or G
ctgtaaactgagaatgcagagctgaatagaacatgacatagctctgaaagccctgttgtgcctgaaaggatgaggcaggatcatgcatttgtttattgccaggcccctttcccctcanccatttcaattgccagaggaaggaatcagaggagctattctccctccatctttctccttcatcagtttctggttgatacctgagacaggtctaacatgagctaactttcanagtcagaaggtagcaaagaccatctctcattanacaaaagccaacctgccctagcantcccggtggtcacacctggaagccaagaataccanatgtctagttctcccactctaacaccttacatctgaaaaagaggggagagctgagcttcnanttgccccanatgacatatctggacagttgtgccttgagcatcanangaccttcctctccactctggctctctcttctntttctttctcanatccttggctggngggangccataaacac

SEQ ID NO: 4475 - DNA, 227 bp, Homo sapiens
  unsure (9): n=A,T,C or G
  unsure (20): n=A,T,C or G
  unsure (57): n=A,T,C or G
  unsure (72): n=A,T,C or G
  unsure (105): n=A,T,C or G
  unsure (118): n=A,T,C or G
  unsure (125): n=A,T,C or G
  unsure (144): n=A,T,C or G
  unsure (185): n=A,T,C or G
  unsure (188): n=A,T,C or G
  unsure (204): n=A,T,C or G
  unsure (219): n=A,T,C or G
  unsure (220): n=A,T,C or G
ttgcaaagnttctaacagcnacatagagtccatgtgatcagtagtggattcttgtcntgatgccagggtctnaccgcctaaagctggatcaaggcccttgctctncaaaattgccaancagttgncccgaaacttctccagcanctctaccttctgggtcaggtccttcagctctccctgagttncantcaacttctggtgcanctgcttgttgacggnntctaaca

SEQ ID NO: 4476 - DNA, 581 bp, Homo sapiens
ctgtctgctcctggcaccagcgtagcagctcctcctgggtgcctgccgacccggtggctggcatccctgtatctgtcttgtcgttgttcctctgcacaggctccttggctagcacatcatacaggtctcgtacctgattgggggtcactgcccggaggttcaggttggggtagcgggtggctgggtccagcccatactgggccacattgcgatgcatgttttctggggatgtctgtgacagaagctggtacaggctctcacgctcagccaacacctctagggactcagcgccctctgcccaccgcttcaccatccaggctgcatcaaaggctgccaggaagccccgtgccactccagtgcccaggggccagaagggctccaccaggcagtcccccaccagtcccagcagcaggcgggcgccatgcttctcttgcacacgagcagaactctctgcccgcatcatgctcgtgaagtcaaaggcagagacatcaggctgcccatgggcatcctgggcaaactctagtttcccgagcttgccatgggtggcaaagtcagcagtcttgatctcttgacctcatgac

SEQ ID NO: 4477 - DNA, 308 bp, Homo sapiens
aaatgattctttatttcaataaactttaacaaacaatatataatatttcttccttaaaaagctcattcaaagatcataggcagacttcttccccattgtattttagttggggagataaaggcaaaaagaggaaatgtaagctatcttacagtcattctgagaacctctggtttcatgctatactttcccagctaaaagttactaatttacgaagttcagatactgaaacttaaaaatcaagatccatatattagaatgtcctgctgtcacactggtggtggcccattgtgtcggagtctggtaaatgg

SEQ ID NO: 4478 - DNA, 481 bp, Homo sapiens
  unsure (252): n=A,T,C or G
  unsure (423): n=A,T,C or G
  unsure (442): n=A,T,C or G
  unsure (469): n=A,T,C or G
aaatcacagcttttacctatttgttaggctatagtgttttgtaaacttctgtttctattcacatcttctccacttgagagagacaccaaaatccagtcagtatctaatctggcttttgttaacttccctcaggagcagacattcatataggtgatactgtatttcagtcctttcttttgaccccagaagccctagactgagaagataaaatggtcaggttgttggggaaaaaaaaagtgccaggctctctanagaaaaatgtgaagagatgctccaggccaatgagaagaattagacaagaaatacacagatgtgccagacttctgagaagcacctgccggcaacagcttccttctttgagcttaggtgagcaggattctggggtttgggatttctagtgatggttatggaaagggtgactgngcctgggacaaagcgaggncccaaggggacagcctgaactccctgntcatagtagtgg

SEQ ID NO: 4479 - DNA, 338 bp, Homo sapiens
  unsure (27): n=A,T,C or G
  unsure (252): n=A,T,C or G
  unsure (273): n=A,T,C or G
  unsure (275): n=A,T,C or G
  unsure (284): n=A,T,C or G
ctgatgcctcactactagatgcagtgntgggaccttcctcttttggagctgtcccatgtacagtggacccaagctcaggaccttcgtggagctgcttctccaacctgagaaactcaagacccatcctcccgctgtcactttggacaatggaaatctacattttcttttcccttttttttttttttgagacagagtctcgctctgtcacccaggctggagtccagtggcacaatcttggctcactgcaacctntgcttcccgagttcaagcaantntcctgcctnagcctcctgagtagctgggattataggcatgcaccaccacacccagctattttt

SEQ ID NO: 4480 - DNA, 540 bp, Homo sapiens
aaaagttaggtgctctttgtatgcgaggattgggattgttaggggcctgtgttcgtgatgatcaccatcatggagtcatttcttgttgggaattgttagagggtaagatcagagataggtacttagttcaagaagactctctgaagctcccaaactgtagatatgtcctgtgtgcgaactggctggctttacagaagtcctgatggaagtgggtttattgttttttgactcgttaccaaccctctgcttactccttcccctcaaaaaagggaagctgacttctcaggttagccagcagctcactcatacttttttctctctctattccattggctgatctgctgacttggggctctgaatctggatactctccatcaccggttggctgctgtcaccatttccttcctcgttgatggcactactagtggtcaagcagaggatgcagatgtacaactcaccataccaccgggtgacagactgtgtacgggcagtgtggcaaaatgaaggggccggggccttttaccgcagctacaccaccca

SEQ ID NO: 4481 - DNA, 507 bp, Homo sapiens
  unsure (4): n=A,T,C or G
  unsure (24): n=A,T,C or G
  unsure (30): n=A,T,C or G
  unsure (34): n=A,T,C or G
  unsure (40): n=A,T,C or G
  unsure (53): n=A,T,C or G
  unsure (58): n=A,T,C or G
  unsure (62): n=A,T,C or G
  unsure (76): n=A,T,C or G
  unsure (78): n=A,T,C or G
  unsure (90): n=A,T,C or G
  unsure (93): n=A,T,C or G
  unsure (114): n=A,T,C or G
  unsure (134): n=A,T,C or G
  unsure (136): n=A,T,C or G
  unsure (153): n=A,T,C or G
  unsure (165): n=A,T,C or G
  unsure (176): n=A,T,C or G
  unsure (210): n=A,T,C or G
  unsure (212): n=A,T,C or G
  unsure (231): n=A,T,C or G
  unsure (236): n=A,T,C or G
  unsure (245): n=A,T,C or G
  unsure (279): n=A,T,C or G
  unsure (291): n=A,T,C or G
  unsure (322): n=A,T,C or G
  unsure (332): n=A,T,C or G
  unsure (449): n=A,T,C or G
  unsure (493): n=A,T,C or G
  unsure (504): n=A,T,C or G
tcanccatttataaagaaacaacntacaangaangctganctgaggaatgcanatgtntacngtaagaaggaacananaatgtaattcancantcctaaggcaaacaattaatnagaaaaatacatttactgtnantgaaaaatacaaatggnaatccatacttnatggaactacnggcttcttccatggggaaaatggacttaacattnanatgttgacaatttcggaangcagnttatattgncatctacaatctgaactgaaactcagaaatccangggatgcatggncaggaaataaaattcttcaacttattttttnttggagaatntaatgagattttataatgcaaactgtatgaagactgcttgatgacttgagcagtgttcagatcacagcatacatattcaaatgattttaatatttggaaagactgtcagagggttgngtccgtgtaaaaaaaaaaattggtaatatgaaacaaaaaaagcnaatgaagaganaaa

SEQ ID NO: 4482 - DNA, 242 bp, Homo sapiens
cctcaattcattgctaaacattttttaacaagtatctcacatttaacaaaaaaagatcagtcatatggcagcaaaatacaatgtcatatgaccaaaacatgaaagactgtgaaaatgaatctggaggtgacccaagcattgaattcaacaatccaggctgggtgcggtggctcacactgggaggctgaggtaggcagatcacctgaggtcaggagttcaagactagcctgggcaacattgtg

SEQ ID NO: 4483 - DNA, 253 bp, Homo sapiens
  unsure (58): n=A,T,C or G
ctgtacccattgcaggacattctcactggagatcagcttctttttgaatacaagccanaagtcattggtgaagccttgaatcagctagttcctcaaaaagcaaatcttgttttactgtctggtgctaatgagggaaaatgtgacctcaaggagaaatggtttggaactcaatatagtatagaagatattgaaaactcttgggctgaactgtggaatagtaatttcgaattaaatccagatcttcatcttccag

SEQ ID NO: 4484 - DNA, 445 bp, Homo sapiens
ctgccgccgtggaatccaaaatttcgggagctgtgaccctttcctcatgtaaaacgagtagtcttggacgatctgggcataggaaccaatcagaaacaatcgcttcagcaatcaagaccattgttcatcatgggggaacccatggatacctctgagcctctatctgcattaccattcactgggcagcagtcttttgagccaagtggcaaatttggacagtatccatcgatgcagatgaaccacatccaggcactggggaagtggaggacatagaacagctcaatcagtgtttgatccaacacttccatctcattaagacaagtttgatttttctttgctttttatttcatggaatacatgagaatctcttaactgttggagtttccaaggaggcatacctcgtgacttcagttaatggaaagaacaaaactaaaatgctgtatgg

SEQ ID NO: 4485 - DNA, 107 bp, Homo sapiens
  unsure (10): n=A,T,C or G
  unsure (24): n=A,T,C or G
  unsure (34): n=A,T,C or G
  unsure (35): n=A,T,C or G
  unsure (54): n=A,T,C or G
  unsure (65): n=A,T,C or G
  unsure (68): n=A,T,C or G
  unsure (77): n=A,T,C or G
  unsure (83): n=A,T,C or G
  unsure (96): n=A,T,C or G
  unsure (102): n=A,T,C or G
aaatcacagnttttacctatttgntaggctatanngttttgtaaacttctgttnctattcacatnttntccacttgngagagncaccaaaatccantcagtntctaa

SEQ ID NO: 4486 - DNA, 373 bp, Homo sapiens; identical to SEQ ID NO: 142

SEQ ID NO: 4487 - DNA, 214 bp, Homo sapiens
aaaaagtttatatgaatatccagtcaaaaccaacacggtattgcccttgaaatgttaactagacggatttccaaggagaccacaggactgtatactgtcttggaatgtcctcagaaggctctgtcattgatcaggtaacagtaaaaaccccagagtcctttctttcaaatggaaaagggaaagcagagggacagaagctattcaaacttcgtct

SEQ ID NO: 4488 - DNA, 548 bp, Homo sapiens
  unsure (28): n=A,T,C or G
  unsure (79): n=A,T,C or G
  unsure (81): n=A,T,C or G
  unsure (90): n=A,T,C or G
  unsure (97): n=A,T,C or G
  unsure (107): n=A,T,C or G
  unsure (118): n=A,T,C or G
  unsure (120): n=A,T,C or G
  unsure (159): n=A,T,C or G
  unsure (174): n=A,T,C or G
  unsure (182): n=A,T,C or G
  unsure (184): n=A,T,C or G
  unsure (198): n=A,T,C or G
  unsure (206): n=A,T,C or G
  unsure (238): n=A,T,C or G
  unsure (269): n=A,T,C or G
  unsure (314): n=A,T,C or G
  unsure (404): n=A,T,C or G
  unsure (502): n=A,T,C or G
ccatcaccatgtcacccacaccagcagngggaagtctgttcagccgtcccttgatccccttcacggagatgatatacangnttttggctnctgtgtngtcagcacanttgattacagntnctaccggaagacccaaggaaatccggaatttcgcaccanaggacccaccacgtnctcgcttngncatcttgaacgccngaaaaaanaaaaaaggaagtcgattcaaaggacactgggntatgaactttaacgccccgcccaccctcctnacgtggccggagcaaaaaccggcctcttccgcctctgggcgctgncttattacgtaataagtttacgacgtcgcttttagccctctctgcgaagtgggagttgaagtagaagcgcaagagataggaagtatcttntctacgagcttaagagtagttagggacatggaaacagtgatttgttaacttgctcacgacctcttttgaccacttaatagtgccaggcacttatctgnacactagagaataggaattaaaacacggtttgtgccgtgtgggggt

SEQ ID NO: 4489 - DNA, 567 bp, Homo sapiens
  unsure (548): n=A,T,C or G
gaggttttctcgctctagggagattcttcaagcaatcactatgtcaacagacacaggtgtttcccttccttcatatgaggaagatcagggatcaaaactcattcgaaaagctaaagaggcaccattcgtacccgttggaatagcgggttttgcagcaattgttgcatatggattatataaactgaagagcaggggaaatactaaaatgtccattcatctgatccacatgcgtgtggcagcccaaggctttgttgtaggagcaatgactgttggtatgggctattccatgtatcgggaattctgggcaaaacctaagccttagaagaagagatgctgtcttggtcttgttggaggagcttgctttagttagatgtcttattattaaagttacctattattgttggaaataaactaatttgtatgggtttagatggtaacatggcattttgaatattggcttcctttcttgcaggcttgatttgcttggtgaccgaattactagtgactagtttactaactaggtcattcaaggaagtcaagttaacttnacatgtcacctaaatgcac

SEQ ID NO: 4490 - DNA, 556 bp, Homo sapiens
aaacatctaaaatacactgaaaatgtgttcttttccaataacatggatgttcacaacagttggtgttacgttagagctaataattatactttagcacgttaacctcagaattctaaggctgagagtcaaacactgctaattcatagaaggcaatagcttgtaataatgaatcataaagctcttctactctttgtagttcagtagataaaaacatctgtctgtagtgaactattttatctgatgggaagaacacccgaggatccgccttcagtatagaatcgaagagaaactgcttcactagctcttttccactagtccgggagtcaccaatcatcagttcaaaatgcttccccactgcatttcgattcatgctcagcacctgatgctgcccatcctgggcaaaagttttatttaataaggcatacagcatggcttccatgatatgaaaatgtaacagtattggaaacagagatgagttctgaatggaaagtcctgttttttccagaacatagaaatctgctttaggcatctttgaaatgatcgaggaaatcttttt

SEQ ID NO: 4491 - DNA, 473 bp, Homo sapiens
  unsure (11): n=A,T,C or G
  unsure (86): n=A,T,C or G
  unsure (142): n=A,T,C or G
  unsure (149): n=A,T,C or G
  unsure (190): n=A,T,C or G
  unsure (271): n=A,T,C or G
  unsure (299): n=A,T,C or G
  unsure (362): n=A,T,C or G
  unsure (432): n=A,T,C or G
ccttgcctcanatccaaggtcactcggaagaggccatgtctaccctcaatgacactcatggaggaaatgctgagagaagcattcanatgcatgacacaaggtaagactgccaaaaatcttgttcttgctctcctcattttgntatttgntttatttttaggagttttgagagcaaaatgacaacacccanaaattcagtaaatgggactttcccggcagagccaatgaaaggccctattgctatgcaatctggtccaaaaccactcttcangaggatgtcttcactggtgggccccacncaaagcttcttcatgagggaatctaagactttgggggctgtccagattatgaatgggctcttncacattgccctggggggtcttctgatgatcccagcagggatctatgcacccatctgtgtgactgtgtggnaccctctctggggaggcattatgtatattatttccggatca

SEQ ID NO: 4492 - DNA, 415 bp, Homo sapiens
  unsure (367): n=A,T,C or G
  unsure (369): n=A,T,C or G
aaatgaatttgacactctacaagacagagatttctttctccagttaaacctcagaaggtaagtcagctagtacaaaaagtattctatatactagtatatcatacctcagactgcagagctcttgttctcttttaacttttcgattctctatgattttatttcttttggttctgatagttcattttgtagtacacgaagcttatttttcatttgtttcatttttgctgtaagttgttcacagggatttttttttcttttttttttttttttgacggagtcttgctctgttgcctaggctggagtgcagtggtgcgatctccactcactgcaagctccgcctcccgggctcacgccattcccccgcctnancctcccgagcagccgggaccacagtcacctgccaccacgcccggcc

SEQ ID NO: 4493 - DNA, 197 bp, Homo sapiens
aaaaatgtctatgaaaattgacactggaaaaaactgtttatctctaggtcttgttttgaaaggattgttgatgagtctacttgcttttcctagttaagacactagcaatggtttctacagtatttctctatatgttgttttcaggttttagaaagggggatgatcttttcaggtatcaaagtggtaaaagcagtatt

SEQ ID NO: 4494 - DNA, 413 bp, Homo sapiens
ctggaaacagatccatctctagacatgaaagaacaatcgacaagatcctctggacacagcagttctgagttatccccagatgcagtggaaaaggcagggatgtcttcaaatcagagcatctcttcacctgtgcttgatgctgtacccagaacaccctcgagagaaagaagtagttctgcatcttctcctgaaatgaaagatggtttacccagaactccatcaaggagaagcaggtctgggtcttctccaggacttagagatgggtctgggactccctcgaggcacagcctgtctgggtcctctcctggaatgaaagatatacctagaacgccatctagagggagaagcgaatgtgattcttccccagaaccgaaagctttgcctcagactcctaggccgaggagtcgttctcc

SEQ ID NO: 4495 - DNA, 544 bp, Homo sapiens
ctgaattccccaggatagattatgagatgctggaacattactgtaacgctggctttgcataaagatgggtcttgtcccattccttcaccagtaagctcttgtgggctgaacattgcaacaacagagctctcttcggttccaacgtgcgcgtaaatcctgcagacaggagcccaataagacattaggtcaactcagggcatttcgaaaacgctattttctgaacagacggctaagcaagaggcttgcagggcccatctcctcagagttatttatcctcacggagctcagtacaggtctgtgaaaaggtcctcatcataggaagggggacctacacggcccgccatcgccattttgtccttcacaaagccccactgctacttttaagcctcgaggccacgcacaagaccttatccgccagtcgccctggccaggcagctacaacacagaaggcatagtgcgtgctatgctatgttcgcacaatcgctcaaaagaaaataaaagaaaaagcttgtacaaaagagtaacagctataaagacacctcgg

SEQ ID NO: 4496 - DNA, 386 bp, Homo sapiens
ccttttttaagtgacctgtaactcatatcagtgaaaaagaacatgctataaaaagattccacaaagtgagagcattaagctcaaaggtcctgaggtaggtgtgtttgaggagctggtgtgtagctgctgtataagaagtcaacctccttattttcaggtacatttattattattttaaccccaagcagaattgcctagctgggtcctcacctttacacaatagtcataggatttgactgttatcaaaaagtaaatccactctcagaggccatagatttcctattactgaggttcttcaaaagaatatgtaatcaatttatatagtaattcctaaaaatgagattctaaaatatagtagcatgcagatgaagcatagctaatgcttt

SEQ ID NO: 4497 - DNA, 573 bp, Homo sapiens
  unsure (11): n=A,T,C or G
ccttgcctcanatccaaggtcactcggaagaggccatgtctaccctcaatgacactcatggaggaaatgctgagagaagcattcagatgcatgacacaaggtaagactgccaaaaatcttgttcttgctctcctcattttgttatttgttttatttttaggagttttgagagcaaaatgacaacacccagaaattcagtaaatgggactttcccggcagagccaatgaaaggccctattgctatgcaatctggtccaaaaccactcttcaggaggatgtcttcactggtgggccccacgcaaagcttcttcatgagggaatctaagactttgggggctgtccagattatgaatgggctcttccacattgccctggggggtcttctgatgatcccagcagggatctatgcacccatctgtgtgactgtgtggtaccctccctggggaggcattatgtatattatttccggatcactcctggcagcaacggagaaaaactccaggaagtgtttggtcaaaggaaaaatgataatgaattcattgagcctctttgctgccatttctggaatgattc

SEQ ID NO: 4498 - DNA, 311 bp, Homo sapiens
aaacattcctgggcacccactcaagagtgctctttttatcaccttctggaaatccgcaaagttgcaggggcctctggagtgtctcttctctagagagaattggtgggacccccctcagtgcagtggccccaactagtggagggagagaggacttaagtcagatggactcaacagaaatgggtttccagaagaataatgaaaagttgtgggtaggaaaatgaatcatttggactcttcaatgaaatggagtgagcccaggagagctcagccaacagaggcactctgggaacctgttagtaaagccaggctga

SEQ ID NO: 4499 - DNA, 437 bp, Homo sapiens
agaaaaaactattgggtactaggcttggtacctgggtgatgaaataatctgtacaacaaacccccatgacacaagtttagctatataacgaacgtgcatatgtaccccctaacctaaaaggaaagtttaaaaaggaaaaaacacctaggagaaaagaaaaatgataaattaacaaaggacaatgctcttagcaccgccatcattcaggaatttccaagggttttaggagctttgtgttaggaactgggggcagagaccaaatatatatttcttcttatgttacactaccccagataggaaaacagaaattactctagatatttcaaacaaaaaagggttgtatataggcaattagtgcttatcactggaggtgctagaggtggtggaggttgtggggatggggttgcaccactggctttcaggctactttaccacag

SEQ ID NO: 4500 - DNA, 564 bp, Homo sapiens
ccaccagagaaatgcgaatcaaaaccacagtgagataccatctcacaccagttagaatggcaatcattaaaaagtcaggaaacaacaggtgctggagaggatgtggagaaatgggaacactttgacactgttggtgggactgtaaactagttcaaccattgtggaagtcagtgtggcgattcctcagggatctagaactagaaataccatttgacccagccatcccattactgtgtatatacctaaaggattataaatcatgctgctataaagacacatgcacacgtatgtttattgcggtactattcacaatagcaaagtcttggaaccaacccaaatgtccaacaatgatagactggattaagaaaatgtggcacatatacaccatggaatactatgcagccataaaaaatgatgagttcatgtcctttgtagggacatggatgaaactggaaaccatcattctcagcaaactatcacaaggacaaaaaaccaaacaccacatgttctgactcataggtgggaattgaacaatgagaacatatggacacagggaaggggaac

SEQ ID NO: 4501 - DNA, 212 bp, Homo sapiens; identical to SEQ ID NO: 2921

SEQ ID NO: 4502 - DNA, 569 bp, Homo sapiens
  unsure (94): n=A,T,C or G
  unsure (112): n=A,T,C or G
  unsure (154): n=A,T,C or G
  unsure (159): n=A,T,C or G
  unsure (166): n=A,T,C or G
  unsure (246): n=A,T,C or G
  unsure (289): n=A,T,C or G
  unsure (447): n=A,T,C or G
  unsure (470): n=A,T,C or G
  unsure (477): n=A,T,C or G
ctgagaggcatctaccttcatggaaacccatttgtctgtgactgttccctgtactccttgctggtcttttggtatcgtaggcactttagctcantgatggattttaagaacnattacacctgtcgcctgtggtctgactccaggcactcgcgtnaggtncttctgntccaggatagctttatgaattgctctgacagcatcatcaatggttcctttcgtgcgcttggctttattcatgaggctcangtcggggaaagactgatggtccactgtgacagcaagacaggtnatgcaaatacggatttcatctgggtgggtccagataacagactgctagagccggataaagagatggaaaacttttacgtgtttcacaatggaagtctggttatagaaagccctcgttttgaggatgctggagtgtattcttgtatcgcaatgaataancaacgcctgttaaatgaaactgnggacgtnacaataaatgtgagcaatttcactgtaagcagatcccatgctcatgaggcatttaacacagcttttaccactcttgctgcttgcgtgacctc

SEQ ID NO: 4503 - DNA, 521 bp, Homo sapiens
aaaaataattatttttttaattgacagataacaattgtacatactcatggagtacatagtgatattttgatacctataatatatagtgatcagatcagggtaattggcatagccatcatctcaaacacttatcatttcttcgagttgggaacattcttgacttggggttattgaactttgaaaatcccatgtgattgacctaagttatgttctatgtcaggtcctgatgattcaaggtcagaagtagtttgatgtcagggagtttaatgctgcccagcatgggtagaataaccttgttgcattacatgaccctatttccctgaccagagcagattgatcagggctggagttgggtcccaagctaagcttgtcatattttctctttcttgggaattgtgatagagtctaaaacagtttaattggtttgagataattacatgacctgaggcagagattgcaaactggtggcccatgggctgaagctggttcataaataagttgattctattttttttgccttt

SEQ ID NO: 4504 - DNA, 553 bp, Homo sapiens
  unsure (107): n=A,T,C or G
  unsure (153): n=A,T,C or G
  unsure (184): n=A,T,C or G
  unsure (193): n=A,T,C or G
  unsure (325): n=A,T,C or G
  unsure (327): n=A,T,C or G
  unsure (473): n=A,T,C or G
ccacgttcctggccgaggacccgaaggttaccctgaccatcttcgttgcccgcctctactacttctgggacccagattaccaggaggcgcttcgcagcctgtgtcanaaaagagacggtccgcgtgccaccatgaagatcatgaattatgacnaatttcagcactgttggagcaagttcgtgtncagccaaanagagctatttgagccttggaataatctgcctaaatattatatattactgcacatcatgctgggggagattctcagacactcgatggatccacccacattcactttcaactttaacaatgaaccttgggtcanangacggcatgagacttacctgtgttatgaggtggagcgcatgcacaatgacacctgggtcctgctgaaccagcgcaggggctttctatgcaaccaggttccacataaacacggtttccttgaaggccgccatgcagagctgtgcttnctggacgtgattcccttttggaagctggacctggaccaggactacagggttacctgcttcacctcctggagcccctgctt

SEQ ID NO: 4505 - DNA, 449 bp, Homo sapiens; identical to SEQ ID NO: 4444

SEQ ID NO: 4506 - DNA, 375 bp, Homo sapiens; identical to SEQ ID NO: 4446

SEQ ID NO: 4507 - DNA, 470 bp, Homo sapiens
ccttttctcttcgtcacacaacagagaacaagcctcacagcccaaagactccagaaccaagaaggagccctctaggacagaaaaggggtatgctgtcttctagcacttcaggtgccatctctgacaaaggcgtcctgagatctcagaaagaggcagtgagttccagtcacggacccagtgaccctacggacagagcggaggtggagaaggactcggggcacggcagcacttccgtggattctgaggggttcagcatcccagacacgggcagtcactgcagcagcgagtatgcggccagctccccaggggacaggggctcgcaggaacatgtggactctcaggagaaagcgcctgaaactgacgactctttttcagatgtggactgccattcaaaccaggaagataccggatgtaaatttcgagttttgcctcagccaactaatctcgcaaccccaaacacaaagcgtttt

SEQ ID NO: 4508 - DNA, 213 bp, Homo sapiens
aaacatattcagaacagatgcttgaaatatgcacttagcactttggttccacatctgtctgggtaaaccatgaagaaaatgaagctgctgcctcaatcgacccagacagcagccataggcagataaagatttggtttcaccctggtggtggtaggcatcgtgtgtgactttttttcctctaatatcaattttacagtacggaaatagtatttt

SEQ ID NO: 4509 - DNA, 291 bp, Homo sapiens
  unsure (76): n=A,T,C or G
aaaaagtttctaatattaaagtcagaatattaatacaattaatattaatattaactacagaaaagacaaacagtanagaacagcaaaaaaataaaaaggatctccttttttcccagcccaaattctcctctctaaaagtgtccacaagaaggggtgtttattcttccaacacatttcacttttctgtaaatatacataaacttaaaaagaaaacctcatggagtcatcttgcacacactttcatgcagtgctctttgtagctaacagtgaagatttacctcgttctgctca

SEQ ID NO: 4510 - DNA, 564 bp, Homo sapiens
aaacttgatccaacctctttgcatcttacaaagttaaacagctaaaagaagtaaaataagaaggcaatgcttgtggaatgtacagtgcatattggcggcgcacgcctcattacgattcgcctgcttgcttctcctgttcaatcgtttctttggaaggcagtggatttttctcttgcgtctctgtcttcttcagtttcgacttatcgaatttctcgatctcagccatatcgggtttgtcagacatggttgcggaggaaaagctgcagggagcaagccaagagcgagcgtgaggaagagccacccgccccgctgtctctgggctgggaactgcacttctgccctccgacccgcagcctgaaaaaaacccttctcgccctcctactgctgccgttccgcgctcacgagcttcctctttctacagaaaaagaggcgacaccccccgcgcccctcctccccatatttcaaaacgctgtggaccaaagagggcggatgcctctcaaagccgaatcttgcagaataaaggaaattgaccactgcgaattgttaattacagcgtttacctgc

SEQ ID NO: 4511 - DNA, 214 bp, Homo sapiens
  unsure (18): n=A,T,C or G
  unsure (122): n=A,T,C or G
gctgggcggggagcgtcngaccagaagagaatcacgccaggaaagcgacccggaggatgatgatgttaaaaagccagcattgcagtcttcagttgtagctacctccaaagagcgcacacgtngagaccttatccaggatcaaaatatggatgaaaagggaaagcaaaggaaccggcgaatatttggcttgttgatgggtacccttcaaaaattt

SEQ ID NO: 4512 - DNA, 548 bp, Homo sapiens
  unsure (51): n=A,T,C or G
  unsure (63): n=A,T,C or G
  unsure (343): n=A,T,C or G
  unsure (397): n=A,T,C or G
aaaattttacatccagtttgagatcactttgagaataaaatacctgcctancagctcttttgnaaaatgttactataggaaaaagaaaccaagcatattattatactttctgattcctaacaaaaaacataaaaaacacatgtccagttctttaacattgagagacttgtttgtcacaggttaataggaggcactgctggtggaagaccctaaagaataatgcacaccacagccctcagccttgtaagtcgtaagagttactcaaatagcatgctttttgttgtgtgtgggtctgttgttaagagcaacagaacataagatttttctaatcatcaatattcanaatataatcaagaactcatatctaatgatgacaagactttccattgcacatcanatacatgatatttttagttttgtaccttcacacaaattctgaaggcaacatcatttataaaactcgtaggcaaatgtataacattttttaatagtaaaaactcatgataaatatctcccatgccaaagtattagcatatattacactctgg

SEQ ID NO: 4513 - DNA, 436 bp, Homo sapiens
  unsure (8): n=A,T,C or G
  unsure (9): n=A,T,C or G
  unsure (38): n=A,T,C or G
  unsure (50): n=A,T,C or G
  unsure (90): n=A,T,C or G
  unsure (147): n=A,T,C or G
  unsure (193): n=A,T,C or G
  unsure (204): n=A,T,C or G
  unsure (217): n=A,T,C or G
  unsure (343): n=A,T,C or G
  unsure (354): n=A,T,C or G
  unsure (408): n=A,T,C or G
  unsure (425): n=A,T,C or G
gcatgtcnngatctaagtaggagtgatgtttattcganagctgactttanatcttattcctttatatttttctaaagtcaaattattcanaatttgcagtgctttagttcatcacatgatattcttctgagatgtggtgacacttanattggcaattgctgcccccaaactgagggagcgaataataggaagncacttggagcnatcctggctcaanttcaagcgctggtcccatcactcatttttgacctctcattatttgaataaaggggtcttaattcatattcataagtgatgtgtactgccagatacacacctataatcagcactttggaaggctgangcaggaggatngtttgagcctaggaatttgagggtgcagtgagctatgattgtgccactaaattncagctttggtgacaganccgagacgctg

SEQ ID NO: 4514 - DNA, 354 bp, Homo sapiens
ccaaccaggggcagggcgtacttcagcacgaagtccttgatggccgagtcctgggtggagccctgcttcaaagagggaacaggtgagggggcccaccatctccccaccattgttcttgagtacaatgtttgagggactttgggggagtggcgactttgaagggatcagtcttaggaggcaaaacaccccagggctcgaccccactcaagcacagcccagtcattccctaccgtcttttggggctcctttccctccagtgaaccgtaggtgacttcttgggaaaaggcaaacaccttggccctttccttgggggtgtaggctcactaaccccacaaagagaccactcaaggtagg

SEQ ID NO: 4515 - DNA, 531 bp, Homo sapiens
  unsure (35): n=A,T,C or G
  unsure (57): n=A,T,C or G
  unsure (60): n=A,T,C or G
  unsure (74): n=A,T,C or G
  unsure (75): n=A,T,C or G
  unsure (76): n=A,T,C or G
  unsure (84): n=A,T,C or G
  unsure (86): n=A,T,C or G
  unsure (89): n=A,T,C or G
  unsure (106): n=A,T,C or G
  unsure (117): n=A,T,C or G
  unsure (142): n=A,T,C or G
  unsure (144): n=A,T,C or G
  unsure (151): n=A,T,C or G
  unsure (160): n=A,T,C or G
  unsure (191): n=A,T,C or G
  unsure (193): n=A,T,C or G
  unsure (211): n=A,T,C or G
  unsure (240): n=A,T,C or G
  unsure (269): n=A,T,C or G
  unsure (279): n=A,T,C or G
  unsure (284): n=A,T,C or G
  unsure (301): n=A,T,C or G
  unsure (310): n=A,T,C or G
  unsure (324): n=A,T,C or G
  unsure (334): n=A,T,C or G
  unsure (340): n=A,T,C or G
  unsure (348): n=A,T,C or G
  unsure (367): n=A,T,C or G
  unsure (368): n=A,T,C or G
  unsure (374): n=A,T,C or G
  unsure (394): n=A,T,C or G
  unsure (406): n=A,T,C or G
  unsure (407): n=A,T,C or G
  unsure (481): n=A,T,C or G
  unsure (515): n=A,T,C or G
aacgtgaaccactggacaggatatagctgttccancttagggagcccactcgggcanagngactggtcatattnnnaaaccgtntntgntgctgcacatcccatanctgcacctcancactgctggtgcccacagccaagtngntgccctntttgatccnggccacagaggatatatattccccaggctgntncatttgcaaaagctgcangatgtcaccagagcttgcactccacaggnacacactgttgtccagtgccacggccagnacattcccanaactncaatccacaaggttcangtaatagtnatttcggatttcangcgcatccangatacngtctggcngggaaggaatgtaacggcnngtcttncggctggagccaggagtggncttttggctgtnnagtactttcagtctgttctgataaccctctggcgcattttgtggttttccactgagccgaaggatcttggcttnctctacatcaaaaccgttcaggttcaaagcccangctttctgatgtccct

SEQ ID NO: 4516 - DNA, 439 bp, Homo sapiens
ggagaatgacaccctgaaggcactactgaaagccaatgtggagaagcccgtgaagctggaggtgttcaatatgaagaccatgagggtgcgcgaggtggaggtggtgcccagcaacatgtggggcggccagggcctactgggtgccagtgtgcgcttctgcagcttccgcagggccagtgagcaggtgtggcatgtgctggatgtggaaccatcttcacctgctgcccttgccggcctgcgcccctacacagactatgtggttggttcggaccagattctccaggaggtgaggaacccgcaatttgcccctccccagaccctctggatgtggtgtgaagagaagggtgctgtccatgagaagtgtctggttttgttgaggctttagccctggaagcagggtctgagtgatgcaaaatgaacctcaacaggtttggaaggg

SEQ ID NO: 4517 - DNA, 337 bp, Homo sapiens
  unsure (14): n=A,T,C or G
  unsure (41): n=A,T,C or G
  unsure (68): n=A,T,C or G
  unsure (84): n=A,T,C or G
  unsure (98): n=A,T,C or G
  unsure (139): n=A,T,C or G
  unsure (167): n=A,T,C or G
  unsure (179): n=A,T,C or G
  unsure (208): n=A,T,C or G
  unsure (210): n=A,T,C or G
  unsure (217): n=A,T,C or G
  unsure (230): n=A,T,C or G
  unsure (236): n=A,T,C or G
  unsure (237): n=A,T,C or G
  unsure (246): n=A,T,C or G
  unsure (261): n=A,T,C or G
  unsure (280): n=A,T,C or G
  unsure (306): n=A,T,C or G
  unsure (310): n=A,T,C or G
cctcactgagatgntctttgagtgaattcctgaaagaagtnaggaagtgagcccatgccattatctanaggaagagcatcccangcagtgggaactgnaagaacaaagctgtgaggctggagcatgactgcctgtgctngggaccacaaagaggctgtgtggaagcngatggggggcanaggttgtggtgagtgagagatgaggtcanangaaacantgtagagaaaggntgtgcnnagcatacanagccttgaaggtctntctaaggactttggctgantaaaatgggaagccactaggtgattntgangagaggaatgccatgatcttatacttt

SEQ ID NO: 4518 - DNA, 516 bp, Homo sapiens
ctgaggacaaacatgagatgagcatagtcagggacagatgtttgggagaaacaaaaggagggtaagtaggaagcgcagggcaaaggcaggcagagcgagtattgcagcagcctttgctgcgtgctgggaagtttctaacaatgcagggctcttggaaagcactgagattgcagcacttgttttgatagcgaggcaaggagtcacaaagtcaggcaaggagggtcatggaaagcggggtgacagagggagaagtccggggcggtggctctcctctaaagcctgtacctagtcctcatctctctccagcctctttacaatgttcatccatggaaagtgaagcccagagaagttaagtaacttgcttaaggtcacacagcaagttgacaaaaacaaacatacacaaaaaaaataaatcacggccaggcacggtggctcacgcctgtaatcccaacattttggaaggctgaggcaggaagatcaactgaggtcaggaggtggacaccagcatggacctcg

SEQ ID NO: 4519 - DNA, 510 bp, Homo sapiens
  unsure (28): n=A,T,C or G
  unsure (242): n=A,T,C or G
  unsure (344): n=A,T,C or G
  unsure (472): n=A,T,C or G
ctgaggacaaacatgagatgagcatagncagggacagatgtttgggagaaacaaaaggagggtaagtaggaagcgcagggcaaaggcaggcagagcgagtattgcagcagcctttgctgcgtgctgggaagtttctaacaatgcagggctcttggaaagcactgagattgcagcacttgttttgatagcgaggcaaggagtcacaaagtcaggcaaggagggtcatggaaagcggggtgacngagggagaagtccggggcggtggctctcctctaaagcctgtacctagtcctcatctctctccagcctctttacaatgttcatccatggaaagtgaagcccanagaagttaagtaacttgcttaaggtcacacagcaagttgacaaaaacaaacatacacaaaaaaaataaatcacggccaggcacggtggctcacgcctgtaatcccaacattttggaaggctgaggcangaagatcaactgaggtcaggaggtggacaccagcatgg

SEQ ID NO: 4520 - DNA, 301 bp, Homo sapiens
ttaaaactgtgtttgtggatcagagaaggctttatagcacagggggcattcagatgagtcttagaggaagagaagaaacatggcaagcagattacatctgagccgtttgaattgtgtttttctttcttcccatgtttattttctaagatctacctgaacttagagactcaagatatttttttaggaaacctcctacccatgtctgaggtagcaagtgcagcctcacgacagataccaggcaatccagagccacaaaacgtgattcctccaggctctgcctggcctgaccctgtcctgtcag

SEQ ID NO: 4521 - DNA, 317 bp, Homo sapiens
  unsure (4): n=A,T,C or G
  unsure (143): n=A,T,C or G
cagngccctccaccactcaccaggcaaacaaatgtggcttccaagaaggacaaccacccccgtttgctaagcccttcctaggaccaagctgtgggccctgggcttccctgatagtccaagttcaggttgttacttctgagcanaggcaactgaggctcagagaggccaagtggcttgcctgagatgatgtgactactgagcaatgaagctgggcctcatactaccctgcctaggactgcaggcccccccaccacaacgcttcctccccagcccctcaataccccactttggctgccagaggctatgagcagccccag

SEQ ID NO: 4522 - DNA, 430 bp, Homo sapiens
ccagtgaggtagggtttgcaatgagctccacccttcagccatgtcctgcaaccttccccgggcccatagtgagggtgccaccttactcccagcctccaggggctctgcctgctcctgccctgtcccccgcatcctatgaggcatgggcgtgggtgggcacagcatactgtgcgtgtgtgtgtccgtcacaccttgctcgggacggaaagattcccacacaggaataaggacccgtggccctcatgggggaaggacagaggcactacaggtcacctcatcccctctcctgcctccatggcacacgtcaccctccccaggccacttccaagtcactcagagttgtgggacagagtgaagctctctgcatggcgtttccttggctatggtttgcagaggctgcaaactccaatgagctacagtttgggggcag

SEQ ID NO: 4523 - DNA, 418 bp, Homo sapiens
  unsure (12): n=A,T,C or G
  unsure (42): n=A,T,C or G
  unsure (297): n=A,T,C or G
aaaatactttantattataaacatccgtgacctacataatancaataatgctttaactgtataaatgagactgtggaaattccattattggctctatttttaagggttacaatgaaattatgtacagtatataaagcttgtcaaactgaacatggtcttaggccattactactatttcattccaatttggattttaatacaattaacttacagatctgaaataaaagcactgcttaatggtttcagatgcattttggtactgaataagtttcaaggaatctttacagataataaatnataatgaagagaacctacgactaaagctgcttacatggataacaggaggaatgacgattgcaaatgttatgttattgacaattctatgaattaaaactcataaccacttctagatttcttt

SEQ ID NO: 4524 - DNA, 140 bp, Homo sapiens
  unsure (117): n=A,T,C or G
ccagtgcttccagaatgtaccatggactagcatcgggggcagggcctgcggtgtctccaggggcatcagctccaacttaggtacctgcagggaatggccctggttggcccggatganaaggccagtgctgggatccccca

SEQ ID NO: 4525 - DNA, 397 bp, Homo sapiens
ctggtgggtgacttgggcagtgtgttcctgctttcagtggttagcctttagcaaatctgctttagagtgagagtagagggcaggctgttgtattacagtgctcttgtttttgtaaaatttaattcactctactgttattttgtctccttgggtaaagtgttatttaatttttcttcattttttagtaatatataacagtcagtgagagaatttggttttcagagatgtcatccaaagcagattttacagttgtttcctggttataaattgtctcaacaattctcttttagtcatttagattgtttaatatgggaaaaccggggtgtagaacatgttgtaaaattaaattttatttacttttttcttatttccaggtccaagcatctcattttgaagg

SEQ ID NO: 4526 - DNA, 535 bp, Homo sapiens
  unsure (191): n=A,T,C or G
ctggctaattcagtcatgcaaactctgctctcacagttaaaacagttctatgagccaaaacctgatctgctgcctcctctgaaattagaagcttgtattctgacccaaggagataagatctctctacaagaaccactggattatctgctgtgttgtattcagcattgtttggcctggtataagaatacagncatacccttacagcagggagaggaggaagaggaggaggaagaggcattctacgaagacctagatgatatattggagtccattactaatagaatgattaagagtgagctggaagactttgaactggataaatcagcagatttttctcagagcaccagtattggcataaaaaataatatctgtgcttttcttgtgatgggagtttgtgaggttttaatagaatacaatttctccataagtagtttcagtaagaataggtttgaggacattctgagcttatttatgtgttacaaaaaactctctgacattcttaatgaaaaagcgggtaaagccaaaactaaaatgg

SEQ ID NO: 4527 - DNA, 203 bp, Homo sapiens
  unsure (38): n=A,T,C or G
  unsure (52): n=A,T,C or G
  unsure (74): n=A,T,C or G
  unsure (127): n=A,T,C or G
  unsure (180): n=A,T,C or G
  unsure (184): n=A,T,C or G
ctgctccacgtgaccacccaggccctcggccaggccgntgagcagatccagngctacgatcatgaagtccttgncgggagcctcatactgctcagggtgctgggtgtacatcatggcctgagccagngtcttctgcaccagggtgacacagcgctggtagacgggctcacagtaaggcangaanccactctgcagggcggtgg

SEQ ID NO: 4528 - DNA, 167 bp, Homo sapiens
aaatcagcagcaagcattaggacatgctattttggccccataagttaggtgtgtagcactacacattagacaccaagtcatcccaaccaatatttatccatatgaacagataaactgaacaaaaacatagttctgataaaacctgcattcacaacctaatgtagttt

SEQ ID NO: 4529 - DNA, 467 bp, Homo sapiens
ccaggctggtcttgaagtcctaacctcaggtggtccacccacctcggcctcccaaagtgctaggattacaggcatgagtcaccatacccggccggttatctgcagttttcaattctcagatttgctacatgaatatttttagcctacagaattcagattagctttgaggaaatgtggtgtgagagacacgtgtaaccagcagaaaatcagcttagactacccaccttagcgttttgttcttattcaaacaggcaaattcttagtaaataagaaagaagtaaagtttgatctcaagaaaatatgagggaaggctgaaaagggccctgggttcagaaagaagggttactaaaaaggagataagccgctggacaacagatctccattttgcagaatgctaagacattgcacttagtacctcctgtttcccatgggttctgatccagaaatgtgccctgggaactgagcag

SEQ ID NO: 4530 - DNA, 309 bp, Homo sapiens
aaaaagtatattaaagcctatgggatgcttttctgtcatattcccctaggtccagttgaacatgagaaaagtcagttttctgattagatttctgggtatggaagagagaaaatatagttttctgtaaagatgtaagtgaaagaatttagactggccttttaacataaactaggggtttccagtttcttggaatgggaggactccgtttgaatatctaattttgttatgcactctgctcttatttggttgtgattactaatagttgagaagtctgtttctgctgttccagtggttagaaaccactgtttt

SEQ ID NO: 4531 - DNA, 314 bp, Homo sapiens
  unsure (6): n=A,T,C or G
  unsure (18): n=A,T,C or G
  unsure (26): n=A,T,C or G
  unsure (28): n=A,T,C or G
  unsure (32): n=A,T,C or G
  unsure (56): n=A,T,C or G
  unsure (74): n=A,T,C or G
  unsure (108): n=A,T,C or G
  unsure (115): n=A,T,C or G
  unsure (118): n=A,T,C or G
  unsure (119): n=A,T,C or G
  unsure (130): n=A,T,C or G
  unsure (146): n=A,T,C or G
  unsure (194): n=A,T,C or G
  unsure (251): n=A,T,C or G
  unsure (263): n=A,T,C or G
  unsure (277): n=A,T,C or G
  unsure (279): n=A,T,C or G
  unsure (295): n=A,T,C or G
atgcanaacaaattatcntgtgactntnacantggatatttagaatgctgaacggnaaaattaaagtataaaanttaatgatcagaatgctgactgatttccataatncatttcnccnntggaaattaangaggaatcactgattncatttaatgaccatacaattcatgtaaatggctaacattatttagcanaatacacattcacctgacttgattagaaaaagttttccattaacttagcaacactgntgaagcagtctnacattatagcacanantggaggtgggaggacnggaagtacatatatcattt

SEQ ID NO: 4532 - DNA, 267 bp, Homo sapiens
  unsure (9): n=A,T,C or G
  unsure (11): n=A,T,C or G
  unsure (53): n=A,T,C or G
  unsure (63): n=A,T,C or G
  unsure (64): n=A,T,C or G
  unsure (96): n=A,T,C or G
  unsure (98): n=A,T,C or G
  unsure (107): n=A,T,C or G
  unsure (108): n=A,T,C or G
  unsure (118): n=A,T,C or G
  unsure (120): n=A,T,C or G
  unsure (128): n=A,T,C or G
  unsure (136): n=A,T,C or G
  unsure (138): n=A,T,C or G
  unsure (139): n=A,T,C or G
  unsure (146): n=A,T,C or G
  unsure (157): n=A,T,C or G
  unsure (163): n=A,T,C or G
  unsure (174): n=A,T,C or G
  unsure (189): n=A,T,C or G
  unsure (193): n=A,T,C or G
  unsure (197): n=A,T,C or G
  unsure (216): n=A,T,C or G
  unsure (217): n=A,T,C or G
  unsure (227): n=A,T,C or G
  unsure (245): n=A,T,C or G
tcctgtctnanggtgaggacctgaagggtgtgggtcccggggagggtgaggangccattgtanngagatttactgagatggtatcgggatgccccnancaccacgtnnggggattacntntgggtttntgggaacnannagctganttaggggaganaacccnaaagatctcantggggaaaggactangggngcanggtgtttcacagaaacaannaaggggcctngatttcacagaaatcatnaagagggctccttgtgggtaga

SEQ ID NO: 4533 - DNA, 79 bp, Homo sapiens
  unsure (11): n=A,T,C or G
  unsure (39): n=A,T,C or G
  unsure (41): n=A,T,C or G
  unsure (42): n=A,T,C or G
  unsure (61): n=A,T,C or G
  unsure (63): n=A,T,C or G
ctctgaatcanagagcagtgagacctaagggtccctgancnnagagggtccctcctgtctnanggtgaggacctgaagg

SEQ ID NO: 4534 - DNA, 397 bp, Homo sapiens
  unsure (254): n=A,T,C or G
  unsure (317): n=A,T,C or G
  unsure (333): n=A,T,C or G
  unsure (356): n=A,T,C or G
  unsure (366): n=A,T,C or G
  unsure (370): n=A,T,C or G
aaaaattttctttttttggcccatcggggcttcggatacctgcttttttttttttatttttccttgcccatcggggcctcggatacctgctttaatttttgtttttctggcccatcggggccgcggatacctgctttgatttttttttttcatcgcccatcggtgctttttatggatgaaaaaatgttggttttgtgggttgttgcactctctggaatatctacacttttttttgctgctgatcatttggtggngtgtgagtgtacctaccgctttggcagagaatgactctgcagttaagctaagggcgtgttcanattgtggaggaaaagnggccgccattttagacttgccgnataactcggnttanggctagtcgtttgtgctaagttaaact

SEQ ID NO: 4535 - DNA, 469 bp, Homo sapiens
  unsure (11): n=A,T,C or G
  unsure (12): n=A,T,C or G
  unsure (20): n=A,T,C or G
  unsure (21): n=A,T,C or G
  unsure (93): n=A,T,C or G
  unsure (143): n=A,T,C or G
  unsure (144): n=A,T,C or G
  unsure (169): n=A,T,C or G
  unsure (247): n=A,T,C or G
  unsure (322): n=A,T,C or G
  unsure (332): n=A,T,C or G
  unsure (364): n=A,T,C or G
  unsure (452): n=A,T,C or G
ccaacaagggnntctacggnnggtaaagataagagggtgagagagataaggctagattgtataaggcttgacagaccatagcaagataagcangaactgtgtccagttaaccatttatccctaacatctaacatagagttcanntagtaaaagccataaaccctttgantcttctggcaagataagtaattagcacagattattgtcactcactgcaactcagccttggagggagtacacaaatcanaaggaggtcaagtgtctgggaaattaaatgacagcacctggaagaacagatcattgttggggtaagaaatggaancccagtgtanaaaaggatagaatgccatggggttagaggtancagaggctgggacagaacttgtctgttctgccccctttcacccctcctgttctttgccttatgtccaacccatcacttgctggggtantcagcctagttgaacag

SEQ ID NO: 4536 - DNA, 372 bp, Homo sapiens
tggggtctgtgtatgctcacttccccatcaacgttgttatccaggagaatgggtctcttgttgaaatccgaaatttcttgggtgaaaaatatatccgcagggttcggatgagaccaggtgttgcttgttcagtatctcaagcccagaaagatgaattaatccttgaaggaaatgacattgagcttgtttcaaattcagcggctttgattcagcaagccacaacagttaaaaacaaggatatcaggaaatttttggatggtatctatgtctctgaaaaaggaactgttcagcaggctgatgaataagatctaagagttacctggctacagaaagaagatgccagatgacacttaagacctacttgtgatattt

SEQ ID NO: 4537 - DNA, 415 bp, Homo sapiens
ccagtaaaggttttgatgccttctctgtgccccccaagaaagagtgattgttcagagtgtgggaggttaccctgttctctgcacagtgttagcacaaaggcaggggtggagttttctggctctctgcccaccaaagtttcatctacaatggcagttgctgggggtggcggggcatattgcattcccatttgctggtggggcaagcaaagccaaacctgcctttgcagacatgtgccagcaaagaaatatcaggagttgccatggtgtcacgggaagctgcagtatggggaagaaatgtgggctggtgcagtcataggggctgccttgctggagctcttcatgagtcaggcatgtccctccagtgcagatgctctggtatgagcttccagggtacctgagactgccctgtaagcag

SEQ ID NO: 4538 - DNA, 133 bp, Homo sapiens
  unsure (119): n=A,T,C or G
ctggtgctgcggcgtgcatgtgcggcccgagagcgtggcttcgggtctaccagatgccttcaaggaaaaggccagaacctgcactgcacggcacagtcactgtgtgtggtgggacccantgtcggctgagagg

SEQ ID NO: 4539 - DNA, 576 bp, Homo sapiens
aaagaagaatcccagtttttacttttactggatggtgaaattggttgctcttgtattttatgaaaaaaaatgatttttttaaccttcatacatagaagcaaaaatactttaactgctgtaaaccttcaaaagttaatagaagtgagatcatactggtttgtttcttattttgattggagaaaaattaaattgctgcatttcgcagtgacccatttacatggcattctcagcttagactgcgtaagaagaaatatatgtggtgaaatgttggaaccatttctctcttggtctctgtttaatgttgaaagggtgagctaataggaggcactttcaacttcactccctcacgctaccccgtccccctccagactggcagtttcaaggatgcaaattgcattgcaaaatcaaactgactcatgaagcatttgggccagtgcactgtttacttccatctgtttgcagacacatttgtgcccggcgtttgggagccctttgtatcaatgttctgacaagggtccctataaccttaacctactcgaaaccggtttgggatggatatgatggggcttctgtgct

SEQ ID NO: 4540 - DNA, 337 bp, Homo sapiens
ctgcgttacccggaaccgccgggccgaacagcatgacgtccgctttggagaactacatcaaccgtatcctcaagctggccgccgcgggcttatcaggaactgttgccgttattacatcagatgggagaatgattgtgggaacactgaaaggttttgaccagaccattaatttgattttggatgaaagccatgaacgagtattcagctcttcacagggggtagaacaagtggtactaggattatacattgtaagaggtgacaacgttgcagtcattggagaaatcgatgaagaaacagattctgcgcttgatttggggaatattcgagcagaaccttt

SEQ ID NO: 4541 - DNA, 111 bp, Homo sapiens
tgctgctgccctccagccgtctgttgcttccctcccccgctcccatttttcagcttttcttgaaatctggcaagcgccagaaagggaaataacttccatccaccttaattt

SEQ ID NO: 4542 - DNA, 474 bp, Homo sapiens
  unsure (426): n=A,T,C or G
cctgagccggcggcagatggaggtgtgtgtgcgtcaccctgatgtggctgcctcagccatacagggcatccagatcgccatccacgaatgccaacaccaattcagggaccagcgctggaactgctcaagcctggagactcgcaacaagatcccctatgagagtcccatcttcagcagaggaaatatctgtacctgtcgcttgcctctacttaccctctgcttagtaaaccacatttaggatggggaacccatgaggaagaacccagaatcagcatgaggaggggttgaggactttgcctaatcgtgcagatggaggcagcctggacaggtaaaaagtctgcccttctgcagaagctcttcccggcgggggacaccaccagcctgtgtgtcatccctgctgcctctggaaaaccctctctgaatcanaggtgctgggtgtgtgtgtgcctgtgtgcagtggctcctgccagcagg

SEQ ID NO: 4543 - DNA, 251 bp, Homo sapiens
ccactcagcacatttcatggaggtcatgtcttttcactgatacttttttgatagtttttatataacaaaatccttattctatttataacttaagatgataaggcactataaattaatgacctaaaataatatatttgtctgttatcttttgctatttctacttcactttaatttttagctgtaaaattggtaaatggattcttacaactatctctttccatttcttactatttggttttcaaatttcattt

SEQ ID NO: 4544 - DNA, 602 bp, Homo sapiens
aaaattagggtggtggtgcacacctatggtcccagctacttgggtgtcttaggcgggagaatcacctgagcccaggagtttggggttgcaatgaactatgaccacaccactgcactccagcctaggcaacagagcaagaccctatctcttaaaatcagttcatgatggatattgtggcttcagatgtgaaagaaaagatacggggctaaaattctgtattttcagtgtattctggtaaccagctaatccaagcagtaatttttgaaatgtgaagtttagaatatattctaaataaaatacgtgcaacctccagtgggaacctcttattattggggaggtagtagaaaggcgctgggtgttctaaaataggctctcctggcccacggctgactgtcttccttgtgtctctgcagtggacgtgactctggacccagacacggcctaccccagcctgatcctctctgataatctgcggcaagtgcggtacagttacctccaacaggacctgcctgacaaccccgagaggttcaatctgtttccctgtgtcttgggctctccatgcttcatcgccgggagacattattgggaggtagaggtgggag

SEQ ID NO: 4545 - DNA, 399 bp, Homo sapiens
cctgaaaataggctattccatttggcaagtaagaggccattgctgatcttagagcaatttccacagaatgagaggcagaagcaagataatagtgactgagaaaaaaactattcagtactctcaggaagcttgctaaattgctaaaattttaatttgcacttattggataaaaatataattttcctaggcatctaaaaattatttttagtatttagtgcaggggaaagcatactgagaatactattttggacaaattttttgataagcactttgaccagttcatcaaaagccttaaaatattcatccgtggccgggcgcggtagctcacacctgtaatcccagcactttgggaggctgaggccgacggatcacaaggtcagaagttcgagaccagtctgg

SEQ ID NO: 4546 - DNA, 205 bp, Homo sapiens
  unsure (46): n=A,T,C or G
  unsure (47): n=A,T,C or G
  unsure (57): n=A,T,C or G
  unsure (67): n=A,T,C or G
  unsure (106): n=A,T,C or G
  unsure (109): n=A,T,C or G
aatattcccaaattgtgcttgctcatggcaaaatggatgcaaccanngttattccanaacatgcatntcaagcattcacctgttttcatgaatcctggatgctcancantgtttgaactatttaatagcttcacggcttttcgataattacctcttaagtactcaaaattgcttttaagaaagagagagggtgcggaatttccag

SEQ ID NO: 4547 - DNA, 295 bp, Homo sapiens; identical to SEQ ID NO: 342

SEQ ID NO: 4548 - DNA, 227 bp, Homo sapiens
attagatggagaggaggcagtttctaaatggcttgactttggtgaagtctcaactcaggaagctctgaaattaatccacccaacagagaacatcaccttccatgcagtctcttctgtggtgaacaactcgcgaaacaacactcctgagtgtctggctcctgtcgacttggtggtcaaaaaggagctcagggcaagtggcagtagccagaggatgttgcagtggttgg

SEQ ID NO: 4549 - DNA, 368 bp, Homo sapiens
ctgaatcatgaataacactatataatagagtataaggaacacaagcattagatgtgatccttgccccatacccttagattatgtcagactaaagctgacaattctgccaggctctgaacccctagtgcccccaacccaaatcttggaagcaaagaatatgccctgtcatacaactttgtacaagttgtagtaaaacaaagcttaagttttctcatctttctacagcaaatggtcagttatttaataaacactaaaatgctcctaagaatccattttgagtttgtttaccaaacacattgtgcaagaactgactacacaaaaagttcctttgaaatttggtccacaaattcacttaaggttggaaattt

SEQ ID NO: 4550 - DNA, 401 bp, Homo sapiens
aaactacagaacacccactggaactcatggagatgctggagactttgcaatgattgcatattttgtgttgaagccaagatgtttacagaaaggaagtttaaccatacagcaagtagacgaccttttagactcaattgccagcaataattctgctaaaagaaaagacctaataaaaaagagccttcttcaacttataactcagagttcagcacttgagcaaaagtggcttatacggatgatcataaaggatttaaatgttctttcacagaggactggagttaatattgacaggatgtttaacgtttttatcaatgtcttcataggacctgttcactgttcaaaaaatacacttaatggagatttggcatcagcaaccattcctgaagaaagcagacttatgg

SEQ ID NO: 4551 - DNA, 182 bp, Homo sapiens
ctggagatgttgggctgggaggccctgtggtcactcatactgcaggagagagaagaagggtacaggtgccagcttctccctgcccttaagcgaggtcagctccaccaggctcacgcactccaggacctcagcctgcaggcggcccagcagctcacaggcagcgttcatggttccaccagtgg

SEQ ID NO: 4552 - DNA, 606 bp, Homo sapiens
aaaaaccaaaagaaaattcagaacagttttgtaataggataaattaaaggtatgctaccacatataaaactttgctacagtcagttaagtattatacaacttttcaaactaaaggaaaacaaatcaaaatattaaaagaagatactgtctaatctaaaagtgtactggtttctacaagtgtcaaaaaaagatttgatgtagtgcaactgtctatacttgtggtgcctttgaaaaaagggtgggaaggaggggagagaagaaacttttcttgcttctggaagcaaaagacatattggaattagagaataaacagaccatgcagtgcgtcactccacgctgcagtcattggtgctcatctgccaaccaaacatttccttaagtctcactgtggcaatctccttaggattcaaacccagagttaaggctggtctgctaaaaacgggggcactattgtcattcaaccctttagatctctagatttcctaatgcccgaataaggccaaatacagaataattaattaagcatttctttttccaaaagcaaatcaagtcactctcctttcttgctaatttatactttttcttatggcaatgatttttttctag

SEQ ID NO: 4553 - DNA, 568 bp, Homo sapiens
cctggctaaaatctacccttgggccctgcactcctccccatggctatattgcaaatatcctatactttgcatgtgatcacacaaagagggtttctgttactggcacacaaaaagtttgcctgagatgattctcctccacttccatcagggtcttctggtcattgatttcaacttattctctcttaagaagcccattgagtccccataatctcttggtttctttcttttccaggaccaactgctcacagttcaaaccctcattttgcctctatttacttgtaccttgattggctgatgccctaacagacccaggttcttcagaaagccttcctagtccacctcagaccttggggatccccctttcccatgacccccgatggcacctgattacgtcactgggttccagttaccagaccacagccaaggtccaggatggctgcatcagagtcatccagagccggttaaaaatgacagcctcggctgggcacagtggctaatgcctgtaattccagtactttgggagggaaggtgggtggatcacgaggtcaagagatggaggccatcctgg

SEQ ID NO: 4554 - DNA, 517 bp, Homo sapiens
  unsure (489): n=A,T,C or G
ctgctacagaagctgatatattatggcgggccaaaagcagctttctaaagtgactcccaatgaagggagagtagattaagaggaaaataaccccagagggaagcaagcaagtttgacccccaaagcccccaaagttctaggagctccagactgtctctgttagatcccttctttcttaatcccagtcccccctccctcccagtcccgccagcccaagagggactgactgtagctgacaagcagggcaacagcagaatcagttcaaataagcaatcatgtacaaggcatcgacattcccacacccagcaatggcgcagatccaccccgaccccagcagttcgtaatcactgcctttaacttagcgcttaagtggcaggcactgggctaagcgctttacagacatcacagcttctgaaattcctcacaacaaccctatgaggtaggttctgatatttcagccccattttacagataagaagactgagttgntaacttttaactgagcagttaaaagaca

SEQ ID NO: 4555 - DNA, 399 bp, Homo sapiens
  unsure (26): n=A,T,C or G
  unsure (31): n=A,T,C or G
  unsure (56): n=A,T,C or G
  unsure (65): n=A,T,C or G
  unsure (68): n=A,T,C or G
  unsure (82): n=A,T,C or G
  unsure (83): n=A,T,C or G
  unsure (114): n=A,T,C or G
  unsure (121): n=A,T,C or G
  unsure (127): n=A,T,C or G
  unsure (157): n=A,T,C or G
  unsure (198): n=A,T,C or G
  unsure (208): n=A,T,C or G
  unsure (212): n=A,T,C or G
  unsure (215): n=A,T,C or G
  unsure (235): n=A,T,C or G
  unsure (272): n=A,T,C or G
  unsure (280): n=A,T,C or G
  unsure (302): n=A,T,C or G
  unsure (338): n=A,T,C or G
  unsure (378): n=A,T,C or G
  unsure (379): n=A,T,C or G
  unsure (380): n=A,T,C or G
ctgaaaataggctattccatttggcnagtangaggccattgctgatcttagagcantttccacanaangagaggcagaagcnngataatagtgactgagaaaaaaactattcantactctnaggaancttgctaaattgctaaaattttaatttgcncttattggataaaaatataattttcctaggcatctaaaaantatttttagnattnagngcaggggaaagcatactganaatactattttggacaaattttttgataagcactttnaccagttnatcaaaagccttaaaatattcntccgtggccgggcgcggtagctcacacctgtaatcncagcactttgggaggctgaggccgacggatcacaaggtcnnnaagttcgagaccagtctgg

SEQ ID NO: 4556 - DNA, 257 bp, Homo sapiens
ccaatagtactgcagtggtaaagataccaggcactcctggggcaggaggtcgtcttagccctgaaaacaatcaggtattgaccaagaagaaattacaggacttagtaagagaagtggatcctaatgagcagttggatgaagatgtggaggagatgctgctgcagattgctgatgattttatcgagagtgtggtgacagcagcctgtcagcttgcgcggcatcgcaagtctagcaccctggaggtgaaagatgtccag

SEQ ID NO: 4557 - DNA, 503 bp, Homo sapiens
ctgatgccccaggaggccggcctggcggaggagttcctgctcactgacaatagtgccatatggcaaacggtagaagaactggattacttagaagtggaggctgaggccaagatggagaacttgcgagctgcagtgccaggtcaacccctagctctgactgcccgtggtggccccaaggacacccagcccagctatcaccatggcaatggaccttacaacgacgtggacatccctggctgctggtttttcaagctgcctcacaaggatggtaatagctgtaatgtgggaagcccctttgccaaggacttcctgcccaagatggaggatggcaccctgcaggctggcccaggaagtgccagtgggccccgtgctctggaaatcaacaaaatgatttctttctggaggaacgcccataaacgtatcagctcccagatggtggtgtggctgcccaggtcagctctgccccgtgctgtgatcaggcaccccgactatgatgaggaagg

SEQ ID NO: 4558 - DNA, 347 bp, Homo sapiens
ccagtggaggggtgggggtatcgatcccgccgggggctggcttggttgctggtgccctgagcccttctctgcccgcctgggtgttgccttcactgatggaggtaggcgtccagccagatgtcaccagacttcttcagggacctgacgatgtccaccagcgcggtgaggaagggcttcacttcgtagctgaggccgtgcttggcacacagcgacttgaccagcggggccacccggctgtagttgtgtctcggcatcctggggaagaggtggtgctcgatctggaagttgaggtgcccgctgaaccagttggtgaaaagtgagggctccacgttgcaggtggctgccag

SEQ ID NO: 4559 - DNA, 392 bp, Homo sapiens
  unsure (72): n=A,T,C or G
  unsure (95): n=A,T,C or G
  unsure (142): n=A,T,C or G
  unsure (187): n=A,T,C or G
  unsure (217): n=A,T,C or G
  unsure (226): n=A,T,C or G
  unsure (248): n=A,T,C or G
  unsure (265): n=A,T,C or G
  unsure (278): n=A,T,C or G
  unsure (281): n=A,T,C or G
  unsure (286): n=A,T,C or G
  unsure (346): n=A,T,C or G
  unsure (372): n=A,T,C or G
cttttttttttttttttttttttttttagggaggaataagtttatttctcctccatccactcaaaatatatnttaacaccagtggcattatgganacagcatttggttagggagtgccaagcattctacagcatttgatggnggaaatagtcatgctttttatttctgctctctaggaatgtaaggngcacagcaggtcagggtactgctgtgtganacaaaaggnccaggtagaggcaattctccanatgcaggcagggcaggngctcactgggcanagngcttntcatacaccttcaggaactcgagcacgtcgtcgggggaccccaagatcaccggcgccctntggtgaatgtctgtgggaatgacgtntaacacggcctccttcccag

SEQ ID NO: 4560 - DNA, 455 bp, Homo sapiens; identical to SEQ ID NO: 4202

SEQ ID NO: 4561 - DNA, 344 bp, Homo sapiens
cctgggcaacatagcaagaccctcgtctctattaaaaatataaaaaatacaccagacgcggtggctcatgcctgtaatcccagcgctttggaaggctgaggcaggtggattgcttgagaccaggagtttgagaccagcctggtcaacacagagaaaccccatctatactaaaaatacaaaaatcagcctggtgcggtggcacacccattagtcctagctactcaagaggctgaagcataagaattgtgtgaacccaggaggcggagcttgcagtgagctgagattgtgccactgcactccagcctgggcaacagaccaagactctgtctcaaaaaaaaaaaaaa

SEQ ID NO: 4562 - DNA, 291 bp, Homo sapiens
ctggcgggggcgagcacctctgcctattcccgggtccccaagcccctcagccccatgcctgtctacacagcaggattgcttgagcattcaccggaagttatgggcctggggacccaggctgaaaccctgccctcctggtgcttccactctagacaagggggtcagtgacatggtgatgccagttggaggtgacctctgtcaggctgggagcagggcagacaggtgttggtgtaggtgggctccagggcaagaggcagcccccagtagagtgcacggggttttctagcccag

SEQ ID NO: 4563 - DNA, 518 bp, Homo sapiens
  unsure (395): n=A,T,C or G
  unsure (443): n=A,T,C or G
  unsure (461): n=A,T,C or G
  unsure (472): n=A,T,C or G
  unsure (504): n=A,T,C or G
  unsure (506): n=A,T,C or G
aaaagctcagagagtaagtgctggggaaagcagagctatcagaggaaatctctcatagaaacgaaaccaaaccaacagaaaatgaagaaggccacatctttaaggccacctctgcctctatcagatgagctgctggtctagatcaggggctggcaaacttttctgtaaaaggccagacagtaaaaatttccgattttgcaggccacatagtgtctgttgcaactattcaactctgccatagatcatgtgtaaaggaatgggtgtggctgttcaataaactatacagttgacccttgaacaatatgggtttgaactgcatggctgcacttatatatggatttttttcaaccatacaggttgaaaatacagtattggcagggggcgaaacctgcgtncatggagggctgatttatcacatacgtgggttctgtagggcccactgngggacttgagtatgcatngggtttttgtntactcaggcgttctggaactatcctccatgtntnccaaaggatggt

SEQ ID NO: 4564 - DNA, 289 bp, Homo sapiens
cctaaagggaactgtcttctgtcgagaagtaaaggaaacttcatgaaggatgtagaagcttagctgcctcagagaagagagaacctgaagatctgaggcaagctggacaggagaggtggatatttgttgatggaagaattcaagtttataatcaattcccacttagcacctactgtgtgctaggaacttgaatgtgtatgtttgacaagtcctgcttggcctgatgggtgggagaaggaacctgagcctggctgagatggctaggcggagggctttgaagtccaagcag

SEQ ID NO: 4565 - DNA, 572 bp, Homo sapiens
  unsure (48): n=A,T,C or G
  unsure (158): n=A,T,C or G
  unsure (231): n=A,T,C or G
  unsure (295): n=A,T,C or G
  unsure (314): n=A,T,C or G
  unsure (559): n=A,T,C or G
tttttttttttttttttttttttattgaacagttttattctgttttanaataaaaactttgctttaatattgtaaggggtactgcaggtatgccatgctgccagttattgctggggcacaaaacgccccagtcagtgattcggagggctgggaaaacncataaactcataatttcagagcaagtagaactagtatttacagttttctttcttgaaattggcccgggacatntccaacagtctacacatgtattgccatggtacttgctctgatgctctgaatgcctcggaactgngttcaatatcatgatttgngggtcctctaaaaggttttgttgttaacatgcaagcaaacagcactgaacaatattgtctaaactatggctgccaagtactggatcttcataatgaaaccaaattacaaaacactgccttgtagagctatacaaaagatataaaatgaaaataaaaaatgtcaaccagccttaaatattccaattctcctacagtgcagtttctatatctttatcactactgaatgttttaaggagaaagttaanaaaacaatcaaaa

SEQ ID NO: 4566 - DNA, 576 bp, Homo sapiens
aaatcaactaaagactcatgagatttatttggttacagtgaataacctggacaaaatgttgagaagagttgttaaaacaagtttacattaaatatactaacaattacgtttggttacatatttgtaagtgatggttatttagaaaaactgcatagaaatccaaaccttaaatattctgcaaatcaaatcattagcttttctcttctctaataaagtagggtgactagttcttggattaatctaactataacattaatgtagcacttgattatcttatggaataattctctatctcatctaagcctcacaacaaccttgtaaagtattatccccatatggaggaagaaacaggcttagaagtggaaaggtagattctctgcttgcacaaccgtattatgtggctaagctattgaacttgaacctagatttgggacttcatttcaaatatgaaattttttgattaaatctttttatcttgtatggaaaaaatatctcattagctgtcagatgttatttaccctgctaacttaaaaatatttcattaaaaaaattcagcttcatagcctttcagtttcc

SEQ ID NO: 4567 - DNA, 384 bp, Homo sapiens
ctgtctggtaaaccagtggcacttcactgccccagggtggctggctccctttctgaatttctgtctcaatgtgatataattgccaccattcaggatggctacccacatctggtatgaacaccatgacttctgtaagccaacggggcttcctcctcagaacagtgcccgtgcaatcttcctccctgtggccttgatcctgggaaaggagccccctcctccctcactcggaggagttcctgaggcagacgggccactggtgacgccaggtgtagcagtagaggaccttcgccgctgccgcaggaggaaatcgtgtgaagctccatccatggcgtagaatacattagccgaggctgggatagtcagctctcgctcccctggtagcag

SEQ ID NO: 4568 - DNA, 355 bp, Homo sapiens
aaactagtattaaaggtagtttaccaaagcattttttgttttcttaccttgaaaacacagaaccgttaattccttggtttaagcagttgctaagttttttaattttaggctcagaggcccataggaggttttaagatttatgtttagtccgataggtgaggtctttgatattttgaattttaactccttttatgatacatcacagtaacctcatttttgaagtctttctttgtactttaatgttctccctgttctaatagttgaagtatgagatgtaactattataaactgttgctgaaaacataaatgtctgtaacttacaaacatgataaataaattaaaaattccatccagg

SEQ ID NO: 4569 - DNA, 119 bp, Homo sapiens
ctgggagatatcgatgcggttgcacagcaggtccgagatgacgtcctgtgcgtgagccaccgcgccctcagggtctcggtcgatgagcaggcggcgcagtgaggcagtgaccaggttgg

SEQ ID NO: 4570 - DNA, 568 bp, Homo sapiens
cctagaagaggtcaaggttagaaaggttaagcatttgatcactacaggtacttgtagtacctagagaaggaacccatcctggggttggtggagttggtattgctactcgttttgatagttctcatttacagagaaagaaaaataagccaaagccagaaagcaatccaagccttacagttgtccaatacctcagggccagttggctagaattttcttttccctcagcccataatcacttagagttagccatacaacaaacagcctgacaatctgaccagcatttccattgatataaaatgtaagcattccttcattctgtagttaggaactccaacttcagccttatctccaacataatttcccaatttaacctatgtactgatatggacatttctttgtgaatatgccagattcaagaatgtatttttctaaggtcaatagagatacgacattttaagtcaggaaaaatcacctataaattagtaggaataactgtagaagcatcacaaaagataccccatgaatagatggcatggtgtgcatgctgacagccacggggtcatactct

SEQ ID NO: 4571 - DNA, 332 bp, Homo sapiens; identical to SEQ ID NO: 4096

SEQ ID NO: 4572 - DNA, 351 bp, Homo sapiens
aaattaataacttgaaattacccctgccccccaccccattacatctttttataaacagcaaacattttgctattttatacataggctagcaggcttgtttcaatatgaaagtgctaattcatttacagatttttataatcagttatgtagtgctacaataaatgtccaataatctacataggaacaatgatgaaaatgatgaagactgaataaggctatcagatgaccttatcttatttacatataaagaatagatacccaatggtgaggaagaaacagaaattggacaaatactcataggtgtaaaaattacatctacctttgagttttatactgtaaatgagacatttt

SEQ ID NO: 4573 - DNA, 511 bp, Homo sapiens
  unsure (71): n=A,T,C or G
  unsure (112): n=A,T,C or G
  unsure (119): n=A,T,C or G
  unsure (124): n=A,T,C or G
  unsure (139): n=A,T,C or G
  unsure (144): n=A,T,C or G
  unsure (196): n=A,T,C or G
  unsure (234): n=A,T,C or G
  unsure (244): n=A,T,C or G
  unsure (254): n=A,T,C or G
  unsure (260): n=A,T,C or G
  unsure (307): n=A,T,C or G
  unsure (322): n=A,T,C or G
  unsure (349): n=A,T,C or G
  unsure (379): n=A,T,C or G
  unsure (381): n=A,T,C or G
  unsure (387): n=A,T,C or G
  unsure (392): n=A,T,C or G
  unsure (404): n=A,T,C or G
  unsure (405): n=A,T,C or G
  unsure (437): n=A,T,C or G
  unsure (498): n=A,T,C or G
  unsure (499): n=A,T,C or G
cctgagtggcctgtttgccacccagaatggggatgttggttgctatggaaacatggatgagtttacccaanaggaactccgggctctggatagtgagggcagggccctcctnacacagnataanatccggtaatagctnatatntccctgctactgagcactgctggtgctactctttgagtgtgaagattctaangcttgccatgtaaacatacatgcaccgtggagaagttnccaaatttgnctttcctggnttagtnctggctgggctactcagtgtgtgaccctggcaaatttttcccccctntgaagcttgagtttncatctctacaatgtggggctggcctantgatccagctcttattaccatagacatctnanaagcancttantgctgaactcanngccccaggttgctgtctttctgggtgttctgngtgaatagcagcaccattacctggtggtaatccttagatatccctctccctgccttatcannagtcagtcccca

SEQ ID NO: 4574 - DNA, 530 bp, Homo sapiens
  unsure (326): n=A,T,C or G
aaattagaggttaataatgttgttttcttctctctcttttttttttttttttttttgagacagagtctagctttgtaccaggctgcagtgcagtagtgccatctcagctcactgcaacctctgcctcccgggttcaagcgattgtcctgcctcagcctcccgagtagctgggattacagccacatgccaccacacccagctaatgtttgtatttttagtagatacggggtttcatcatgttgcccaggatggtcttaatttcctgacctcgtgatccgcccatctcggcctcccaaaatgctgggattacaggcatgagccaccanaaccggacatgctttccttaaaagctaaatattttaggcttgtgtgccattaggctctgttacaactacttaattctgcttttgtaattctatagcacccattgataatacataaacaaatgagcatgaatgtgtctcagtaaaaatttgttcacataaacaggcagtccacccatgaagctatagcttgctgaccccttgttt

SEQ ID NO: 4575 - DNA, 607 bp, Homo sapiens
aaagttatgtttgagaaccctgacttccaagtagatgaagagagtgaagaatttaggcttctgaatccacttgtttcaaaaattagtgaaaaaaggaagaagaaactaagactcttagagcaacaagaacttcgtgaaaaagaagaggaggaagagccggaaggaaaaccaagtgatgcagaaagttcggagagttcagatgatgaaaaagcctgggttgaagaggtcaggaagcaacgcagactcctccagcaggaggaaaaagtgaagcggcaggaacgactcaaggaggaccagcagacagtcctaaagccccagttttatgagatcaaagcaggagaagaatttagaagcttcaaagattctgccacaaagcagaaactgatgaacaaaacccttgaagatcgtttgaaaattgaagcaaaaaatgggacattgagtgtatccgacaccaccgttggcagcaaacaattgacattcacgttaaagaggtctgaacagcagaagaagcaataggaggctgagaaactgcatcgacaagaaaggaaaagactccgtcgttcggccggacacctgaagtcaagacacaaaagaggacggtcgtttc

SEQ ID NO: 4576 - DNA, 234 bp, Homo sapiens
attttttaaaaagattattcaactaccaatcagtaatgtttttaaacagtacatttgctttgaacttggaaaatgtgttcagaaagaaaaatggaattgaatttcatttatacactaattccttggattttgcacagttacctaacggttttagtctggagttaaattcagatgcatggaatcctgaaggaaaatggtagctttttaatctttttgtgtgtgtgtgagtctttt

SEQ ID NO: 4577 - DNA, 582 bp, Homo sapiens; identical to SEQ ID NO: 643
  unsure (540): n=A,T,C or G

SEQ ID NO: 4578 - DNA, 291 bp, Homo sapiens
ccaatggtggcagagtctacatagaactatgcttcgtggtgttctggggaaaacctttcgacttgttggctatactattcaatatggctgtatagctcattgtgcttttgaatacgttggtggtgttgtcatggtgccaatgggtcatgtttggttagaaggtgacaatctacagaattctacagattccaggtgctatggacctattccatatggactaataagaggacgaatcttctttaagatttggcctctgagtgattttggatttttacgtgccagccctaatgg

SEQ ID NO: 4579 - DNA, 202 bp, Homo sapiens
aaacctcagcttaactgcagaattctaagccttctttttgatcaaactgagatctatggcaacccttctgctacccgggacttggaaggatagtgaatataaattaggctctggacccccaaggctggtgatgctactgtaacctctacagctctggattcaacctgagggcctgggatatgtgactttacataaaaatgat

SEQ ID NO: 4580 - DNA, 507 bp, Homo sapiens
  unsure (326): n=A,T,C or G
  unsure (376): n=A,T,C or G
  unsure (410): n=A,T,C or G
  unsure (447): n=A,T,C or G
  unsure (456): n=A,T,C or G
  unsure (460): n=A,T,C or G
  unsure (479): n=A,T,C or G
tgcgcctgtagttccagctattcaggaggctgaggcaggaggatctttgagcctaggatgctaaggttgcagtgagccaagatggcaccattgcactctagcctgggcagcagagcgagaccctgtctcaaaaaatacatttatttttttcattttcagttaacagtgtactcttatgacaccgttattagctggtactttggtgatttctattactagtttttctaagctatttacagagtgtttgtagctttcatttgcagcattatgttcccacaaattctgtactcagtatatacagtatagtttatctgctctatttctgncttatagaaatcatgaatgtggtctgcagacattgatgaagaaaatctgntggtaattgatacatgggctaaagcatcagaggnttaatttgaagtttatgttcacacactgaaaacttantttttttgntggnagatccatgtgcatgctanaatttgggacaggcactatttgcataaa

SEQ ID NO: 4581 - DNA, 511 bp, Homo sapiens
cctcttgattcctaggagtcaataagaaggctttggagtccaggcaggaagtcagggacttgaattcctccacacacttttcgggaggatgtggtgagcgattgtagaggagaaagcgctggtaaccctggcctgtctcattcagcatgattccacctgggcatgagctggaaaagagctcagtcttcatgtcagggcggccttcagttctgagatctgtgctcccttcagtcaggtggtagatccatttccggggcacacagagcccatctttcatgcggatggtagcacgaaggtggagctgcatcggggcagagccagcagccatattgaagacaatgttgtccacagggtcaaaagttgccaactcctccttggtgggagctgcccctgcgataaagtaccactggcccaagtggacctctgggaatgtttggggctgcggactttctcgtcgtgccccacaaaagtaaagcttggggacctggggggagccggaagtatcgcttcg

SEQ ID NO: 4582 - DNA, 131 bp, Homo sapiens
aaaaaccattttcctatgttaggagtgcaagaatagccagcatttccgattttgacatatgttcattttatgcatatttaagaaattatagctgcatatcccttctttcaaaaaatgttgctttttttttt

SEQ ID NO: 4583 - DNA, 365 bp, Homo sapiens
cctatttaagggttcccagcagaatgggccattgtccgcctctccagttgcatgactggagtttgatggccttttgttctttctgagctgtagctggagcttgcttgttggttcacaggaacaagcaaggttcatctaaactgtaggcaaaaacttaaaaacaactagtgagtttagaatttaatggcaaatgtatgataagttttgaaacacaatttctttctctctagtccccatttttggaaaaaacaaacaaaaaaacataaatcatgataggactgagttgtttgcaaaatagattgtagtcttacacttggtctgattatttgcataaagtgcaagaggaataattatttctacatagg

SEQ ID NO: 4584 - DNA, 595 bp, Homo sapiens
aaatttggtgatattattatattttatctgaatgaacagaatttgctgatttgacactgtgtttgagtgtgcattttttgttgaaaaatgacaattctggaatgccgtctccctttccagattattcagagctgggagagcttcccccacgatctcctttagaaccagtttgtgaagatgggccctttggccccccaccagaggaaaagaaaaggacatctcgtgagctccgagagctgtggcaaaaggctattcttcaacagatactgctgcttagaatggagaaggaaaatcagaagctccaagcctctgaaaatgatttgctgaacaagcgcctgaagctcgattatgaagaaattactccctgtcttaaagaagtaactacagtgtgggaaaagatgcttagcactccaggaagatcaaaaattaagtttgacatggaaaaaatgcactcggctgttgggcaaggtgtgccacgtcatcaccgaggtgaaatctggaaatttctagctgagcaattccaccttaaacaccagtttcccagcaaacagcagccaaaggatgtgccatacaaagaactcttaaagcagacctc

SEQ ID NO: 4585 - DNA, 342 bp, Homo sapiens
ggcacgatatcggctaactgcaacctctgcctcccgggttcaagtgattctcctgcctcagcctcccgagtagctggggttacagacaccacgcccaactagtttttgtatttttaggagaaacggggtttcaccatgttggctaggctggtcccgaactcctgacctcaggtgatccacccacctcagcctcccaagttgttgggattacaggcatgagccactgcgccctgcctatgatgacctttatattttcatatggattaaagataccgtccagagtgctttcatttcatcttgaatgctcgttttagcatttcttcttggacaggtctagaatac

SEQ ID NO: 4586 - DNA, 461 bp, Homo sapiens
  unsure (9): n=A,T,C or G
  unsure (21): n=A,T,C or G
  unsure (33): n=A,T,C or G
  unsure (50): n=A,T,C or G
  unsure (51): n=A,T,C or G
  unsure (110): n=A,T,C or G
  unsure (119): n=A,T,C or G
  unsure (134): n=A,T,C or G
  unsure (188): n=A,T,C or G
  unsure (209): n=A,T,C or G
  unsure (262): n=A,T,C or G
  unsure (265): n=A,T,C or G
  unsure (273): n=A,T,C or G
  unsure (434): n=A,T,C or G
  unsure (445): n=A,T,C or G
ctggagccntctgctcaccanaactcctacttnccggtggcaggagagcnngagagggacagacagatggcagggcatgtccaaaagaagagcatcagcacaaatgaatnctccccttncccacctccaggggngggggcctttggcacctcaatccccgataccctactccttcccacccacatctncttgcacccatctggaacctnggttgatgtgagccggcaacagagaagcaccgtggcgcggcgagggaatgcanacngcacccancggtggatggcggcagcggaggccgcggggaaacctgaccaggaagctgaggaccaaaccagcctctttttccgttcccggtttttttcctgaacccaacgcgtgccgtgccccgtttcccccaatatgtgttggggaggggtgtcctgaatggggtggtngattttttttnttaaaaaaattttttt

SEQ ID NO: 4587 - DNA, 498 bp, Homo sapiens
ggagcagcagatagaagggacagggttgcacttataacaccactatcctcccagccctggttttatcatcatcatcgagaaaaatacaattaatcagcagtgatcaaaggtaagtctaaacattccatttaactaacttaaatgtgacctggtgtgccgtgtcattctataaatgacataacagaataagactcactttctaattcacagcctctggttcaatttcaagtaagcaaatacattttgctttggttttgcttacaatattctgggaaatgcaggctataaataatcactcaactgttttgtgggtcaacagaatcactactactttcagtttcgttgatgccatttatatcatgagctcaagcacacgggcgcttcagaaggcactataaagtttagttttgatgtggtgtgatgttctgatctatcttgaaaggtaaagaaacccacaggattcagcgtcaagccaatccatgcccaggcacatcgcag

SEQ ID NO: 4588 - DNA, 456 bp, Homo sapiens
cctaaaaaagcggcctcggtgggaatgcatttctcttgctccacgtctattttagttgcatatctgtagtgatgacaaatgcctccagccttgtcctctgcaaggctgcactgggctgcatacaggctcctgtctcaggtgtctggtttcctccttgaaaggttggggcagcagagtcagccctgtctatctgggcaaggccctgacacttggaagcatgaaaagccatggttcaggtggagtgagcttccaatgcccttggaaggattttatttcagggccgtggggcttaaaagtcatcactgtacaatccactgggagcaaagatcaagataagatgtgatggatatcataaaagcggaacagaacatcccattgctcagagatgggagaacaactctgaatggagagggctcaggttatatacattcacccttttcatgggaaagtgtgagg

SEQ ID NO: 4589 - DNA, 534 bp, Homo sapiens; identical to SEQ ID NO: 343

SEQ ID NO: 4590 - DNA, 290 bp, Homo sapiens
  unsure (75): n=A,T,C or G
ctgcctgcctgggaggaggggctggcctggatctgtgacagccacccagcagcactgcagggccatggggctcanaaaatgcagaggcatcccccgccctgcccaggcataggattggctgaggcatcctgccttcagccgggtccacacgtgacacgtccacacgtgacaggcccacagacgacaggaccacacaacaggttcacacgtgacaggtccacacgtgactggtgcatgcatgacaggtccacacgtgacagtccacacgtgacaggtccacatgtgacagg

SEQ ID NO: 4591 - DNA, 243 bp, Homo sapiens
ccttcacttggttcatgtaggaacaccaagtccctttcaaagcaccacatcttcctctaatcaatatttcttggagtccctagggaatgtcttacatgcattcaaacaatcaccatttctggagatacactacagggtcaccataaactctgctacccttaggttccatcactatggaagctgagtttcaccagaaggcacttttgtcctccattacgaccagcaaagccagctaagccacag

SEQ ID NO: 4592 - DNA, 413 bp, Homo sapiens
ccacacggtactgctctcggcggactgaagcatttgtcctgcaacctgctgcttcagatggctcttagctacaataagaaatcctaagtccaaaggccaactttctcatacaactggtgcccttgcaggaagcagtgggaggtggggagggatgaggaccactgttgagtaaggacagcagaggtcccttgccatgcctcccttctgcccttgtccgggaacaacatggggagaagccagggatctcatgacatcctttagtctcaaactcgatcccaaggttgccacgacagccttgtccccaccatgcaagtcacctccccaacaagacacataaaaagccacgtctgctctccactaggctcccacaagaaaaacagaccaagatcccccatggggcgtgagtactgcag

SEQ ID NO: 4593 - DNA, 315 bp, Homo sapiens
ctggattagataggagggtctctttcagcttgcacctctgggaagccaacactgacgcccactgggagaggctgaacttggtccaggctaccacttcagcatcagcccatggtggaagcagacttccccaagcccaaagttcagccccctgccccacacccctctgcacacctgccacaatgacggaggtaaaaccaaagaacatccccagcgccatcttctgcagagcagagggaagcagcttgcaccgcagcagtaaagggtcgatcaagcggtccttcagagggaccagaatcagcaccaccacaacattgg

SEQ ID NO: 4594 - DNA, 466 bp, Homo sapiens
ccagtacagttcttcctggatggccgacacagatcctggggaaaggcaatcccggcactgctctgaaaccagagctcctcctccctccccgggcagggtggagctgagaagggctgctctagcgttgggactccacctccatacacctgatattttgatagggcaggtccctgctatgggccactgttctgggcagtatagtatgcttgacagcatccttggcatctatccaccagatcccagagcacccgctactagctgtgacaacatcctccaaacattgcaaaatttcccctgggaggcaagattgcctcagatgggagaatcacgctctagggaaatctgctggtatgagaaccccaactccccactccactgagcctccagatggcgagcaggctgcagctccagcacagacacgaagctccctccagccactgacggtccatggctggggttacccagg

SEQ ID NO: 4595 - DNA, 405 bp, Homo sapiens
aaagagacagacaatgacgcattttaatctacctttgtcttaatttacagcaggttttgtatgaatttttaaccttttaacaaactcccaaatctggttgatgcctttgacagtgatgaaaacgatttcaccacatctgaatccagagaaaccggcttttttttcttattgcgagcatgttaaaacgttgggaacatgtggggaattgtatattgcgctgaattaacttctcccgcctcttgtaatgctctggtgggttcttgtttgggaatgcgatattttgtggctggtttagctagagagtgaactctcaaaggtatcaaaactgtgcttccattattagtgcaagaaacagacaggctttaaggggtagatgacgtgaaattttgcaagtcttaattacag

SEQ ID NO: 4596 - DNA, 388 bp, Homo sapiens
ccaactccagctctatctggtcaatggtctcctgatactccttctcccgggttttgaacaggggctccgtatctttaatcactttctccaggctatcttcctgctgctggagtagaaagggaagcgggggaggccagccaaggagggatgggatgggacgcattccaaagggccaagtcagggagagagagagaggaagtctggttaaagaaactggagaaagaaaagcaaaaggataaaggaagaggggaggcgcaggtagaggatgacagccacatggggggacagagcaaggagaggagcgggggagtgggcgtcaggctggagaggcagagccagagggccctgaggccgggagcagaggttacctctccctgggcctctgcag

SEQ ID NO: 4597 - DNA, 106 bp, Homo sapiens
ccagagtcctgtccaaggcaatggcgtaggctgcgcctcagttcatccgagtccctccccagctcactggtccaggccaagggatgggagaggctttgagtctaga

SEQ ID NO: 4598 - DNA, 337 bp, Homo sapiens
ccaaaatattggaacacacagaaccaaaccaggtgtgttctacacctgcatgagtgaaggatttccacgtagacacctaggaagagcccgcatgccctagactcactccagaggaaggattgatttgcaaccagaaagggagctgaaaaccacggagctccatggctcttcattcaaaagggaaaataatgattccacgttgctttttagagttcaaatcaacatctttctggataaatctattttttaacaatctttttattatttgtaaaagatataaaaacaactcccatcagtagcaatacaaggttatacattttaaccagattttctcagg

SEQ ID NO: 4599 - DNA, 431 bp, Homo sapiens
aaaaagtgggataagaacacaaagaggttatatataagaatgtatttcgtagagttgtatgtgaaggcaaaaaaacccaaaaaacctgaaagtttcttcaatggaaaactggttaattacatctatttgggccttaaaatgatgtgctagatctgtatgtcagggaaagacattcatggtgtactattaaagttaaaaaaataggttataaagtagtatagagtgatctaagtctctctctctctctgcccccccccacacatatgtgcgtgcaaatgcgtagatgtctaaaaggtatgtgtgtgagtatgtctaacacatatatgtgagaagatatttgcaaggctgtacgctaaaattttaagcaagaatgatctttaggaggctgaatttcttgggattttatgcttctatttttggtttatattttt

SEQ ID NO: 4600 - DNA, 364 bp, Homo sapiens
ccagttggcagaggttcattcagtaagtcccgagcagggtgcgaaggacagtcatccttctgaagagcccgttaagtcattttccaaaacacagcgctgggcagaaccaggggaacccatctgtgttgtctgtggtcgttatggagagtatatctgtgataagacagatgaagatgtgtgtagtttggagtgtaaagcgaaacatcttctacaagttaaggaaaaggaagagaaatcaaaactcagcaatccacagaaggctgattctgagccagagtctccactgaatgcttcctatgtctacaaagagcacccctttattttgaaccttcaggaagaccagattgaaaatcttaaacagcag

SEQ ID NO: 4601 - DNA, 390 bp, Homo sapiens
  unsure (227): n=A,T,C or G
  unsure (272): n=A,T,C or G
  unsure (318): n=A,T,C or G
  unsure (336): n=A,T,C or G
  unsure (347): n=A,T,C or G
ccagaatataccagaatcatcttgcttcaggcatgtgcttcttgggtttctccgtgtgtcgctgtaccttgtaggtctctgcatgcatccactcagcttgtcctctgaccatacatttgaatcgcaccacacatcagagcatgctgaatcagtgcgtgttttgaatcatcactgcgagcacttgtgttcgagtcaacaggcaccacaatgtatgtgcaattctctanctctgggtgattgggggctactataggtatgtccctaaatgttgngtgtctacacgtattgggtttcgttccaagggtgtgtagtgtttangaaactgggactgcgcantgtttgtgtcngtgtgtggtgtgtggcatcagggcgtcactactttaatatata

SEQ ID NO: 4602 - DNA, 557 bp, Homo sapiens
ctggcagctcacattttacattagagagtggggtccccacattttacattacagagcggggtccctgagctgcaggaggagagcctgcagggctcttgggtagaattgcacttttgcaataagggaaacgggagcaatgtttcagcctcagtttctatttataatactgacacaaaaagaatattgctggatacatagcatggatctagatagagcaactccaggagttctcacggtgacagcccccctcactcacagacaccatgtgatactaatagggcttagacacaaagcactgaattcccaaagcattgaagagaaagacagctctcagtctgagtaaaaccgtattgagagaagaaaagaggttgaaagaatcttaaagacaaattcagattacatgtaacattggtcaaattgaccagaaaatattcttccaaagaagttcttctctaaacaccaaaagtgcacagctactctcagcatgagaaatacaagtattatgagaaagagggcttattctgagcagaatttccatctctgctgctctcccatct

SEQ ID NO: 4603 - DNA, 464 bp, Homo sapiens; identical to SEQ ID NO: 200
  unsure (261): n=A,T,C or G
  unsure (444): n=A,T,C or G
  unsure (455): n=A,T,C or G

SEQ ID NO: 4604 - DNA, 304 bp, Homo sapiens
ccaagtaagctgtgggcaggcaagcccttcggtcacctgttggctacacagacccctcccctcgtgtcagctcaggcagctcgaggcccccgaccaacacttgcaggggtccctgctagttagcgccccaccgccgtggagttcgtaccgcttccttagaacttctacagaagccaagctccctggagccctgttggcagctctagctttgcagtcgtgtaattggcccaagtcattgtttttctcgcctcactttccaccaagtgtctagagtcatgtgagcctcgtgtcatctccggggtgg

SEQ ID NO: 4605 - DNA, 525 bp, Homo sapiens
  unsure (471): n=A,T,C or G
ctgagttatgaagctggaattggttctagacgctgggtagatgcaaagcagcctaactcttcaagtaccgacatttctcacctctgattccggctctcctttgagaaggagaccttagcttccccgacttcaagtagaacagaagcccgtttccttccctcatcagtgaaaaaatctaatgtttcaaatgtaaattgttcatagaaaaggaacatagaatctgttttacagaagtaaatcgaccgtcaagagaagacttggcctctaatttatattgctttgcactttggtttgatattaagaaacagcattcttcttcagtgaaattttgggtgccaaacacctacccagaatgtccagggctttcattttcaaaagttagcattctccttttgaccgtccaagtcattatgaattctgacttgttgtattaggaacatgttggacagtggaaaattttctctggattgntttagtaatatttttgggattatacttcctttctgtaccaatttcttttaattt

SEQ ID NO: 4606 - DNA, 555 bp, Homo sapiens; identical to SEQ ID NO: 641

SEQ ID NO: 4607 - DNA, 350 bp, Homo sapiens
ctgcacagggaaggaagggaagacgggaagaggttagataggaaatacaagagtcaggagactggaagatgttgtgaaatttaagaacacatagagttggagtaaaagtgtaagaaaactagaagggtaagagaccggtcagaaagtaggctatttgaagttaacacttcagaggcagagtagttctgaatggtaacaagaaattgagtgtgcctttgagagtaggttaaaaaacaataggcaactttattgtagctacttctggaacagaagattgtcattaatagttttagaaaactaaaatatatagcatacttatttgtcaattaacaaagaaactatgtattttt

SEQ ID NO: 4608 - DNA, 505 bp, Homo sapiens
aaaacatgcaaatatagtaaccttacatgacattgttcacacagataaatccttgactttggtgtttgagtatctggataaagacctgaaacagtacatggatgactgtggaaacatcatgagtatgcacaacgtaaagctgtttctgtaccaaattctacgtggtttggcatattgccatagaagaaaggtattgcatcgagacttgaaaccacagaacctcctcattaatgagaaaggagaattaaagctagcagattttggactagcccgagccaagtcagttcccacaaagacctactcaaatgaagttgtcacactatggtaccggccacctgatgtgcttcttggttcctcggagtactcaacacagattgacatgtggggtgttggttgcattttctttgaaatggcttctggaagacctttatttccaggatcaaccgtggaagatgaactgcacttaattttccgactgctaggaactccatctcaggaaacttgg

SEQ ID NO: 4609 - DNA, 319 bp, Homo sapiens
aaaaaagcctctgggaattaggaactagaatgaaaatccaactttccagatcagcttcttaaatatcttgtatttcaataaacatacacttcatacacacagatagatttgatatacaagtacaaaaacctgacatgcacattgaagagaatttatcattcatgatgttaatatatacagaaattctaaggaaaattgcaatgttttaatataaactttctttttaatttcagagttgataattcaacactttcagccaaaatttggccaaagggggttaaaacctgatcttatgtctggaatcccaatgtgatcctcc

SEQ ID NO: 4610 - DNA, 373 bp, Homo sapiens; identical to SEQ ID NO: 202
  unsure (109): n=A,T,C or G
  unsure (113): n=A,T,C or G
  unsure (120): n=A,T,C or G
  unsure (123): n=A,T,C or G

SEQ ID NO: 4611 - DNA, 551 bp, Homo sapiens
  unsure (548): n=A,T,C or G
cctgctcctactatgtccttttccttctctcatatatttcagtcgtctggagttctcagaataaggaatccattatcaatgacctatcccatgaacattttttttgagaacctgtgtaagactatatagacatgaatatttgatgacctgacacctcaccgttcaaacctagatttgggttgtataaatatcaactcaaggctgtaagagcctcccatggtctaatgtttcaagagtaaagaagaatagacaaacacccatgttggaatcatctgttgcagaaaagaacacaaagatagttttattaatttagaacaaattttgagaactttacatagacagaaatcttctacctcctttttttctaattttggggaatgtcttccactagtggtcgctaaaaatgtagaaatatcatagggagtgcaaattacattgtctctttacctgccacaatctggcagcactcatcatgtagcaaatgcccaaataatagactacagattatagtgacttcaccctaggttaacattatttctaggtaaggnact

SEQ ID NO: 4612 - DNA, 430 bp, Homo sapiens
ccaccataaagttgttcagatgtctgtctccaatcccgaggatccagtggctgatgcatatcagagcgtgagagctggcgaagtgggagcggagcgccaggaaagcctcagggcttgtactcatcctcacgaaggcccgctttaagagatcagcaggcactttactttctcgttttctaaaagacgtgactgtttcagtacgattagcgcccttatacattagcatgtaagctccaacatcatgttttcctgacatttttgtcagccaatctttatattcacacggcggtgccctgggatcactcaggtaagccgccttctcctcttgggacatggtgttcaaaagaaggtccttcaaggtaacagtattttcaagccactcaattaatcctaacctggaggtcatgggcacaacgctataggtcctcag

SEQ ID NO: 4613 - DNA, 528 bp, Homo sapiens
aaaagatcagtacaagagctatattttttcctaagaaaaaatttcaacaggaatggggagtagccccgttttggggctgatctgtccagaatttggagtgaggaacaaatccattctcatctactttccacattttccctcttgtttgaggtcctgttccaaccttcatttctgaaactgttctagagcactttgtctttctcatagttcataacttaccccttcagtctagaattagaattacattatctgttttactactttactagactgtaagctcctagaagataaggactagggagttcatctctgtattccaccagaaggtacagtgactcataactagagtctttagatgaaacttactgagttgaataacttaatatatttctgttttcattcccaagggaggccatgtctggagatagaccttgaatttaataaattttaggcactataccatttcagtggagaaaattgttgggaaatttggggggatggatatataagggggagggaagtcactgg

SEQ ID NO: 4614 - DNA, 432 bp, Homo sapiens
aaaaaatataaacattttctttccattaggaagaaataactttagcctaacacatgaaacataaaagctacctaaatttcctataaatcacctagtgaatagctgtaatctacataataaaaagtaaaaaaaaaacttctcatgaactatgtattagaaatgggaaaacaacgtaggagcaggggtttttaggcactttcagtattctcaggtgttcttcgttctggcccttccagggtaattaggaaggcagaacaagacagatgagctcctgcctgctctgagacaagaagggtggggtctcattagctttgcaacaggaaacatcctgttttatggtagtggggtcaggaatgtaggaactggtatccattctgccaattccaccacccattcagtttgcttatccctacagaacagtgactgaggttc

SEQ ID NO: 4615 - DNA, 381 bp, Homo sapiens
ccaagcctcatcaataactgtatccaaaaggagacgctgcttggggtgtacccagagaaaacaccaagctttcctggcttcccggccctccctctccccattagtctttggggtgcatacataagtgttgtgtgaagtctcttggggtttagaagatcttgcactcattgatggagaagagcctccttctgtttcgtctcctggcctggttgacggcagttcggacggcgcactcaaacacctgctgtactccccgattgctaagggctgagcactccaggtagcccttggctctgacatcctgggccagtttcttcccttccatggcattgacgcaggaggccctgtggggccccatctcccgctggtcagtctgggtgg

SEQ ID NO: 4616 - DNA, 379 bp, Homo sapiens
ctggctgggccacccaacccgagggagggggcagtgttcttcccagtcgcagtctccagtgatgagcatcccctgttggggccttcggtggctctcctcagcggctaatgcagttctggacatccacaaagcctaggcgttgcctgcgtttccgctgctccgtcatctgctccttgagctcgttgagctgggcagtgaggtgggacaccagcttcatggtggagttgagcttgtcctggagaatccgaatctcattctgctccccctcgccctcattgctgacaagggacatggcccgcatccgggggaaccagtccaggttcttgttctgaaaaacatcaccagtgggttaagcaggcgtgggcccggcctagaaagg

SEQ ID NO: 4617 - DNA, 373 bp, Homo sapiens; identical to SEQ ID NO: 6

SEQ ID NO: 4618 - DNA, 405 bp, Homo sapiens
ggaagatggcggtggctggggcggtgtccggggagccgctggtgcactggtgcacccagcagttgcggaagactttcggcctggatgtcagcgaggagatcattcagtacgttttgtcaattgagagtgctgaagagatacgagaatatgttactgatctcctccagggaaatgaaggcaaaaaaggtcaattcatagaagaacttataaccaaatggcaaaagaatgatcaggagttgatttcggatcctttgcagcagtgcttcaaaaaagatgaaattttagatgggcagaaatcaggcgaccatctaaagcggggtaggaagaaagggagaaacagacaggaagttcctgcatttactgaacctggcacgactgcagaggttaaaacaccttttgatttgg

SEQ ID NO: 4619 - DNA, 373 bp, Homo sapiens; identical to SEQ ID NO: 6

SEQ ID NO: 4620 - DNA, 408 bp, Homo sapiens
aaattaaaattgtagaaatatctgagtagattggagagaggaaattaattatatagactgtagactattagttgacattgtattaggtaccacacatgacttctcttagtaattcaataatcttttgatggaagagttacagacctcattttatagatgaggaaataggcttagaatcaagtgacttgcccaagaatatacagaaagcaaataatgggacctgataattgaaaccttaatgtgcgtatactttaagagtttgtatattatactttttcacacactgtgatgagctttttctgttattttgaaataaaggtaacagtatatttactttttccctctttctaccctatagacccaagtcttggattgaggaacaggcaatgggatcattcctcagtgtgg

SEQ ID NO: 4621 - DNA, 303 bp, Homo sapiens
ccaggcgcggtggctcacgcctttaatcccagcactttgggaggctgaggcgggcagatcacgaggtcaggagatcaagaccatcctggctaacatggtgaaaccccacctctacaaaaaatgcaaaaaaaagtagttaatttgttactcagcaaatctctacggtgcctaccagactccagatctgggctgctggacacaggaacatcgttaagcaaatcccggccgtcgtggaactgacagcctggaggggacgcaagagacttgggcattcaacagataacttcagagtcccaactgcag

SEQ ID NO: 4622 - DNA, 248 bp, Homo sapiens
agaacaagtctataaaagtagaaatcacatacaaaaatacagattactctgacatgttggcaaaatagcttatggctggacttgagtttggaagttctgtatgtttgagggcatccgatgtcagagtccaaccggatcctaaccccagctcttgtcactaatctgtaaacaataatttcaagtagtatttagcactttttaactattaagaaattgaagcatcatcatttcctgtgcaacccaacttt

SEQ ID NO: 4623 - DNA, 463 bp, Homo sapiens
  unsure (6): n=A,T,C or G
  unsure (155): n=A,T,C or G
  unsure (157): n=A,T,C or G
tgaaanacagtatggaagttcctcagaagaattagaaatgctatatgattcaggattcccacttctggatattaaaaaaaaaaaaaatgaaaccaggatctggaagagatatttgcactccccatttcattaatgcagtattcataatagccaananatggaaacaacctaaatgcccattgatggttgaatgaatttagaaaatttagtatatacgtacaatggaatgttattcagccatagaaaaggaaggaaatactgtcagatgctgcagcttgaaccttgacaacattttgctaagtgaaataagccagccacagaaggacaaatactgcatgatttcaccaatatgaagtatctaacgtagtcaaacttatagaaacagtagaatggtggctgctgtggggagggggaattggggaactgctgttcaaaaggtatagagtttctgtcacgcgagttt

SEQ ID NO: 4624 - DNA, 452 bp, Homo sapiens
ctgaaaagttccagcatattttgcgagtactcaacaccaacatcgatgggcggcggaaaatagcctttgccatcactgccattaagggtgtgggccgaagatatgctcatgtggtgttgaggaaagcagacattgacctcaccaagagggcgggagaactcactgaggatgaggtggaacgtgtgatcaccattatgcagaatccacgccagtacaagatcccagaccggttcttgaacagacagaaggatgtaaaggatggaaaatacagccaggtcctagccaatggtctggacaacaagctccgtgaagacctggagcgactgaagaagattcgggcccatagagggctgcgtcacttctggggccttcgtgtccgaggccagcacaccaagaccactggccgccgtggccgcaccgtgggtgtgtccaagaagaaataagtctgtagg

SEQ ID NO: 4625 - DNA, 493 bp, Homo sapiens
ccatcagaggaatgcaaatcaaaaccaccatgacataccatctcacgacagttagaatggtgatcattaaaaagtcaagaaacaacaggtgctggagaggatgtggagaaactgaacacttttacactgttggtgggactgtaaactacttcaaccattgtgaaagacagtgtggcgattcctcaaggatctaaaactagaaataccatttgacccagccatcccattactgggtatatactcaaaggattataaatcatgctgctataaagacacatgcacacgtatgtttattgcagcactattcacaatagcaaagacttggaaccaacccaaatgtccaacaatgatagattggattaagaaaatgtggcacatatacaccatggaataataagcagccataaaaaaggatgagttcatgtcctttgtagggatatggatgaagctggaaaccatcattctcagcaaactatcgcaaggtcagaaaacc

SEQ ID NO: 4626 - DNA, 544 bp, Homo sapiens
  unsure (514): n=A,T,C or G
  unsure (534): n=A,T,C or G
ccttggatgaacttgcttcacttcaggtcacaatgcaacaagctcagaaacacacagagatgattactacactgaaaaaaatacggcgattcaaagttagtcaggtaatcatggaaaagtctacaatgttgtataacaagtttaagaacatgttcttggttggtgaaggagattccgtgatcacccaagtgctgaataaatctcttgctgaacaaagacagcatgaggaagcgaataaaaccaaagatcaagggaagaaagggccaaacaaaaagctagagaaggaacaaacagggtcaaagactctaaatggaggatctgatgctcaagatggtaatcagccacaacataacggggagagcaatgaagacagcaaagacaaccatgaagccagcacgaagaaaaagccatccagtgaagagagagagactgaaatatctctgaaggattctacactagataactaggttgacatacctggaatatagagaacacttgagaagtttgtaatggntttcatttgaaatagactgntgaaagtttt

SEQ ID NO: 4627 - DNA, 387 bp, Homo sapiens
ccttttttaagtgacctgtaactcatatcagtgaaaaagaacatgctataaaaagattccacaaagtgagagcattaagctcaaaggtcctgaggtaggtgtgtttgaggagctggtgtgtagctgctgtataagaagtcaacctccttattttcaggtacatttattattattttaaccccaagcagaattgcctagctgggtccctcacctttacacaatagtcataggatttgactgttatcaaaaagtaaatccactctcagagaccatagatttcctattactgaggttcttcaaaagaatatgtaatcaatttatatagtaattcctaaaaatgagattctaaaatatagtagcatgcagatgaagcatagctaatgcttt

SEQ ID NO: 4628 - DNA, 350 bp, Homo sapiens
aaaatgaacatctctgtgtgccacagttcctaggactggggcaaggacacagtgtcaagtcttgttttgaggatgagtctctgaagagacagaattcctgccagaatgcgcacagaacataagtcagccaagtgtgtcgtgccagggatactttgactttggtttgctgctgctgctgctagggatattgggagggttatcctttccaggttgtaggagagggttgtgggtaaaggtctgtcgtaaaggacccctggctgctagctccaactgattccgcatgcgttgttcacgctctcgcagaaattttctttttgtttcactggaaaggaaagatgatgctcagtttt

SEQ ID NO: 4629 - DNA, 446 bp, Homo sapiens
aaataaggtaagtgaaatatgggctcagaattaaataagattttcaagaaagttcttgtagctgtaaaataggagaatatgaatgtcaaaattttgactgtttctgtgccaaacagaaagtttcacaaatgctttccaaactgcaataaaaagaactttaataataccattaagtctacaaagttactgtcaagttgacagtattcaaatactacaatattttctaaatgtaaattttgtaacatcttgaatactttctaagcccacttttctgtcattacaaaaataaaattccaagaaatttctgctacattaatcttaagagatcaaaataacctatgtagttttctaggttaatgtaattcaagtaaagtggtactaaagaaaacacatcattttaataaaaaccaaacctgcttaagagacataacagagttaagcaaaag

SEQ ID NO: 4630 - DNA, 332 bp, Homo sapiens; identical to SEQ ID NO: 4096

SEQ ID NO: 4631 - DNA, 508 bp, Homo sapiens
ctgttgaaacagaagaagttgagcctgatgaagaagaatttcaggaagagtctttggtggatgactcattacttcaagatgatgatgaagaagaagaggacaatgaatctcgttcttggagaagatgatttgactgatcattgatctacatatgctagaactctatctgtgtttcattagtattatctaatgtacttttacatatttgtaaaaacaatttttggtaaaatgtgatgaagatggatttcacaaatagacaaaaaagaagaaaactaccttctgatcttgtattttgaaagattgatgtttgcattttacttcagtaaacaattgctaaagacatcacactagaaacatatgcaatgtttttattacatacttctactggacatcacagaattctttgggttctttgtaatttaatgaataggtctgaaaacttatgaccaatacttgttataacttagaggactttgttttattccaaataaggaatgaatttgcattt

SEQ ID NO: 4632 - DNA, 207 bp, Homo sapiens
ctcactacgcagtagtcagaattcaaaatgctcaagagaaagccatccaatgtttcagagaaggagaaacatcaaaaaccaaagcgaagcagcagttttgggaatttcgatcgttttcggaataattctttatcaaaaccagatgattcaactgaggcacatgaaggagatcccacaaatggaagtggagaacaaagtaaaacttca

SEQ ID NO: 4633 - DNA, 609 bp, Homo sapiens
  unsure (567): n=A,T,C or G
  unsure (601): n=A,T,C or G
aaagcaaaaaaaggatttattgaaatcatgtgacaatatatccctaacaccatgaagaagatgacaattatgatttccatagagtattttgcacttgcctaagcacaaaagcaaaaccagagcaaggcaaacaatatacaaacaaaacttgatcctatctaataactttcatgaaacaaccataaatgaattttgttttattaagtcaggcttcaggactactgaattgcattcactaaaatgctatttgaaattttacttactcgccacccaccccactactcttaattcatcgccctctccacaaaaggacaaaaggcaaaaaaggtagtaagcaaaatataaataataagaattcaaaaacagagatcaaagtaaatttttttttcagtctctgcgtctatgctcaaatcaatgttttctgagcatacagggaagcaaggaaaccaattctctagctcttgctctgcctcttattctcctccaccccccaatacatttctgaatattttttaatccatttatcactgagtacttgcatataactagaagcaccgactatattgntatcaactttggagcaattttcatggggaattgnacaaatga

SEQ ID NO: 4634 - DNA, 460 bp, Homo sapiens
  unsure (394): n=A,T,C or G
aaaaacactttatttaataaaagttaaacatacaaaactgaaataatacacatcctaaaaattaccttcttccattaataggaagacccttttctatgcatgtatttggcttaaactcaactcaggataactgtgatgatgttcacttacaccaacaaatgcagacaacctgatctaattaacaaaaattacaaacagctaaatgaacataatatacagggaaattatcgtcagattaatgcacaagaaatacaagaaatttttaatgatgaaatattcagtatccttgttcattaatttagccttgtgtttttacaaaaatagtatctacactgtatacagggctatacatcagctttttgttctcccatataaacatcacacatccatttancggcagtggtaccatgttttggatgtgtgatgtttatatgggagaacaaaacatggtaccactgcc

SEQ ID NO: 4635 - DNA, 607 bp, Homo sapiens
aaaaaagaaataacattcaaaacaacttatatattctgtttctgtctacttagcacattttcacatttctttccccccagaatataaggcatataatcatttataaaaccacattaatactagagtaaaatatagaactatagaaaaatatcactatgttggataatggggagaagtctgtgtaaaacaaccaagtctgagttatgaaatattctccaacagatataaatagatgtaaatataaatatttcttaacttcaggtttatttggtaacgaaataatggcttctaaaaaattgtcaagaagagacagatccaacctttaattggtgtgcaggcacattgcttatagtggacttattaaattccaaatagcagttaattgtataacttaaaactgcatcatagaagtatttaccaatttcttttcaaaacaagtgtgctcactcagatttcctttcataattttgatagcatccaattaatgaggttttgctgtgataatattccagaataaaaaacattcaatgtgtcaaacaaatactttgaaagaacagcttgattaatgtgtagaaaacaggtttactcctagcagctctctgctatg

SEQ ID NO: 4636 - DNA, 427 bp, Homo sapiens
aaaagcgtgagcttaaaatacaagactgccatattaaattttttgttgacattagtctcagtgaagactatgaaaatgctggctatagatgtcttttcccatttatctaaatatggactgctcaggaaacgagactttccattacaagtatttttaattaattgggccagcttttcaaacaaagatgccacattcaaaatagggtatattttcctatattacggtttgcccctttataaatccaagtagataggaagaaagaagacaaactttgcatctcagtatgaattattcaatttatttgaatgatttttctttacaaaacaaactcattcattagtcatgtttatctgcttaggagtttagggaacaatttggcaattttgtggttttcgagattatcgttttcttaaagtgccagtatttt

SEQ ID NO: 4637 - DNA, 476 bp, Homo sapiens
  unsure (199): n=A,T,C or G
  unsure (213): n=A,T,C or G
  unsure (215): n=A,T,C or G
  unsure (216): n=A,T,C or G
  unsure (234): n=A,T,C or G
  unsure (239): n=A,T,C or G
  unsure (242): n=A,T,C or G
  unsure (246): n=A,T,C or G
  unsure (250): n=A,T,C or G
  unsure (264): n=A,T,C or G
  unsure (268): n=A,T,C or G
  unsure (276): n=A,T,C or G
tttggaatccattagagaaaaatccttgtcaccagattcattacaattcaaatcgaagagttgtgaactgttatcccattgaaaagaccgagccttgtatgtatgttatggatacataaaatgcacgcaagccattatctctccatgggaagctaagttataaaaataggtgcttggtgtacaaaactttttatatcanaaggctttgcacantnntatatgagtgggtttacnggtanatnatgntatnttttacaactaatnttgnactctcanaatgtttgtcatatgcttcttgcaatgcatattttttaatctcaaacgtttcaataaaaccatttttcagatataaagagaattacttcaaattgagtaattcagaaaaactcaagatttaagttaaaaagtggtttggacttgggaacaggactttatacctcttttactgtaacaagtactcattaaaggaaattgaa

SEQ ID NO: 4638 - DNA, 274 bp, Homo sapiens
ccaggatatattggttttttatgttaactttggtgaccttttgtgtactttacatgaaacaccttatatattaagtactggggattcgttctatgttccttcaggtaactattataacatcaaaaatctccggaatgaggaaagtgttcttctttttactcagataaaaagatgaaagatcaaccaaccttaaatatatgtatgtatatatgtatatgtgaaaaacagtttgtatagttggaatatttgtctttgtaattacttgtgatgtttt

SEQ ID NO: 4639 - DNA, 332 bp, Homo sapiens; identical to SEQ ID NO: 4096

SEQ ID NO: 4640 - DNA, 567 bp, Homo sapiens
gcttcatacaaaagggtctacagaagagagacacctcctctatgggcgacctgcagtgctttatcggactagatatgatatcttatatcacactgactttgaaagtggttatagtgaaatattcctaatgccactctggacatcatatactgtttccaaacaggctgaggtttccagcgttcctgaccatctgaccagttgcgtccggcctgatgtccgtgtttctccgagtttcagtcagaactgtttggcctacaaaaatgataagcagatgtcctacggattcctctttcctccttatctgagctcttcaccagaggctaaatatgatgcattccttgtaaccaatatggttccaatgtatcctgctttcaaacgggtctggaattatttccaaagggtattggtgaagaaatatgcttcggaaagaaatggagttaacgtgataagtggaccaatcttcgactatgactatgatggcttacatgacacagaagacaaaataaaacagtacgtggaaggcagttccattcctgttccaactcactactacagcatcatcaccag

SEQ ID NO: 4641 - DNA, 475 bp, Homo sapiens
aaaatagtttaatgaaaaaataaatatagtgtatgaatgatctaagtatgagaaatagcaaggacaaaatagcaaatatttttgtaggggagaaggaatctgaatgtgtatggaatattaaggagaataagaaattaatttaacaggggctgtggcggggggtgggagaacatgaggaaaaatagctaatacatgctggacttaataccgaggtgatgtgttgataggtgcagcaaaccaccgaggcacacgtttccctatgtaacaaacctgcatatcctgcacatggatcctggaactgggtcagaggtatagggttaatttctcttgctgaggctcagatttctccttcatgcatgtttaatggtccacctaagttcaactggaggagcatctttcttctttgttaaccaaacatgcccaggtagagctgcttctcttttctatggtagctgctgagttctgactgtgtcag

SEQ ID NO: 4642 - DNA, 388 bp, Homo sapiens
aaaaaatgtggcgttaataacattcaagccaagagccaaatcaggaatgcaatcccattcacaattgccacaagaagactaaaatacctaaaaatacagctaaccaaggaaacaaaagatatatataatgagaattacaagatacccctgaaagaaataagagatgtcacaaacaaatggaaaaacattccatgctcatgaataggagcacagctttgtaaataaaggacatagggtgaggaagccgggttgttttaagaagcctgtgtcccctgtgaaaaggcccatggcatatcttgtagaattacaaggagttcattctgtagcaggatgagctgcagacaaaacttctcagacaccgagttggagaaggaagggcttttttcag

SEQ ID NO: 4643 - DNA, 451 bp, Homo sapiens; identical to SEQ ID NO: 3176

SEQ ID NO: 4644 - DNA, 367 bp, Homo sapiens
aaacctttgtgtgctggtttataaaataatgtgtgtaatccttgttgctttcctgataccagactgtttcccgtggttggttagaatatattttgttttgatgtttatattggcatgtttagatgtcaggtttagtcttctgaagatgaagttcagccattttgtatcaaacagcacaagcagtgtctgtcactttccatgcataaagtttagtgagatgttatatgtaagatctgatttgctagttcttccttgtagagttataaatggaaagattacactatctgattaatagtttcttcatactctgcatataatttgtggctgcagaatattgtaatttgttgcacactatgtaacaaaacaa

SEQ ID NO: 4645 - DNA, 367 bp, Homo sapiens
  unsure (245): n=A,T,C or G
  unsure (272): n=A,T,C or G
  unsure (311): n=A,T,C or G
  unsure (338): n=A,T,C or G
  unsure (354): n=A,T,C or G
aatctgaatgtgtatggaatattaaggagaataagaaattaatttaacaggggctgtggcggggggtgggagaacatgaggaaaaatagctaatacatgctggacttaataccgaggtgatgtgttgataggtgcagcaaaccaccgaggcacacgtttccctatgtaacaaacctgcatatcctgcacatggatcctggaactgggtcagaggtatagggttaatttctcttgctgaggctcanatttctccttcatgcatgtttaatggnccacctaagttcaactggaggagcatctttcttctttgntaaccaaacatgcccaggtagagctgnttctcttttctatggnagctgctgagttc

SEQ ID NO: 4646 - DNA, 475 bp, Homo sapiens
ccactagaggtctgtgtgccattgcccaggcagagtctctgcgttacaaactcctaggagggcttgctgtgcggagggcctgctatggtgtgctgcggttcatcatggagagtggggccaaaggctgcgaggttgtggtgtctgggaaactccgaggacagagggctaaatccatgaagtttgtggatggcctgatgatccacagcggagaccctgttaactactacgttgacactgctgtgcgccacgtgttgctcagacagggtgtgctgggcatcaaggtgaagatcatgctgccctgggacccaactggtaagattggccctaagaagcccctgcctgaccacgtgagcattgtggaacccaaagatgagatactgcccaccacccccatctcagaacagaagggtgggaagccagagccgcctgccatgccccagccagtccccacagcataacagggtctccttggcag

SEQ ID NO: 4647 - DNA, 474 bp, Homo sapiens; identical to SEQ ID NO: 205
  unsure (446): n=A,T,C or G
  unsure (463): n=A,T,C or G

SEQ ID NO: 4648 - DNA, 231 bp, Homo sapiens
ctggagacactttagaactctttccccatcctccaccatagtgcaaacttcacgcttctctgagcacctccaaggtatgcccttgaagtaaaacagaaaagggaagaaagggggctttttcttttccatttctgaccaaacagaggtctgaaatagcagtgtattatgaaattctcattccctgcaacagtcagccaccacttggaaaatggctatttttgccataaacta

SEQ ID NO: 4649 - DNA, 357 bp, Homo sapiens
ctggaaattgctgctagaggaggaggcttggctgaatgactgaattaatagtacatgtacagggcttacgaaagcactcaaatgtcaaaattttggcttgggagactctacccccatcctctccttttctaaggatctggatccatcaaccatttgtttccactaaaagaaaaccctggctcagaaagtctgcaagtgcagaggaatggaggatgagtaagtcacaccagcaggctggctcagatggggagaaccctgaggttgggtgaatgagtggaaacggaatgactccagtagctggctctactgcgcctttttctgcttgtggggaggctttgcattccagtagaagagcag

SEQ ID NO: 4650 - DNA, 189 bp, Homo sapiens
agaagaaggacgctggaaagtcggccaagaaagacaaagacccagtgaacaaatccgggggcaaggccaaaaagaagaagtggtccaaaggcaaagttcgggacaagctcaataacttagtcttgtttgacaaagctacctatgataaactctgtaaggaagttcccagctataaacttataaccccag

SEQ ID NO: 4651 - DNA, 320 bp, Homo sapiens
aaaatgcctttataataagctttgtttctttgtgaaactaattcagcaggctgaaggaaatggttcatgtgataatgtgggctggtatcctctagagtacctgggtacataaacagaaactcctgtaggtaaaaagtaatttgtgccattagtctttctatgtttctgcatccagatagagtgcagttcatgagggagggggcgggggactgaaggggaaagggcgttaaagtgatacatttttataccaaatgtgtttatttttttgtgcaagtaatccttaaaattgcaattgtattaggtgttaaaataaagttttt

SEQ ID NO: 4652 - DNA, 448 bp, Homo sapiens
ggatgtaggatttctttttagagtgattaaaatgttacaaaattgctggctgggtgcagtggcttatgcccataatcacagcacttcgggaggctgaagtgggaagatccaggagttgaagaccagcctgggcaacatagtgagaaaatgtctccctaaaaggaagaattaacctcatgtggtggtgtgcacctgtagttctagctacttgggaggctgaggcaggagaatcgcctgaacccaggaagcagatgttgtaccgagctgagatcatgccattacactccagcctgggcgacagaacgagacgccatcaataaataaataaataaagtaaagtaaaaaacctattaaattgaggctagagctggagatgtaattggtttttgagaaacattagtataaagcttgcccttgttgtgtggaagaagccattttgtactgcttt

SEQ ID NO: 4653 - DNA, 600 bp, Homo sapiens
  unsure (44): n=A,T,C or G
  unsure (53): n=A,T,C or G
  unsure (95): n=A,T,C or G
  unsure (267): n=A,T,C or G
  unsure (366): n=A,T,C or G
  unsure (388): n=A,T,C or G
  unsure (466): n=A,T,C or G
  unsure (490): n=A,T,C or G
  unsure (495): n=A,T,C or G
  unsure (506): n=A,T,C or G
  unsure (556): n=A,T,C or G
  unsure (594): n=A,T,C or G
ctttttttttttttttttttttttttttttacttggttgataanatgttgaanaaaccatggaattatacacagcactatacattattactatanaatgtctggtccctcccatcataaatatggtttaatgaaggtattgaaaaacttcacaatatcgagctgcaattcttttttctttttatacaaatacaagttaattagctctattaagttgcaattttatttttataaagctttgtaaagttatgaacatggaaaccctaanaatcacctaagctttttacataagtaaatttcaagttgacagtctgtccattttgaactatttataattaacaggacacttaacacagtaatatcttanacaaggaagagggcattaattntgcaggcaggtagcaatgaaaatgccaaacctgaacaatcagtcactatttccttatacagtttgagtaaaagaggtngactacagaaagaaaaaaaaaagngaatntaaaatgtatnttccccaaatacaactctacttcaataagtcttgaagattaccgatgacntcaacaaaaatgaatgaactcagggaatgagttctttntcccca

SEQ ID NO: 4654 - DNA, 286 bp, Homo sapiens
aaaaaattacacggagcaatttccagcttatctttttttataaaagtactgcctatatcaaacattttatatcacgttaattccattgaagagctgcctttttctgttaaggtactgattccaattgatgggatacatgcccttaatacagaaagtttccattatttattcaaatatcaaaattaagattattgagaagtttattgctttatggctgggcaagatgctactagcacattttaggtaaataatattctttattaaaaactatgaggtcattctgttt

SEQ ID NO: 4655 - DNA, 297 bp, Homo sapiens
aaatgactgtgctgcccctttcacatcaaagaactactgacaacgaaggccgcgcctgcctttcccatctgtctatctatctggctggcagggaaggaaagaacttgcatgttggtgaaggaagaagtggggtggaagaagtggggtgggacgacagtgaaatctagagtaaaaccaagctggcccaaggtgtcctgcaggctgtaatgcagtttaatcagagtgccattttttttttgttcaaatgattttaattattggaatgcacaatttttttaatatgcaaataaaaagttt

SEQ ID NO: 4656 - DNA, 332 bp, Homo sapiens
  unsure (28): n=A,T,C or G
aaatagaaaacagtatattgaaagtggngggtttgatctttttatttagaaacccacaaaatcagaaacacagtacaaataaaacagaagtcaaactataagttgacttttagttcctaaaaagaaacatatttcaaaagcaatggaatctagaattcttataacatgaataacaaaatgtacagcaagcctatgtagttcaattaatatataaggaaaaggaaggtctttcttcatgatacaagcattataaagtttttactgtagtagtcaattaatggatatttccttgttaataaaattttgtgtcataatttacaaattagttcttt

SEQ ID NO: 4657 - DNA, 464 bp, Homo sapiens
  unsure (84): n=A,T,C or G
  unsure (93): n=A,T,C or G
  unsure (103): n=A,T,C or G
  unsure (116): n=A,T,C or G
  unsure (285): n=A,T,C or G
  unsure (394): n=A,T,C or G
  unsure (401): n=A,T,C or G
ctttttttttttttttttttttttttacaaaacagtatattttattttacaatagcaaccaactccccagtttgtttcaattgngacatctanatggcttaanattactttctggnggtcacccatgctgaacaatatttttcaatcttccaaacagcaaagactcaaaagagattctgcatttcacatcagttcacaagttcaagagtcttccatttatcttagcttttggaataaattatctttgaggtagaaggacaatgacgaagccacttaattccttgngtctgcataaaagcagatttattcatcacaacttcatttatgtgaataaagcagatgatgataaaatgttctcttattcttgtttaatcagtagtggtagtgatgccanaaactgngaaaggaaggcttttagttactttcttctttccattttccaataatccattccccatccccag

SEQ ID NO: 4658 - DNA, 505 bp, Homo sapiens; identical to SEQ ID NO: 645
  unsure (47): n=A,T,C or G

SEQ ID NO: 4659 - DNA, 387 bp, Homo sapiens
ccatttccaagtaacacccactgcatgcccatcaataaaagagaaccataacaaaatagaaaatttaccatatggctatgattttaagaaaaaaaaaatgcggacacgagcacatgagcaaagtccaatattaaagtaacattccttcttacgggctatgattaggaatctgattagataccagaataaaaatacaaatgctgaactatttaggtcaaagaacctctatagaagcatctgtcttcaaaggcattccagtttgagactcaattttagaataaggcataacaaatatgttaacaaaagacatacacaaagtgatgaaagagggattctataattccccacatactctgaacctaataaaacaaatctagattttttttt

SEQ ID NO: 4660 - DNA, 450 bp, Homo sapiens
ctgtcttgaggaggaagatgaagactgtgaatgaaggacagcagacttgcttctaggaaaataatatatgtaagttgggatgcctcttgcagccagatgtttccgaataagtcgctcagtaccataccagttaaaacctttcgtggcatgtccaatacgtggaagatgagcacttgctttcttcttttttgctgctaaaatatcttcttcaggccctcttctagggctgccatcttaatgccagacaggacattggaacgatcacgatgctgagccacaatcaaggccaacaaatcttgccctttgtttcttgattctttatcatcaacaggaaataaaaggacacctcccaaactcaggtctttcattttcccagccagctcatatattttttttggctcagcggatcgcttttccagagctgtaaataaaccacctctgccccagtgg

SEQ ID NO: 4661 - DNA, 238 bp, Homo sapiens
aaaatatgtttattttgtatgttttacaatgaatacttcagcaaagaaaataattataatttcaaaatgcaatccctggatttgataaatatcctttataatcgattacactaatcaatatctagaaatatacatagacaaagttagctaatgaataaaataagtaaaatgactacataaactcaatttcagggatgagggatcatgcatgatcagttaagtcactctgccacttttt

SEQ ID NO: 4662 - DNA, 196 bp, Homo sapiens
ccaggtgaaggctggggggagtgtggtgatggagtccagcaggggaactctggacaggcttgactcaagccagcttcaggaactcctgcagcgtgttttgttccacagcctccacgaagagctcatagtccccacagtactggtccccgttgacaatctggggtggggtggccttggggttgcctgccaaggctcg

SEQ ID NO: 4663 - DNA, 251 bp, Homo sapiens; identical to SEQ ID NO: 4543

SEQ ID NO: 4664 - DNA, 338 bp, Homo sapiens
aaaagaacttccccatcagcttctgcaaggttatttttacatagtctcatgcttatttgtatggggaagttctttttcctggaaaagatttaactaagcacaaaactaaaatccagagcagggataagggaagaatgcaggtgttcttagtggaagtatcagcatcagggaatctttctcttaaacactggaactggtagagttgaagaacttctttttctcaatacttccatcattctttgtatccattcatcagggaggaaagtttctttgaaaatagttattcagttataagtaatacaggattattttgattatatacttgttgtttaatgttt

SEQ ID NO: 4665 - DNA, 293 bp, Homo sapiens
aaaagacatacacaaatctagtacatcaataaccggggatttttcttttttgctatactattttcacaaccacgggtgtgcttgctaggcaatataaccatcacagaagcaaacgttaggcagaatactggtaagaaaaaacaaagcaagaaaagagctaccagatatacagacaggcttggttccacattcactactgcattttcaagcgccaagtattaactgcacatttttgttcagctagaaaggagggatttttttttttgtttttttctttttttttggtttgtttt

SEQ ID NO: 4666 - DNA, 468 bp, Homo sapiens
ccagataattttgcatctgcttggatgattgtagactgagatgtgagtggaggataaagtattagacttttgctgagtaactgccaaccaagaagtatttatcggacacttactaggtgcctaggattgtatcagagggaatatgaaatgtgtccctgccctacctagttttaacgacagaatatctattaaaggctacttagctgaagggtaagggtgacaggtctaggggaagctttgggaggtggtgtgctgtgacagaaaaagtggcagagtagggacgagagacctgcattctagccctgtttctgtcacttgctctgtacacttagacaacagcttgacctcttgagctttagtttcctcctctgcataatgagagggttagactactgaattgtatgggaaaaaaatacaaattcctgggtcctaggccatgcctgctgaatccgactgttcaggaagagg

SEQ ID NO: 4667 - DNA, 408 bp, Homo sapiens
ctgtgcaagaaaaattaaatgaaatagtagatcagataaaaactagaagagaagaagaaaagaaacaaaaagaaaaagaagcagaagaagctgaaaagcaattattccatggtactccagttacaattgagaatttcttaaattggaaagccaagtttgatgcagaactcttggaaattaaaaagaaaaggatgaaagaagaagaacaagcaggaaaaaataaattaagtgggaaacaactatttgaaacagatcataatcttgacacatctgatatccagttcttggaggatgttggaaacaacgtggaggtagatgagtctttgttccaagaaatggatgacttggagctggaggatgatgaagatgatccagactataatcctgctgacccagagagtgactcag

SEQ ID NO: 4668 - DNA, 557 bp, Homo sapiens
ccaagtggggtgagggagacccacgctggatcgtggaggagcgggcggacgccaccaacgtcaacaactggcactggacggagagagatgcttcaaattggtccacggataagctgaaaacactgttcctggcagtgcaggttcaaaatgaagaaggcaagtgtgaggtgacggaagtgagtaagcttgatggagaggcatccattaacaatcgcaaagggaaacttatcttcttttatgaatggagcgtcaaactaaactggacaggtacttctaagtcaggagtacaatacaaaggacatgtggagatccccaatttgtctgatgaaaacagcgtggatgaagtggagattagtgtgagccttgccaaagatgagcctgacacaaatctcgtggccttaatgaaggaagaaggggtgaaacttctaagagaagcaatgggaatttacatcagcaccctcaaaacagagttcacccagggcatgatcttacctacaatgaatggagagtcagtagacccagtggggcagccagcactgaaaactgaggagcgcaag

SEQ ID NO: 4669 - DNA, 247 bp, Homo sapiens
cctcttccatgtcctggagttgaatgagttcaaagattggcaataaaggaaaaaagaaagcattacgggtatgacgggaacaagctttggagtttatcgaacagtcacaccaagtttctctagcacacggacacccttttcttggtactcttgtcgggtcatccaaaagttgtctttgtctttcatgatatccgctagaactgcaccacccaggaataccatgtgctttctgcggggtgggtcttca

SEQ ID NO: 4670 - DNA, 228 bp, Homo sapiens; identical to SEQ ID NO: 3993

SEQ ID NO: 4671 - DNA, 473 bp, Homo sapiens
ccaatgaagatactccacagttgtatgtggcctgtggtaggggaccccgatcatctctgagagtcctaagacatggacttgaggtgtcagaaatggctgtttctgagctacctggtaaccccaacgctgtctggacagtgcgtcgacacattgaagatgagtttgatgcctacatcattgtgtctttcgtgaatgccaccctagtgttgtccattggagaaactgtagaagaagtgactgactctgggttcctggggaccaccccgaccttgtcctgctccttattaggagatgatgccttggtgcaggtctatccagatggcattcggcacatacgagcagacaagagagtcaatgagtggaagacccctggaaagaaaacaattgtgaagtgtgcagtgaaccagcgacaagtggtgattgccctgacaggaggagagctggtctatttcgagatggatccttcaggacag

SEQ ID NO: 4672 - DNA, 317 bp, Homo sapiens
ctaagcttgttgtggtcacctattatgtgccagataccatgctgggtgctagagctaccaaagggggaaaagtattctcatagaacaaaaaatttcagaaaggtgcatattaaagtgctttgtaaactaaagcatgatacaaatgtcaatgggctacatatttatgaatgaatgaatggatgaatgaatattaagtgcctcttacataccagctattttgggtactgtaaaatacaagattaattctcctatgtaataagaggaaagtttatcctctatactattcagatgtaaggaatgatatattgcttaatttt

SEQ ID NO: 4673 - DNA, 453 bp, Homo sapiens
ggaaaataggagtggttggctgggtgaagaataccagcaaaggcaccgtgacaggccaagtgcaggggccagaagacaaagtcaattccatgaagtcctggctgagcaaggttggaagccctagttctcgcattgaccgcacaaacttttctaatgaaaaaaccatctctaagcttgaatactctaattttagtattagatactaatagaagagaaaaattgtaacacactgaacaatagatactgtatgttcttaagactatgtatactagaataatagtagcagagtagggtgaaaaggaactttctgttctgaaagctaagcgactgtacgtgctactaaaaatgtctgacactgaaataattttactcaactatgttttcaacaagcaaaaatatagtattctaagattaaaatgtcattacaaaatatttagtgtgaacatttaattt

SEQ ID NO: 4674 - DNA, 606 bp, Homo sapiens
aaaaatataaagatgcagtatcatttctgatataaagttacttaaaaaaatccaaggtcttagggaattcacaaatcataactagaagtaacttttattaatttaatgtacacataattaccaaattttaatacattaaaaatgtgtaaatgcccacagactgtacaaaaattaacaccccattttgttaaaagttcccaaccacctcccaccataaatatacaaaaacctatttttagatatgtcaaaattgcatgcatgaatattttctaaagcttgaattttgctcttcactggataatgttatctatagctgtttctgtaacagactacataaacattgatatattatttaccatgcctttgaaactgtgcaggactttcataaacatggggaacaaaataaatagagtaaaaactgcaacagttttgtttagatgcaagtgcaattgggaaagctttcgaatttcaggattataaaactactataaaagtatttattctgttgttggcttagccacttgtattcaagcattatttgcagcattgctttacagcagttggtgctagaagatacaaaacatatagttaccactatttatactt

SEQ ID NO: 4675 - DNA, 171 bp, Homo sapiens
aaatgattttttttttcaaatagaaaaactaaagaactgaactatcacaggaatttttcttcactgcagaagctgagatgttccagtaggagaagtaggagatatcttcacttgattggaaaataaacaccgtaactcaaggctctgctgagtacataaaaaatctggtga

SEQ ID NO: 4676 - DNA, 590 bp, Homo sapiens
ctaactgcaacggagagactcaagatgattccctttttacccatgttttctctactattgctgcttattgttaaccctataaacgccaacaatcattatgacaagatcttggctcatagtcgtatcaggggtcgggaccaaggcccaaatgtctgtgcccttcaacagattttgggcaccaaaaagaaatacttcagcacttgtaagaactggtataaaaagtccatctgtggacagaaaacgactgtgttatatgaatgttgccctggttatatgagaatggaaggaatgaaaggctgcccagcagttttgcccattgaccatgtttatggcactctgggcatcgtgggagccaccacaacgcagcgctattctgacgcctcaaaactgagggaggagatcgagggaaagggatccttcacttactttgcaccgagtaatgaggcttgggacaacttggattctgatatccgtagaggtttggagagcaacgtgaatgttgaattactgaatgctttacatagtcacatgattaataagagaatgttgaccaaggacttaaaaaatggcatgattattccttcaatgta

SEQ ID NO: 4677 - DNA, 525 bp, Homo sapiens
  unsure (58): n=A,T,C or G
  unsure (126): n=A,T,C or G
  unsure (283): n=A,T,C or G
  unsure (426): n=A,T,C or G
  unsure (510): n=A,T,C or G
gaaagacagcgcaactttgaatgctttcttacttgttttgtgacccaatttatgtggnagattgttatttcattaggatttagtaaaatttttttttctgattctaaacttattgtgaaaattganctgtacagatattcttttgatttcaattgggaacatttggaagaacaacagtcttacttgcctgtacaatatagagacatatgaatagtcataacagttttcaacttgttcttgtttctgttaaactatattcctagaaacatagtttgaacaactnggtctttgttaggcttgtcaaattgccttcatggaaaaataatctacaaaagtatggtttaattgattgtcttacatgataattttccctggtaacaacttagtaagtgatatatcttttttcctaaattgcttaaatactgngaaattgctctgacaaattggaagtgtaccattggcatatttgtcttcctttttatgcatgatggtaaaataaaagcatgttgntctgctaaaaaaaaa

SEQ ID NO: 4678 - DNA, 262 bp, Homo sapiens
aagcgatgctgccaggttcagactggttactacttaaaggtgaagaactctctctctctattggagtcagatggctgcccgggaccacgtcaggaatattttcttcagtagtcaccacttctgttatactagaaagttcttctgtatgttccacttttcctggattgtcttcggtatgcatgcctggaactgttgctggagacaacggctcttcacagaccacctccttttctaaggaaaatggctggtatgacgtgatgag

SEQ ID NO: 4679 - DNA, 601 bp, Homo sapiens
  unsure (587): n=A,T,C or G
  unsure (590): n=A,T,C or G
aaagtgcaatttattgaaaggtttaagcaaatcaggataaaggatctttctaataaatgactaacattaaagagatgctatattgatatatttagataaatctttcaaaaatcataattgatttctatagatgccaaatttacttctgttgtaacaatgacctgcccccctcaaaccccaaacttaattgctgaggattaagaagatcctctaattggcaagagctttttctgatgttaatatttttgtctgtttcaatacatctaactaaaaagaactatgggtctagagtagttgctttagcagccctgagttctataaccacaatggtattcctgttagaacttaagagaatgttgtgaacgttccccattctatttgaggagaaaacaaagaactcagttgctttctgatttagcaaagtaactatgctttgggctatagtgttaatgtctaagataaaggtagcaaaaattggagttatctaagaatcagaaaatgcttcagagaaatgaactgtaagaggaatgtttctaggagctgtctgatggggtagaagggattgcaacacaaaggccatttactgntgngattgaatatt

SEQ ID NO: 4680 - DNA, 361 bp, Homo sapiens
aaaagtctttatttcctctgaaaacttactggtaaagtatacaatttatgaataatcatatattcatgctttttgaaatatatctgaataaaagacaaattattcaatatcaatagcagtaaataacttatttgcaagaaaattattacaattcctactgtaaagaatcaccaaccactatttagcaattaaatttcaacacattttttttggaactctttaggactttagacaaaggccaccaaggctgacaatccaggtaactatggcagtgacagaagtcaatcattaatactgccattattttagacaaagggctgacaatctcagaaactagttctagaaattatcatcaatgtgg

SEQ ID NO: 4681 - DNA, 598 bp, Homo sapiens
  unsure (160): n=A,T,C or G
  unsure (190): n=A,T,C or G
  unsure (231): n=A,T,C or G
  unsure (264): n=A,T,C or G
  unsure (301): n=A,T,C or G
  unsure (307): n=A,T,C or G
  unsure (321): n=A,T,C or G
  unsure (343): n=A,T,C or G
  unsure (348): n=A,T,C or G
  unsure (353): n=A,T,C or G
  unsure (412): n=A,T,C or G
  unsure (445): n=A,T,C or G
  unsure (476): n=A,T,C or G
  unsure (490): n=A,T,C or G
  unsure (502): n=A,T,C or G
  unsure (511): n=A,T,C or G
  unsure (516): n=A,T,C or G
  unsure (523): n=A,T,C or G
  unsure (527): n=A,T,C or G
  unsure (541): n=A,T,C or G
  unsure (546): n=A,T,C or G
  unsure (591): n=A,T,C or G
caagctttttttttttttttttttttttttttgcgattgtaaaattttattactgggctgtttacatgatactttctttcttattaaatataacctgacaatctttattaaatgaaaatatttttgtatcatcaacaacaacaaaagaactaggatgaanaatttcccacattcttaatatttatagggnttctctccagtatacattctcatgtgtgctcaaaaggctgngtgaaggctttcccaaatgtcttacatttatanactttcaccccactctgactcctttcatatattcacnctctanaggacagttggaanattttcccacttttattttttnttganacagngtctcattctgtcgcacaggctggaatgcagtggcgtgatctcagctcactgcaacctntgtctccaggttcaagtgattctcctgccttancctcctgagtagctgggattagaggcatgcnctaccatgcctggntcattttttggnaatttttantaganatggggntacnccatgttgaccacnctggnctcgaatttctgacctcaaatgatctgcccgccttgcaccttggnctccaaa

SEQ ID NO: 4682 - DNA, 391 bp, Homo sapiens
ctgctgttagtgtagcaacctcgcttttcatctgtttagcaatggaggaatgaatagcaccacacagtcctcgatctgaggacacaccaataaggaggtgtttcttcttgtcttcaggccccttgatatcagctttttcatacagagctaaagatcccaatccatatattcgagctggtttcagctctctctcagctcgggcatattttgctgccgctaccattttcatagacttggtaattttctggatgtttttgatggactttagtctcctggtgatatctttcaaagttgccatatttcgaacttgaatccattgcggctgcaaggtccaggccgacagcccaacgacacccgcgcgagagaacatggtagccacagccctgctgaa

SEQ ID NO: 4683 - DNA, 577 bp, Homo sapiens
  unsure (546): n=A,T,C or G
  unsure (549): n=A,T,C or G
  unsure (552): n=A,T,C or G
ctctagtcccagctacctgggaggctgaggcaggagaattgcttgaacccaggaggcagaggttgcagtgagccaagatcatgctactgcactacagcctggcaacaaagcgagactctgtctaaaatatatatatatatatattgtttactactcaccacagatctgcaggagttcactgatctctaggatctgccttaactccaacttacatgttttggtcactattacaaactgtcatcccagaatgatgctgcagaggctagggctaggacacagaccagtgtttccatgtgggaattccctcccagtatttcttaggaaatgtatgttttttgaatccataatccctagaaaaatcagttgaggaaatgagaagtattgtaattattctgtgaatagtaacacttaccattatggagacatcactagtttgaaagaatccaacttcatcaaatattaacgtaccgagttgaaggctacaagaactgagacaggagcatagcagagagaaacggtcaccatctcattagccctatttttggntgntgngatgccattacatctgtatatctgg

SEQ ID NO: 4684 - DNA, 252 bp, Homo sapiens
ctgactccctagggccttcagacgtgtatgcaaatgagtgatggataaggatgagtcttggagttgcgggcagcctggagactcgtggacttaccgcctggaggcaggcccgggaaggctgctgtttactcatcgggcagccacgtgctctctggaggaagtgatagtttctgaaaccgctcagatgttttggggaaagttggagaagccgtggccttgcgagaggtggttacaccagaacctggacattgg

SEQ ID NO: 4685 - DNA, 552 bp, Homo sapiens
ccaaggaatggcccaagaggaaggtgcttcaggacctggtacctgatgatcgaaagttaaaatatactcgtccagggctccctaccttcagccaggaagtactacataaatggaagacagatatcaagaaatatcatcgtattcagtgtcctaaccagggctgtgaggctgtctacagcagtgtatctggccttaaagctcacctgggctcttgtacattgggaaactttgtggctggaaaatacaaatgtcttctatgtcagaaagaatttgtgtcagagagtggtgtcaagtatcacatcaactccgtccatgctgagaaaatttcaaacacatgaaagtagagaaaatagcataatgaacccagtatgctgtcagccatcctcagcaatcatcagtgactggttcgttgtaaacccaacaacaaccaaaagctttgaaaagctgatgaagataaagcagcggcagcaagaagaagaaaagcggaggcagcagcacaggagcagaaggtctctaagaaggcggcagcagcctggcattgagcttcccgag

SEQ ID NO: 4686 - DNA, 281 bp, Homo sapiens
  unsure (262): n=A,T,C or G
ctctattggactaccgtgaggatggtgtgaccccatatatgattttctttaaggatggtttagaaatggaaaaatgttaacaaatgtggcaattattttggatctatcacctgtcatcataactggcttctgcttgtcatccacacaacaccaggacttaagacaaatgggactgatgtcatcttgagctcttcatttattttgactgtgatttatttggagtggaggcattattttaagaaaaacatgtcatgtaggttgnctaaaaataaaatgcattt

SEQ ID NO: 4687 - DNA, 292 bp, Homo sapiens
aaaaaaacaatatttgcttctataacaaaaggaaacaaatctaagaatcattcctgtactacagaagggttaaggcaaaggtagccttttgggccttttaatgaacatgacccctatagaaaagtcaaggaaaaaaaaacccttgtataaattattttatttattattgtaattagatcttcacaaagttgtcttttcactgtgttttgtcaacgtgaaattaaattgtagttataagcaaaagttggttgcctagggaacaattgtatattcagtttaacagaaataaaag

SEQ ID NO: 4688 - DNA, 308 bp, Homo sapiens
ccatttaccagactccgacacaatgggccaccaccagtgtgacagcaggacatcctaatatatggatcttgatttttaagtttcagtatctgaacttcgtaaattagtaacttttagctgggaaagtatagcatgaaaccagaggttctcagaatgactgtaagatagcttacatttcctctttttgcctttatctccccaactaaaatacaatggggaagaagtctgcctatgatctttgaatgagctttttaaggaagaaatattatatattgtttgttaaagtttattgaaataaagaatcattt

SEQ ID NO: 4689 - DNA, 237 bp, Homo sapiens; identical to SEQ ID NO: 206

SEQ ID NO: 4690 - DNA, 328 bp, Homo sapiens
ccaagtggtggccgatgtgctctgcgagttcctggaggtggctgtgcatctcatcctctacgtgcgcgaggtctaccccgtgggcatcttccagaaacgcaagaagtacaacgtgccggtccagatgtcctgccacccggagctgaatcagtatatccaggacacactgcactgcgtcaagccactcctggagaagaatgatgtggagaaagtggtggtggtgattttggataaagagcaccgcccagtggagaaattcgtctttgagatcacccagcctccactgctgtccatcagctcagactcgctgttgtctcatgtggagcag

SEQ ID NO: 4691 - DNA, 407 bp, Homo sapiens
aaaaatgttcattaagctccaatgattgtttgctgctatccttatctacagtcatgctgagtaaagctatagctaaatggaagttaaattgtattcacgaggtgttaatgtttacatcttattatctgcagtctctcagagaaagcaaaagtaactacaaatagcgctatgccagaaactggtttcttgaccaacaatgtcgcttcagcatgcaatgaactggttcattctaaagtggtcacggctgttgatgacaagaggctttgtatttttatatggcacatcttttggtccatgtgaaaacaagttttttgaatgttaactattttctgacactttggagttactgttgctcttcccatttccattaggtcgatatatggttcatggcaatactgtacaagttt

SEQ ID NO: 4692 - DNA, 124 bp, Homo sapiens
gacttgttcaagaataactgatatgccttcactcagaagaaaagaaatgaatgtgaaagaaagccaagcatcacttgcacttaaatcattaccacggaagatatattagcttcaactttagttt

SEQ ID NO: 4693 - DNA, 381 bp, Homo sapiens
aaaataatcattgatttgtgtgatgtctacatcttttaacttctggttctgttataaagagtacatgtcacggttcataggcagtaacatttcagagaactgacatgaacaagtagtgaaaattgggcattaaatataaaaataacagttcttcataaacagaaggaaaataaggaaatagaaataccgacgagaaaggagagtccttgaaagagacccaaggaaaccctgaattcatacccacgtcaaatatgcacatatcctgagatgatgccactttgatgaatgtgcattagtctgatttatcatgtaccttaagagagccagatggggtatgtttttgtgctgtgatatggtatttatacaggtacaaatataagg

SEQ ID NO: 4694 - DNA, 342 bp, Homo sapiens
ctgctgatacccaggcagtagctgatgctgtcacctaccagctcggtttccacagcattgaactgaatgagcctccactggtccacacagcagccagcctctttaaggagatgtgttaccgataccgggaagacctgatggcgggaatcatcatcgcaggctgggaccctcaagaaggagggcaggtgtactcagtgcctatggggggtatgatggtaaggcagtcctttgccattggaggctccgggagctcctacatctatggctatgttgatgctacctaccgggaaggcatgaccaaggaagagtgtctgcaattcactgccaatgctctcgctttgg

SEQ ID NO: 4695 - DNA, 544 bp, Homo sapiens
  unsure (460): n=A,T,C or G
  unsure (506): n=A,T,C or G
aaaagattgtagatgacattggaatctaatttccgtatttgggtgctttcctagtattgtaagaatatgcttaattaatgagtcgcaatgaataatctgtttgtcttgatttgctttctgaaaggtgatgagggttttgggaaatggactttgttcaggcttttgccctttgtggctgtgacatattaagatgttggcagtaaaattgagagccaccagaagatgttaactgtgtatatgggcgctgccagataggaaatccaaatgagtagactatagtgttattgttagctactatggggtgagacgtagacagataaccatatgtaaggcagctccctaaatgctgaaacaaagaaccgtctcttgacttactcctgatgtctcatggtacatggtagctgccccaaaagcttgcaattaattgaaacttctcatttgttaggtggcaggtaggtangttttgaacttggtagtgatattcagacgaggagcaagattccacntggcagttctgtgatgcttaagtaaatgatgtgatcat

SEQ ID NO: 4696 - DNA, 208 bp, Homo sapiens
ctggatcacccttggaaaccaactggatgggatccacctactagacccagatgtggttgcacggttcaagcaaaggtacccagatggtatcatctctaaacctaagaatttatagaagcacttccttacagagctaagaatccatagccatggctctgtaagctaaacctgaagagtgatatttgtacaatagctttcttctttattt

SEQ ID NO: 4697 - DNA, 249 bp, Homo sapiens
aaaaaaaaccgaaacttaagaactgaacaaggattacaaccacattccaataaagaaaattttccttcaacaaagcatattgttttgtttatatacaatatgtgaccaccaagagttttaatttagttgtaccaaaggcaaaacattatacttaaaattaaattacagatgcatgaagaataaaagtttaatgtatcaaagataatttgttatttaatgcactcaatgtcagtatttggggcaattttt

SEQ ID NO: 4698 - DNA, 159 bp, Homo sapiens
gtgtgagcagtttatttattcaaaagtctttgtctgctgaagtcagcatacccctgctgaactgagtgctccaatgtggcaactaggagtgggtgctcgtgctggagaggtcatttcgtattatttcatttactgctgtggcagcagggccgggggtgg

SEQ ID NO: 4699 - DNA, 372 bp, Homo sapiens
cctgtggctgacctctgaccccagccctctttcttcagccctccctttactccaaccctctcctgcctgctttcctgagatgtcctggtcttccttggtgccagaagagggcactaccacaggaccctctcaagcttctcaggcaacagcttgaggtccctgaggggagtggcaagccctaatgcaactcaccctcatcctggtgcttaggtggcagagggtgggcagcaggggacagggatgggatggcaaaaccaccaactgcccttggtggcaggtgggtggagatgggatgcgtgccaacctcagatgccaactcaggtcatcaaggccaaggaccagtggcgaaagtgagtcttggggtaccttagg

SEQ ID NO: 4700 - DNA, 511 bp, Homo sapiens
aaaagaagcagaggtcaccatctccgagttcattctcatgtaactgaatgaaaacaatgagctgaaaataattctaagtttttttattgtttgacaggttcaacgttacagggtctgacaagtgtgtttttctgaaaaacacagaggtcagcagcatggaatgtgagaagaatttatactggatatgtaacaaaccttacaaataataaggaaacgtgttcacttattgactattatagaatggaactcaaggaaatctgtgtcagtggatgctgctctgtggtccgaagtcttccatagagactttgtgaaaaaaaattttatagtgtcttgggaattttcttccaaacagaactatggaaaaaaaggaagaaattccaggaaaatctgcactgtgggcttttattgccatgagctagaagcatcacaggatgaccaataaccatgcccaagaatgagaagaatgactatgcaacctttggatgcactttacattatttctggattcaaa

SEQ ID NO: 4701 - DNA, 543 bp, Homo sapiens
  unsure (514): n=A,T,C or G
ctgccgtggtggctaaagatagaagccctgggcaatggatcatctgtgtggaaggagacagtgcatttgggttttctggcatggaggtagaaaccatctgcaggtacaacttgccaatcatactgttggtagtgaataacaatggaatttaccaaggttttgatacagatacttggaaagaaatgttaaaatttcaagatgctactgcagtggtccctccaatgtgtttgctgccaaattcacattatgagcaagtcatgactgcatttggaggcaaagggtattttgtacaaacaccagaagaactccaaaaatccctgaggcagagcctagcagacacaactaaaccttctcttatcaacatcatgattgagccacaagccacacggaaggcccaggattttcattggctgacccgctctaatatgtaaataaagacgccagttggtggtcttgagttttctctttcttgcaagatgaaattttattttccacagcaaaattactctactgntaaaattgtgcaaaataaaataaacattt

SEQ ID NO: 4702 - DNA, 554 bp, Homo sapiens
ctgtatttttttgcattcattcattttccattctgcaacctccatcacattagcagagtaaccagtaagttgttttctattttctaaagtatttttttctatcactatatgtatcacttctgagtcttacaggtatagagctgagtttagagagttgctaaaattcacctattggaccaaactaaggttggtacttggctgtttgttccccatctgagcctaagtctccagctcagacacatctctttatgggcacaactgggaacaacaaaatggcaacagttctacagctcataatataaccagtctgaagggttcccctactcacagaccccttcatttactgggagttaagcctcactgctaaataatatattttgaaactggaaaactgggcatgctgccttccacaatacaccactatactcatgattgcaggagggtggcttggggactaggggcaatgacacgggaaggatacaatcattgcccttacttatctttgatcttcttcccatcctcacactgaataatcacttgttcctaccttccct

SEQ ID NO: 4703 - DNA, 289 bp, Homo sapiens
  unsure (11): n=A,T,C or G
ctgggcaggcngtgggtctgcatcccaggagagggacccgaaactgggagacttggagattttatcagggctgtggaggacctgcctttcttctcctccagagatagatgactcattatccagcaacacagaggtcagcaccgacctcaccagcagcaggctcacaggagtggcaggggcattgggagagtgggaggcagcacagggtcagctctttcacgaaaacagagaaacggggcagctctagagtgggagtaggggcacagagaacaggaaggaaaggcggccg

SEQ ID NO: 4704 - DNA, 228 bp, Homo sapiens
  unsure (183): n=A,T,C or G
  unsure (199): n=A,T,C or G
  unsure (221): n=A,T,C or G
cgaggtaaaaaaaaaggggggtgctttgatgttagggctcttggtaggggtaaaaggagggcaatttctagatcaaataataagaaggtaatagctactaagaagaattttatggagaaagggacgcgggcgggggatatagggtcgaagccgcactcgtaaggggtggatttttctatgtanccgttgagttgtggtngtcaaaatgtaataattattantagtaag

SEQ ID NO: 4705 - DNA, 445 bp, Homo sapiens
cgacaccgtaactatccgcactagaaagttcatgaccaaccgactacttcagaggaaacaaatggtcattgatgtccttcaccccgggaagacgacagtgcctaagacagaaattcgggaaaaactagccaaaatgtacaagaccacaccggatgtcatctttgtatttggattcagaactcattttggtggtggcaagacaactggctttggcatgatttatgattccctggattatgcaaagaaaaatgaacccaaacatagacttgcaagacatggcctgtatgagaagaaaaagacctcaagaaagcaacgaaaggaacgcaagaacagaatgaagaaagtcagggggactgcaaaggccaatgttggtgccggcaaaaagtgagctggagattggatcacagccgaaggagtaaaggtgctgcaatgatgttagctgtgg

SEQ ID NO: 4706 - DNA, 348 bp, Homo sapiens
aaacatggttagttgctagtacaaggaatcgtttattggtaacatcttggtggctggctagctagtttctacagaacataatttgcctctatagaaggctattcttagatcatgtctcaatggaaacactcttctttcttagccttacttgaatcttgcctataataaagtagagcaacacacattgaaagcttctgatcaacggtcctgaaattttcatcttgaatgtctttgtattaaactgaattttcttttaagctaacaaagatcataattttccatgattagccgtgtaactcctgcaatgaatgtttatgtgattgaagcaaatgtgaatcgtattatttt

SEQ ID NO: 4707 - DNA, 465 bp, Homo sapiens
ccaaaccaatgagaattaaggaaggctcttccaggccagtttggtcagatgatgactggttgaagaagttttctgggaagacgcttgaagagaataaagaggaagaagggtcagagcctcccaaagcagagacccaggagggagagcccattgctaaaaaggcccgctcaaatcctcaggtgtacatggacatcaagattgggaacaagccggctggccgcatccagatgctcctgcgttctgatgtcgtgcccatgacagcagagaatttccgctgcctgtgcactcatgaaaagggctttggctttaagggaagcagcttccaccgcatcatcccccagttcatgtgccagggcggtgatttcacaaaccacaatggcactgggggcaagtccatctatgggaagaagttcgatgatgaaaactttatcctcaagcatacgggaccaggtctactatccatgg

SEQ ID NO: 4708 - DNA, 367 bp, Homo sapiens; identical to SEQ ID NO: 3183

SEQ ID NO: 4709 - DNA, 501 bp, Homo sapiens
aaaatacataaaattttctaaaacgtaaaatggaaaggtttaatacacaggaaaaacactgcacaccttaactaaacaaactagaaagaaaatatatttatatacagaactaagatgagtccattcattatttttacaaatattcacatagatggtttagagataagtagttaagtgtgtctcattaattaatggatgctttctagcctctgtcttcattaattttatttcctattcaacaaaaaataatgctttcaggatatattacatatagagcaatatcatttttatcagtaatttgtctgaaaaagagaaaaacttaaaagcagaaccctacaaagcaaagcaaactacaaagcaaagagtaatcacagtgtttgcaaaatagaaatgtgtgactttaactttatagcaggctgcctaattaatccagacagtagagaaagcagactgaggcaggaagtaagaggtgggactaaactgttaagaagataataattt

SEQ ID NO: 4710 - DNA, 468 bp, Homo sapiens
aaactcttcagtttacagagaaggatgctgaggacctagatgagaagttacctgcaaaaggcaaaagggttacttagtgtcagaaccaaggcaatgacttctctctcccagatctcctagctactggtcctgggccattttttttttaaataatcccaactttctttaaaagacaagcatttcagtaagctagttattttcatgggttgctcatccatttttttcagtgatctaaaaatgtagggagatggctactactgaagttgtctgtctacttgggataatagcaaattaattgaagacaatgggaaagtaagttataaaaaatactgggaaatctgtttctcttctgagcaagcattcagggcaggtataaacatcaaacatagtgacattgtcaaaacctcttccatttgaacattgattaattcatcaaataaatggtatagtaaaaaaaaaaaaaaaaaa

SEQ ID NO: 4711 - DNA, 417 bp, Homo sapiens; identical to SEQ ID NO: 3179

SEQ ID NO: 4712 - DNA, 437 bp, Homo sapiens
  unsure (415): n=A,T,C or G
aaaactcattaataagataccaaattcaagagattatagttacattgtaaaacgtaatcttcttttaataaaagctaataatgactgatgaattacaaatgcacttatttattggtgattacaaacaatacttaagaacttaagcagcttgagtagtagtttaagctagacagagcaaagaaaattcttgtttaatatatatatatttttaattccagtaatattttcttaaattcctgttaaaaatataatcaatattaaagtcagcaaaatgcctttgactgacgcctggattattttaccacttaacctggttacacagtgatttttttttttttctgtcagatgtaactgacaaccagtttagtctttctttaagataaatgaagtgataactcacattgcagcatcttgnggaaaatattcaaactacattt

SEQ ID NO: 4713 - DNA, 303 bp, Homo sapiens; identical to SEQ ID NO: 3177

SEQ ID NO: 4714 - DNA, 451 bp, Homo sapiens; identical to SEQ ID NO: 3176

SEQ ID NO: 4715 - DNA, 525 bp, Homo sapiens
  unsure (419): n=A,T,C or G
  unsure (471): n=A,T,C or G
  unsure (477): n=A,T,C or G
ctggtggcttcctgatttccgcccacagaaggtatgttcacactgagagagctctcccgccaaggggaggaatcacctgctttaatacatgttgttctcttctgtgctagtgtggtcatccactctgtataaacttatgtgcaacattaagacaaaaaaagggagttgagttgataagatgacttgggaggctctcatagttgtaataactatggaagacagaagaacatgctatcatctttatttttagcactcatatctggacctattactaaaaaagcttcttcattccttccaaccactagattataatggctaaaaagtcttttccttaaatctgatgggtgtaaaaataaaaagtaacagcatttctctagggctctgtttttattttgttttgttcttcctttatagacacnacaaaaacaaggattaactttccaaatactcatggtgcacaagaaggttatntatgcncagtatttctaatttattcaaattcaatttgaatttggtctgaagcta

SEQ ID NO: 4716 - DNA, 507 bp, Homo sapiens
ctgagcacgagtatagcagcattaactttaatctcattggctacattaatgaactttcctaatcctctcaatgccatgcagattttgtggatcaatattattatggatggacccccagctcagagccttggagtagaaccagtggataaagatgtcattcgtaaacctcctcgcaactggaaagacagcattttgactaaaaacttgatacttaaaatacttgtttcatcaataatcattgtttgtgggactttgtttgtcttctggcgtgagctacgagacaatgtgattacacctcgagacacaacaatgaccttcacatgctttgtgttttttgacatgttcaatgcactaagttccagatcccagaccaagtctgtgtttgagattggactctgcagtaatagaatgttttgctatgcagttcttggatccatcatgggacaattactagttatttactttcctccgcttcagaaggtttttcagactgagagcctaagcata

SEQ ID NO: 4717 - DNA, 403 bp, Homo sapiens
  unsure (208): n=A,T,C or G
  unsure (220): n=A,T,C or G
attttaattaatcttttgttttttttttttttttttttagactcaagatatcaatgaaatatgcatatcttatttggagtgtatgattttatagcctccatcttttagttcagttttaagaaaaacagactaaatgatccctgtaatgtttgaatatgttactagctggagttccagaaaatattctggcatgcctttgaactttganagctcatttcgngggtgctctgatttaatgtcaactatgcaaaagccaagtaaatgcaagcactgaatacacaaaggccaaataaatacaagacaggacagaaaataaaatacatgcttaccagtaagaatgataagccttctccaaagaaagggaaaaattccctcatccaagcctcaaggtccaaacctcgca

SEQ ID NO: 4718 - DNA, 372 bp, Homo sapiens
  unsure (25): n=A,T,C or G
  unsure (57): n=A,T,C or G
  unsure (84): n=A,T,C or G
  unsure (91): n=A,T,C or G
  unsure (154): n=A,T,C or G
  unsure (169): n=A,T,C or G
  unsure (248): n=A,T,C or G
  unsure (272): n=A,T,C or G
  unsure (284): n=A,T,C or G
  unsure (334): n=A,T,C or G
  unsure (352): n=A,T,C or G
  unsure (361): n=A,T,C or G
ttttttttttttttttttttttttngggttaaatacaggcttttttttttaatctgnaattgatttacatttgattttaaaaanacactgnttacatcaggtcaccacaaagcagatttacatacaaccttcaattgcggaaaaacaaagtttntttttgatccaaacncaaagaaaaacttctttgggtttttttttaatgatcttttccttgatcataaaaaaagtaaaaaatgcagtacttttanaaggtaaagctagtaagtttacanaagtgcaaaacnccaaaacacttgaagcaaaaacttttttttttttttttaaaaaaaaggtntgacttcttgttttctgntcttggcanaaattttaatt

SEQ ID NO: 4719 - DNA, 292 bp, Homo sapiens
  unsure (240): n=A,T,C or G
  unsure (258): n=A,T,C or G
aagcactttacagtctttgtggcagcagaatatacttgtccatggttcatatcaatgctaaaattccggcagggaaaaaaatgatatgttaagcacccaaatcttcacatggagggggagggggtgggaaaagaaggaaaaaaagggaaaaacaaccaaaataatttaagtaaatgacagattggaaaacagggtttataaaaattattctcttgagtttataaattgttaaactcaatntatagctatgttaaactncgtaagaaccactatactgaaaacaccatttaag

SEQ ID NO: 4720 - DNA, 379 bp, Homo sapiens
ctgatggtcatctttgtttacaagccattacaggtttgaacaaattcaaaattgcctattattaagcctccgcaggagctactgggcataagcaaacctaagattttataacccagcaattatcctatagaaaatagtccagattattatattctgccacacctttattcatacttgactccaaaaagttctcaattattcacagggataatctagaaaataaatattagttttgctttcaaagacattactggaatgagcaggaacctgcatctttgttatattaattaacttattatttagttttcctgtctgcttagaaattggctgtttaggttgaaaaatgatttaagaagcataaactataacacaacaattt

SEQ ID NO: 4721 - DNA, 458 bp, Homo sapiens
gttagtattgactttgtctaaaagaggcttgacttcaactgggataaaaatgtcagtgaattttgttaaagtagtaaaaatgcagttgacttagtaggaacataaaattatttcctaataagataatattgcactcctaccaaataaacaggattttagtaatatctgagggattgttgatggtgagttagactgtatttggcatagaatttggaaatgtaacttgaatgtaaatatgctgcaaaatgttgaatgtatacatagaaagactttttctgtcgacgccaaatgcccgttgtaaatgaaccttaaatattacattcctcctttgcacaataatatttctttataacacttatgattttttcccccaggacaacaaactgcccttaagagtcatttccttgttatcacaggtgtcaatatttttctgtattttgtttataattttatttttt

SEQ ID NO: 4722 - DNA, 428 bp, Homo sapiens
  unsure (349): n=A,T,C or G
  unsure (360): n=A,T,C or G
  unsure (373): n=A,T,C or G
  unsure (377): n=A,T,C or G
aaatgtttttgaaaattgcaattcctacaaataaatgtcatagtgcaaataaatgtcaggatttagagaaggagcctaaactgaatttgtgttatttcagtaaaagttatggagttatgggtctagacgtgttaataagttagacagaactttggcactttagaacaaatgcatgagtggtatttcagttcctaagttacataaaaagtgtgaaagaacactgtgaggtcccagcaacgccagactatattaaggtaagtagaaagtgtttttatagggcttcaatacccaggtggtgacagagcagaagaaccggttttttttttttttttttactactaagcttttncaaaagaagtntctgttttattgnatanaacaagtacagcattttactacatagtatacaagtttttaatgagcattta

SEQ ID NO: 4723 - DNA, 262 bp, Homo sapiens
aaatgctttaatgaaagttatgaatgggatttaacatgggaactatgcatatgcaatatcatatttttcatatcaatgaaaaattccataaaaatagctatattaaatttcatatgtaaatatttaacaaatatgtttgtattcttctatttttatacaatgaatattaatacatattgcatttatttattttaatgacatttatttaagttcaattgtacaaaacctaatttgttgtcaaaagtatcaagcaataaatttt

SEQ ID NO: 4724 - DNA, 625 bp, Homo sapiens
  unsure (580): n=A,T,C or G
ctgagttacaaggactaaaagtgaaaagcattctaaaagtccatgaacactgttgttcacacccttcttcagaacacactaaacttgtctgacacatttctcttcatacatagcaagcaacagcacccaataaaagcctgagaagaaatgctgctgtgtaaatactgcaactattcctgaaaaaagaattatgggatatatactccaaagctgcccattcccataatttgtattgcataggtcacataatcacacacatatatatacacatgtgtgtatatatatgcacatgcaagaatatattaagacgacaatgaagtctagtcacagagcaatttacaggctcaatatatttttttacactttgcttgaaagaaaatttcaatattttacagtctttcagtaggcattatatacactgcactttatgaaatctaaaaggtattgaaataaatttttccaacattttggtaacaaaacaaacaacgtttctccaaatacttgtgctatctacatgatgtttgctctgataatcactaatcacaaaaaactgactcaatggaataattagaaaaattgnctaacaccatgcatgggtttcaatcatttttaatatcctatccta

SEQ ID NO: 4725 - DNA, 428 bp, Homo sapiens; identical to SEQ ID NO: 351
  unsure (55): n=A,T,C or G
  unsure (57): n=A,T,C or G
  unsure (83): n=A,T,C or G
  unsure (85): n=A,T,C or G
  unsure (97): n=A,T,C or G
  unsure (122): n=A,T,C or G
  unsure (130): n=A,T,C or G
  unsure (151): n=A,T,C or G
  unsure (154): n=A,T,C or G
  unsure (158): n=A,T,C or G
  unsure (167): n=A,T,C or G
  unsure (183): n=A,T,C or G
  unsure (190): n=A,T,C or G
  unsure (208): n=A,T,C or G
  unsure (229): n=A,T,C or G
  unsure (245): n=A,T,C or G
  unsure (249): n=A,T,C or G
  unsure (257): n=A,T,C or G
  unsure (274): n=A,T,C or G
  unsure (291): n=A,T,C or G
  unsure (297): n=A,T,C or G
  unsure (303): n=A,T,C or G
  unsure (327): n=A,T,C or G
  unsure (349): n=A,T,C or G
  unsure (381): n=A,T,C or G
  unsure (385): n=A,T,C or G
  unsure (389): n=A,T,C or G
  unsure (391): n=A,T,C or G
  unsure (403): n=A,T,C or G
  unsure (409): n=A,T,C or G
  unsure (412): n=A,T,C or G
  unsure (418): n=A,T,C or G

SEQ ID NO: 4726 - DNA, 582 bp, Homo sapiens
  unsure (453): n=A,T,C or G
  unsure (527): n=A,T,C or G
  unsure (539): n=A,T,C or G
  unsure (541): n=A,T,C or G
  unsure (554): n=A,T,C or G
ctggttctagtcaattctgaaccaccaccccccgccccccgcaaaaagtaaaagtcaaaccaaacttcctcaagctgcatgcttttcacaaaatccagaaagcatttaagaattgaactaggggctggaagaagtgaaagggaagcatctaaaaatgaaaggtgagtaaccagatagcaaaagaaaagggaaagccatccaaatttgaaagctgttgatagaaattgagattcttgctgtcttttgtgcctctacaagctactactcattccagaattcctgggtcttccaagaggattcttaaggtaccagagatttgctagggaaccaaaagtgcttgagaatctgcctgagggcttgcatagctttcacattaaaaaaagaaaaagctagcagatttactcctttttaggggatcatatcaagaaagttagtctggttggaaaccaaganaatggctgatgtctctttcttggaatatgtgaaataaatttagcagtttaactaaatacaaatatatgcattgngtaatccactcnanaattaaacagacnaaaggtatgcttgctttggaatgatttt

SEQ ID NO: 4727 - DNA, 424 bp, Homo sapiens
  unsure (12): n=A,T,C or G
  unsure (14): n=A,T,C or G
  unsure (19): n=A,T,C or G
  unsure (37): n=A,T,C or G
  unsure (74): n=A,T,C or G
  unsure (94): n=A,T,C or G
  unsure (318): n=A,T,C or G
  unsure (322): n=A,T,C or G
  unsure (356): n=A,T,C or G
  unsure (377): n=A,T,C or G
  unsure (418): n=A,T,C or G
attatccaggcntnaggcnacatctgtctagtgttgncttcatcaagaacagactatatactaattcccactanaagctgtccatgccatacanaagatctattaaaaatgttttaaatggaaaatgtactctagaccacaggactaatgtaaattaatatacagtcattcattatttgttgaagttgatagaatttttgaagtgtaaacttgtgtctgaatgttttatttgttctttagctgaagttttgcaatttttatgtcaaaattcaattgctattaaacaagttgagatccagttataaattaaccttgttnttantagatgacatttatttcaataaaagttgcaaatngggcttaatcttaaaattggnggtcatttcaatggttgacatatttggctatttattaaccncctctt

SEQ ID NO: 4728 - DNA, 265 bp, Homo sapiens
ctcaaattaccctccaaaagcaagtagccaaagccgttgccaaaccccacccataaatcaatgggccctttatttatgacgactttatttattctaatatgattttatagtatttatatatattgggtcgtctgcttcccttgtatttttcttcctttttttgtaatattgaaaacgacgatataattattataagtagactataatatatttagtaatatatattattaccttaaaagtctatttttgtgttttgggcattttt

SEQ ID NO: 4729 - DNA, 410 bp, Homo sapiens
  unsure (25): n=A,T,C or G
  unsure (52): n=A,T,C or G
  unsure (88): n=A,T,C or G
  unsure (131): n=A,T,C or G
  unsure (180): n=A,T,C or G
  unsure (213): n=A,T,C or G
  unsure (266): n=A,T,C or G
  unsure (301): n=A,T,C or G
  unsure (316): n=A,T,C or G
  unsure (353): n=A,T,C or G
  unsure (396): n=A,T,C or G
gtcctactgtgcctggctccagttnttttttttttttttttttttttttganacagggtctcattatgtcacccaggctggagtgtantgcaatcacagctcactgcagcctcgacctcctgggctcaagngatcctcccaccttagcttcctgagtagctgggatttcagcccactttntgctgaaagaactgccagcaggtaggaccccanaggcccccaaatgaaagcttgaatttcccctactggctctgcgttttgctganatctgtaggaaaggatgcttcacaaactgaggtanataatgctatgctgncgttggtatacatcatgaatttttatgtaaattgctntgcaaagcaaattgatatgtttgataaatttatgtttttaggnaaataaaaactttt

SEQ ID NO: 4730 - DNA, 539 bp, Homo sapiens
  unsure (456): n=A,T,C or G
  unsure (467): n=A,T,C or G
  unsure (478): n=A,T,C or G
  unsure (482): n=A,T,C or G
  unsure (490): n=A,T,C or G
  unsure (492): n=A,T,C or G
  unsure (505): n=A,T,C or G
  unsure (508): n=A,T,C or G
  unsure (512): n=A,T,C or G
gtgggtgttttctaaatattaataggggggcttgattcaacaaagccacagacttaacgttgaaattttcttcaggaattttctagtaacccaggtctaaagtagctacagaaaggggaatattatgtgtgattatttttcttcttatgctatatccccaagtttttcagactcatttaagtaaaggctagagtgagtaaggaatagagccaaatgaggtaggtgtctgagccatgaagtataaatactgaaagatgtcacttttattcaggaaatagggggagattcaagtcatatagattcctactcgaaaatcttgacacctgactttccaggatgcacattttcatacgtagaccagtttcctcttggtttcttcagttaagtcaaaacaacacgttcctctttccccatatattcatatatttttgctcgttagtgtatttcttgagctgntttcatgttgnttatttcctgnctgngaaatggngntttttttttttgntgntggntttttttttttttttttaacttgggac

SEQ ID NO: 4731 - DNA, 398 bp, Homo sapiens
cgcctgggcaacgacttccacacgaacaagcgcgtgtgcgaggagatcgccattatccccagcaaaaagctccgcaacaagatagcaggttatgtcacgcatctgatgaagcgaattcagagaggcccagtaagaggtatctccatcaagctgcaggaggaggagagagaaaggagagacaattatgttcctgaggtctcagccttggatcaggagattattgaagtagatcctgacactaaggaaatgctgaagcttttggacttcggcagtctgtccaaccttcaggtcactcagcctacagttgggatgaatttcaaaacgcctcggggacctgtttgaattttttctgtagtgctgtattattttcaataaatctgggacaacaaaaaaaaaaa

SEQ ID NO: 4732 - DNA, 627 bp, Homo sapiens
ccatgacatcacgccgtagtggagttggcctggcagtggtcaatggacagctcatggcagtaggaggttttgatggcacaacatacttgaagaccatagaagtttttgatcctgatgccaatacatggaggttatatggcgggatgaattaccgtcggctagggggtggcgtaggagttattaaaatgacacattgtgaatcccatatttggtgaacacagagaagacagtcttgtatatattcctctgtattctggggagctttgaccttggagctttgtacagcttgagaaaacattagaacaaattttattatttgccggtgcctcaacaaatggaaatacaatccaatgaaagtacttcacctgcaagatgcacaataattttcaactctgtgcagaagaatatttatttttggttttaatttatcatggttttttgttgttttcgttttgaacttatccttcctcccacaaaaaaagaaaagaagaaaaaattccaagcagcaaaacttactttgtttgtaaggtattcatttaggtttgaaaatactatttaataagggcagaagggctatatatgatttggctattatttctagacactccatccacatgattccactaa

SEQ ID NO: 4733 - DNA, 410 bp, Homo sapiens
aaaaactatttgtaatgtaattttaatgcattttttacaggcccagtaatggttaaatacgtcagcttactgaataattttaactatttattcttctaaggatacagcttgtctctggattttccagtcttaattttatattttattaatctattttaatgcttgcttttcccatttatagacgttgtagcagtaattgcaagaagttcttgagctgaattcctgttgtgacaacttcctataattacagtagataactttttcttttagtcgtatataacttttctataacttgtgatggacaagagatatgcttatccaataaaataagcttaaatattagatgctcttgggtcaaaatgtccttttaccaaattgacctttttatgagttctttgggtaaatacttt

SEQ ID NO: 4734 - DNA, 516 bp, Homo sapiens
aaagaaggtagataaatttattgccacttgaaaactaaatataactcagatgagtcagacaaaaaaaatcattgacattaaaattattattatttgaccaggtttgtcttttgaagatttctctcacaggcacttctgcaacaaatttgtataatttaatataaatattttgtgattattcttaaaggccaagcaatgggcatttatgatggctaatcataaatacacaataatatatattacatagtatatattaattgacaggttgcattttttctttgagcttatacacttttggaaaaagtctaccttttataaatatcaagttggatattcttgtctgttgcatttgctaaataagagtcaatagttaagaatctgtttcttttatatatgtcggattgtatccatttggaatacagaatcccctgcataaaactagcatgttttgctgaagtacttgttaacttgactctaaaatattttttattttcctaatatatagcatttattttt

SEQ ID NO: 4735 - DNA, 483 bp, Homo sapiens
aaagatattttcttgaattatttagaacatggtaagcctggtattttttaatcaaacaaaatatttatgaaatgggttttctcttaattctggattcatcatggctttctaataccaattgtaatatttacaatattcaccaaaacttagaattttgcaaatgctggaattctgccagtgtttctttgctaagccttgcatgcaaaatttgaaattttaacattggcacccaaaacctacatggaatgtatgtctggagtatttcaaactttacattgaaacataatttccttggaaaacaaaccataagcctgaggaggtttttatcaactggaatgctttatattagtttgtttttcactgtacattcctcattttacattcatttaacctgccgattatttaatttttttattgtaaagtagtttttagcatttgcttttatttttttactttgatgccttttcaaattggcatgtcttt

SEQ ID NO: 4736 - DNA, 376 bp, Homo sapiens
  unsure (91): n=A,T,C or G
  unsure (95): n=A,T,C or G
  unsure (144): n=A,T,C or G
  unsure (192): n=A,T,C or G
  unsure (194): n=A,T,C or G
  unsure (210): n=A,T,C or G
  unsure (216): n=A,T,C or G
  unsure (318): n=A,T,C or G
  unsure (328): n=A,T,C or G
  unsure (332): n=A,T,C or G
  unsure (334): n=A,T,C or G
  unsure (359): n=A,T,C or G
cttttttttttttttttttttttttttttctttttttttacaaacctcaaggttgttttatttaaaccaaataatctgagcaagacatatntacnttaaaaacaaatgaacacattaaaatttcactattttacaattaaattntagcaacatatacaaatactgagtgactacagtacatgccgaggtaananaagtacattctggganaatatnactgacgctcaaaccatttttatttccaatatgtatttcaatacatgtttgtttccacttttcccagtgccacacacacacacacacaaaaacaaaacaaancaaaaaaaancagncncaagttggattacattggaattggngccacagttaacttttt

SEQ ID NO: 4737 - DNA, 222 bp, Homo sapiens
  unsure (79): n=A,T,C or G
  unsure (90): n=A,T,C or G
  unsure (203): n=A,T,C or G
acagaaataaattaaactcttcatcaacaaagacctgtttttgtgactgccttgagttttatcagaattattggcctantaatccttcanaaacaccgtaattctaaataaacctcttcccatacacctttcccccataagatgtgtcttcaacactataaagcatttgtattgtgatttgattaagtatatatttggttgtncccaatgaagagcaaattt

SEQ ID NO: 4738 - DNA, 542 bp, Homo sapiens
aaaaaacaataaaatagtaattggggaaaaaacccttcactctattggtgtctttgtctggaaaactttcccagaatcactaaaattccaggtcaacaggtagtacctgaattattcaagtatactgtaatttgcttccaaatctgttagctgaagagagaaactaaaattttatccaagttaattcagtgcaaatcaaagcttcaagttgaaaatctgagagaaaaaataacgttcgaactgcaggaaatgcttctggaactgaaaaattaaaaaatcacattatgaagaaatctttgcaagtgttcttggtatatgaaatgctgagttaagaaatgggacccttttaagttgcagtgagggttctattatgaagactatttgcaatgtgggcaaaagggaaacagagagggaagagctgaaggttgtatttgtggaaggaaattcaagttaagcaaaaactgcttttattcaattctagaaaaatttggtgagatatatcatacattaggggataaaacagattatggagataaatttac

SEQ ID NO: 4739 - DNA, 417 bp, Homo sapiens
ccattacatcctctttttaatttacataatacagatacttgagaaagttgttgtggtgttgtatgccaagaaaattctttttattggtgcctatattgtaacaattatttttaatgcattgtattttgaagtaacggttcagttaaatttttcacctgctgtgtaactgaaacacaattacagtctataatcatctgtagaagtctggagataattttgcaactcatgttatgggttaaatgaatatttttgtaaaagtaaaagcaacaaatttataaattgattatttgaaactttacaacacaattgcatcccaaatacaaattgtattgcttattcattatagctattcgtcctgtaatctgtttctaggtgaagcatactccagtgttttaggggttttgaaaataaatattt

SEQ ID NO: 4740 - DNA, 355 bp, Homo sapiens
  unsure (11): n=A,T,C or G
  unsure (223): n=A,T,C or G
  unsure (224): n=A,T,C or G
  unsure (242): n=A,T,C or G
  unsure (245): n=A,T,C or G
  unsure (298): n=A,T,C or G
aaaaaaaagtncgagtctgttgcactaggctgtacatgactaaagttgacagatgctatgctagatttataatcactagttctggtacttgtgtctttgtatgatcaaagcatgcaataagcaatacaaaataccaagccttatacttaaaagaagtttaacatattggttaatatactggttaatatactggttaaacatattgaatgtatataagtggcannactagatttttaaggaantgnacattataatattggagctcagtactgcatgaagagacttcattaaaactaanaaaacatttatttggggagaaattttaggcatttaagaacttgtatttttctatttt

SEQ ID NO: 4741 - DNA, 342 bp, Homo sapiens
ccacttgtgtgggtcctcacaagcaaagagagcactaaacttgacattgggagtccaccactccaactttgctttctgaaggttttggtgtacattgagccccagaaggaaaggagagtatctgtgagtgggggcctcccttgaccccagtacgaagtctatgccctgaatccccagagtagcccttcctggtgcccaactggcctggggacaaacagcgtccactacatctaggactgccggctaagtggacacacttcttgacctcctaccaggaactttggtaaaagctagctttggggaaggggttgggtgtaaatatgagagggtggagggagacca

SEQ ID NO: 4742 - DNA, 236 bp, Homo sapiens; identical to SEQ ID NO: 3153

SEQ ID NO: 4743 - DNA, 303 bp, Homo sapiens
aaaaacaggacttgtcactttatataaaagaatagtatgctctatttcctgaatggatgtggaaatgaaagctagcgcacctgcactttgaattcttgcttcttttttattactgttatgattttgctttttacagatgttggacgattttttcttctgattgttgaattcataatcatggtctcatttcctttgcttctttggaatatttctttcaacacattcctttattttattatacattgtgtcctttttttagctattgctgctgttgttttttattctatttacaggatgattttt

SEQ ID NO: 4744 - DNA, 596 bp, Homo sapiens
  unsure (382): n=A,T,C or G
  unsure (526): n=A,T,C or G
  unsure (568): n=A,T,C or G
aaaaaataagtatacttgctagtactatcttcactcttttttttttcagaagccaatgttctctaaatctgcagcttcattccacagctttacagaatcataatctcttgaatatatttccaatgttattaaaaaataaaaaatcatacaagatatatttagcacattaaaacttaagaggttacagtataactgtccagacctccaggtaccactgaatacttttccagtacaaagaggccaatatgttagaataattaattctctgtatttacttttattaaaaagaggtttttggtagtaagaacaaataatctctcatttgttgcctgaaatcctaaaataggatcattggtttctaggcttgctacttgctgcttancaacctgtcctacttgcctgccttcctttctgttgtaaagtacagtggacatgggagcaggctgacgatagatgaatactcgacgaaggcactcacaaagggctgcatacgagtaatttggagcacaggcaaaaaattttttgnctctctttgatgcttggacatagcctaaagcattgaaaggtngcgatgtgctcccacatatcatcttgtt

SEQ ID NO: 4745 - DNA, 228 bp, Homo sapiens; identical to SEQ ID NO: 3151

SEQ ID NO: 4746 - DNA, 328 bp, Homo sapiens; identical to SEQ ID NO: 2874

SEQ ID NO: 4747 - DNA, 491 bp, Homo sapiens
aaaatagctttaaatgcattcttcacaagtaattcagcatatatttttatatcatgtttacttatgcttaagaattaaagcaagtatatttattactctgatggaaatatgggaaatctctcattcatgcaatatacagggataatattcaagcgaagggaaaattcccgctttttatttttgtaaatgtatccatatataatcatcgacatgacagatgaggaaacccatgaagtttcccactagtcagatatacattttcacttcatcagaagcacctgatatctacagctaatttataattagatactgtttcaatgaaaccaaaatgagccctacaagttcctataaacaaaagcttccaatgtactaggacagtcagtaattaatgcatcattcagaggattatggctgttccttaagaagtgcaagttcaaacctgtcaacaccagaggtaatcattttatattaatttatacgtaataccattt

SEQ ID NO: 4748 - DNA, 196 bp, Homo sapiens
  unsure (184): n=A,T,C or G
aaaatggttgaaaagaattcaaagaataataatattttgggacatgttaaaattatgtgaaattcaaatttcagcatccataaataaagttttattgaaacacagccaaaaaaaaaaaaaaaaaaaaaaaaaaaaaaaaaaaaaaaaaaaaaaaaaaaaaaaaaaaaaaaaaaaaaaaaaaacnaaaaaaaaaaag

SEQ ID NO: 4749 - DNA, 594 bp, Homo sapiens
  unsure (483): n=A,T,C or G
  unsure (536): n=A,T,C or G
  unsure (584): n=A,T,C or G
ctgctgacagttctttggtggaaaagtaagttgcgtacttacccaagctgcccaaatgattatcaagccaagtttgtttttcaaaaataggttttaagatacaccaaagaaactatacaatacaaaaatttaacaatgaagttaaagtatatagcaaaagccaaatatgacaacacacatgtataatgtagaaaagaatcctttcagtcctagaaaactaaaatggggagaacttactgaagggtaacatacataaaatgagtactaatagcaaggaataatcctaaacattttcccaataaactgactaagcctcaaaaggacagcttaggaaaatgattaacatgcagtttttcttttttcctagccaattcagttctacttagataaatctggttgccaatcaatacatatataaattaatttttttctgctcaattactaccattttttctttttcaccttttccccaattttctctancaacacttttcctttggtttgatcagttgaactcaaaaggtttggtacctaanatgagtatcaactgttattgcaatagcacttgggaaatgcaatcctanaaaggcgaat

SEQ ID NO: 4750 - DNA, 625 bp, Homo sapiens
  unsure (621): n=A,T,C or G
ctggggagatggtgtttgtatatgaaaatgcaaaagaaggagctcggaatataagaacgtcagaacgagtgacactaatagtggataacactagatttgttgtagacccatccatttttactgcacagccaaatacaatgttgggcaggatgtttggatctggccgagaacataactttacacgacccaatgagaaaggagagtatgaggtggcagagggaattggttccactgtgtttcgagcgattctggattactataaaacaggaataatccgttgtcctgatggcatatctattcctgaactgagagaagcatgtgactatctttgtatctcttttgaatatagcactattaaatgtagagatctcagtgccctaatgcatgagttatcaaatgatggtgctcgtagacaatttgaattttatctggaagaaatgatcctccctctcatggtagctagtgcccagagtggggaacgggaatgtcatatagtggtgcttacagatgatgatgtggttgattgggatgaagaatatccaccacagatgggagaagaatattcacaaattatttatagcacaaaattatatagatttttcaagtatattgaaaacaganatgt

SEQ ID NO: 4751 - DNA, 414 bp, Homo sapiens; identical to SEQ ID NO: 3146

SEQ ID NO: 4752 - DNA, 373 bp, Homo sapiens
aaagtttatttcctttgtggatacaacattatttttacaaaaatgcaaattgggaggaaaaactaaggctagagaatatatcttctacttcttggcaaagcatgtttactattggtcaatgttattatttgactctatattgccaaagggataatcggggagaaggtcataggaattttcatccttctttaatagcagacattaaagatgtctcctattataaggagttatgtgaggtcagctaaaactaattatttgaggtcatacaaatgactcaaaattcttagagaaaccatgggtttggagaggaatcctcatatatatttcagaagaggagaaaaaataagatagaaataagatcttgtattttttt

SEQ ID NO: 4753 - DNA, 368 bp, Homo sapiens
aaaagatttacatgttcatatacaatttataaagttaaaaattctctgtacaaaatcttacatgtacagagtttatataagccccattcttatggctgtatcaccacacagatttgcttaaaactataatactacaaacactcgggttcttcatattcaatcttggcacccatatagcaatacactattctgaaatgtaaattacaaaggaaataaaatgtaatcatgcagacattttttaatataagaaaatgcgataaaatatactacaccagatcaacatttatcaattccatagatactgagttttcaacttactgcactgttttcatataagtacatgcaaaactagcagattatggattttt

SEQ ID NO: 4754 - DNA, 356 bp, Homo sapiens
ctggtgttcagcctctcaacagcaaaccatgagactacataactatcaggttttcacttcactttcttctcttctgtctaaataatcacaatgcctttaggcttataaaaagcatctaatcattacagtgtcttatcctttttaatgttctttccttttattaaactgtggcaagactgaatgtttaggaaaggtagcaatgttttggaggtaattttatttttgtataaatttatgattagaatattaagtcattgattgttaaagtaattatctaaatagaagatgttggattacaaaagaaaatgggagttaacatgattgcatgtcaaaatgtgggaaattgctggagttgg

SEQ ID NO: 4755 - DNA, 548 bp, Homo sapiens
  unsure (324): n=A,T,C or G
  unsure (409): n=A,T,C or G
  unsure (496): n=A,T,C or G
aaatggaaagttactattataaggttaatttgcagtcctcttctaaatagaaaaccatatccttggctactaacatctggagactgtgagctccttcccattccccttcctggtactgtggagtcagattggcatgaaaccactaacttcattctagaatcattgtagccataagttgtgtgctttttattaatcatgccaaacataatgtaactgggcagagaatggtcctaaccaaggtacctatgaaaagcgctagctatcatgtgtagtagatgcatcattttggctcttcttacatttgtaaaaatgtacagattaggncatcttaattcatattagtgacacggaacagcacctccactatttgtatgttcaaataagctttcagactaatagcttttttggngtctaaaatgtaagcaaaaaattcctgctgaaacattccagtcctttcatttagtataaaagaaatactgaacaagccagtgggatngaattgaaagaactaatcatgaggactctgtcctgacacaggtcctcaaagc

SEQ ID NO: 4756 - DNA, 385 bp, Homo sapiens; identical to SEQ ID NO: 3139

SEQ ID NO: 4757 - DNA, 547 bp, Homo sapiens
  unsure (521): n=A,T,C or G
gtcgatttgggaggaaaggtgtggctataaactttgttactgaagaagacaagaggattcttcgtgacattgagactttctacaatactacagtggaggagatgcccatgaatgtggctgaccttatttaattcctgggatgagagttttggatgcagtgctcgctgttgctgaataggcgatcacaacgtgcattgtgcttctttctttgggaatatttgaatcttgtctcaatgctcataacggatcagaaatacagattttgatagcaaagcgacgttagtcgtgagctcttgtgaggaaagtcattggctttatcctctttagagttagactgttggggtgggtataaaagatggggtctgtaaaatctttctttcttagaaatttatttcctagttctgtagaaatggttgtattagatgttctctatcatttaataatatacttgtggactaaaagatataagtgctgtataaaatcagccaattatgttaaactagcatatctgcctttattgngtttgtcattagcctgagtagaaagg

SEQ ID NO: 4758 - DNA, 268 bp, Homo sapiens; identical to SEQ ID NO: 3137

SEQ ID NO: 4759 - DNA, 283 bp, Homo sapiens
aaaccaatccaatatacagacctttgaaagtaaaagatcaactgcacagatattttttaactaaagaatgtgtcagtaaatctatgtaaatatccaaattgacacaaattttctaaagagttaaaattattaaatttcaaattattattttatatacttttgatcaaaatataatatttgcttcaccataagttgaagatattaagaaaacataatctaaggtttattacaaaaaataatggcctctgatagatatacagagaataatatattcttaaatttt

SEQ ID NO: 4760 - DNA, 592 bp, Homo sapiens
  unsure (526): n=A,T,C or G
aaaaatccatgttcaacccaaacccactccccaaccctaactataggagatgaccctttaggaagctgaaaaggtttttataaagtcacaaaatgcatctcaatgcaagtttatataatatcaaaattatctcactgattttaatgtgtaagttatataatttatttcacccaccttgtattattctagaaaataagtcagcttttatatttaacaaatatgtgcaaaaatcataaacatagcttatagaaatataaacagatatctaattacaaagtttccgatctacttcgctaaaaggcccaagtcccctttttcttttatttataactttattttaagcagtctctccctgtcaaacttacctgtatgttttcgagaatgagtgataagagaactagagacagcaaatgccttcccacaggtatcacatacataaggcttttctccagtatacctacggacatgataggtcagtgtgctggcttgagcaaatctctgtccacacctatcacagacatatggnttctctccactatgcttccttgcatgaatcttgagattgctagaagttgcaaactgtaagttgcat

SEQ ID NO: 4761 - DNA, 139 bp, Homo sapiens
  unsure (126): n=A,T,C or G
  unsure (128): n=A,T,C or G
aaaactcttctaactgccatagcaccagcctccacaaaatacttcagacacatatcatcaattccaccagtggttagaataacattggcaccagctttttttttttttttttttttttttttttcngnggaaatttttt

SEQ ID NO: 4762 - DNA, 181 bp, Homo sapiens; identical to SEQ ID NO: 3134

SEQ ID NO: 4763 - DNA, 408 bp, Homo sapiens
  unsure (283): n=A,T,C or G
ctttcccagaattagttgtatagggttggcccaagagatgtaagaaaaatctcgcattgctccctaagcaccctgggccttattaaagagcaacttctatttccagtcgggggagtaacactaaagctacaagaaatatgtaataatgataggtaataatgtgttccaaagctttttcaaactagaataaggaggcaaatagaagaatgagatactgatgtccacagttcattggcagaatctaaccccttctgttatcttttttaatactatttttgtttanatagaagtttcaaagaagataaaaatgcttgaagagcctgagagtaaaaagattatgctgcaaagctatgatataaactgctcttgcagtccaaagggatacctgattaaagaagtttcttattt

SEQ ID NO: 4764 - DNA, 330 bp, Homo sapiens
  unsure (35): n=A,T,C or G
  unsure (44): n=A,T,C or G
  unsure (63): n=A,T,C or G
  unsure (134): n=A,T,C or G
  unsure (138): n=A,T,C or G
  unsure (178): n=A,T,C or G
  unsure (231): n=A,T,C or G
  unsure (241): n=A,T,C or G
  unsure (281): n=A,T,C or G
  unsure (307): n=A,T,C or G
  unsure (317): n=A,T,C or G
ttttttttttttttttttttttttttttacaagcnccaaactanaaccaaatttatttatcanaattattgagttggatgaaacagaaaataagccaacagaacacttaaaaatacaagtttattttctccatnttgntaagtctaattatgatttatttcaaaatcatgaaaagcanagcctagcataccaaatgctaggtcaaatttgctctggaaacttactttctanattatttttnggacttacttaaaaaataattaatttccattaatatagcnctaatagcctccaaattatactgcanaattcctatntgtaacctttttt

SEQ ID NO: 4765 - DNA, 336 bp, Homo sapiens
  unsure (11): n=A,T,C or G
ctgctatctancaagaaaaccaaggtcccttaatatagtctaaatataatgtgtggcttattatagagaaatctttagcaacgtaagtttaaccagtaagtgtcacaactgatcaacagtacttaaaaggaaacaaacaaaaatcacactagccacaaatttccaccatatacacatgaaattaattttaatctgttttgactccttgacactaactgatcattaatgaaatatgatatggaaagatcacagagtagaaaacaagcaaagattagtttatacaacagtgactatatacatcagagggaaaacatgctagctaatgcaacattaagg

SEQ ID NO: 4766 - DNA, 524 bp, Homo sapiens
  unsure (505): n=A,T,C or G
aaatttgaggtggtcttaagaataacaaatgaacagaattccaaatttttgaaataggtgaactgctgcagttacgggtatacatttaggaaaactgtatagctcttacaagaccagcaatgtaactttattttgtacatttttgaattgaaaatataaacaataattaaaaaataaaaagaaaatacagcataataaaaaacatacgcttctcaattaaatgtactggatacatataaattttaagggaagaagcaaaaaaggaaaatgattgatatttaagtgcagactgactacctagacaaaaaaaaaaagacttaaaaaaatatcataaaacctctagttcttctatgactaatatccatatggttggagtatcgtcactatggaagtgattttgttatgtttgcatatgttacactttactggtaatttacatgatggcttttaaggccctgggagacatggtttttggaaacaagattggataaaaatcactgctaanacgcaatacaccttatttt

SEQ ID NO: 4767 - DNA, 238 bp, Homo sapiens
gctgttttaagttagaaaactgaatagcaacactgaatactgtagaaatgcactttgctcagtaatacttgagttgttgcaatatttgattatccatttggttgttacagaaaaattcttaactgtaattgatggttgttgccgtaatagtatattgcctgtatttctacctctagtaatgggctttatgtgctagattttaatatccttgagcctgggcaagtgcacaagtcttttt

SEQ ID NO: 4768 - DNA, 431 bp, Homo sapiens
ttaaatgctatgtgttaatatttcacttgcttgtattagaaaggcaaaatgtaagactttggtatgtgtgacatatgctttatttggctttattttacaagcacagtatctgcaaaaaacaaagtaaccttttttcatacctgccagttttgaatttatatatgttattgaacaaatagtaatagaggattcgctgttgaaacaagttgtccaagcaatgttatattcatttttatacttattgggaaagtgtgagttaatattggacacattttatcctgatccacagtggagttttagtaattatattttgttgatttcttcattttgttttctggtataaaagtagagataatgtgtagtcacttctgatttagtgaaaccaattgtaataattgtggaaatgttttgtctttaagtgtaaatatttt

SEQ ID NO: 4769 - DNA, 623 bp, Homo sapiens
cggagagactcaagatgattccctttttacccatgttttctctactattgctgcttattgttaaccctataaacgccaacaatcattatgacaagatcttggctcatagtcgtatcaggggtcgggaccaaggcccaaatgtctgtgcccttcaacagattttgggcaccaaaaagaaatacttcagcacttgtaagaactggtataaaaagtccatctgtggacagaaaacgactgtgttatatgaatgttgccctggttatatgagaatggaaggaatgaaaggctgcccagcagttttgcccattgaccatgtttatggcactctgggcatcgtgggagccaccacaacgcagcgctattctgacgcctcaaaactgagggaggagatcgagggaaagggatccttcacttactttgcaccgagtaatgaggcttgggacaacttggattctgatatccgtagaggtttggagagcaacgtgaatgttgaattactgaatgctttacatagtcacatgattaataagagaatgttgaccaaggacttaaaaaatggcatgattattccttcaatgtataacaatttggggcttttcattaaccattatcctaatggggtt

SEQ ID NO: 4770 - DNA, 410 bp, Homo sapiens
aaagtatttacccaaagaactcataaaaaggtcaatttggtaaaaggacattttgacccaagagcatctaatatttaagcttattttattggataagcatatctcttgtccatcacaagttatagaaaagttatatacgactaaaagaaaaagttatctactgtaattataggaagttgtcacaacaggaattcagctcaagaacttcttgcaattactgctacaacgtctataaatgggaaaagcaagcattaaaatagattaataaaatataaaattaagactggaaaatccagagacaagctgtatccttagaagaataaatagttaaaattattcagtaagctgacgtatttaaccattactgggcctgtaaaaaatgcattaaaattacattacaaatagttttt

SEQ ID NO: 4771 - DNA, 481 bp, Homo sapiens
ctgtagaaagagcgagagagatggttaaaatgccattaaggaaagctccttgtttagaatctttaagatagagctatatgtaaccatcactattcagccatttttgacctacaaaaatggtcacttcatatggtccaacacatttggtgagaatccttaagaagtggagggcttttcctttgggcaataatttagaggtgatcccaaacctagaaatctaataatatatctagattcttctctcacctcttctacttctactctttctactttgaaagattttcaaagtagaacacctgtcacagaacggatgtaagttaattttcatagaggagtccctctatttcatagaggaatttgtgtatatacccaacttttaataaatgaggccacagttaatcatttatatttctggaatgacttgctacttctctaattctcattcgtccttactagggagtgtgtcctaacaatttggttt

SEQ ID NO: 4772 - DNA, 596 bp, Homo sapiens
  unsure (583): n=A,T,C or G
aaaggttttgtatgtgtgtatgtatgtgtaaatagcaataaaagaaagattcaaaagtttgctaagttttttctttttaagccctttaagtaatgatataactagaaactacgtttcatctcaaaggaaaaaccacaggtgatatattctcatgcttcaggttaaaaacctctcttaaaaggctaggtttgcgaaagccttcctaaaattatgcttctgttgttactatcaatttgatattcagccagaaaaattaaaaataattattaatcccaaagcatactttcaaaatttctactaagaattatattaaatcaaaccaaactacaattttagagagatcaaactgagtaggagagagcatggtatgaaaatttactctccctttcatctaagccacacactataggtctcaataactatacaattactcttgtaattgactgatttctttacacctaaggatcattataacctgccatattagtttaatttaacataaaatcgtaatacagaaatttggtcacagtaggggatatctagatttcttctgcattgaaaagaatggtttccatttatctgngtttacaaaaaat

SEQ ID NO: 4773 - DNA, 386 bp, Homo sapiens
cgggaacagcaagcacaattctgtactttggttataccatgataatggttttgatcttctttctttttacaggaacaattggcttctttgcatgcttttggtttgttaccaaaatatacagtgtggtgaaggttgactgaagaagtccagtgtgtccagttaaaacagaaataaattaaactcttcatcaacaaagacctgtttttgtgactgccttgagttttatcagaattattggcctagtaatccttcagaaacaccgtaattctaaataaacctcttcccatacacctttcccccataagatgtgtcttcaacactataaagcatttgtattgtgatttgattaagtatatatttggttgttctcaatgaagagcaaattt

SEQ ID NO: 4774 - DNA, 497 bp, Homo sapiens
gtcaccttcgtgaataccaagacctgctcaatgttaagatggcccttgacattgagattgccacctacaggaagctgctggaaggcgaggagagcaggatttctctgcctcttccaaacttttcctccctgaacctgagggaaactaatctggattcactccctctggttgatacccactcaaaaaggacacttctgattaagacggttgaaactagagatggacaggttatcaacgaaacttctcagcatcacgatgaccttgaataaaaattgcacacactcagtgcagcaatatattaccagcaagaataaaaaagaaatccatatcttaaagaaacagctttcaagtgcctttctgcagtttttcaggagcgcaagatagatttggaataggaataagctctagttcttaacaaccgacactcctacaagatttagaaaaaagtttacaacataatctagtttacagaaaaatcttgtgctagaatacttttt

SEQ ID NO: 4775 - DNA, 539 bp, Homo sapiens
aaaatactggcactttaagaaaacgataatctcgaaaaccacaaaattgccaaattgttccctaaactcctaagcagataaacatgactaatgaatgagtttgttttgtaaagaaaaatcattcaaataaattgaataattcatactgagatgcaaagtttgtcttctttcttcctatctacttggatttataaaggggcaaaccgtaatataggaaaatataccctattttgaatgtggcatctttgtttgaaaagctggcccaattaattaaaaatacttgtaatggaaagtctcgtttcctgagcagtccatatttagataaatgggaaaagacatctatagccagcattttcatagtcttcactgagactaatgtcaacaaaaaatttaatgtggcagtcttgtattttaagctcacgcttttggggatacattctcaggtcttctttaatgtgggaactgcaaaatataactgccattacatggtaatgggagttaaagaatagagtcctcatgtaaaggttagaacatacttt

SEQ ID NO: 4776 - DNA, 544 bp, Homo sapiens
  unsure (513): n=A,T,C or G
ccagaggtagccggagtgtgtcacagcccctcagatgcctttccttccacctttttttattttttaagaatcccaaataactcactgaagtgtctcaaaggcgaacaagttttaccaaaatgaatcctttttcagttaacagatcaaatggatgagttctgagcctctcaagttcctttccccagttagagtggggaactgggcaagtgttaactgtgggactcactgcagcgtcctatcctaaaggcacgagaagacggaaatgcaacctgcggagctgggcttggttcccaggtcacagtttggcccccgctacaggatgctgccctgctcagagagagatttaatagggagctgaaggaatcgttagggggccagggagatgtgactgaggctggctttccacgtgaatgagacggggtcggtggagggtttggtgctacagccagtcagaagatttgcaaatgcgaacacattcctgtgtgaggcatgttaccctttgtcagttattgngaatatgtgtattttaagcaataagattcag

SEQ ID NO: 4777 - DNA, 585 bp, Homo sapiens; identical to SEQ ID NO: 207

SEQ ID NO: 4778 - DNA, 253 bp, Homo sapiens
ctgaagcccgaggcagggttggtgtgatgccaaggcaaagtggtgaggagaaaacaggaaacgggctttctctgaattggtaaatgggaaagaagtgagcaacttaagattgtcacaattaatcacaagtgtacaggattagactgggtttatatttaactcttgcttcataggtgtaccatttaaagagtgttatttaatgctaagtttaactgctttaataaagtttatttttaaatatcttaaaaaaaaa

SEQ ID NO: 4779 - DNA, 144 bp, Homo sapiens
aaatatcggccaccactttcatgaggctgaatgggattcagcaattaggagcgttgcagggaagtgtggcagggcagaggtgggacaaattgcagatccctgtggggtcccttggttaggtgacaattagtctataaaacacag

SEQ ID NO: 4780 - DNA, 173 bp, Homo sapiens
ctgtggaggggacactgtctttgaggcatcactggttccacaaaaggtaggggaaggtcttgagggaccaccccatgccctcattaatcaaccagaagcttggcccggagcagcagcggggattccagtagctgtgggcatacaggatgctagggcggccacaacccaggcag

SEQ ID NO: 4781 - DNA, 534 bp, Homo sapiens
  unsure (211): n=A,T,C or G
  unsure (311): n=A,T,C or G
  unsure (402): n=A,T,C or G
  unsure (406): n=A,T,C or G
  unsure (480): n=A,T,C or G
  unsure (482): n=A,T,C or G
  unsure (503): n=A,T,C or G
  unsure (505): n=A,T,C or G
  unsure (507): n=A,T,C or G
  unsure (522): n=A,T,C or G
  unsure (525): n=A,T,C or G
aaaacaaatacaagttattgattcactcttctcaacttgacagtctacctgtggtataactgtcaggtaaaaacatacatctttacaacttggtggtcccaagttaaaaaaaaaaaaaaaaaccaacaacaaaaaaaaaaacaccatttcacagacaggaaataaacaacatgaaaacagctcaagaaatacactaacgagcaaaaatatntgaatatatggggaaagaggaacgtgttgttttgacttaactgaagaaaccaagaggaaactggtctacgtatgaaaatgtgcatcctggaaagtcaggngtcaagattttcgagtagggatctatatgacttgaatctccccctatttcctgaataaaagtgacatctttcagtatttatacttcatggntcanacacctacctcatttggctctattccttactcactctagcctttacttaaatgagtctgaaaaacttggggatntngcataagaagaaaaataatcncncntaatattcccctttntgnagctacttt

SEQ ID NO: 4782 - DNA, 463 bp, Homo sapiens
ccacggtgttccttatgttataaatgtcactctgcccgatgaaaagcaaaactacgtacatcgaattggcagagtaggaagagctgaaaggatgggtctggcaatttccctggtggcaacagaaaaagaaaaggtttggtaccatgtatgtagcagccgtggaaaagggtgttataacacaagactcaaggaagatggaggctgtaccatatggtacaacgagatgcagttactatctgagatagaagaacacctgaactgtaccatttctcaggttgagccggatataaaggtaccagtggatgaatttgatgggaaagttacctacggtcagaaaagggctgctggtggtggaagctataaaggccatgtggatattttggcacctactgttcaagagttggctgcccttgaaaaggaggcgcagacatctttcctgcatcttggctaccttcctaaccag

SEQ ID NO: 4783 - DNA, 106 bp, Homo sapiens
ctgtttgtgtatggggactgtgacggaaacagcaataattacctgaccaaggaggagtgcctcaagaaatgtgccactgtcacagagaatgccacgggtgacctgg

SEQ ID NO: 4784 - DNA, 386 bp, Homo sapiens
cagtgcctcagttgctgatcagtgtgttttttgtgtccaattcttttatcaccaaaaaagagaagaaatattgcagtgaatgaagattcctctgcattttagcactgctttttcaactgtagttggcttttgaatgaggatgacaatggaagagatgaagaatgaagctgagaccacatccatggtttctatgcccctctatgcagtcatgtatcctgtgtttaatgagctagaacgagtaaatctgtctgcagcccagacactgagagccgctttcatcaaggctgaaaaagaaaatccaggtctcacacaagacatcattatgaaaattttagagaaaaaaagcgtggaagttaacttcacggagtcccttcttcgtatggcag

SEQ ID NO: 4785 - DNA, 213 bp, Homo sapiens
ctgtacatatgtggataagctgattaatggttttgcaactgtaatagtagctgtatcgttctaatgcagacattggatttggtgactgtctcattgtgccatgaggtaaatgtaatgtttcaggcattctgcttgcaaaaaaatctatcatgtgcttttctagatgtctctggttctatagtgcaaatgcttttattagccaataggaatttt

SEQ ID NO: 4786 - DNA, 393 bp, Homo sapiens
  unsure (110): n=A,T,C or G
  unsure (133): n=A,T,C or G
  unsure (202): n=A,T,C or G
  unsure (220): n=A,T,C or G
  unsure (224): n=A,T,C or G
  unsure (230): n=A,T,C or G
  unsure (240): n=A,T,C or G
cctgtccctgcagacatgagagacagcaggtctcatgggggtgacaagcttttttttttttttcttaaagaattttcaaaatcaaattccagaatgattttacggagatntcccaggaaaattaaggcttctnttaaacactaaaaaggcatgtaattgcttgttagcaaaatggatatgacacatctctgatacttttttnattattggttgggctgancagncaaaanacctggtcgncgtcttgactttggcaaatgagccggagccccttgggcaggtcacacaacctgtcccagcgagggacaccgagtggcccttcatgtacatccatggtgtgctggcttaaaatgtaattaatcttgtaaatatactcctagtaatttaagattt

SEQ ID NO: 4787 - DNA, 244 bp, Homo sapiens
  unsure (10): n=A,T,C or G
aaacacaaantagatatagatgctaatggtggctaatctggtatgtttcttatagcaaactgttgttcatgcaacacttgtgctcaaaggggaaggcacaggatttcctacaatgagccaccttataaagagttctttttgtacaaattaatttatgtcacatttaatttagtgtgcataacctcaaaactgaggtactattccaatttataaaaaccacttgcataacttttatgcaagtttt

SEQ ID NO: 4788 - DNA, 358 bp, Homo sapiens
agaagagtcaagggcacgagcatcggccatgcctttcttggacatccagaaaaggttcggccttaacatagatcgatggttgacaatccagagtggtgaacagccctacaagatggctggtcgatgccatgcttttgaaaaagaatggatagaatgtgcacatggaatcggttatactcggacagagaaagagtgcaagatagaatatgatgatttcgtagagtgtttgcttcggcagaaaacgatgagacgtgcaggtaccatcaggaagcagcgggataagctgataaaggaaggaaagtacacccctccacctcaccacattggcaagggggagcctcggccctgaacagagcag

SEQ ID NO: 4789 - DNA, 452 bp, Homo sapiens
cctatctggttggcctttttgaagacaccaacctgtgtgctatccatgccaaacgtgtaacaattatgccaaaagacatccagctagcacgccgcatacgtggagaacgtgcttaagaatccactatgatgggaaacattccattctcaaaaaaaaaaaaaaatttctcttcttcctgttattggtagttctgaacgttagatattttttttccatggggtcaaaaggtacctaagtatatgattgcgagtggaaaaataggggacagaaatcaggtattggcagtttttccattttcatttgtgtgtgaatttttaatataaatgcggagacgtaaagcattaatgcaagttaaaatgtttcagtgaacaagtttcagcggttcaactttataataattataaataaacctgttaaatttttctggacaatgccagcatttggattttttt

SEQ ID NO: 4790 - DNA, 548 bp, Homo sapiens
  unsure (458): n=A,T,C or G
  unsure (488): n=A,T,C or G
  unsure (493): n=A,T,C or G
  unsure (510): n=A,T,C or G
ctggtagtgtttcggatcttcagggaatagggcctttcattgggggcgtcgaaagaaccattttgccccttctgatgatagtgctgtcccctgaggtggtcttcctggggtgtctccatcctctcttcaccaccctccaataactgtgaagaaggaatcagagcgcatcacggtccactgcaagcactccaactcgacaccaatgtttccattttgttttcagaagatccagcctcaacttatgtttgtaaaacaagacgtgatgcttttgtgtgtgtgtgacctctgggggaggaaagatctatgaaaattcccaaggctacatcttcggaatatatcaggactacatctcatgattctatcataagtatcccaatttccaccctatattagggagagagagtcactgttgatgacagtgatatgctgtgtgtgaatcttgctggattatattttgngtctatgtatacatgtatagataggactgntctgnattaaatgttctcttgntttcttcagataccaactcacccactgaatgattccta

SEQ ID NO: 4791 - DNA, 237 bp, Homo sapiens
  unsure (18): n=A,T,C or G
ccttcccatcagcacagntcgtgaggtggctttactgaggcgactggaggcttttgagcatcccaatgttgtccggctgatggacgtctgtgccacatcccgaactgaccgggagatcaaggtaaccctggtgtttgagcatgtagaccaggacctaaggacatatctggacaaggcacccccaccaggcttgccagccgaaacgatcaaggatctgatgcgccagtttctaagagg

SEQ ID NO: 4792 - DNA, 224 bp, Homo sapiens
aaaatgaatcaattttattccaattcttcaaaatttatacgtaatatgttgtttccaaaatgtaagtcaccctttatataatagttttattatttcatctttctttgatagttttttttttcatcttttctttatggttcttcagtagaagccagaatcttgagttgcccagttaggagcctctgacctgctattctgattaagtttcttctcaatattcatgg

SEQ ID NO: 4793 - DNA, 623 bp, Homo sapiens
  unsure (514): n=A,T,C or G
  unsure (530): n=A,T,C or G
  unsure (553): n=A,T,C or G
  unsure (591): n=A,T,C or G
  unsure (599): n=A,T,C or G
aaactagtaatagaattttctgaagaatatccaaataaaccaccaactgttaggtttttatccaaaatgtttcatccaaatgtgtatgctgatggtagcatatgtttagatatccttcagaatcgatggagtccaacatatgatgtatcttctatcttaacatcaattcagtctctgctggatgaaccgaatcctaacagtccagccaatagccaggcagcacagctttatcaggaaagcaaacgagaatatgagaaaagagtttcggccattgttgaacaaagctggaatgattcataatagacaactggtctgttaatctttttcatcattgttgtgtataatttacctctcattagaaaggctaacaaattttaagtgccacaggttttaaggattctgcagaaaaaaaagaaaaaagtccttcagtttagaacctacaaaagcttgtgtatcttgattaatgtactttttattgcatggtgtgaactaagttattgctgcataaatttgnaatatatcctgtttgnatttttttccaagtgtataatgntggtgtggagttttcatgacagaatatacacattttgnaaatctgnacttttttcaaatattgaatgcct

SEQ ID NO: 4794 - DNA, 201 bp, Homo sapiens
aaagaacttgcatgttggtgaaggaagaagtggggtggaagaagtggggtgggacgacagtgaaatctagagtaaaaccaagctggcccaaggtgtcctgcaggctgtaatgcagtttaatcagagtgccatttttttttttgttcaaatgattttaattattggaatgcacaatttttttaatatgcaaataaaaagttt

SEQ ID NO: 4795 - DNA, 507 bp, Homo sapiens
tgagaatggaaggaatgaaaggctgcccagcagttttgcccattgaccatgtttatggcactctgggcatcgtgggagccaccacaacgcagcgctattctgacgcctcaaaactgagggaggagatcgagggaaagggatccttcacttactttgcaccgagtaatgaggcttgggacaacttggattctgatatccgtagaggtttggagagcaacgtgaatgttgaattactgaatgctttacatagtcacatgattaataagagaatgttgaccaaggacttaaaaaatggcatgattattccttcaatgtataacaatttggggcttttcattaaccattatcctaatggggttgtcactgttaattgtgctcgaatcatccatgggaaccagattgcaacaaatggtgttgtccatgtcattgaccgtgtgcttacacaaattggtacctcaattcaagacttcattgaagcagaagatgacctttcatcttttagagcag

SEQ ID NO: 4796 - DNA, 509 bp, Homo sapiens
ctgcatcttgtccacgggagagaagtagtgcatgccaatcaccttctcaggtcttttgctgacagcagcgatttcactgattgggagagcagatgtgttactggcaaagatacagtgatctggaatcaccgcttctacttcctttagcactctgtgtttaagactaaggtcctcaaacacagcttcaatcaccatgtcggccttttcaaaaccttggtaatcaagctgcccagtcaagttgctgaagatggaatccctttcaaatgatgttagagctttcttcttcactttgtcattcaatcctttgaacacttgttgctgtcctcggtctagcgcagtgagggtggcatctttaagtatagtctttagccccttatccacggagacttgggcgatgcctgctcccatcagccctgcaccaagaatagccagatgcttaacatccttctgtggagctccaaatttattcttcttgcacaggacctgaccatggtagagtcccatcaagg

SEQ ID NO: 4797 - DNA, 374 bp, Homo sapiens
ttttaacaagaagcagtttattacacaaaacgaaacctgagataatagaaaataacacttgcagtaataaaggaagcagccttgcactccacctccacactccagagtataattaaaagactcctatcagacatttctatcaccaataatgccaacctctgtatacagcagcaggctgggccccaaatcagaagattcatgttgcttgctttctctatagggaaagtgaagctttcggtaagtatcatgtggctattcctggttctactttcccttgtggaaatgtaatacctggtttacactgctcttttgtgagtacgtatatggtgataggaataaaggagaaagtctggaaagcaccaagcacaaagcag

SEQ ID NO: 4798 - DNA, 251 bp, Homo sapiens
  unsure (82): n=A,T,C or G
ccatcttacctgcttatgtctcctacacaaagctaaatattctagcagtgatgtaatgaaaaattacatcttactgttgatntatgtatgctctggtacacagatgtcattttgttgtcacagcactacagtgaaatacacaaaaaatgaaattcatataatgacttaaatgtattatatgttagaattgacaacataaactacttttgctttgaaatgatgtatgcttcagtaaaatcatattcaaattt

SEQ ID NO: 4799 - DNA, 354 bp, Homo sapiens
  unsure (79): n=A,T,C or G
  unsure (118): n=A,T,C or G
  unsure (159): n=A,T,C or G
  unsure (163): n=A,T,C or G
  unsure (165): n=A,T,C or G
  unsure (208): n=A,T,C or G
  unsure (212): n=A,T,C or G
  unsure (219): n=A,T,C or G
  unsure (228): n=A,T,C or G
  unsure (246): n=A,T,C or G
  unsure (284): n=A,T,C or G
  unsure (337): n=A,T,C or G
  unsure (347): n=A,T,C or G
gtacaagctttttttttttttttttttttttttttttctttttaggattgaataacaaggctttaatggctcaattttnttatgattatacaaacatataaatcttgaaaaggtaacnccatttagtaaaatccataaaaataacagttttgccacagngcananaaaagttcattcagtttgattccccatgccctcgacaagcagntttntgattanagctggaanacacaggctgggtacagnggcgaccccgtagtcccagctactggggaggctgaggnggaaggatcacttgagcccaggagtttccgaacagtctgggcaacataccaanaccctgtctnttttttt

SEQ ID NO: 4800 - DNA, 529 bp, Homo sapiens
ctggaagaactgagagatgacctggagctctactataaacttcttaaaacagccatggtcgaactcatcaacaaggattatgcagattttgtcaatctttcaacaaacttggttggcatggacaaagccctcaaccagctttctgtgcctttgggacaattacgagaagaggttctgagccttagatcgtctgtcagtgaaggaattcgggcagttgatgaacgaatgtctaaacaagaggacattaggaaaaaaagatgtgtgtattgaggcttatacaagttattcggtcagttgagaaaattgaaaaaatcttaaactctcaaagttctaaagaaacctctgcactagaagcaagcagcccccttttgactggacaaattttggagagaattgccacagaatttaatcagttacagtttcatgctgttcaaagcaaaggcatgcctcttttggacaaagtaagaccgcgtatagctggcattacagccatgttacagcagtcactggaaggtctcctattagaagg

SEQ ID NO: 4801 - DNA, 368 bp, Homo sapiens
gtctgtgtatgctcacttccccatcaacgttgttatccaggagaatgggtctcttgttgaaatccgaaatttcttgggtgaaaaatacatccgcagggttcggatgagaccaggtgttgcttgttcagtatctcaagcccagaaagatgaattaatccttgaaggaaatgacattgagcttgtttcaaattcagcggctttgattcagcaagccacaacagttaaaaacaaggatatcaggaaatttttggatggtatctatgtctctgaaaaaggaactgttcagcaggctgatgaataagatctaagagttacctggctacagaaagaagatgccagatgacacttaagacctacttgtgatattt

SEQ ID NO: 4802 - DNA, 388 bp, Homo sapiens
aaacaaatgtagactttattttgtactgtacaaagtgctaatgtcagtagatccattaaaatatagaatatttaagaaagatcattaataaaagtaatggtcattcaatttaatgttacagtttacagcgttttactgctagtgttttaagtcagcatgagcagtatcaaagtacttatgtagctagtttctaaaactttacagaaaacccagtacaattccaagtgcttatagccaatataagcatatttcatattagaaatagttatccatatgttaacaagaaactatggtcctcaaatatgccaattttagagtctaataactactgatagtaactatgtaaatattttggaataaacagttatttatgcaagccacacttcag

SEQ ID NO: 4803 - DNA, 334 bp, Homo sapiens
  unsure (80): n=A,T,C or G
  unsure (108): n=A,T,C or G
  unsure (124): n=A,T,C or G
  unsure (129): n=A,T,C or G
  unsure (182): n=A,T,C or G
  unsure (185): n=A,T,C or G
  unsure (198): n=A,T,C or G
  unsure (203): n=A,T,C or G
  unsure (216): n=A,T,C or G
  unsure (219): n=A,T,C or G
  unsure (231): n=A,T,C or G
  unsure (240): n=A,T,C or G
  unsure (244): n=A,T,C or G
  unsure (253): n=A,T,C or G
  unsure (261): n=A,T,C or G
  unsure (267): n=A,T,C or G
  unsure (269): n=A,T,C or G
  unsure (274): n=A,T,C or G
  unsure (290): n=A,T,C or G
  unsure (297): n=A,T,C or G
  unsure (300): n=A,T,C or G
  unsure (314): n=A,T,C or G
caagcttttttttttttttttttttttttttttttctattcggttcagtctaatcctttttgtagtcactcataggccanacttagggctaggatgatgattaataanagggatgacataactnttagnggcaggttagttgtttgtagggctcatggtaggggtaaaaggagggcaatttntanatcaaataataanaaggngatagctactaanaanaattttatgganaaagggacncggncgggggatntagggtcnaagccncnctcgnaaggggtggatttttntatgtanccnttgagttgtggtantcaaaatgtaataattatta

SEQ ID NO: 4804 - DNA, 449 bp, Homo sapiens
aaaccaaagcctcagattttcatacaaacgacacgaccaaacttctaaagtattggtattacatcttaaaattgtcccgtatccttaaaaaaaaaaaaagtgtacactcacgtgccttacaggatattaaaccaaaaagctagaattaacaaacatgccaaatgttttcactttgaatcgtagacacagctcctatatttgagttttacagaaaggcatgtttctcaacatgcatccgaagttttcaatgtatttgtggtataagagcaacatttaacataagtgaaactgcattaacctaaatacgcttactgcttaggtacactcctacaacataactaacttgaggaaagctaaaaattgttttaacagttatggtcaatactgaactttgttattatgtcctagatgaatgtttcagtgttcaaaattactgagcttgaagtttt

SEQ ID NO: 4805 - DNA, 532 bp, Homo sapiens
aaacttgatttgagtttcagtgtctctgaattgaacatcccacgttggaagaagatacatttgggggctccaggactacagtagaaaagtatagagcaagcaggaaaatcttctagtaaaacttacatgcaggacaacaaaatgatgaaagatatccaaataccagataatccaccaggaaggcttttgtttaggaatttgtttcaagaggaacaagggatgagggagaaaaatccgttttatccatcagagtcagtgctataaaattgcctattaaggtaaaagaaaaatgtggagactattttactatacagagagcattaattcagatgacttagaaaagtgataccagcccaagaacagggatctaggtgagcccattgtaagtatcattgaaaacaaaacatgcccgtcaacatgtcacagaaaacgaacgaaggacaacaagaagtggatgagaatattttgttgaccttcatgggtttacagcctctgtctctaaacaaagtatggaaacaagtagagcttttat

SEQ ID NO: 4806 - DNA, 416 bp, Homo sapiens
  unsure (308): n=A,T,C or G
  unsure (333): n=A,T,C or G
  unsure (367): n=A,T,C or G
  unsure (392): n=A,T,C or G
  unsure (400): n=A,T,C or G
atccactgtccatacccttggattggttgaagagcctttggtcatactgaacttcattggaagtccgaggattaggaacaccgagagcaataacttcactgatatcccgattttcatttctctgaagtttcgacctcttatcaggagctgccctggaaagattccggtcatgctgtctctcttttcgcctgtcatgccggatttcatccctctcacgtgcctccccatcctctttttccacatgagttttgatcccagctcttctttccctggctttctgggccatttctctaagtttctcttcatgnttttccttttctttctgagccattnttctctctacttgggcacgcatttccacagcttnacgagccttccgatcagcaatgtanagggcttntgccaatttggcgaaa

SEQ ID NO: 4807 - DNA, 483 bp, Homo sapiens
  unsure (439): n=A,T,C or G
aaattctctggatgagcaagaaggggttaaaagtggaatgtatgttgtaatagaagttaaagttgcaactcaagaaggaaaagaaataacctgtcgaagttatctgatgacaaattacgaaagtgttcccccatccccacagtataaaaagattatttgcatgggtgcaaaagaaaatggtttgccgctggagtatcaagagaagttaaaagcaatagaaccaaatgactatacaggaaaggtctcagaagaaattgaagacatcatcaaaaagggggaaacacaaactctttagaacataacagaatatatctaagggtattctatgtgctaatataaaatatttttaacacttgagaacagggatctgggggatctccacgtttgatccattttcagcagtgctctgaaggagtatcttacttgggtgattccttgnttttagactataaaaagaaactgggataaggagttagacaattt

SEQ ID NO: 4808 - DNA, 507 bp, Homo sapiens
ccttcaacatgattgatcagaacagagatggtttcatcgacaaggaagatttgcatgatatgcttgcttcattggggaagaatccaactgatgagtatctagatgccatgatgaatgaggctccaggccccatcaatttcaccatgttcctcaccatgtttggtgagaagttaaatggcacagatcctgaagatgtcatcagaaatgcctttgcttgctttgatgaagaagcaactggcaccatacaggaagattacttgagagagctgctgacaaccatgggggatcggtttacagatgaggaagtggatgagctgtacagagaagcacctattgataaaaaggggaatttcaattacatcgagttcacacgcatcctgaaacatggagccaaagacaaagatgactgaaataacttcaaattccagccaaacgttccttgttgccactttgggtattctgagattttctcttgcatgcccttagctttacagcttttgcatttcc

SEQ ID NO: 4809 - DNA, 445 bp, Homo sapiens
aaagcttcttttgtgttagatactgtattagagatctgcatttatcatgagttcctttttttttttaactttatttttgggaaagtaacacatgaagtagttcagtcatgtcaggtttgtctggggtggaatggaacagtcaggtagttgaaagttttttttagagatgaaaagcttgtgaactcctgtaaaacatgctgtatttgaaatacatctgttaaaacttaaaaactaaagtgtgattttttttgttgttgttaagtttattgaagtttattcccttaatcagtgaaggacaacccttatttattacctagagcagttgtataattcgctgttagaaattttggtattgggacagtggataagcaggttatcacatagcatagaattcttaaaagatacatgtggggaaaagtagtctcaaataaaagctaatttcttt

SEQ ID NO: 4810 - DNA, 443 bp, Homo sapiens; identical to SEQ ID NO: 563

SEQ ID NO: 4811 - DNA, 563 bp, Homo sapiens; identical to SEQ ID NO: 352

SEQ ID NO: 4812 - DNA, 359 bp, Homo sapiens
cgtggagaacgtgcttaagaatccactatgatgggaaacatttcattctcaaaaaaaaaaaaaaaaaaaatttctcttcttcctgttattggtagttctgaacgttagatattttttttccatggggtcaaaaggtacctaagtatatgattgcgagtggaaaaataggggacagaaatcaggtattggcagtttttccattttcatttgtgtgtgaatttttaatataaatgcggagacgtaaagcattaatgcaagttaaaatgtttcagtgaacaagtttcagcggttcaactttataataattataaataaacctgttaaatttttctggacaatgccagcatttggattttttt

SEQ ID NO: 4813 - DNA, 434 bp, Homo sapiens
aaatctcactggcaatattcaaagttttcattgtgtcttaacaaaggtgtggtagacactcttgagctggacttagattttattcttccttgcagagtagtgttagaatagatggcctacagaaaaaaaaggttctgggatctacatggcagggagggctgcactgacattgatgcctgggggaccttttgcctcgaggctgagctggaaaatcttgaaaatattttttttttcctgtggcacattcaggttgaatacaagaactatttttgtgactagtttttgatgacctaagggaactgaccattgtaatttttgtaccagtgaaccaggagatttagtgcttttatattcatttccttgcatttaagaaaatatgaaagcttaaggaattatgtgagcttaaaactagtcaagcagtttagaaccaaagg

SEQ ID NO: 4814 - DNA, 629 bp, Homo sapiens
  unsure (601): n=A,T,C or G
ccatattactgaccctctacagagagggcaaaggaactgccagtatggtattgcaggataaaggcaggtggttacccacattacctgcaaggctttgatctttcttctgccatttccacattggacatctctgctgaggagagaaaatgaaccactcttttcctttgtataatgttgttttattcttcagacagaagagaggagttatacagctctgcagacatcccattcctgtatggggactgtgtttgcctcttagaggttcccaggccactagaggagataaagggaaacagattgttataacttgatataatgatactataatagatgtaactacaaggagctccagaagcaagagagagggaggaacttggacttctctgcatctttagttggagtccaaaggcttttcaatgaaattctactgcccagggtacattgatgctgaaaccccattcaaatctcctgttatattctagaacagggaattgatttgggagagcatcaggaaggtggatgatctgcccagtcacactgttagtaaattgtagagccaggacctgaactctaatatagtcatgtgttacttaatgacggngacatgttctgagaaatgcttacacaaa

SEQ ID NO: 4815 - DNA, 269 bp, Homo sapiens
ccttcatgccccgaggactagcagacaaacaaggacctgaggaatgtgatgcagttgctcttttaagtctcatcaactcctgcgatcacttcgtggttgatcgaaagaaagtcacagaagtaattaaatgtcgtaatgagatcatgcactcttcagagatgaaagtatcttctacgtggcttcgagattttcagatgaagatccaaaattttctgaatgaattcaagaacatcccagagattgtggcagtatactccagaatagaacag

SEQ ID NO: 4816 - DNA, 348 bp, Homo sapiens
ccttgggtctaactgtgctttagtaaagtctgaattgtccaataattttctcatttcataaacacccttatctctttatatatagctatatgcctttatgtgtatatatacatgacttttttttttccttctcaaaaataaaatagccatccccatagagggaggttctcagcagcattcacagcggttgcagcaggagccatgccttctattaatgttagagacatgcaggacgaaggaaaatgactctccacctgctccctttaatatacagcagggagagagtttctaaagggagggaagtgataaggctgagcatgagatggctaaccagggtttttgtggttt

SEQ ID NO: 4817 - DNA, 327 bp, Homo sapiens
  unsure (29): n=A,T,C or G
  unsure (76): n=A,T,C or G
  unsure (100): n=A,T,C or G
  unsure (101): n=A,T,C or G
  unsure (214): n=A,T,C or G
  unsure (216): n=A,T,C or G
  unsure (284): n=A,T,C or G
  unsure (300): n=A,T,C or G
  unsure (304): n=A,T,C or G
caacagtcttacttgcctgtacaatatanagacatatgaatagtcataacagttttcaacttgttcttgtttctgntaaactatattcctagaaacatanntttgaacaacttggtctttgttaggcttgtcaaattgccttcatggaaaaataatctacaaaagtatggtttaattgattgtcttacatgataattttccctggtaacaactnantaagtgatatatcttttttcctaaattgcttaaatactgtgaaattgctctgacaaattggaagtgtnccattggcatatttgncttnctttttatgcatgatggtaaaat

SEQ ID NO: 4818 - DNA, 552 bp, Homo sapiens
ccattggtagatgtttgattgacttaacaagagagggacaaattttcaatttgtgaaactccaaagcagaaagtattggtgcttgctaccttgtgaattcttccttagacatgcagagaaaatgtatgcaagagaccaaaaagatggctccaagctatgtcatgttacctgtaataaaatcttttcttctagattctttctatgttggcagataatctccccttatagcttccactcacttattcttgcattcagagtcacaatgatcatcttacccatgtggtttttgagaaagaaagatcaattctttgtttgcagtaggtaatcttagagatggagatgattgtagaattattcctagatgagtgtcaatttatttaattccattgtcatataaggagtcaaattgtttcttatcatttgttcattgaagaacagagacctgtctggaaaatcgatctctacaaattcaattaaataatgatccccaaatgctgaaaaagtgaaatacagcaattcaacagataatagagcaatgtttagtatattcag

SEQ ID NO: 4819 - DNA, 393 bp, Homo sapiens
  unsure (43): n=A,T,C or G
  unsure (98): n=A,T,C or G
  unsure (114): n=A,T,C or G
  unsure (131): n=A,T,C or G
  unsure (135): n=A,T,C or G
  unsure (164): n=A,T,C or G
  unsure (169): n=A,T,C or G
  unsure (185): n=A,T,C or G
  unsure (223): n=A,T,C or G
  unsure (250): n=A,T,C or G
  unsure (265): n=A,T,C or G
  unsure (279): n=A,T,C or G
  unsure (294): n=A,T,C or G
  unsure (298): n=A,T,C or G
  unsure (301): n=A,T,C or G
  unsure (309): n=A,T,C or G
  unsure (311): n=A,T,C or G
  unsure (326): n=A,T,C or G
  unsure (350): n=A,T,C or G
  unsure (361): n=A,T,C or G
  unsure (383): n=A,T,C or G
aaaataattactctcacacataattttttttatcatgtaaatnctaaacaaacttctgaaggtataattacacaaattcttagcgatcacaaaagtanatgattgggctaatgngtcatttttctaactgngttntgtcgataatatgcaaaatttaggaatantgtanaaaaatgatgtatttnaatacagcttacaaatgaaacttttttggcttcacaangacatacttattatcataactgatacnattttcatactacantgctcttttgcttnataaatactcaagtnattntgngcgctgcntnaaattttacttttgngcgtcgccttccatccccttagtncatcttatagnagctgtaagttgatcctgtgtntcttgaagct

SEQ ID NO: 4820 - DNA, 254 bp, Homo sapiens
  unsure (156): n=A,T,C or G
  unsure (164): n=A,T,C or G
  unsure (166): n=A,T,C or G
  unsure (187): n=A,T,C or G
  unsure (190): n=A,T,C or G
  unsure (210): n=A,T,C or G
  unsure (221): n=A,T,C or G
  unsure (232): n=A,T,C or G
  unsure (242): n=A,T,C or G
  unsure (245): n=A,T,C or G
tttttttttttttttttttttgtttaactttattactgttgcaccatttatacaattacatataatttcaatgcatccattgtacatttttttgttttttttttgtttttttttttccattttccaatgagtggtgtgttggtgtctgtgacacanaatggaananaaactggaactgcaatgaacncanactttttttttttttttttnatttccactgnccaataaacanaactacaggngcncccaaccac

SEQ ID NO: 4821 - DNA, 236 bp, Homo sapiens
ctgatggtttggaaatgagagaactacagtggtgaagagaccaggaggcagctctcagtgaaaccaacattgcggatgcccttcgtgagccttctcagtcccagcaggaagcccacaacactggcctccccagcctgcctgctgacaacacctaggcttactttatctaaaatcagagtgtaccaggtctgtagcagaaaataatcaactaaatgtcagggacctatgagtcattt

SEQ ID NO: 4822 - DNA, 294 bp, Homo sapiens
ctgctcgaacactgagcttgtgtaaaagttgaaccatgaggccacaaaagcggtcaaaggttctgggaattcgggtctggggattcacttcaatcagaacattcttctgtgtatggatataaacctgtagcaagccagctcggttcaggggactatccatcagcatcagcaaactctggtgggtgatatctggccgcgcttccccagggtcccgtccattcttcaacaatatagacttgtgcttgtcacagttgagtagctcatatgtcttccctaccttgactgtctccagac

SEQ ID NO: 4823 - DNA, 222 bp, Homo sapiens
  unsure (37): n=A,T,C or G
  unsure (191): n=A,T,C or G
gtacaagcttttttttttttttttttttttttttggngattttagcttattttattaatagcttatttccttacaaatatttccccacacgtttatttagtcgcaggcttcatgcatacaaaatgcacactgctatgatcatcgtaaccatcagcaagcaggcattgtcatcagcgcttctttatttctgnggtttctcagtctcttttattttctttcttt

SEQ ID NO: 4824 - DNA, 592 bp, Homo sapiens
  unsure (574): n=A,T,C or G
cctcagaatttcatacaaacaccaagaccaaaatcctaagtattggtattgcgtctcaaatttttcccattaacttaaaaaaaaaaagcttaaacttacgtgccttacaggttattaaatgaaactagaattaacaaacatgccaaaatgtttcacttttaatagtagacacagctcctatattgttttacaaaaaaataaaagcatgtctttcaacatgcatccaaaacagtgttcaatttaacgtggcaaagggcaacatttaacataattcaactgcttttacctaaatacgcttactgcttaagtacatcctataactaacttgagaaaagctggaacttaagtttaacagttatagtttactcagcttcactgttacatcctagatgagtattgtattcaaaaatactgggccttaagtcttcataacaatcctgatttccacttagagtaagcataaatcacaagcttgtattgcagaaactgttaaactgaagttttcttaaagaaaaaaaaaaaaaaaaaaggttgaccaagagtcagtgatcaggatcgatcaattacattcccnatccaccactcatactgg

SEQ ID NO: 4825 - DNA, 542 bp, Homo sapiens
  unsure (488): n=A,T,C or G
  unsure (508): n=A,T,C or G
ctggaggtgaacaaccgcatcatcgaggagacgctcgcgctcaagttcgagaacgcggccgccggaaacaaaccggaagcagtagaagtaacatttgcagatttcgatggggtcctctatcatatttcaaatcctaatggagacaaaacaaaagtgatggtcagtatttctttgaaattctacaaggaacttcaggcacatggtgctgatgagttattaaagagggtgtacgggagtttcttggtaaatccagaatcaggatacaatgtctctttgctatatgaccttgaaaatcttccggcatccaaggattccattgtgcatcaagctggcatgttgaagcgaaattgttttgcctctgtctttgaaaaatacttccaattccaagaagagggcaaggaaggagagaacagggcagttatccattatagggatgatgagaccatgtatgttgagtctaaaaaggacagagtcacagtagtcttcancacagtgtttaaggatgacnacgatgtggtcattggaaaggtgttcatgcagga

SEQ ID NO: 4826 - DNA, 447 bp, Homo sapiens
  unsure (172): n=A,T,C or G
  unsure (233): n=A,T,C or G
  unsure (293): n=A,T,C or G
  unsure (305): n=A,T,C or G
  unsure (315): n=A,T,C or G
  unsure (349): n=A,T,C or G
  unsure (371): n=A,T,C or G
  unsure (377): n=A,T,C or G
  unsure (384): n=A,T,C or G
  unsure (417): n=A,T,C or G
gtacaagctttttttttttttttttttttttttatctggaaggttctcaggtctttatttgctctctcacattccaggaattgacttatttaattaatccatcaacctctcatagcaaatatttgagaaaacaaatgtatattcagattcttattttcagtagggaagtaanaagttgcagctcagtgcacataaagttgagacagagatggagacatccagccccacctttntggaacaagaaagatgactggggaggaaacacaggtcagcatgggaacaggggtcacagnggacacgggggngggctgtctntccacctcctcacattaggctaacagggacgcanacacattcaggtgcctttgcanaaaganatgccanaggctcttgaagtcacaaaggggaggagtgaanaaatcctgcatctcagtccctcacaagaca

SEQ ID NO: 4827 - DNA, 417 bp, Homo sapiens
ccattacatcctctttttaatttacataatacagatacttgagaaagttgttgtggtgttgtatgccaagaaaattctttttattggtgcctatattgtaacaattatttttaatgcattgtattttgaagtaacggttcagttaaatttttcacctgctgtgtaactgaaacacaattacagtttataatcatctgtagaagtctggagataattttgcaactcatgttatgggttaaatgaatatttttgtaaaagtaaaagcaacaaatttataaattgattatttgaaactttacaacacaattgcatcccaaatacaaattgtattgcttattcattatagctattcgtcctgtaatctgtttctaggtgaagcatactccagtgttttaggggttttgaaaataaatattt

SEQ ID NO: 4828 - DNA, 332 bp, Homo sapiens
ctgcgtggagtgacgggaggagggaatcactgtgtgtgcgagagtgcttcagactcaatttccaaaataattttcacccctctaagcatgtaaatatacaaagatggatccttcatagaaattaaagaatcaatttgagctcatttcgaatacagaacaagtatggcacagatggaagtcctgccacgtttcctttaatgatgctgactcttgtatcacacaggccagcatgaagtttcttactcagactttacaggcattttccgtaattcaatcagtcctgctcccagcacaacacaggaggtgattcgagaataatcgtgagaatcagg

SEQ ID NO: 4829 - DNA, 304 bp, Homo sapiens
aaaaaagcaatttggaaggtaatttgataggctttccaacttaaccaaattttttattgtaattcttggatagtatttttgtctttttcaattcatttgtctttttcagtatagtttttgttaaggcaaatgtcttcccttaatatccaaatattgctaataaacggtagaagatgctttggaaattaaaattatctcgctgttggttagacttaacactgttaatcttcagccaaatatcacatatggatcaaattattttcttttttgttgtttaccctatcctcaacaacatttttagttt

SEQ ID NO: 4830 - DNA, 442 bp, Homo sapiens
  unsure (246): n=A,T,C or G
aaataattatcaggatatagaaacaaatatccattcagataaaacattactgcttaaaagtggctaagaaatattttgcatgtaataaatatatttcatgtttaggttaacaggcaccatcttgagagcagtttgtttttttttttagctaataaataaattacattcaagaaaacaaggtgtttatatctgagtatatcattaaatgtttttcttcatatagcacccaaacttcaaactgtctanaaagtatctcctaaaatataactcataccttaagtaataaaaataaaggccaagaaaaaaaatcaatttaagacaaaatttacagtttatattcttaattccccattcaataaaatatcgattgccaatttaataaaagtaaatgaactgtatatatgcaatctgttagcactgaaaatctgaaatatatattttt

SEQ ID NO: 4831 - DNA, 265 bp, Homo sapiens
  unsure (8): n=A,T,C or G
aaatttanatgttcaaaagtagttgtgaaatttgagaatttgtaagactaattatggtaacttagcttagtattcaatataatgcattgtttggtttcttttaccaaattaagtgtctagttcttgctaaaatcaagtcattgcattgtgttctaattacaagtatgttgtatttgagatttgcttagattgttgtactgctgccatttttattggtgtttgattattggaatggtgccatattgtcactccttctacttgcttt

SEQ ID NO: 4832 - DNA, 522 bp, Homo sapiens
cgacgaaggagtaggtggtgggatctcaccgtgggtccgattagccttttctctgccttgcttgcttgagcttcagcggaattcgaaatggctggcggtaaggctggaaaggactccggaaaggccaagacaaaggcggtttcccgctcgcagagagccggcttgcagttcccagtgggccgtattcatcgacacctaaaatctaggacgaccagtcatggacgtgtgggcgcgactgccgctgtgtacagcgcagccatcctggagtacctcaccgcagaggtacttgaactggcaggaaatgcatcaaaagacttaaaggtaaagcgtattacccctcgtcacttgcaacttgctattcgtggagatgaagaattggattctctcatcaaggctacaattgctggtggtggtgtcattccacacatccacaaatctctgattgggaagaaaggacaacagaagactgtctaaaggatgcctggattccttgttatctcaggactctaaatactctaacag

SEQ ID NO: 4833 - DNA, 429 bp, Homo sapiens
aaaatatttacacttaaagacaaaacatttccacaattattacaattggtttcactaaatcagaagtgactacacattatctctacttttataccagaaaacaaaatgaagaaatcaacaaaatataattactaaaactccactgtggatcaggataaaatgtgtccaatattaactcacactttcccaataagtataaaaatgaatataacattgcttggacaacttgtttcaacagcgaatcgtctattactatttgttcaataacatatataaattcaaaactggcaggtatgaaaaaaggttactttgttttttgcagatactgtacttgtaaaataaagccaaataaagcatatgtcacacataccaaagtcttacattttgcctttctaatacaagcaagtgaaatattaacacatagcattt

SEQ ID NO: 4834 - DNA, 490 bp, Homo sapiens
ctgacaaaaagtgtcagagccagaggccaacctctgctagatgaagcagcagcacatgactccatttctatctgataaggagacagagaagaggcatctcgaacagatgaaaaaccaaaggctggtgtcctaaaaaaaacagattggcttcaaagaaaacactaaggaagacccacagagctgtattaattttagtaaaaataatcatatgccaacaggggaattgaaccactttctaaatcatagtatgaactcatctcttcagatacttggtaagtggtcaaagcttgtttttataattactttcactgtcttgggcaaaaagtctttcttatctttggtccttaggtgtggtatcagtttcttccatttttttatgtgttacaaaacaatctttttttacttgacatcaacaaccaaggtgcagtataaacacgaagttgctgatattgttgcttttatacacataaaataccaacatctcccatac

SEQ ID NO: 4835 - DNA, 254 bp, Homo sapiens
aaaatatcttttataggttttatataaaaatgtctgagtatgattttgtgtgaaagttctgataccagttgtaatagagtcaaatttatgtgagcaataaagaagaaattggcagatattggaaaaatattttgtgaaaagctgtatttattataaatactagggccatgacatagtaccattggggttaagtcattttcccaatctatttataatttaatgatatgttagtgcctctgttatatgtcaagttt

SEQ ID NO: 4836 - DNA, 407 bp, Homo sapiens
gatctgtgttaatctgagtaacttattgcctagcctataaataaattccaaaatatccaattcatttcttcttgaaatggtgcttgttttgttttctttccattacacaattagactcctacagtttaaaacaaactttaaaccactatcttgcactgctaacttttttctacctttgtaaatagaaacatttctgcataaaagtcatacatatgaagcaagggctgaatcataatcacaaggcttaattttgataaacgaatccagtgacctaaggattttctgcaaaatttgactgggagttgtgataggtggtatttttgtttattttcttcctcttactccttaggataaaggtaagttgacttgaacaactttctttgcactgggaaaataagcaaatgttt

SEQ ID NO: 4837 - DNA, 404 bp, Homo sapiens
ctgtccgaggagctagtagggcaaactgctccctgagctgggccgatcttttgacatccttctccgagaaacaatattctttttcagttattacaaagaactgctgttgtgatgactagttatttgcttgagcagttccatattacataatcctgtgccacaaaacaccctgtacactagtggctgggatattattcatttccactaggcagctatctcactgttgaaatttatatccaaaagaatatttaattttggcttatttttcttataaaatagggaactcgtcttatcatttttaagtcctcacctcagtgtggtacttcaaactacttcaaattattactataattaaatgcttcattttatataataattaataaaaaaggtggcatatgcttttt

SEQ ID NO: 4838 - DNA, 517 bp, Homo sapiens
aaacctaacccatgttagctgcaactccactacagtcttgatcacttagctcaggaaacaaacacccagcaacaaccctcgtatctcattaataccaatctgtggccctcactgactcagtggtactttttataaaaatatctgaagaagtggcaaacggttacaacggatgtcaggtcgaagcaattccaaaagctgagaaaacgcttcatccgctgcttgtcttctccccctattgctacagttctgccaccaaagggggaaaattacgtgaatatgattgttgtgaccaagccttggcaaaagtcaataaataacagaacctgtcaagggcagagcaattttatgggcaacctcttctagttgcaaatgtgggggttgggaaaagtgggagagaggcatgtgtgcaagaaagagataagggtccttttgggaagggtttggtgacccagccccagctcaatgccagcagactaggacccgctaaaacccattattcagacggaaaggggagaag

SEQ ID NO: 4839 - DNA, 277 bp, Homo sapiens
aaatacttaatttgaacagctctaagatattgtcacttaggtcatctaaaagcttttagagatttgaacataagttcatttcctattaatcaaagacattccgtaagttggcaaaagaaattgggagagagaaatagaaggcttgatattctggacagcattaaggttgataggttgatgataaaaacttaaaaccaggacctccattctgtcatgactgacaccatggtagtctgtcagcttgaccagtggagagtcattcatttagcacaagcag

SEQ ID NO: 4840 - DNA, 489 bp, Homo sapiens
aaatgacttcagctaacttaccccaagagaaaaatctggcattgatctcttggttagcattattaccaatatcaactagcactattaaaatcaaagttgaaatggtacattcatttgccaaaaaaaaaaaaagaaaaaaaaggcttaaaggcaaagaaggtgaatcaacgtgcaaattagcatctggcccaattgcaaaattcatttcctggatgtgagggattgaaccatgcacacttgcaagcaagatgaagggcaaacagatgacatcaaatcaaaattaaccccacaaagaatccagaagacctcagatggtaaaggacagaggtctacgtctactgctgttagtgctcaggtatccatcctgttttccctaatctcccgattctgatccaagagtctttgagacctatgtcctaggccatcctttcatctagaaatggaaaccatggctgtggcaccaggcatggtcaaccctgcagtgattca

SEQ ID NO: 4841 - DNA, 499 bp, Homo sapiens
ctgatcttaacaaaattcgtagcagtggaaccttgaaatgcatgtggctagatttatgctaaaatgattctcagttagcattttagtaacacttcaaaggtttttttttgtttgttttctagacttaataaaagcttaggattaattagaagaagcaatctagttaaatttcccatttgtattttattttcttgaatacttttttcatagttatttgtttaaaaagatttaaaaatcattgcactttggtcagaaaaataataaatatatcttataaatgtttgattcccttccttgctatttttattcagtagatttttgtttggcatcatgttgaagcaccgaaagataaatgatttttaaaaggctatagagtccaaaggaatattcttttacaccaattcttcctttaaaaatctctgaggaatttgttttcgccttacttttttttcttctgtcacaatgctaagtggtatccgaggttcttaatatgagattt

SEQ ID NO: 4842 - DNA, 514 bp, Homo sapiens
aaaagcagagaaggcatccatagactatttccttgcttacaagctcagtgaacatactgaattcacttataaaaagaattttctcaattttagttgcttttcaaaaaattcttattccttttatttgtaattctttgacattgttgctgcttcacagttttggtaattggacagtttggtctttattatgatattaacatttttacctgtcctgaaacaaggaaatacaatcaaagaaacagaagattggtggaccttgaaccacattatgatatcagatgacccagagtcatggttactaagttgcttaaatttttagtaacaaagatgtattagaaagtgacaggtcaattcaataatggtttttttggatacatttaattatataatccccttaagttgtgcttagtcagcagtatttaatctgttgtctattatatatctaactggtctgttatgtttattatatatttatatattgcttattcatatcttattggagtaactcattttt

SEQ ID NO: 4843 - DNA, 345 bp, Homo sapiens
  unsure (8): n=A,T,C or G
  unsure (60): n=A,T,C or G
aaatattntggtcatattttataataaaatattttggcaaaaataaaatataaggtttantttattttctattaatggtagatctggagagtattttacatttctaaatagtatctacttaatttgactgctttcacatttgtttctgaaaacactgctattcgcttttcagaattttgagattaaaagcacctaaaaataagataaaataaaatttaagtaaaatatttgtttgatgctcgaaagttgacaaattcacaaacttactttaagtgtcttacatgatatatgccaccacagaaactttattgcctgctaagacttatttgactaaatctaatcttt

SEQ ID NO: 4844 - DNA, 251 bp, Homo sapiens; identical to SEQ ID NO: 4543

SEQ ID NO: 4845 - DNA, 621 bp, Homo sapiens
  unsure (557): n=A,T,C or G
  unsure (559): n=A,T,C or G
  unsure (613): n=A,T,C or G
ctcaggcagaacacaaatagaaatttaatgatgtgctcaactccaccagaaattacctcgagtcagcattgacgatattggaggagctgccgtgctgctgatacggggtgtgctttatgctgctctttgcggtttgttgatcccctcctcccccactctcaatacctagagagtgaaacccgtacaatgagataaagactaaaaagagaaatcccttcctatatacagtgtgctacatttacaaaaaatttctccttaagaaaacagaatattcaaaaacagcacttttccaggaagttagtgaggaagataaggcacacatttatttataaatggatgttgctcctttgtatttttagcttccctatttgcttaaaagtacaggctccctaagagaggatggagagggagagactgaattgttagtaggtctaaacatcaaagaaaacatttttattagttacttatggaaaatcatctattacaatgataaccttcaagtgacttccattatggctggacaggcggtgagctcagtggattgcagtggtgtgctngntgattttgcacagtgagctctgcggaaggggtcaggctcaactgctgatgtgtntcacacgt

SEQ ID NO: 4846 - DNA, 501 bp, Homo sapiens; identical to SEQ ID NO: 4709

SEQ ID NO: 4847 - DNA, 437 bp, Homo sapiens
  unsure (367): n=A,T,C or G
  unsure (403): n=A,T,C or G
  unsure (433): n=A,T,C or G
aaaatacataaaattttctaaaacgtaaaatggaaaggtttaatacacaggaaaaacactgcacaccttaactaaacaaactagaaagaaaatatatttatatacagaactaagatgagtccattcattatttttacaaatattcacatagatggtttagagataagtagttaagtgtgtctcattaattaatggatgctttctagcctctgtcttcattaattttatttcctattcaacaaaaaataatgctttcaggatatattacatatagagcaatatcatttttatcagtaatttgtctgaaaaagagaaaaacttaaaagcagaaccctacaaagcaaagcaaactacaaagcaaagagtnatcacagtgtttgcaaaatagaaatgtgtgactttnactttatagcaggctgcctaattaatccanacag

SEQ ID NO: 4848 - DNA, 270 bp, Homo sapiens
  unsure (38): n=A,T,C or G
  unsure (45): n=A,T,C or G
  unsure (96): n=A,T,C or G
  unsure (118): n=A,T,C or G
  unsure (120): n=A,T,C or G
  unsure (197): n=A,T,C or G
  unsure (247): n=A,T,C or G
  unsure (251): n=A,T,C or G
ttgacaaatgtataaccatctccacaaaggcaatgtanaaaattntcatcaccccttaaagtccttttacacttttttttgagactgcctcagtantaaccactgctaaatttatcananaactgcacacctggattgtattttgacagaacttccttccaacccaattgcttttaataatttttttatgataaatntttacccaaaatgttatagaatttatttacaaagaaatttcgtaagttgnattnctcctactggtgtggtatt

SEQ ID NO: 4849 - DNA, 592 bp, Homo sapiens
ctggcctgtcatataaaacatactgtcattgagcttaagctccgcttgttctgaggtttcacctccatgtgtttcattggtgcaaaagtggatctcttagttggtcacttaattctttctttttcagaaagatagtatgttcactggtatatttggtcactcttagaaccttccttcacattgttttttatgggacccatgaatggttagcctttcttttctattgtagaaggaaataaataggagtaaaaagaccattgtagtaaataagttcaaggggaacttgggaccagaaaccactgttatgtacaaaaaaatggcaaattcaataaactcaaatttaaaataatttttaaattaacagttatgataaattttatattttatacaaatagattgcttagaatggttctcaagaattataagagaaatgaactcacagtacaaaaattttataattactatacttgtgttttgtttgggggctgggaaatgtatttttacattgtagccaatcattttatatttgtcaatttaaatcttatgggtcttttttttttatctctcttgatgtcagattttatagtctttt

SEQ ID NO: 4850 - DNA, 379 bp, Homo sapiens
aaaaaaaatccttctaatctgctatgcttgaatgccacgcggtacaaaggaaaaagtatcatggaaatattatgcaaattcccagatttgaagacaaaaatactctaattctaaccagagcaagcttttttattttttatacaggggaatattttattcaaggtaaaattctaaataaaatataattgttttttatcttttctacagcaaatttataattttaagattccttttcttgtttatcagcagttgttattacatccttgtggcacattttttttttttaattttgtaaaggtgaaaaaagcttttatgagctcatgtagcaatcagattttcctgtggattgataataaatgaatatgatatatagttaaaa

SEQ ID NO: 4851 - DNA, 501 bp, Homo sapiens
  unsure (133): n=A,T,C or G
aaaatacataaaattttctaaaacgtaaaatggaaaggtttaatacacaggaaaaacactgcacaccttaactaaacaaactagaaagaaaatatatttatatacagaactaagatgagtccattcattattnttacaaatattcacatagatggtttagagataagtagttaagtgtgtctcattaattaatggatgctttctagcctctgtcttcattaattttatttcctattcaacaaaaaataatgctttcaggatatattacatatagagcaatatcatttttatcagtaatttgtctgaaaaagaggaaaacttaaaagcagaaccctacaaagcaaagcaaactacaaagcaaagagtaatcacagtgtttgcaaaatagaaatgtgtgactttaactttatagcaggctgcctaattaatccagacagtagagaaagcagactgaggcaggaagtaagaggtgggactaaactgttaagaagataataattt

SEQ ID NO: 4852 - DNA, 421 bp, Homo sapiens
  unsure (352): n=A,T,C or G
aaattctttaattaaggcattggtcccaacggtgcacatagattaagggattttgcttccttctgaactagatcatttgttagaggcttcagaaaaagaaaattagcttgaaatctagtctgggaaattgggggcagggaatgaaaaagttggtctcttgtttctccacgatacacaggcttcccatctaaagtcatgcttaactaaaagggaaaaaaatgaaccaagcaaaagtatatagagtagccgtgacatttgcattattttctagactttacatttgcctgcaacaggtataacatgaaactccagagggaatttggattgataggaatgttcacataaacaccancagtggctaactgttacacaacattcaaagtattcgagagaactgcctggagacagagagcgagggtcc

SEQ ID NO: 4853 - DNA, 501 bp, Homo sapiens
  unsure (373): n=A,T,C or G
cggagagactcaagatgattccctttttacccatgttttctctactattgctgcttattgttaaccctataaacgccaacaatcattatgacaagatcttggctcatagtcgtatcaggggtcgggaccaaggcccaaatgtctgtgcccttcaacagattttgggcaccaaaaagaaatacttcagcacttgtaagaactggtataaaaagtccatctgtggacagaaaacgactgtgttatatgaatgttgccctggttatatgagaatggaaggaatgaaaggctgcccagcagttttgcccattgaccatgtttatggcactctgggcatcgtgggagccaccacaacgcagcgctattctgacgcctnaaaactgagggaggagatcgagggaaagggatccttcacttactttgcaccgagtaatgaggcttgggacaacttggattctgatatccgtagaggtttggagagcaacgtgaatgttgaattactga

SEQ ID NO: 4854 - DNA, 477 bp, Homo sapiens
ccatctgcttagtagagctttttgcatgtatcttctaagaattttatctgttttgtactttagaaatgtcagttgctgcattcctaaactgtttatttgcactatgagcctatagactatcagttccctttgggcggattgttgtttaacttgtaaatgaaaaaattctcttaaaccacagcactattgagtgaaacattgaactcatatctgtaagaaataaagagaagatatattagttttttaattggtattttaatttttatatatgcaggaaagaatagaagtgattgaatattgttaattataccaccgtgtgttagaaaagtaagaagcagtcaattttcacatcaaagacagcatctaagaagttttgttctgtcctggaattattttagtagtgtttcagtaatgttgactgtattttccaacttgttcaaattattaccagtgaatctttgtcagcagttccctttt

SEQ ID NO: 4855 - DNA, 476 bp, Homo sapiens
ccacagaagttgctgctgacgctctgggtgaagaatggaagggttatgtggtccgaatcagtggtgggaacgacaaacaaggtttccccatgaagcagggtgtcttgacccatggccgtgtccgcctgctactgagtaaggggcattcctgttacagaccaaggagaactggagaaagaaagagaaaatcagttcgtggttgcattgtggatgcaaatctgagcgttctcaacttggttattgtaaaaaaaggagagaaggatattcctggactgactgatactacagtgcctcgccgcctgggccccaaaagagctagtagaatccgcaaacttttcaatctctctaaagaagatgatgtccgtcagtatgttgtaagaaagcccttaaataaagaaggtaagaaacctaggaccaaagcacccaagattcagcgtcttgttactccacgtgtcctgcagcacaaacggcggcgt

SEQ ID NO: 4856 - DNA, 432 bp, Homo sapiens
ctgttcccagctaaaggaattcagactctaaggattctaggagccgaaaagcaaagggtcgctggacgaagatgcagacactttgcctcaggtgacttgaatgggactgctgatgcctgtggtccccaagggacggaaaccacaaggaacagttctcctgactctgtcttattcctcctttatccgtagaacctaacgtagaggctggcatgttgcagctactcagtaaattacgtgagtgaattaatgaatgaccgcggctcattcattggaggttggtctccaacttgtctctcaacacccaggagacctacagggaaagctccccagggacttaaagccccaagaagagatggtttatccctggctgaaaacatgagccaatgcctgagagtcacctgtgtgtgaagtcggctcctgtcagggaatcag

SEQ ID NO: 4857 - DNA, 369 bp, Homo sapiens
aaaaatattaaattcaagttacatggaaattttatgcataaaaatcatattgtataatcagaatgaatcttcagtggtcatttctgaaaaacaaatactaactttagttaaaaagttaaacttttacttctctttttcaaagtattttcaaaacttcactattcaaattaaataggatattttaataatttacttcaaagatattatataattctgatcccaagagatcttcttgtggtgtttataaataaatctactaacagaaaagagtaagaaaagccaatctaggaaagaaaatcgttgaattaagtgagagtcaaagtgctaattcaatctatggggttttttcctccccatcatttcttttca

SEQ ID NO: 4858 - DNA, 379 bp, Homo sapiens
aaattgttgtgttatagtttatgcttcttaaatcatttttcaacctaaacagccaatttctaagcagacaggaaaactaaataataagttaattaatataacaaagatgcaggttcctgctcattccagtaatgtctttgaaagcaaaactaatatttattttctagattatccctgtgaataattgagaactttttggagtcaagtatgaataaaggtgtggcagaatataataatctggactattttctataggataattgctgggttataaaatcttaggtttgcttatgcccagtagctcctgcggaggcttaataataggcaattttgaatttgttcaaacctgtaatggcttgtaaacaaagatgaccatcac

SEQ ID NO: 4859 - DNA, 374 bp, Homo sapiens
ctggtggagaattaatgggttatattatgggtaaagcagaaggctcagtagctagggaagaatggcacgggcacgtcacagctctgtctgttgccccagaatttcgacgccttggtttggctgctaaacttatggagttactagaggagatttcagaaagaaagggtggattttttgtggatctctttgtaagagtatctaaccaagttgcagttaacatgtacaagcagttgggctacagtgtatataggacggtcatagagtactattcggccagcaacggggagcctgatgaggacgcttatgatatgaggaaagcactttccagggatactgagaagaaatccatcataccattacctcatcctgtgagg

SEQ ID NO: 4860 - DNA, 125 bp, Homo sapiens
gctttatgatattttatttgatattattcagtaatacaggttttgtggcaaatatgcatttctaaaagtgcataatgaaacattttatttttctagctcttgaatttgtcatagaaataagccat

SEQ ID NO: 4861 - DNA, 484 bp, Homo sapiens
  unsure (473): n=A,T,C or G
ccaatataattattaagtgactttggtgtgttcatgggaaactgatgtaattaaatattctgttatattaagagcgtgttcttattactgacattttgtaatcaagaaaagtgatatagaaaatatgtaggagactgttaaaattggtgattatggtaatatggtcatgtgaatcaatttttgatttataaagtactcacacaagttgtttcaaagatgatatttctgtgaacagagaggccatgggaagatttgaaaattattaaagaaaaattcctacagattttcaatgcagagaccataatcaaaaagtaaactttctttagtagtatgttcaatacatcatttaattttttaagttatcctgaagaaggaaaggtccttaattattatagtctaaacaaatttatagattactgtttgaagtaaataatacgagtgaatatttttcaaatgtgataaaatagcacaangtggctggtga

SEQ ID NO: 4862 - DNA, 235 bp, Homo sapiens
  unsure (8): n=A,T,C or G
  unsure (12): n=A,T,C or G
  unsure (15): n=A,T,C or G
  unsure (77): n=A,T,C or G
  unsure (80): n=A,T,C or G
  unsure (109): n=A,T,C or G
  unsure (116): n=A,T,C or G
  unsure (134): n=A,T,C or G
  unsure (146): n=A,T,C or G
  unsure (162): n=A,T,C or G
  unsure (178): n=A,T,C or G
  unsure (186): n=A,T,C or G
  unsure (189): n=A,T,C or G
  unsure (213): n=A,T,C or G
tcaaaggnattntgntgactttaatattgattatatttttaacaggaatttaagaaaatattactggaattaaaaanatntatatattaaacaagaattttctttgctntgtctancttaaactactactcaanctgcttaagttnttaagtattgtttgtnatcaccaataaataantgcatttntanttcatcagtcattattagcttttnttaaaagaagattacgttttac

SEQ ID NO: 4863 - DNA, 417 bp, Homo sapiens
  unsure (8): n=A,T,C or G
aaatattnattttcaaaacccctaaaacactggagtatgcttcacctagaaacagattacaggacgaatagctataatgaataagcaatacaatttgtatttgggatgcaattgtgttgtaaagtttcaaataatcaatttataaatttgttgcttttacttttacaaaaatattcatttaacccataacatgagttgcaaaattatctccagacttctacagatgattataaactgtaattgtgtttcagttacacagcaggtgaaaaatttaactgaaccgttacttcaaaatacaatgcattaaaaataattgttacaatataggcaccaataaaaagaattttcttggcatacaacaccacaacaactttctcaagtatctgtattatgtaaattaaaaagaggatgtaatgg

SEQ ID NO: 4864 - DNA, 238 bp, Homo sapiens; identical to SEQ ID NO: 4661

SEQ ID NO: 4865 - DNA, 145 bp, Homo sapiens
tttgatgccatttctaagacctacagctacctgacccccgacctctggaaggagactgtattcaccaagtctccctatcaggagttcactgaccacctcgtcaagacccacaccagagtctccgtgcagcggactcaggctccag

SEQ ID NO: 4866 - DNA, 250 bp, Homo sapiens
ccaggagagtgacaccatggagggtacaattgccagctcccccgtgtctgtgcagcattgtctgggttgaatgacactctcaaattgttcctgggatcgggctgaggccaggcctctcctggaaccacctctctgcttggtctgaccccttggcctatccagttttcctggttccctcacaggtttctccagaaagtactccctcagtaaagcatttgcacgaaaaaaaaaaaaaaaaaaaaaaaaaaag

SEQ ID NO: 4867 - DNA, 423 bp, Homo sapiens
aaaacactctgatctgaggccaatggcatcaaaatacaaattgctgaagtgggagaggaagtgaagggctgtttgttagggggactacagtggagattctggtgagtgtgggtgggctcgccagtgaccccaatattttctttgtgtaacaaccagagtaagcattaggatgcccaggctgccctctactggcagtttctgggaaggaccacaacagcagcacccaacctgcaacccacaacagccgagacaggagagagagaagaaagcaagagagagagaggagaggaagagagagaggagaggaagagatagaggaggggaagagatagaggacaggaagagagagaggaggggaagagagacaggaagggaagggagaggagaggaagagagagaggagaggaagagagaggaggggag

SEQ ID NO: 4868 - DNA, 529 bp, Homo sapiens
ccaatcaataagggactttcctctctgccattaagagcaacgatgctgaccacatactctgtgcctggagtgaggttggtgagggtgatggaattccgagagtggggcacccgatcttctcgaggtctcccactgaagtgctcgggatgatggcggatcctgtagccagtgatggtggctcgaggagcaatccagtgcacagtaaaagagttggcagtaatatcagaaaagtcaatgccagttggggaatcaagacctgttttctgtcttcctctaagaggtgtgctctcatgttgttcgtagacactggagacactcactacatattctgtaccaggcaggagatttgttaagaccactgcattgtctgaaggagaaattgacaactctgcaacatcttcctcatttttcacaggtgagtaacgcaccaggaagttggttaaatcaatggatgggggtggagcccaggtgacacgcatggtgtctggaccaatgttggtgaatcgcaggtcagtgggaggaggaacag

SEQ ID NO: 4869 - DNA, 282 bp, Homo sapiens
ctgcgtccaaatttacttgacaaagctataaacacaaggccctttctgaagtcctgctgattgagtttccccttccttttgtcggtggagaggaatgtaaaggctaagcgggtgtactcggactgtgtgcctctgggcttgctggcggtggcacttaaaggaactcattcattctctggatggggcaacactcctcacccgggatcccccaagggctttcccacacggagaccttcccgaacacagagacatctgatcttggcttgcccaagctggcccagg

SEQ ID NO: 4870 - DNA, 427 bp, Homo sapiens
ctgggggagggagcagacagtgagtgggaactggctggcccggggctccttcttgctcactcaccagtcttgctcttcacctctaagccaatgttgaccccttcatctataaagtccacaactctccggaagtcatcctcacggaactgtcgagaagttaaggctggggccccaagccgcaggccgcccggtgtgatggcacttcggtctccaggacaggtgttcttgttggcagtgatggatacaagctctagcacccgctcagcccgagctccatccaggcccttgggccgcaggtccaccagcaccaggtggttgtcagtaccacctgataccagtgagtagcctcgctctagcagggcatctgccatggcccgagcattcttcagaacctgcagggagtactcccggaacatgggggtgcagg

SEQ ID NO: 4871 - DNA, 524 bp, Homo sapiens; identical to SEQ ID NO: 209

SEQ ID NO: 4872 - DNA, 552 bp, Homo sapiens
ccaagaaaaaggctgaggaagaagctgaggctaagcccaagttcctctctaaagcagaacgagaggctgaagctctaaagcgacggcagcaggaggtggaagagcggcagaggatgcttgaagaagagaggaagaaaaggaaacagttccaagacttgggcaggaagatgttgggtttgttattctaccctgtgtagcccctagatggaagaggaaagagtgggatgagatacagtgtctcttaggagagatagaaacctgttcactctggagtttggaaaggggaaggatggtgggagtttatgagaaaacatttttctgttagatctccatttaccccatatcataagtctacccctttttttcttcatttggggttcctcgtctggattccctccattccctctcctcttttcttccatgagctcttctgcagctttgctttctttggtctgcagaagatcctcaggaacgggaacgtcgggaacgcagggagaggatggaacgggagaccaatggaaatgaggatgaggaagggcggcagaagatccg

SEQ ID NO: 4873 - DNA, 132 bp, Homo sapiens
ctgcccttccatgtcgtcacaggcataccgggcgtggacccactgcttggtgcccttgccgaagtagtagcacttccgttggaaattgatccacttttcagggcacgtgttgcacacaaagccgctggacac

SEQ ID NO: 4874 - DNA, 436 bp, Homo sapiens; identical to SEQ ID NO: 208

SEQ ID NO: 4875 - DNA, 452 bp, Homo sapiens
ccattaaaagttatttacaacagtgggagaaaaaaagacaagaagttgtttcacattacagacctccccccaccccaaagcctaatacttgcttaccaagtcaaaaaagagacacagttgattcacaggctggaggtttgaacttgagtaagacatttataaaaacctagacggggcagtgtcctccccagcccaggtgccactaggcacagcacaagagactaaaaacaacaggggaaggctggacactcaaggtttgggagtataagcaccccacttctggctcagggatttggggagtagggtaaacaaaacctacttggaaaagaattggggaagaaaaccaacaactgccttatgcaggggtggggacagggaaggaggtagggccagggacaggagcatttcacatcactaacctaacttgggaagctgtaagggaccatcttcaa

SEQ ID NO: 4876 - DNA, 396 bp, Homo sapiens
ctgcgctgcacagcctgggcagcaggctgagtatgggctcctcactcccacctcctggccttcaaggccctacttgttgccccagacagccatctttgagaacacaggtcttgggaggaagcggctggacttcatgtaggcagagatcttctccaagccctcaaagcgggagatgaagtccttcagatttgggaaggcgtccaagcacttgggctcaaatatacggtggaggtcaaggacatcatagacgagaaaatctacaaaagtgatcttgtttcctgcaaaccatggccgcttccccagaaactctgagtagagctttagcttttcagggagttcctccaagtactttggcttcagtttctcaaattctggattgtagcagatcatgcccag

SEQ ID NO: 4877 - DNA, 484 bp, Homo sapiens
ctgccagagtagtggctttaatgaccttagaaagggtacatcattctacaacatcctgcccctccccatcactctcctattctttcagaagagtgttggaatccacgacctcttctgtaggtactggaaggggcccgaagaattcccgcatatatccagaaaagccagaagtttggggacccattcttaaacttcctagaatgtccccttaggaatgagcatcggcacttggaggtgaaactcttgaagggtttttatttagaaatcagattgtcagcatgtggtggcatcttcttaaacttagataacgggtccagagttgcctggctagttagtgtcaggttcattagactagatgcatctctcctgacttgccagagtctctaggtgtggttgtacattctgaatgcactgttttgagtattcagcacctgttgtgcatgtgtctctgcagcaagcgatccccctccaagaccatcccagg

SEQ ID NO: 4878 - DNA, 636 bp, Homo sapiens
  unsure (603): n=A,T,C or G
attttagctgtgcaaagggaggtagtgtgggaaaagtgtttccattctgggaaaagcccaaaccgaatacggtcagcagtcaactccagggtttgggcttgattcctgttgaataatagttttgagcattctttgtggttaaataaattcttaaatctgcctagttttgatgaattcttttgtgaaacttgaaagagaatagacagtatgacatatagaattaatacaaaacagtttaacaaccatttaactgcagtgtaagaaaattggactgtaatcatatcgctactggcatctgttatctagtatgcatttctggtgtgtatctgaaaggaagacattttctaccctagatccaattgcatttatttatcaataagtgccattaaattgaaattatattacattttacactttctcaatgaatgaacaaattagtctgtagaatctagccacctgtttagcctagtcatgtgccttgaacatatatgtgtcccataatctggctcatggtacctgttcttctatccaaacctttcaattcatgctacctgattcatttatttgacatagatcttaggcccacttgaactcttttcttgnttatctagcatagcacaaacgtttttccagtct

SEQ ID NO: 4879 - DNA, 323 bp, Homo sapiens
cgagaaaattgaaatcattgctacactgaagaatggagttcaaacatgtctaaacccagattcagcagatgtgaaggaactgattaaaaagtgggagaaacaggtcagccaaaagaaaaagcaaaagaatgggaaaaaacatcaaaaaaagaaagttctgaaagttcgaaaatctcaacgttctcgtcaaaagaagactacataagagaccacttcaccaataagtattctgtgttaaaaatgttctattttaattataccgctatcattccaaaggaggatggcatataatacaaaggcttattaatttgactagaaaattt

SEQ ID NO: 4880 - DNA, 264 bp, Homo sapiens
ctgtgggcccggagggcctcggcgaagctgagatagaagaagccatcctcggacatcacgtctcccagaagctgcacggccggccggctcaggttcccctccccgagaagatattccaagagcgtgtgcctttcaaacttcttcatcgcctttctgcagcccagtgccttgaggtctttgagggcctggttgagagccatctggtagatgccttcgggcgagtggcccttttcctggggacgcaaggcgtagcccagcttctcg

SEQ ID NO: 4881 - DNA, 384 bp, Homo sapiens
  unsure (253): n=A,T,C or G
  unsure (260): n=A,T,C or G
  unsure (270): n=A,T,C or G
  unsure (300): n=A,T,C or G
gtctgtgtgcctgtgacaaggaggtggccttctgcctgaagcgcaacctggacacctaccagaagcgactgcgtttctactggcggccccactgccgggggcagacccctgggtgctagaagcccacaccctctaccctgttcctcagcatggagctctggcatccccacctcagtatctaacctgaaccagcctggcttttcaaacactccggggggaggtagtcccagcctcccccggaaccctctaccantgccttntgaccttctnaagctttccgaatcctcccagttgaggcantagctgtgtcctctgagggtggatgggaatcttgggagaagcccaagcaagggagccctcagaggtggtgtttggaccaaagca

SEQ ID NO: 4882 - DNA, 340 bp, Homo sapiens; identical to SEQ ID NO: 354
  unsure (45): n=A,T,C or G
  unsure (63): n=A,T,C or G
  unsure (64): n=A,T,C or G
  unsure (67): n=A,T,C or G

SEQ ID NO: 4883 - DNA, 606 bp, Homo sapiens
ctggtcatcttgtcatgtgaagaccatcttcctacagagtctaggctggccgtcgttgaagtcctcaccagtactacaccacttttcctcaccaacccccatcctattcttgagttgcaggatacacttgctctctggaagtgtgtccttacccttctgcagagtgaggagcaagctgttagagatgcagccacggaaaccgtgacaactgccatgtcacaagaaaatacctgccagtcaacagagtttgccttctgccaggtggatgcctccatcgctctggccctggccctggccgtcctgtgtgatctgctccagcagtgggaccagttggcccctggactgcccatcctgctgggatggctgttgggagagagtgatgacctcgtggcctgtgtggagagcatgcatcaggtggaagaagactacctgtttgaaaaagcagaagtcaacttttgggccgagaccctgatctttgtgaaatacctctgcaagcacctcttctgtctcctctcaaagtccggctggcgtcccccaagccctgagatgctctgtcaccttcaaaggatggtgtcagagcagtgccacctcctgtctcagttcttc

SEQ ID NO: 4884 - DNA, 579 bp, Homo sapiens; identical to SEQ ID NO: 210
  unsure (511): n=A,T,C or G

SEQ ID NO: 4885 - DNA, 285 bp, Homo sapiens
ctgttaatcgagtagcgctttgaagaaatgtaatggcttttcttaagtctccttctgacactttaacaagataagctattccctcatcactaattttgacattttccttcttggcaatgtctagtaatcgctgctgttgaattttatctgacagaggcttgaagcggaattttgaacatctagaggtcaggggttcaattattcgactgacatagttacagataagacagaatcgggtggctttcgactccttctccatggtacgtcttaaagctgcctgagcag

SEQ ID NO: 4886 - DNA, 345 bp, Homo sapiens
ctgctgaaaacttccttgaagaagaaattattcaagagcaagaaaatgaacctgagcccctatccttgagctcagacatctccttaaataagtcacagttagatgactgcccaagggactctggttgctatatctcatcaggaaattcagataatggcaaagaggatctggagtctgaaaatctgtctgacatggtacataagattattatcacagagccaagtgactgaacacgcattcccaactatatatctacagatgcattccattttaactcttcttgagctaaaacgtcaaataggagaggaagataagataaatatttgtaaataaaacctaaagttt

SEQ ID NO: 4887 - DNA, 86 bp, Homo sapiens
aaatgctttccctgagtattctatgaagtctggggatcttcgaatgctattaatcttagacagtaaattttataaagaaattcttt

SEQ ID NO: 4888 - DNA, 355 bp, Homo sapiens
ccacctcaagatgaaaacagataactccctaaatgttaactggctctactcccctaatattaaacataaaaaccacatgggaaatatagaaattcaaatagaagtaacataaacctgtcataaatcgtaaacaaaaaactatttgtgggacagcatggatgacaaatggtctactgtgtaaattttagaatgaggcagacaaaagttggaaggccggttaattttcccctccttctcctgcttcagcttcgtctccttgggtatccgatgtccacaatgtcaagttgtctctcagtaattgcattattagcgtgctgtctttgtatgactcttcacttaatgtatcaagttcagc

SEQ ID NO: 4889 - DNA, 86 bp, Homo sapiens
aaagaatttctttataaaatttactgtctaagattaatagcattcgaagatccccagacttcatagaatactcagggaaagcattt

SEQ ID NO: 4890 - DNA, 568 bp, Homo sapiens
  unsure (562): n=A,T,C or G
ccatgagtgacaggtggcctcttggtgggagaggtggggcagggggaaggcagctcccactagaccagggcagtatttaggggaaggaggcagattggagcagttggctgccaacacctggcctcactcagggagaggggccttgggcctggaagatatctgggtgaggtacccacaccatctgctgcaacctctgtgtatccattatgggctcacgccattcacaggcatgaattgagcacctagtatgtgggaaaacaggggaaacagagatggcacagacatggtctccatccttcgggggctccagtctagttgggggagatcagagaagttccatttgccactctaggccaagctaggtaagcggcagagccatgaagcattgtgggagcttggaggagggagtgagcccttgcagtcagggagaaggagtcagcctggggagacttccagaaagtagccctttgaccctgaggaggtggggatcagtcgtgatgaaagtaatagccattcagtagccccttgtaattcaccctgagccaatgcctggaggcagganaaagta

SEQ ID NO: 4891 - DNA, 198 bp, Homo sapiens
cctcggcctcgggcagcgtcagcatcgaggagatcgacctggagggcaagtttgtgcagctcaagaacaactcggacaaggatcagtctctggggaactggagaatcaagaggcaggtcttggagggggaggagatcgcctacaagttcacgcccaagtacatcctgcgcgccggccagatggtcacggtgtgggcag

SEQ ID NO: 4892 - DNA, 545 bp, Homo sapiens
  unsure (496): n=A,T,C or G
  unsure (530): n=A,T,C or G
  unsure (542): n=A,T,C or G
cctctggccggagctgcctggtcccagagtggctgcaccacttccagggtttattccctggtgccaccagccttcctgtgggccccttagcaatgtcttaggaaaggagatcaacattttcaaattagatgtttcaactgtgctcttgttttgtcttgaaagtggcaccagaggcgcttctgcctgtgcagcgggtgctgctggtaacagtggctgcttctctctctctctctcttttttgggggctcatttttgctgttttgattcccgggcttaccaggtgagaagtgagggaggaagaaggcagtgtcccttttgctagagctgacagctttgttcgcgtgggcagagccttccacagtgaatgtgtctggacctcatgttgttgaggctgtcacagtcctgagtgtggacttggcaggtgcctgttgaatctgagctgcaggttccttatctgtcacacctgtgcctcctcagaggacagtttttttgttgngtttttttttttttttggtagatgcatgacttgngtgtgatgaganaat

SEQ ID NO: 4893 - DNA, 556 bp, Homo sapiens; identical to SEQ ID NO: 211

SEQ ID NO: 4894 - DNA, 272 bp, Homo sapiens
aaatcttttctcccgtgtccctcttcttcaagcaactgaattatctgtataaaatggaaacatatctggttcccatttcaaacgatagtacagataccaaagaggagactgccagaaaaggagagtacaaagtgacctcttagagaggcccaggcacttgctgaaaatttaggggaagggtatgagatttctaaatgattgataatcacacaggtgacaactacaacacaaaaaaaccattgacaggaaaaatgaacatagttctccttttt

SEQ ID NO: 4895 - DNA, 310 bp, Homo sapiens
ctgtgacttatcatggagttgataacaagaagaataaagggcagctcactaagagccctctggcacaaatggaagaagaaagaagggagcaagtagctaaaattaagaagatggagatggagatggagcaggtgtttgagatgaaggtcaaagaaaaagttcaaaaactgaaggactctgaagctgagtctgcagatgtggatcctgactcctgagagaagtagctcaccgtgacgaagctgcgtttgcttttatcgatttgcaaatcaaagaagggggacatattgggagaaggccccccaaaatctgg

SEQ ID NO: 4896 - DNA, 601 bp, Homo sapiens
  unsure (550): n=A,T,C or G
  unsure (576): n=A,T,C or G
ccatcagcacgagggcactgaccagcacggcatacaaggtggccttccctagcaagatctcatagaggatggtggcagacaggaccccttgctggtaagactctgttgacaagaacagagcatgtaggcacctgtgcacaggtggctctggcctccctcacgcccctgtgtccgtggattctccatgccctggttcgagagcagagacggcgaaagatagagagaaaaaggagagactcacttaccggaggtgaagccacagtctgaaagaaaacaggggaagaaaaatggatgagagaatgctgctttgtaaggacattgagccttacatcacagactcacaggccacaaacacatgcatatcagatagtacaaagttagcctcctttgatagccctggttctgtctccctcatgctgctccagtgccagcgaagtggtcactatgatcttaggaaaccaggaccccagaagagaatgggatgcacaccactcagatgctgagctgtatggctggtcctcagggagacttgaaggcttagctctaaggngtcaggatctgaaggaagaatgagcntgaggtgctccattcagcctctatg

SEQ ID NO: 4897 - DNA, 526 bp, Homo sapiens
  unsure (424): n=A,T,C or G
ccaacatggggaaaccccatctctactaaaaatacaaaaattagccgggcgtggtggagcacctgcagtcctagctactcaggaggctgaggctggagaatcgcttgagcccggaaggtggaggtgcagtgagccaagatggcgccactgcactccagcctgggcaacaaccacaactgaaaaaaaaatctactgaggccagagtgagttggggcggggagcatggagagggggtcaggcttagccccaacaactcagaatttcacttccttgtacggccctcactttctccacctggccccggggcaggtctgagggtctgaagtctgttgatctgaaggtcctaggcaaatccagtcacttgggagccggagatatttaacatcacggcccggtcccctttcccaggggactcatttcctancactctctccactgtccttgccccacccctgggggaaaaaatgtatttttcttttgtgaatacttcctgaaacttgcgggcatagaaaccacaaactgctca

SEQ ID NO: 4898 - DNA, 561 bp, Homo sapiens; identical to SEQ ID NO: 356

SEQ ID NO: 4899 - DNA, 635 bp, Homo sapiens
  unsure (555): n=A,T,C or G
  unsure (569): n=A,T,C or G
  unsure (580): n=A,T,C or G
  unsure (621): n=A,T,C or G
ccacaactgtgaagttagaaaagccctgtcaaagcaagagatggctagtgcttcatccagccaaagaggtcgaagtggttctggaaactttggtggtggtcgtggaggtggtttcggtgggaatgacaacttcggtcgtggaggaaacttcagtggtcgtggtggctttggtggcagccgtggtggtggtggatatggtggcagtggggatggctataatggatttggtaatgatggaagcaattttggaggtggtggaagctacaatgattttgggaattacaacaatcagtcttcaaattttggacccatgaagggaggaaattttggaggcagaagctctggcccctatggcggtggaggccaatactttgcaaaaccacgaaaccaaggtggctatggcggttccagcagcagcagtagctatggcagtggcagaagattttaattaggaaacaaagcttagcaggagaggagagccagagaagtgacagggaagctacaggttacaacagatttgtgaactcagccaagcacagtggtggcagggcctanctgctacaaagaanacatgttttanacaaatactcatgtgtatgggcaaaaaactcgaggactgtntttgtgactaattg

SEQ ID NO: 4900 - DNA, 353 bp, Homo sapiens; identical to SEQ ID NO: 212

SEQ ID NO: 4901 - DNA, 305 bp, Homo sapiens
acaacaccgggaatattgccagagttaacctgaccaccaacacgattgctgtgactcaaactctccctaatgctgcctataataaccgcttttcatatgctaatgttgcttggcaagatattgactttgctgtggatgagaatggattgtgggttatttattcaactgaagccagcactggtaacatggtgattagtaaactcaatgacaccacacttcaggtgctaaacacttggtataccaagcagtataaaccatctgcttctaacgccttcatggtatgtgaggttctgtatgccacccgt

SEQ ID NO: 4902 - DNA, 602 bp, Homo sapiens
  unsure (524): n=A,T,C or G
  unsure (540): n=A,T,C or G
  unsure (579): n=A,T,C or G
ctgtatctgtcatttggtgccactaacttaggccagattaaacagaaagcaacctctgccacaaagcatctccctaggaagagatcacaacataaactaaagcactaactctcaagatcctgttgtcacgatgattcagttcatatattatctctgacttttctgagatgatctaataagttctaagcaaaaataaatatttaatctttgattaaataacattattacttagtctagggtgactgggttacgtaggatggcttgaaagagataagccttggtggacatcttaaaaatttaactgaagtaaagagcaactggtttagttcccttcccctggagtgttgtggtgttgagaagacaaaactttgggaacaatcacagaggggctagatagacaatgcaaaattgctgctggagagactgagtgagtagatgttaaataactaagtgcgtgctggatgaataatgttctggatccaagaaagacatacacaggtaaaaaatgaattcatgccttttgngttgttcaaaacttgnactttatttttctcaaatatttttacttatgctttttgncattatccacagtgttttttttt

SEQ ID NO: 4903 - DNA, 566 bp, Homo sapiens
aaaaaaagaaaatacaaccatgggaaagaaatcttaaatgaaaaacgcatctcattgtaggcatttttgcctcatattttactgggccatgtttgtttcctggtactcatgtatttttttttccagatctctttccccaagttgctattgtaagagtattctgctgcgtgtggatgcagttatacacattaaagcagatctggagtctgaagtagctataaagcagctataaaacagaaatacatgcatagctgcagaaaccatgataggtagaggacttttcttttggttttgttttgttttgttttgttttgtttttggttttacagagaagagatttttattacaaagaaaaaaattccagtgaattgtgcagaaatgctggtttttacaccatcctaaagaaaaactttacaagggtgttttggagtagaaaaaaggttataaagttggaatcttaaattgtaaaattaaccattgagtgtcaaagttctaaaagcagaactcattttgtgcaatgaacataaggaaagactactgtataggttttttttttttctcctttt

SEQ ID NO: 4904 - DNA, 304 bp, Homo sapiens
aaaaacaagttccccagagaagctggcacttcctttgccctccaaaaaggacctgaaaagtcccaatccaaactttagaaaattagttatgagatgcaataaatgatgatcaaagcagtcagagggagaaggatgaatgtgtcttccatttagctagagactgtagcatagcctctttaggtgttggtggatcagtaaaaacgactgaagtaccagaagtgcttggaaggataggggtacaaagtaatgaccataataccttgtctaaatcagtagcagggcttcatggctaggaaactttttt

SEQ ID NO: 4905 - DNA, 592 bp, Homo sapiens
  unsure (387): n=A,T,C or G
aaaagcaaaaatgcaattctgtagatgaaaacagttatctcagagggtcaaccacacaatgtcatacagagacgctggtcttaagccatttttttccatattcatataatttcaaaacatgagaagtatcctacttgctgagaagtgccaaatgaccctaatattcaagatatcttagaaatgctatcctttagttaacatacccttaaattttgtaacattgattttaccctggatttagtccatacacgtcaatgtacagacttatcaaagtacaatgctggaacaactagtgtttgtatttttggaatctagaaaataaaaacaatatagccatgatttcaaataggtgagtttccttatataacatttattcatatttattgnataagcatcatgattttttcttccaattaagttttagtgacttcctaaagacatttttaacaacattcctcaaaaataaacttacttagttttcagttttagttactagtgcctgcctataaaaggaccttaaatgatttaaccctaaagccagattcattcctatatatacccagtcagttgtctgcaaagaagtcctaagact

SEQ ID NO: 4906 - DNA, 440 bp, Homo sapiens
  unsure (300): n=A,T,C or G
  unsure (351): n=A,T,C or G
  unsure (362): n=A,T,C or G
ctgccgctcatccaccatcagtgactttgtgctgttatcattcatgtgcaccttgacgacgagcttcttaaccttggcctccttcagtttttccagcgccagcttaattttatcagccttggcttgggcttcttcctcttcctgagagagaggttcaggaggtggtggtggcagtggaaggtctaacacaggatcggctggtggaggtggtaagtcatcctcatattggctgataccagtggcagcaacatttgttccataaccaagagaggctgcaccactgaaaattgatgcttgtanagatgctgaatgatgttgattctgcaaggactctttctgtgcctggattgncctctgctcancctcacttatgtctgctaccagatctgccatgagagcatctaaatcttggtcttccagtgcatttaaggactcattta

SEQ ID NO: 4907 - DNA, 282 bp, Homo sapiens
ctggtgctgcttgcaggaagggcagtaccaggggttttccttctccagggtctccacagtggtgaagagctcaatgcactcctgcagccgcacgggagccttcttcatcacgtacccgacgcagtcatgcttcacgtagccctcagcctctacctcgtcatagtaacgcttcttcatctctggctcccagtcgatagcaatgtacggctgggcatggacttcttcaggggaggttgtgcggtcgctggtcccattggagttcaccgtctgcagggtgaacag

SEQ ID NO: 4908 - DNA, 300 bp, Homo sapiens
gctgtgtgaacgtgtatgtacctaggatatgttaaatatatagctggcaccttagttgcatgaccacatggaacatgtgtctatctgcttttgcctacgtgacaacacaaatttgggagggtgagacactgcacagaagacagcagcaagtgtgctggcctctctgacatatgctaacccccaaatactctgaatttggagtctgactgtgcccaagtgggtccaagtggctgtgacatctacgtatggctccacacctccaatgctgcctgggagccagggtgagagtctgggtccagg

SEQ ID NO: 4909 - DNA, 549 bp, Homo sapiens
ctgtgaacatctgttctttcttcctcttctgtctactgcatgcaggcccggaagctgagcgttagtcaaaggtacaggaagggaaaagagaagagggcaaggcccatcccccaagaaaggaagggctctgatgcagagggagcaggagctgaggtggagacggccactgcctctctcaccctctgttccatccctctgctcaagaaaaccaggcttagcagagtgagacagacgctttttattggtctggctggcgtgcctagtggaaagctcaggcagagcttcctatcttgccctggctcccatcttccctctcctgggagttcatcacacatcccgagagggaagagtgtcctgggcagaggtggcaggcaaagccgggtaaaaactccagggctgggaagcaaatggggctcagggtgatgcagaaaatgtgatgttgccaggccatccaaataaagcatccatcggggcagaggagaagctgtttccctgcagacactcctctgcccccaccaggaatgggaggggcaggaggaagagcttccc

SEQ ID NO: 4910 - DNA, 513 bp, Homo sapiens; identical to SEQ ID NO: 213

SEQ ID NO: 4911 - DNA, 468 bp, Homo sapiens
ctggctgtgatttttgctacaggccacagtcaggagcacatgatagtagcattggcacaggccacggtggaccgtttttcagtgtacagttccagcaaaacctggtattctccctgaggaatagtaaattcaggattattgacaggcccagcatagtaaatctgctctcctttccttcttccacagaaagaaaacttgggcagagccgcctcacagatgggataggagaaattcaaaacagatgagccttgagacatgagagctaggtcaagaaaaagctctttgatgtcctctctcagaataattccaaatctaatgttgatatttgattttaattgcttggaacacttttcaacagaaaagccaaaatcttgtaatggatcgcaactctggtagagcacttccaagccgctgtcgctacagaccacgtgtgtgggccaggctttcccaccgccgcctccactgcag

SEQ ID NO: 4912 - DNA, 575 bp, Homo sapiens
ccatggagacagggccgttttcttccctgggagtttgctcagaaccaggcactgctggggaccatggatggggaggaggggcacagggcccagtgcagatgaaggttgcacaaacaccccaaactgagagcccggcctcctggcaggcgagtaagcgagcaggcgcctcgacagcacagcctgtgctttcccctcagatcaatctgctactcccttttccttaggagggagaggagcaggcagataagcctggtgtccaccaccctctctgccccacctgtagaggaagggctcaagggacaggagagcagagagggagtgtgacgctggcctcagagcccgtgcagggtcgaggagaggctctcctcggtggggagtcaggggaagatcggtttcctgttgaatctgggctgggtgtgtcttagctgatcttctgtatcagcttctcgtcagacaggcagtagaggctgttgatggacaagtctgagatgaagtgctcgcaggcttttcgagtgatctgcttgcatcctcgaaggtcgatcaaggtgacgttggcaatgcgccgtaggtagatc

SEQ ID NO: 4913 - DNA, 555 bp, Homo sapiens
ctggctgggcccaagagctccatctgtttccccaaagtacaggcagcttctaggccattgagtggggcatgatattggatgcttggctcaggaaacaaccccagccaacccaaggggcagtgggacatgttggcctcaggttagaaattattgctcaaagcagaaacagttgtgtcctagagagggtctgttaaaccctctttccatgtgtatctctatgtagcaattgatgggccctgcggtcaggatccctggtttctccagctccatgaatgcctccctgtgaggccctggacagtttctccctcttcttctcctggcttcagtttccccgtatgtacattgagacagtaagactggatgattctcaggttccctctggctttccattctggcatcccagagtggaggctctgggagggcagaaccctgttcctgcctcagtttccccacctgtgggtctgcgtatagggctgggtatggaggtactgagtaatggagtgctgcgtgaacatcccagtctccctgtggatagctgtgctgtgagatccaact

SEQ ID NO: 4914 - DNA, 490 bp, Homo sapiens
ctgcaactcggggacatacaggtgcactctgcaggacccggatgggcagagaaacctaagtggcaaggtgatcttgagagtgacaggatgccctgcatagcgtaaagaagagacttttaagaaatacagagcggagattgtcctgctgctggctctggttattttctacttaacactcatcattttcacttgtaagtttgcacggctacagagtatcttcccagatttttctaaagctggcatggaacgagcttttctcccagttacctccccaaataagcatttagggctagtgactcctcacaagacagaactggtatgagcaggatttctgcaggttcttcttcctgaagctgaggctcaggggtgtgcctgtcagttacactggaggagagaagaatgagcctacgctgaagatggcatcctgtgaagtccttcacctcactgaaaacatctggaaggggatcccaccccattttctgtgggcagg

SEQ ID NO: 4915 - DNA, 418 bp, Homo sapiens
ctgagtttttatccaattgaaatagtaatttaagtcactgccttccatcagttcttttccccaagctgctaacttggcaataattcttgctgccatatgaacagtgaagggatcctggcgattcaacattggcagaaagtagggccacgcagtgttcttgctacatcttgcatagtcaaagaaaatgctaacacgctgatgattttcctgcagcatatcatccaccatagttagtatatactgaacggtctgttctttgcagatatgagtcatcagatttataaatgttttagcacactggctgccttcagtttgaagcatctcttgcttctcttcagggcttcgtttcatttcaaacctctgaataaactcacaatcttcagcagaaatcatctgtccctgaagataggattgccag

SEQ ID NO: 4916 - DNA, 202 bp, Homo sapiens; identical to SEQ ID NO: 358
  unsure (45): n=A,T,C or G
  unsure (133): n=A,T,C or G

SEQ ID NO: 4917 - DNA, 538 bp, Homo sapiens
  unsure (77): n=A,T,C or G
ctgtacacatgaaaattgaattgtttcaaaaggagcaatgatagcaagagaaagttcttggcattttaagaaaagtncatatacatagcaagaaatgaaagtaaatcaaaatacatagctttgtacatgttagaaatatccaatgtgccaccaacacaacaaccgccctattaaaaagtcctcaggtctggagacatctgtatttttctttgtataactacattcgcattacccaaccacatatctctcccatggtctgttacccattaggaagcttttaaccagaatttttggcaatatgcttttcttcaaataaaacaagccttcaaataaatcattatgtctgacaactgaattgggtaaagtctttctgaaatatgtgtaatctttagaaaattcttcttttttccttcataaatcagcagtgctccatcttcaaataaatcatgatcagtcacaatcttaactcatgtgctcatatgttctcttcatccaacattttgttgataccatcacatagtttttgtaagtggggttt

SEQ ID NO: 4918 - DNA, 322 bp, Homo sapiens
  unsure (296): n=A,T,C or G
ctggaaacgctgagtattcgaggaaataacattcggtattttattctaccagacagtttacctctggatacactacttgtggatgttgaacctaaggtgaaatctaagaaaagggaagctgttgcaggaagaggcagaggaagaggaagaggaagaggacgtggccgtggcagaggaagagggggtcctaggcgataatgtctctcaagatttcaaagtcatatgagatttgggatattttttgtacaggttgtgtttgtttatgtcagtttttaataaacataaatgtggggcanaaaaaaaaaaaaaaaaaaaaaaaaaa

SEQ ID NO: 4919 - DNA, 520 bp, Homo sapiens
aaaagatagagccacatggacagaaagatcaatattgccctttatagtggctgctgcggttgtagctccgagactatattggagggggtgaggaaggacaagggggccagcaggtgggggacagcggcagacccctcccccaccccgatgctttggtccaaacaccacctctgagggctcccttgcttgggcttctcccaagattcccatccaccctcagaggacacagctactgcctcaactgggaggattcggaaagcttcagaaggtcagaaggcattggtagagggttccgggggaggctgggactacctccccccggagtgtttgaaaagccaggctggttcaggttagatactgaggtggggatgccagagctccatgctgaggaacagggtagagggtgtgggcttctagcacccaggggtctgcccccggcagtggggccgccagtagaaacgcagtcgcttctggtaggtgtccaggttgcgcttcaggcagaaggccacctccttgtcac

SEQ ID NO: 4920 - DNA, 284 bp, Homo sapiens
ccaggaatcgcttaatcctgaaagtcttgtgagaagacatggcgagcagcggagtcaagaacacaccacgatggcggagaaaggagacattggagaagaaccaagctgggtctataaggaattgcacatgagatggcacacatatttatgctgtctgaaggtcacgatcatgttaccatatcaagctgaaaatgtcaccactatctggagatttcgacgtgttttcctctctgaatctgttatgaacacgttggttggctggattcagtaataaatatgtaagg

SEQ ID NO: 4921 - DNA, 453 bp, Homo sapiens
ctgccatgttgagaggtgccttgtggagaggctcatgtggcgaggaactgagactggcttctatccaacaaccagtgaggaactaaggccctaaagtcctatagtccacaaggaactaaatcctaccaacaactacatgagtgagcctggaatctgattttccccagtggggacttaaggtacctacaacctggctgttatgggctaaactgcatcctgcccaaatttatatgtttgagtcttaactcccagcacttcagaacatggttttgtttggagacatagtcattaaagaggtaatgaagttaaaatgaggtcattaggatgagtcctaatccaataggactggtgttcttatatgaagaggaaatttgaacacagacacatatacaggaaagaccatgcgaagaagacacagagaggaaacggccatctacaatccaaggagagagg

SEQ ID NO: 4922 - DNA, 343 bp, Homo sapiens
ccacttgtgtgggtcctcacaagcaaagagagcactaaacttgacattgggggtccaccactccaactttgctttctgaaggttttggtgtacattgagccccagaaggaaaggagagtatctgtgagtgggggcctcccttgaccccagtacgaagtctatgccctgaatccccagagtagcccttcctggtgcccaactggcctggggacaaacagcgtccactacatctaggactgccggctaagtggacacacttcttgacctcctaccaggaactttggtaaaagctagctttggggaaggggttgggtgtaaatatgagagggtggagggagaccag

SEQ ID NO: 4923 - DNA, 538 bp, Homo sapiens; identical to SEQ ID NO: 214

SEQ ID NO: 4924 - DNA, 562 bp, Homo sapiens
  unsure (25): n=A,T,C or G
ccatgagtgacaggtggcctcttgntgggagaggtggggcagggggaaggcagctcccactagaccagggcagtatttaggggaaggaggcagattggagcagttggctgccaacacctggcctcactcagggagaggggccttgggcctggatgatatctgggtgaggtacccacaccatctgctgcaacctctgtgtatccattatgggctcacgccattcacaggcatgaattgagcacctagtatgtgggaaaacaggggaaacagagatggcacagacatggtctccatccttcgggggctccagtctagttgggggagatcagagaagttccatttgccactctaggccaagctaggtaagcggcagagccatgaagcattgtgggagcttggaggagggagtgagcccttgcagtcagggagaaggagtcagcctggggagacttccagaaagtagtcctttgaccctgaggaggtggggatcagtcgtgatgaaagtaatagccattcagtagccccttgtaattcaccctgagccaatgcctggaggcaggag

SEQ ID NO: 4925 - DNA, 639 bp, Homo sapiens
  unsure (612): n=A,T,C or G
  unsure (617): n=A,T,C or G
  unsure (624): n=A,T,C or G
  unsure (627): n=A,T,C or G
aaagatttagtgcttaacattttcccaagtgtgggaacattatttttagattgagtaggtaccttgtagcagtgtgctttgcattttctgatgtattacatgactgtttcttttgtaaagagaatcaactaggtatttaagactgataattttacaatttatatgcttcacatagcatgtcaacttttgactaagaattttgttttacttttttaacatgtgttaaacagagaaagggtccatgaaggaaagtgtatgagttgcatttgtaaaaatgagactttttcagtggaactctaaaccttgtgatgactactaacaaatgtaaaattatgagtgattaagaaaacattgctttgtggttatcactttaagttttgacacctagattatagtcttagtaatagcatccactggaaaaggtgaaaatgttttattcagcatttaacttacatttgtactttagagtatttttgtataaaatccatagatttattttacatttagagtatttacactatgataaagttgtaaataattttctaagacagtttttatatagtctacagttgtcctgatttcttattgaatttgttagactagttctcttgncttgngatctgngtncaattttagtca

SEQ ID NO: 4926 - DNA, 526 bp, Homo sapiens
  unsure (476): n=A,T,C or G
ccaggtgtgggctcaagagccttactctttccatctcagtttaggggcgcagccagctcctcttcccaatagggctctttctgctttccctctccttggccctagatttgtaatccatgaaaaagcacaaggtcctggctccttgcggtcacattctggttctctgcgttttgtggactctgctctcactgttcacccagcactagcagtaccagatggttctgtggagtcctggggaatggagagagcacagtctgactccctgccaagtagccaggagttgacttgcccatggtccgctggctttcccaccacttcctacaggatgggatctaagagactcaagagctgggtttctttcagcactctgtactgtcccaaatagcaaacaaatcactttgtagccagatttctgaatggaaatgagaaattgaattctccatggacttttaggtttatgggggagttttagctgngtttcttggttttatttcagccaaacatgtctgcttttgatttttttttt

SEQ ID NO: 4927 - DNA, 236 bp, Homo sapiens
ctgggccgctaagtaagggcctccaaagacttccatacccaaaccctggagcctgtgagggtgacctgatgcagcaaagaaggactctgcagacgggagtgagttaagggtcttgcgaggtcattctggacttggggtgggccttaaattcaatgaccagggttcttataaagagagcggccacaggaagacggaggagagactggaagatgcagccgcagcaagggacacggtgg

SEQ ID NO: 4928 - DNA, 463 bp, Homo sapiens; identical to SEQ ID NO: 359
  unsure (6): n=A,T,C or G
  unsure (43): n=A,T,C or G
  unsure (45): n=A,T,C or G
  unsure (47): n=A,T,C or G
  unsure (108): n=A,T,C or G
  unsure (110): n=A,T,C or G
  unsure (420): n=A,T,C or G
  unsure (448): n=A,T,C or G

SEQ ID NO: 4929 - DNA, 596 bp, Homo sapiens
  unsure (591): n=A,T,C or G
ccacactgcacctccttcgctgtcaagtgggtcccccacgaagatactgcacggagagcagtgccaagcctgtggatcaggaatatcaacagcccccagagagtggtgctggctgagggtctgagagcaggacaggaaaacccacctatggaataggtgcctatccctgtgaagatgaacctctggcccttccaggatggaaggagtgcaatgtagtcaactcctcacttagggtctggttggtcacctaaagaaatagagccctaccagggaagatcattgggttcaaatgctgatgagtaggacatttagaggtggcagtgtctggatctaccttggtaggagggagtcagtactgttggacccataggtagcctcatccctgccactgtgtttgctccatttatgtacccatcctacccggcctgggctgacccatggggaaggctggctaatttcagtgcttctgcttggttgttcagggccatttcaggtttgggtgttttctggggatgttaacatgggattcaggctcaactcacaagaaacttttccatctcatgatggatgctgttgggcatgtccaatgtntgact

SEQ ID NO: 4930 - DNA, 139 bp, Homo sapiens
gtgctagggaaggcgggaaccttgggttgagtaatgctcgtctgtgtgttttagtttcatcacctgttatctgtgtttgctgaggagagtggaacagaaggggtggagttttgtataaataaagtttctttgtctcttt

SEQ ID NO: 4931 - DNA, 578 bp, Homo sapiens
aaattttctttttgtttcactggaaaggaaagatgatgctcagttttgccggacccaggatgaagaggttggagatgggaccacatcagtaattattcttgcaggggaaatgctgtctgtagctgagcacttcctggagcagcagatgcacccaacagtggtgatcagtgcttaccgcaaggcattggatgatatgatcagcaccctaaagaaaataagtatcccagtcgacatcagtgacagtgatatgatgctgaacatcatcaacagctctattactaccaaagccatcagtcggtggtcatctttggcttgcaacattgccctggatgctgtcaagatggtacagtttggggagaatggtcggaaagagattgacataaaaaaatatgcaagagtggaaaagatacctggaggcatcattgaagactcctgtgtcttgcgtggagtcatgattaacaaggatgtgacccatccacgtatgcggcgctatatcaagaaccctcgcattgtgctgctggattcttctctggaatacaagaaaggagaaagccagactgacattgagattacacgag

SEQ ID NO: 4932 - DNA, 483 bp, Homo sapiens
  unsure (462): n=A,T,C or G
cctacagacttatttcttcttggacacacccacggtgcggccacggcggccagtggtcttggtgtgctggcctcggacacgaaggccccagaagtgacgcagccctctatgggcccgaatcttcttcagtcgctccaggtcttcacggagcttgttgtccagaccattggctaggacctggctgtattttccatcctttacatccttctgtctgttcaagaaccagtctgggatcttgtactggcgtggattctgcataatggtgatcacacgttccacctcatcctcagtgagttctcccgccctcttggtgaggtcaatgtctgctttcctcaacaccacatgagcatatcttcggcccacacccttaatggcagtgatggcaaaggctattttccgccgcccatcgatgttggtgttgagtactcgcaaaatatgctggaacttttcagggatcactanagacatggctgcagcacaagc

SEQ ID NO: 4933 - DNA, 557 bp, Homo sapiens
cgtgactaagatggaggcgtttttggggtcgcggtccggactttgggcggggggtccggccccaggacagttttaccgcattccgtccactcccgattccttcatggatccggcgtctgcactttacagaggtccaatcacgcggacccagaaccccatggtgaccgggacctcagtcctcggcgttaagttcgagggcggagtggtgattgccgcagacatgctgggatcctacggctccttggctcgtttccgcaacatctctcgcattatgcgagtcaacaacagtaccatgctgggtgcctctggcgactacgctgatttccagtatttgaagcaagttctcggccagatggtgattgatgaggagcttctgggagatggacacagctatagtcctagagctattcattcatggctgaccagggccatgtacagccggcgctcgaagatgaaccctttgtggaacaccatggtcatcggaggctatgctgatggagagagcttcctcggttatgtggacatgcttggtgtagcctatgaagccccttcgctgg

SEQ ID NO: 4934 - DNA, 588 bp, Homo sapiens; identical to SEQ ID NO: 215

SEQ ID NO: 4935 - DNA, 392 bp, Homo sapiens
ctgcgctgcacagcctgggcagcaggctgagtatgggctcctcactcccacctcctggccttcaaggccctacttgttgccccagacagccatctttgagaacacaggtcttgggaggaagcggctggacttcatgtaggcagagatcttctccaagccctcaaagcgggagatgaagtccttcagatttgggaaggcgtccaagcagttgggctcaaatatacggtggaggtcaaggacatcatagacgagaaaatctacaaaagtgatcttgtttcctgcaaaccatggccgcttccccagaaactctgagtagagctttagcttttcagggagttcctccaagtactttggcttcagtttctcaaattctggattgtagcagatcatgc

SEQ ID NO: 4936 - DNA, 587 bp, Homo sapiens
aaagatttagtgcttaacattttcccaagtgtgggaacattatttttagattgagtaggtaccttgtagcagtgtgctttgcattttctgatgtattacatgactgtttcttttgtaaagagaatcaactaggtatttaagactgataattttacaatttatatgcttcacatagcatgtcaacttttgactaagaattttgttttacttttttaacatgtgttaaacagagaaagggtccatgaaggaaagtgtatgagttgcatttgtaaaaatgagactttttcagtggaactctaaaccttgtgatgactactaacaaatgtaaaattatgagtgattaagaaaacattgctttgtggttatcactttaagttttgacacctagattatagtcttagtaatagcatccactggaaaaggtgaaaatgttttattcagcatttaacttacatttgtactttagagtatttttgtataaaatccatagatttattttacatttagagtatttacactatgataaagttgtaaataattttctaagacagtttttatatagtctacagttgtcctgatttcttatt

SEQ ID NO: 4937 - DNA, 551 bp, Homo sapiens
  unsure (524): n=A,T,C or G
  unsure (525): n=A,T,C or G
ccaagggaaggtctatcctcttatcaaccgaagacgatttcaacaaatggacgtacttgagggcttgaatgtcttggtgacaatatctggcaaaaaggataagttacgtgtctactatttgtcctggttaagaaataaaatacttcacaatgatccagaagttgagaagaagcagggatggacaaccgtaggggatttggaaggatgtgtacattataaagttgtaaaatatgaaagaatcaaatttctggtgattgctttgaagagttctgtggaagtctatgcgtgggcaccaaagccatatcacaaatttatggcctttaagtcatttggagaattggtacataagccattactggtggatctcactgttgaggaaggccagaggttgaaagtgatctatggatcctgtgctggattccatgctgttgatgtggattcaggatcagtctatgacatttatctaccaacacatatccagcgtagcatcaaaccccatgcaatcatcatcctccccaatacannatggaatggagctttctggtgtgcta

SEQ ID NO: 4938 - DNA, 490 bp, Homo sapiens
aaatgaaatgcaatataaaatactaatacacttttcttccaaaagtggaaatgcttaagtaccctatactagaaaaaaaaaaattaggctgtttattcaattccacaatgtataatacagcagttttatgtcccttattgctgacagcttcgataaaaactattaacaagtagttccaagcacagaaatagatgtacagtatgagcacgatttttctttatattaatttttaatgtcctatcatgtggattaaatgcataaagggcaaataaaaatgaggaatcttccctaagtaatcaaaacatatgtcttattgagaagaaaattttagaagctgattaaaatccttcagcactagctttgcaattaattctggagaaataccttgacacatcttatagtatttgagtttccttataactttaccttccttcaaacagaagctacctatgtgcaaataaactggttgttctgtcaggacttctaaaag

SEQ ID NO: 4939 - DNA, 92 bp, Homo sapiens
cggccgcagaagcgagatgacgaagggaacgtcatcgtttggaaagcgtcgcaataagacgcacacgttgtgccgccgctgtggctctaagg

SEQ ID NO: 4940 - DNA, 567 bp, Homo sapiens
ctgagagccatccccacactcctcagatgcctccatcaacaccaagcagcagtttcttaaccacgttgaaaccaagactgaagactgaacctgaagaagtttccatagaagacagtgcccagagtgacctcaaagaagtgatggtgctgaacgcaacagaatcatttgtatatgagcccaaagagcagaagaaaatgtttcatgccacagtggcaactgagaatgaagtcttccgagtgaaggtttttaatattgacctaaaggagaagttcaccccaaagaagatcattgccatagcaaattatgtttgccgcaatgggttcctggaggtatatcctttcacacttgtggctgatgtgaatgctgaccgaaacatggagatcccaaaaggattgattagaagtgccagcgtaactcctaaaatcaatcagctttgctcacaaactaaaggaagttttgtgaatggggtgtttgaggtacataagaaaaatgtaaggggtgaattcacttattatgaaatacaagataatacagggaagatggaagtggtggtgcatggacgactga

SEQ ID NO: 4941 - DNA, 387 bp, Homo sapiens
  unsure (255): n=A,T,C or G
  unsure (277): n=A,T,C or G
ctgtcagggggtcagcgacaggcagtggcgttggcccgagcattgatccggaaaccgtgtgtacttatcctggatgatgccaccagtgccctggatgcaaacagccagttacaggtggagcagctcctgtacgaaagccctgagcggtactcccgctcagtgcttctcatcacccagcacctcagcctggtggagcaggctgaccacatcctctttctggaaggaggcgctatccgggaggggggaacccaccancagctcatggagaaaaaggggngctactgggccatggtgcaggctcctgcagatgctccagaatgaaagccttctcagacctgcgcactccatctccctcccttttcttctctctgtggtggagaaccacag

SEQ ID NO: 4942 - DNA, 297 bp, Homo sapiens
cctggttccatcctgggcactacagttgacatcagcgccatattcaaggaggtgtcgcacaatgttgagccagcccctagcacaagcttcatgcagggcgcagtaacctgcgttgtcccgatgatttacatcacaaatcttgttctctaagcagtacaggaccacttcctcatagccaagcctggctgcccgctgcagaagggtctcgccagcgttcttattgacaataagtctccgtgcttccggcggcatagggcgagactgggtggtctcctgaggggaacttgagcatggtag

SEQ ID NO: 4943 - DNA, 401 bp, Homo sapiens
  unsure (393): n=A,T,C or G
aaatcgtttgttttgaaaagtatatccttgaaaagtattttgatatagatgggaagattttcatagactggcatctatttttccacctactgtttaatgaagtaaactgttgaatgatgtaaactgttaaatgaagtaaacagttaaaactgatgacataaaagacaagcaaagcgaaggaaacatgttataaaagataagtattacagcattcttaagtatggtactttataaaatgaaaaccgggatgctgtcttctgagatatcaacatatttataaggagcacatgctatgtgacatacttcaggatgccaagaattttaattaaaactcaacttctataaagtgaatataaagctaataagaggaatatttttccacctctggcctanaccaccag

SEQ ID NO: 4944 - DNA, 497 bp, Homo sapiens
ccacaggagcagaggcagacctgggatgccccagtttctcttcagggatggatagtgacctgtcttcattttgcacaggtaagagagtagttagctaacctatgggaattatactgtggggccttgtgagctgcttctaagaggctaacctggaaactaagctcagaggcaaggtaataaagcacttcagggcttgctccccaagtgggcctgatttagcaggtggtcctgcgggcgtccaggtcagcaccttcctgtagggcactggggctagggtcacagcccctaactcataaagcaatcaaagaaccattagaaagggctcattaagccttttggacacaggaccccagagaggaaaaagtgacttgcccaaggtcgtaagcaggctactggcatggcaagagcccagcttcctgacggagcgcaacatttctccactgcactgtgctagcagctcagcagggcctctaacctgtgatgtcacactcaagagg

SEQ ID NO: 4945 - DNA, 580 bp, Homo sapiens; identical to SEQ ID NO: 216

SEQ ID NO: 4946 - DNA, 478 bp, Homo sapiens; identical to SEQ ID NO: 647

SEQ ID NO: 4947 - DNA, 461 bp, Homo sapiens
cctactatgtgccaaggaggggtaaggcagctagctctcacagacacaccccacagtgaaaatcacacacacacacacacaccccggcatctgtgctcactcacaggcagactgctcactttcttgcacctttcttgccatcacctcggccacacccacattcctccaataggcttgggaaccagcatggaagggtcaagtgtcatagaagaaaccccctagcctaccctactcccagacttcatgccagaggtttaactccacttcccttctgtttgcctgcctagatgctctccccttctccatccacaagcggtcagggcgacaggtaggcagactcctgagaaccagaagtccagaggctttgggtgtgtggagtgattccagtgccttcagattccttcaggctcctgggggtcccctctgccagccaccctatgttcagatcgtccatctgatgg

SEQ ID NO: 4948 - DNA, 479 bp, Homo sapiens
ctgtgagggtgtgactactgatgatgcttcaaaggaagaggaagcagcaatattttaggactgggtaccagcagagaaggcagggaggagggagcgggggatcaggctggagggcgcgagttcaccatgaggctgaggaacgattctctctcgtggggtccaagactagcccaggaaacagggagtcgcagggggactggagaggagacctgggccagcgggaggcagtgttctccagagggtcagatgcgtctctgattcaggccagaatacaggtcccgctggcctttccggatgggctcatagtctgggttgggaacaggtggtggcctctccttgttttgtcccctttgcctgccgccagcacccgctcctcgtgtcacaggcttggccttggcctttctattcttgctccagtagtaaaccagcagcagcaagcccccagtgatgcagatgtccactatgacaattgtggacct

SEQ ID NO: 4949 - DNA, 634 bp, Homo sapiens
  unsure (621): n=A,T,C or G
  unsure (624): n=A,T,C or G
aaacaaaatatttaatgtctatacagtaaaattattcaaacttcaaaccagtattgaaagcagttggaaaccagctaatagtttcttaatctcagatttcgagatgaatgtaaactgcattcttttgaaatgtgcaagtgtttgattcatgccatttgataaacttctgccttgtagtcattgtttgatgggaccaacttgtaaagtatgagccttaaataaatctccatgctgaaaaatgtgttctaatgcaacacaaaaacatgaagtgactgcccagaggtagagttagtgtttaggtggaaagggagatgacagctttccaaagaaggacctaaaacacaccaagattgccttctacaggaattgctgggcaggtctccgactaaaggtcttatgatgaaaaggaagaaacaagcccccaacacaaggctctgatactactggtaaatgtaggagagaattaagaatctgttaattaaaatccaaacagagcttatttcagtagtcaagttacctgacatgataattatttctgcaggataattgatgttttatgttcttttttggactttatcttcttgcaaaaatttctacaaaaattggtttcttcatccttgnggngcttattcat

SEQ ID NO: 4950 - DNA, 306 bp, Homo sapiens; identical to SEQ ID NO: 484

SEQ ID NO: 4951 - DNA, 428 bp, Homo sapiens
ctgcatcgcggcccacgacaagagggggaggtacgggaccctgttcacgatggaccgggtgctgacccccccaatggggactgtcatggatgtcctgaagggagacaatcgctttagcatgctggtagctgccatccagtctgcaggactgacggagaccctcaaccgggaaggagtctacacagtctttgctcccacaaatgaagccttccgagccctgccaccaagagaacggagcagactcttgggagatgccaaggaacttgccaacatcctgaaataccacattggtgatgaaatcctggttagcggaggcatcggggccctggtgcggctaaagtctctccaaggtgacaagctggaagtcagcttgaaaaacaatgtggtgagtgtcaacaaggagcctgttgccgagcctgacatcatgg

SEQ ID NO: 4952 - DNA, 280 bp, Homo sapiens
  unsure (97): n=A,T,C or G
ctgtgctattggtcatagagctgcttatgtcctcttccagtttgtcaatgatcatagcaaaggctttgaagatggcattagtgggtccagccaaagngataattctctcaggacaattcccttctgagatgttgatacgtgcaccactctcctcgcgcatcttcttaactgattctcctttctttccgatgatactgccaacttcctttccatgcataagtagccggatggtgagagtgacatttaatccaccttcaatcacaccggtgtccatgtcgag

SEQ ID NO: 4953 - DNA, 349 bp, Homo sapiens
  unsure (34): n=A,T,C or G
  unsure (65): n=A,T,C or G
  unsure (67): n=A,T,C or G
  unsure (77): n=A,T,C or G
  unsure (166): n=A,T,C or G
  unsure (256): n=A,T,C or G
  unsure (306): n=A,T,C or G
gacctcgtgatccacccaccttccctcccaaagnactggaattacaggcattagccactgtgccnanccgaggctgncatttttaaccggctctggatgactctgatgcagccatcctggaccttggctgtggtctggtaactggaacccaatgacgtaatcaggngccatcgggggtcatgggaaagggggatccccaaggtctgaggtggactaggaaggctttctgaagaacctgggtctgttagggcatcanccaatcaaggtacaagtaaatagaggcaaaatgagggtttgaactgtgancagttggtcctggaaaagaaagaaaccaagagattatggggac

SEQ ID NO: 4954 - DNA, 426 bp, Homo sapiens; identical to SEQ ID NO: 218
  unsure (8): n=A,T,C or G

SEQ ID NO: 4955 - DNA, 253 bp, Homo sapiens; identical to SEQ ID NO: 362
  unsure (203): n=A,T,C or G

SEQ ID NO: 4956 - DNA, 291 bp, Homo sapiens
aaaggagcatctcagttacgtgtggcggacaaaaaaaaaggagcagactgtgacagaccattcccatcggccaagtggtcgaacccgacatccaagacccagcgagcagccaagctcagcgcaacctccgggcttctcgctctgactccaaaagggtgagtacgtcgccctcgcgcacggggccttttacattgcggatgatggatcggctcgtgtcgtccatgaattccacgcgcacctgcgtgcactgtccctgagaaccggtcctgcccaggaccttggtgaccctgg

SEQ ID NO: 4957 - DNA, 278 bp, Homo sapiens
  unsure (140): n=A,T,C or G
  unsure (153): n=A,T,C or G
cctctagctgtgctgctcaagagactggatcagggtagctacaagtggccgggccttgcctttgggattctacctgttcctaatttggtgtggggtgcggggtccctggccccttttccacactcctcctccgacagcanctccctgggcagnggcctggtctcaccgtgtgcagccttgtggtttatgcttaaatgtacattttcctgctggtaaaaggagaaactgagaggtgtcctgcagaccggctgaccactccttttggagacggcaggagg

SEQ ID NO: 4958 - DNA, 566 bp, Homo sapiens
agagaggggtatgatggctaagaagcccccaaaaccagcccctcgcaggatcttccaggaaaggttaaagattactgctctacctttgtactttgaaggttttttattaatcaagcggtcaggataccgggagtatgagcattactggacagagttgagaggaactactcttttcttttataccgacaaaaagagtataatatatgttgacaaattagacatagtagacctcacatgccttactgagcagaattcaactgaaaagaactgtgcgaaattcacccttgttttgccgaaagaggaagtacaactgaagacagagaacacagaaagtggggaagaatggagaggcttcattcttacggtaacagagctgtcagttccccaaaatgtgtcactcctacctgggcaagtaattaaactgcatgaagtcctagagagagaaaagaaaaggaggattgagacagagcagagtacgtccgtggaaaaagagaaggaaccaactgaagattatgtggatgtactgaaccctatgccagcatgtttttatacagtgtcccggaaag

SEQ ID NO: 4959 - DNA, 498 bp, Homo sapiens
cctcaggggggcccacagcccccaaagctgagagtggtcgaagcggaggtgggggactcatggaagagatgaacgccatgctggcccggagaaggaaagccacgcaagttggggagaaaacccccaaggatgaatctgccaatcaggaggagccagaggccagagtcccggcccagagtgaatctgtgcggagaccctgggagaagaacagcacaaccttgccaaggatgaagtcgtcttcttcggtgaccacttccgagacccaaccctgcacgcccagctccagtgattactcggacctacagagggtgaaacaggagcttctggaagaggtgaagaaggaattgcagaaagtgaaagaggaaatcattgaagccttcgtccaggagctgaggaagcggggttctccctgaccacagggacccagaagacccgcttctcctttccgcacacccggcctgtcaccctgctttccctgcctctacttgacttggaatt

SEQ ID NO: 4960 - DNA, 189 bp, Homo sapiens
  unsure (85): n=A,T,C or G
  unsure (113): n=A,T,C or G
  unsure (153): n=A,T,C or G
tttttttttttttttttacactcaggttctaattttaatagggaaggaaaaagttacagctcagtgcaccatgaagttgaggcanagatggagacacctcagccccacctctntggaacaggaaagatgattggggagggagcacaggtcagncgtgggaagagggtcatggtggacatgggggtgggg

SEQ ID NO: 4961 - DNA, 396 bp, Homo sapiens; identical to SEQ ID NO: 217
  unsure (248): n=A,T,C or G
  unsure (252): n=A,T,C or G

SEQ ID NO: 4962 - DNA, 145 bp, Homo sapiens
ctgcttcagcctgcccaacataccaagatggcaaccagacgataagaaactaccagagccggagccccagcccctttccctgccatccctgcaaaatgcctcgtctttggatgccaccagctcttcaaaggactccaggtcccag

SEQ ID NO: 4963 - DNA, 275 bp, Homo sapiens
ccttgggaagggggccaagaaaaaaagaacggccactctcctttctgtccttcccttgtgtggaggacagtgattgaaacaggggagttaaaaagccaggaagaaaagaaatcaattgcacatctctagttcgcaagcgtcaaagtcacaacaagtctatacacaacaactctctatctgtagatatgaaattccatcatgatagcacagcgcctgcttgcccctaaatgttcctttcttctgctaatcatgtcagttactatggatgggctgtg

SEQ ID NO: 4964 - DNA, 193 bp, Homo sapiens
aaaatgttagatttagaaaaatggcataataaccaacgtggagaagctgcttcaaatcaaggagacgggaggccagcttcattccatgggaggccagcttcattccagtaggttccgtttcacctggatgaaatggaagattttcttggaatgtataaattggcttagcaggaggcagaaaaccctttcacag

SEQ ID NO: 4965 - DNA, 394 bp, Homo sapiens
  unsure (272): n=A,T,C or G
  unsure (281): n=A,T,C or G
  unsure (298): n=A,T,C or G
ctgccagtagacccccggtcaccctgaggctggtggtccctgctagtcagtgtggctctctcattggaaaaggtggatgcaagatcaaggaaatacgaggagtacaggggctcaggtccaggtggcaggggatatgctacccaactcaactgagcgggccatcactattgctggcattccacaatccatcattgagtgtgtcaaacagatctgcgtggtcatgttggagtcccccccgaagggcgtgaccatcccgtaccggcccaagccgnccagctctncggtcatctttgcaggnggtcaggacaggtacagcacaggcagcgacagtgcgagctttccccacaccaccccgtccatgtgcctcaaccctgacctggagggaccacctcta

SEQ ID NO: 4966 - DNA, 166 bp, Homo sapiens
ccgggcaggtccttaggtgctacagctaaagtcatcaccgaccctgatatcctgaaaacctgtgtaccagacctaagtgacaagagactggaagtggttgggctggagggtgcaattgagatgggccaaatctataccaagctcaagaatgctggacgtcggctgg

SEQ ID NO: 4967 - DNA, 475 bp, Homo sapiens
ccagaggggcagggcacgctaggctggactaggagttaagagtactgtctaaccagtctggcttcttccttcttccagcagccagccctcccctcccattaaagttttactcccacatcctaaaagctcctaacttgaactttgtctaaatagtctctgagactgcatgtgaatttaatgttttttgaaaaagccttcttttttgtttggactatgtagcaatttgattctgccactcccttcactgtggcattcccctcccacccccgctctggcctagacaataagttaatgctagacaccacaaaaaagggcagacatggcagtgcagttttaatatacatatatgtagaatatatatgtacacacagttagcacggtcagggtggggaggggcatcttggggtaggcaggaggctggggtcactcactgtactgtagtgatgtggctaggaggtgttcacaagcccagggg

SEQ ID NO: 4968 - DNA, 519 bp, Homo sapiens
tggagtcgttgctgttgctgtttgtgagcctgtggcgcggcttctgtgggccggaaccttaaagatagccgcaatggctgaaaatggtgataatgaaaagatggctgccctggaggccaaaatctgtcatcaaattgagtattattttggcgacttcaatttgccacgggacaagtttctaaaggaacagataaaactggatgaaggctgggtacctttggagataatgataaaattcaacaggttgaaccgtctaacaacagactttaatgtaattgtggaagcattgagcaaatccaaggcagaactcatggaaatcagtgaagataaaactaaaatcagaaggtctccaagcaaacccctacctgaagtgactgatgagtataaaaatgatgtaaaaaacagatctgtttatattaaaggcttcccaactgatgcaactcttgatgacataaaagaatggttagaagataaaggtcaagtactaaatattcagatgagaagaacattgcataaagc

SEQ ID NO: 4969 - DNA, 226 bp, Homo sapiens
ccaagcagccagccactgcgatctaggagtgaattaccttcagtccttctgccccaccaccccataagctcccacccaggaggacaggggacctgccaaggacccagcgaggcagacaggatctgaatcaagctttgctcctccaggttctcagaaactcccaaaccctcttaatgcattcctcacagccctacctagcctgggaaaacgaaagacttgaggcgag

SEQ ID NO: 4970 - DNA, 571 bp, Homo sapiens; identical to SEQ ID NO: 363
  unsure (544): n=A,T,C or G
  unsure (548): n=A,T,C or G

SEQ ID NO: 4971 - DNA, 447 bp, Homo sapiens
  unsure (367): n=A,T,C or G
  unsure (373): n=A,T,C or G
  unsure (410): n=A,T,C or G
ccatcaacacaagggcgctgaccagcacagcatacagggtggccttccctagcaggatctcatagaggatggtggcagacaggaccccttgctggtaggacactgttggcacggaggaaggacaggtgggtacctgtgcacaggtagctctggtctctcccaccctccaccctccagtgtctgtgagttcttcatgccttggttctaggtcaagaaccatgagagagggagaggaaaaggaagggcttacttacccgaggtaaagccacagtctgaaagaaagcagggagaggaaaataaatgagagaccttattttcataggcaattaaaagtaaagtcagatttgcagttggcacagactcccangcccanaccagcttcctctgacagcccagcacctcctttcttntgccatgcagatgtcagccacattgtccttgcaatcc

SEQ ID NO: 4972 - DNA, 293 bp, Homo sapiens
  unsure (63): n=A,T,C or G
  unsure (111): n=A,T,C or G
  unsure (196): n=A,T,C or G
aaatgttctcaccacaaaatgataagcgtgtgaggtgatggatatgccacttaccttgttttnatcatcccacaatatagacaggcattgtcactttgcattgtaccccangaatcttcacatttgcttttttgtcaattaaaaatagagacacaaaaggagagaggggagagcaatagactcttcacggaaccgngggcttctgcctccgggtaaaataaactgcaaaaaggattcccaggaaaccgttccctctttcagcccttggttacaggaagccggatttgggaaat

SEQ ID NO: 4973 - DNA, 414 bp, Homo sapiens
ctgttggctgaccagaataaactccctgctgagttcaagctttgaatggaatggatgcaaatgatgttgtttccattagagcaggtgctcacagcattctgattggcctgagcagaccgaggctatggctgttgggacaagcttagcatcctggacatcttgtcaaagaacctcactcacccctctggcctctacagccctcagaggagagaaaaccaattctccaacaaacaggtctctccaacatggtggtgctggcaggcttaggtttagaaaatcctgactgttaaaggcgtttgaatacatcacattcctatgcaaatgtttttaatctccagtttaatgtagtttatttttcctatatgtaaagtatttttatacggcttgtatcatgatagtttagcaataaaacag

SEQ ID NO: 4974 - DNA, 282 bp, Homo sapiens
cgacggctccttcttcctctacagcaagctcaccgtggacaagagcaggtggcagcaggggaacgtcttctcatgctccgtgatgcatgaggctctgcacaaccactacacgcagaagagcctctccctgtccccgggtaaatgagtgcgacggccggcaagcccccgctccccgggctctcgcggtcgcacgaggatgcttggcacgtaccccgtctacatacttcccaggcacccagcatggaaataaagcacccaccactgccctgggaaaaaaaaaaa

SEQ ID NO: 4975 - DNA, 377 bp, Homo sapiens
  unsure (88): n=A,T,C or G
ctgaaatgtctgcttaatggtgacgatggtgctattagcaggtgggtgagccagttcccaaggtacacgttcactatcaagagctaancacacctgctaacaactcagtctcctacaaacctgatgtttctccagcaaaacaaattaaaattaaacctaatggtacttctggctgaggctccagaggtccccaggagggagggtgtttgcgtggagggggccttggttccacagaatggtggcttatggacgcttttaagacactaaagaaacccacatggtaaaaggctgggtgcggtggctcacgcctgtgatcccagcactctgagaggctgaggcgggcggatcacaaagtcaggagttcgagaccagcctgg

SEQ ID NO: 4976 - DNA, 420 bp, Homo sapiens; identical to SEQ ID NO: 364

SEQ ID NO: 4977 - DNA, 212 bp, Homo sapiens
ccaggctgcactgtggctagctcaatgtttgttgcattcagcttctcctccattacttgtttgaggatgatgagtgaagacttgatggcttctttcaaagtcatagacttgtggtaaacttcttgcaaggagctctgggcaccctctgaagcagagccaattgctcgagcatcacactgtacaaaggtcccagatgggtccatatgaaacag

SEQ ID NO: 4978 - DNA, 274 bp, Homo sapiens
cctggctgagcaggcagagcaccctgggaccccagggcagaaggacccccgccctccagtccccaagacccaggcccgtctccactcatacacgccacctacatgtgacgtcagccctgaaaaggtaacaggaaagttcagaacaaaaacaaaaccccaaaagtaaaaaggctacgtgtagcagagtaataccggaaacgttatatacacaggcggtgatggccccctcggaagtgtccgggtcacttagggggcactgcagaggtccctgtgg

SEQ ID NO: 4979 - DNA, 460 bp, Homo sapiens
  unsure (164): n=A,T,C or G
  unsure (272): n=A,T,C or G
aaatttcatagattttcatgtgtcataaaatattgatcttttcttgatttctccccaaccacataaaaatgtaaaaagtacattagtttgcatccacactaaaacaggcagtgagtcaaatatggcctgtgggccatactttgccaacccttggcctacagtanaaaaaaaacccctcagaattccttatgggctttgtgttattttgtcacgtggagccaccttaggctggggaagtagaaagcacagggcttttgggcattaggtcctangttccagttctggccctaccatctaccagccgggtagccttggacataaaattcaaactctctgggctttactaccatcatctataaaatggggcaataacacctagatcacagagttgtcatggcaattaagtgagctaatgtatatagagctcgtggcaccagtatctggcatacagtaggcactc

SEQ ID NO: 4980 - DNA, 398 bp, Homo sapiens
  unsure (239): n=A,T,C or G
  unsure (263): n=A,T,C or G
aaaaacaaaatcttaaattactaggagtatatttacaagattaattacattttaagccagcacaccatggatgtacatgaagggccactcagtgtccctcgctgggacaggttgtgtgacctgcccaaggggctccggctcatttgccaaagtcaagacgacgaccaggtcttctgactgctcagcccaaccaataatgaaaaaagtatcagagatgtgtcatatccattttgctaacnagcaattacatgcctttttagtgnttaagagaagccttaattttcctgggatatctccgtaaaatcattctggaatttgattttgaaaattctttaagaaaaaaaaaaaagcttgtcacccccatgagacctgctgtctctcatgtctgcagggacagg

SEQ ID NO: 4981 - DNA, 302 bp, Homo sapiens
aaataaccttactttcaaaacttagtttaaggttgaacatcccagtgaccagattatgattaacagattgaaaaatgataaagcctgaagtctaagtttatccagcagggtgactcatgcttctttgtcatcctcccacggcagcaatttgttccatgtgaatgctagtaacaggcatcatacactgttaatgctaatatgtaggagtcagttggaggcaaaaacccctatcacgattagcattaacagcatacagcctacagcaagccttcagcactcagaggatgaggcataaagaattt

SEQ ID NO: 4982 - DNA, 171 bp, Homo sapiens
aaatacagtcatttcgtaatgaggagtgggcaggctcagggctgcactccctactcctcaccctcatctatagtggtagagatagggacagggtggaaagaagagaactgactagcaacggcctgactctgtgtgtgtgtgtgtgtgtgtgtgtgtgtgtgtgtgtgtgtg

SEQ ID NO: 4983 - DNA, 286 bp, Homo sapiens; identical to SEQ ID NO: 220
  unsure (218): n=A,T,C or G

SEQ ID NO: 4984 - DNA, 475 bp, Homo sapiens
aaaagaaattcagaaactaagcggttggagaggggcattggaaatagagggggatgctatgagatgggggttgggagcagagaagaaactgcaggagggcaaagtgtaactagcaatataccttctgtgatgctccagaaacacatgtctgctaagattaacttgattggagtttcttatgaaacaggctgatcatcaagatttttaactcaggtttcagtgaaaaaattggaaacttttacaagaaagatttgagaagtagaaggcaggcagcaaattttccagatattatgcttgcatttcaaattcctgtttcaggcttttcaagtaggcatgcacattcccaaagccatgatatttggctaaatacacaaggaccccagtcgcacaccgtccatctcgctgccggcagaaactgcagttgcagattcctcgacaaggcgggcaatgccagttcggatccagcagagcatcc

SEQ ID NO: 4985 - DNA, 536 bp, Homo sapiens; identical to SEQ ID NO: 221
  unsure (424): n=A,T,C or G
  unsure (527): n=A,T,C or G

SEQ ID NO: 4986 - DNA, 221 bp, Homo sapiens
cttttcttacttaaacttcacaccagaaccttctgacattttctcctgcattgtgactcacgaaattgaccgctacacagcaattgcctattgggtaccccggaacgcactgccctcagatctgctggagaatgtgctgtgtggcgtggcctttggcctgggtgtgctgggcatcatcgtgggcattgttctcatcatctacttccggaagccttgctcag

SEQ ID NO: 4987 - DNA, 582 bp, Homo sapiens
  unsure (482): n=A,T,C or G
  unsure (488): n=A,T,C or G
  unsure (503): n=A,T,C or G
  unsure (572): n=A,T,C or G
  unsure (581): n=A,T,C or G
aaatatttattttcaaaacccctaaaacactggagtatgcttcacctagaaacagattacaggacgaatagctataatgaataagcaatacaatttgtatttgggatgcaattgtgttgtaaagtttcaaataatcaatttataaatttgttgcttttacttttacaaaaatattcatttaacccataacatgagttgcaaaattatctccagacttctacagatgattataaactgtaattgtgtttcagttacacagcaggcgaaaaatttaactgaaccgttacttcaaaatacaatgcattaaaaataattgttacaatataggcaccaataaaaagaattttcttggcatacaacaccacaacaactttctcaagtatctgtattatgtaaattaaaaagaggatgtaatggacctcggccgcgaccacgctaagggctgatgaatcccctaatgattttggtaaaaatcattaagntaaggnggatacacatcttgncatatgatcaaatggtttcgcgaaaaatcaattaatcagacaacaagatgtgcgaactcgatattttanacgactctnt

SEQ ID NO: 4988 - DNA, 414 bp, Homo sapiens
  unsure (375): n=A,T,C or G
ctgaggaggccaagtacaagttgtgcaaagtgagaaagatctttgtgggcacaaaaggaatccctcatctggtgactcatgatgcccgcaccatccgctaccccgatcccctcatcaaggtgaatgataccattcagattgatttggagactggcaagattactgatttcatcaagttcgacactggtaacctgtgtatggtgactggaggtgctaacctaggaagaattggtgtgatcaccaacagagagaggcaccctggatcttttgacgtggttcacgtgaaagatgccaatggcaacagctttgccactcgactttccaacatttttgttattggcaagggcaacaaaccatggatttctcttccccgangaaagggtatccgcctcaccattgctgaagagagagaca

SEQ ID NO: 4989 - DNA, 374 bp, Homo sapiens; identical to SEQ ID NO: 365
  unsure (203): n=A,T,C or G
  unsure (234): n=A,T,C or G
  unsure (242): n=A,T,C or G
  unsure (266): n=A,T,C or G
  unsure (309): n=A,T,C or G
  unsure (313): n=A,T,C or G
  unsure (368): n=A,T,C or G
  unsure (369): n=A,T,C or G

SEQ ID NO: 4990 - DNA, 431 bp, Homo sapiens; identical to SEQ ID NO: 219
  unsure (140): n=A,T,C or G
  unsure (162): n=A,T,C or G
  unsure (423): n=A,T,C or G

SEQ ID NO: 4991 - DNA, 530 bp, Homo sapiens
ctgaagggctgcaggaaatattttatgttctgctaattttactctttcagaaagagttgcgacagtatcacccctcttcacgggaacagcttcttgcaaaataatctgtccagcatccacatcttcagctacaaagtgtacagtgcacccagtaactgtgactccggtttccagggcttgctcatgggcatttgaacccttaaaagaagggagcaaggatgggtggatattgagcatttttccattccacttttggacaaaggggccagaaagaattctcatgaatcctgcaagacagactatgtctatggagaactcttcaaggactaggtcaattgcactgtcaaattctacacgatttttatacagtttatgattaattactctagtgggaataccagctctttccgctttatctaacccagctactgcggctttgttggagataacaatatcaatttgtgcagagctatttggttcccgagtactgtctataagtgcttgcaggttcgatcctgttccagatatta

SEQ ID NO: 4992 - DNA, 565 bp, Homo sapiens; identical to SEQ ID NO: 222
  unsure (507): n=A,T,C or G
  unsure (519): n=A,T,C or G

SEQ ID NO: 4993 - DNA, 529 bp, Homo sapiens; identical to SEQ ID NO: 223

SEQ ID NO: 4994 - DNA, 379 bp, Homo sapiens
  unsure (351): n=A,T,C or G
aaattagccaggcatggtagttggaggctgagacaacagggtcatttgaacccaggagttcaaggcttcagtgagctatgattgcaccactacattccagcctgggtaacagagtgagaccccgtctcaaaacaaacaaacaaaagtaacaactaaacaaaagagaataaagtacttgctcaggaggatagagaagggctaggggagagggcagaaaaggtttgtacaacttagagggcatgaacagcagcagcaccttgtttttttgaccaaacaagaaaaggcccccagagctcacgcacagctatcatcagggccggtgccatggcctggctcctcgggtgacacttncccatctgacacatggcacgagggctca

SEQ ID NO: 4995 - DNA, 266 bp, Homo sapiens
  unsure (103): n=A,T,C or G
  unsure (143): n=A,T,C or G
cggtgtgattgaaggtggattaaatgtcactctcaccatccggctacttatgcatggaaaggaagttggcagtatcatcggaaagaaaggagaatcagttaanaagatgcgcgaggagagtggtgcacgtatcaacatctcanaagggaattgtcctgagagaattatcactttggctggacccactaatgccatcttcaaagcctttgctatgatcattgacaaactggaagaggacataagcagctctatgaccaatagcacag

SEQ ID NO: 4996 - DNA, 274 bp, Homo sapiens
aaaagagaagggttgaaaaagattgtgtgtgtgtgtgtgtgtgtgtttaattggcccagggttacttaaataaatcataaccattttgccacattctgtaactgtttagttaaggtcaaattaagtttaccctatggattttgtttcatcttttgtttcgtgtatatactgtttgcctttttcataaaaatcttggatttgttatatattgttcctgttatttttgacatctttgctattgtaaataaattactattttgttttaagtgaaaaa

SEQ ID NO: 4997 - DNA, 486 bp, Homo sapiens
  unsure (181): n=A,T,C or G
aaaaacaaaacaaaacgatccttttgattgtgtggtgcagacgcaggactgaagccacaggcttttggggtgctgtgagcccagggctttgctcagctcacagctagcgcggcgggcagagcaacccttcggcccaagccatcctcgcagcttgcacagaagcttcctgaacctaaggganccgttcccagctctccttaaattcccagtccccaccctgggcctctctccctaacgatcttgtcgctttgggagcccctgaagtgaaccctgaaatactccctccgtcaactctgggctcagacctttgcccttctctgtgtcacaaggaaatttcggtcaagagggtgggaacaggtggtttcagaccgtgcagcaaagccactgccaggtaagttttaaggcaaattttatctcttcttattcagtctgagccggacctaaccttctcaccaccgagcaatcctgcctatgctggacatgcat

SEQ ID NO: 4998 - DNA, 233 bp, Homo sapiens
cctccttccttcagtgcctgctgaaccatcttagggtcactcacaccctctgtaattttaagatgtatgtggtggccggcgggaagaccagccccgacagcacctcctgagaaagtcagccaagggcctaccctgatgccagagtccttgagctgtcagttcccacagttgctcctttgtttgctcttctcagcctcggccagatttacagtccaggcagcaaaatctcaagg

SEQ ID NO: 4999 - DNA, 392 bp, Homo sapiens
  unsure (208): n=A,T,C or G
  unsure (230): n=A,T,C or G
  unsure (238): n=A,T,C or G
  unsure (257): n=A,T,C or G
  unsure (288): n=A,T,C or G
  unsure (304): n=A,T,C or G
  unsure (359): n=A,T,C or G
  unsure (368): n=A,T,C or G
  unsure (370): n=A,T,C or G
aaaagtttttctatgatgatgcattaacaatacaaaaatattttgaacactacaataatctttttctcaagacttcttgcagtgttacactagaatatgtgatctttggattctgagaaaccagtggctaaagtaggaactaaaggctttttttgaggggtgtgtgaatacatggacagccctttttttttttttttttttttttganatgcagtctccctgttacccanactggagngcaatagcgccatctcggntcactggaacctccgcctcccgggttcaagngattcttccgcctcancctcccgagtagctgggattacatgcgcgcaccaccacgtccggctaatttttgnatttttagnanatacagggtttcaccatgttgg

SEQ ID NO: 5000 - DNA, 337 bp, Homo sapiens
  unsure (21): n=A,T,C or G
  unsure (129): n=A,T,C or G
  unsure (238): n=A,T,C or G
  unsure (243): n=A,T,C or G
  unsure (269): n=A,T,C or G
  unsure (317): n=A,T,C or G
ttttttttttttttttccaanaaggggacaaatgtgggaggccatcactgccccattttattgatgcaggctggacaggaggactcaccacctgagctggggatactcaggtcctggggtgctgagganatggggctgcatctggagagggtgctgttggggtgtactctcatctggagagggtgctgttggggtgtactctcatctggagagggtgctgttggggtgtactctcatntgganagggtgctgttgggggcactcccatntggaaagggtgctgttggggtgtactcctgggaaggcaggggccatanaggagcgggagatgtgtcaa

SEQ ID NO: 5001 - DNA, 496 bp, Homo sapiens
  unsure (208): n=A,T,C or G
  unsure (440): n=A,T,C or G
  unsure (477): n=A,T,C or G
aaatccttacatgatttttgaaaccttattaactgaaaatattgcttgctgataaaacttgctcaaatgctattgctgaatgtacaagtcactgattatgccaatacaacaaagataaccacatgtttgaggattgcaatgtgccagacattcactgaaaaaaaaaaaaacacacaactaaacaaaatccacacaacaaacatctganaatctggacacttcacatcagtgttttgaagtgtttcattaatatcttaagacaagtgtatcaaaaccttggcatgatttaatttcaagtcgccaattttgtttttactaacatcagaaagttatggctacactgccaacgccgggtctgcttaatttgacttaagagtttaatatgacttaaacattaaaagctcacactaccccgaaatatataatttcacgcatacggngacattcaacattcaagtgccagtgtttttgtactgncttttggtcaagtttcttt

SEQ ID NO: 5002 - DNA, 297 bp, Homo sapiens; identical to SEQ ID NO: 224
  unsure (207): n=A,T,C or G
  unsure (220): n=A,T,C or G
  unsure (224): n=A,T,C or G
  unsure (230): n=A,T,C or G
  unsure (235): n=A,T,C or G
  unsure (257): n=A,T,C or G
  unsure (288): n=A,T,C or G

SEQ ID NO: 5003 - DNA, 88 bp, Homo sapiens
  unsure (46): n=A,T,C or G
  unsure (49): n=A,T,C or G
  unsure (59): n=A,T,C or G
ctgaggtggtcttgcttgtcatcgtcggtgaagaaggacttgttgnggnacgtgcctcncgccagcatgcccttgggagcctcctcaa

SEQ ID NO: 5004 - DNA, 327 bp, Homo sapiens
  unsure (287): n=A,T,C or G
aaaaacattttttttaatgttggtaacttttgcttcctctacctgaacaaagagatgaataattccatgggccagtatgccagtttgaattctcagtctcctagcatcttgtgagttgcatattaagattactggaatggttaagtcatggttctgagaaagaagctgtacgttttctttatgtttttatgaccaaagcagtttcttgtcaatacacggggttcagtatgacacagaatcatggacttaacccgtcatgttctggtttgagatttagtgacaaatanaggtgggaagcttataatctaattttaggaggaccaaatt

SEQ ID NO: 5005 - DNA, 526 bp, Homo sapiens
  unsure (413): n=A,T,C or G
ccaacatggtgaagccccatctctactaaaaatacaaaatttagctgggcgcagtggtgggcacctgcaatcccagctactgaggcgggagaatcgcttgaacctgggaggcggattgcactgagccaagattgcaccaagattgcaccactgcactccagcctgggtgacagaccgagactccgtctcaaaaaaaaaaaatcttgtttccgtagagtgcctcggggaacctagtttgggaaatgctcatttagggacctgtcgtaatgtgtgcaggggtcctctcacagaagtgtcctaattaaccacacacacttctgctgctggagctctgagcacaggcagaatgacactaaaatattcagcattgaaaggacacaagaagggaaccatttgcagtttcaaaatactgnttcacgccaggctgcatgttgccttacgaacgctgggcaccttggcgtctctcatccaaactcttccaaaactcccacttattctttgctcccttgatggaaaagcagtgatg

SEQ ID NO: 5006 - DNA, 421 bp, Homo sapiens
  unsure (388): n=A,T,C or G
ccaagacagctcgtttctggagagtatgagggtgtgttttcttattgtgaaaggaactaccttctcttagagggtaggaagaatgtggtgtgtgtgtgttctcataaagcaactggacattataggtgcccaggtcatctataaaaacgatccttgggctgtgtaaaaatgaagtggcttttcagtatcctctttcacacttgctgcttcgggagactatgcaatgatgggaaggtgattgcccctttatttcattcagtgccatggtccctgttgttgtagtaatttatttgtttagttcattttttttttcttaacagtcaaggggaagagtgattcctcacactgctttcaagctggactgagccagtctcattctgggaaaganatgctgtgtccagaactcagcagctccatctat

SEQ ID NO: 5007 - DNA, 217 bp, Homo sapiens
  unsure (152): n=A,T,C or G
ctgcggggtctggatccgagtctgccctctccgttacctaatctcggacctcagggcccggccctcacgcctgaacaagaaaacatactgcataccacccagacagactgctataacaatctagctgcttgtctccttcagatggagcccgngaactacgaacgagtgagagaatatagtcagaaagtcctggaacgacagcctgataatgccaagg

SEQ ID NO: 5008 - DNA, 165 bp, Homo sapiens
  unsure (99): n=A,T,C or G
  unsure (145): n=A,T,C or G
ttaagtttgatttttttttcttttttcctttcttaaaaaaaaaaaaaggaagtaaataaattaaattgccaacaatgtggctgagatagccatgatcangccattcttaaaaaaaagaggggggggggcagtaggtggagtttgngaaatataaacaaacaatgg

SEQ ID NO: 5009 - DNA, 490 bp, Homo sapiens
  unsure (385): n=A,T,C or G
  unsure (396): n=A,T,C or G
  unsure (433): n=A,T,C or G
  unsure (434): n=A,T,C or G
  unsure (443): n=A,T,C or G
  unsure (480): n=A,T,C or G
aatttcatacaaacaccaagaccaaaatcctaagtattggtattgcgtctcaaatttttcccattaacttaaaaaaaaaaaaagcttaaacttacgtgccttacaggttattaaatgaaactagaattaacaaacatgccaaaatgtttcacttttaatagtagacacagctcctatattgttttacaaaaaaataaaagcatgtctttcaacatgcatccaaaacagtgttcaatttaacgtggcaaagggcaacatttaacataattcaactgcttttacctaaatacgcttactgcttaagtacatcctataactaacttgagaaaagctggaacttaagtttaacagttatagtttactcagcttcactgttacatcctanatgagtattgnattcaaaaatactgggccttaagtcttcataacaatnnctgatttcnacttagagtaagcataaatcacaagcttgtattgcanaaactgttaa

SEQ ID NO: 5010 - DNA, 258 bp, Homo sapiens
  unsure (9): n=A,T,C or G
  unsure (10): n=A,T,C or G
  unsure (235): n=A,T,C or G
ctggggacnngtgcttgctgaaacccaggagctgaacagtgaggaggctgtccaccttgcttggctcactgggaccaggaaagcctgtctttggttaggctcgtgtacttctgcaggaaaaaaaaaaaaggatgtgtcattggtcatgatatttgaaaaggggaggaggccgaagttgttcccatttatccagtattggaaaatatttgacccccttggctgaattcttttgcanaactactgtgtgtctgttcacta

SEQ ID NO: 5011 - DNA, 402 bp, Homo sapiens; identical to SEQ ID NO: 370
  unsure (12): n=A,T,C or G
  unsure (124): n=A,T,C or G
  unsure (139): n=A,T,C or G
  unsure (243): n=A,T,C or G
  unsure (379): n=A,T,C or G
  unsure (399): n=A,T,C or G

SEQ ID NO: 5012 - DNA, 389 bp, Homo sapiens
ctgtctgtactagacaaggttaccaagtgcggaattggttaatactaacagagagatttgctccattctctttggaataacaggacatgctgtatagatacaggcagtaggtttgctctgtacccatgtgtacagcctacccatgcagggactgggattcgaggacttccaggcgcatagggtaggaccaaatgatagggtaggagcatgtgttctttagggccttgtaaggctgtttccttttgcatctggaactgactatataattgtcttcaatgaagactaattcaattttgcatatagaggagccaaagagagatttcagctctgtatttgtggtatcagtttggaaaaaaaaatctgatactccatttgattattgtaaatat

SEQ ID NO: 5013 - DNA, 514 bp, Homo sapiens
ccagacagtgagcggtttggacgccaactggttagagcacatgagcgaccacttccggaaaggaggcatgctggtgaacgcagtcttctaccttggaatagtgaatgattccttacatggcttgacagatggagtattcatctttgaagctgtttccacagaagatagcaaaaccatacagggctatgatgctattgtggttgaacaatggacagtcctggaaggtgtcgaagtgcagacagactacgtgcccctgctgaactcgctggcggcctatggctggcagctcacctgtgtgctaccaactcccgtcgtcaagactaccagcgaggggagtgtatccaccaagcagattgtctttcttcagagaccttgtctacctcagaaaatcaagaagaaggaatcgaagtttcagtggcgattctccagagaagaaatgcacaacaggcagatgaggaaatcaaaaggtaaactcagtgccagagacaaacaacaagcagaagaaaatgagaag

SEQ ID NO: 5014 - DNA, 381 bp, Homo sapiens
ccacccagactgaccagcgggagatggggccccacagggcctcctgcgtcaatgccatggaagggaagaaactggcccaggatgtcagagccaagggctacctggagtgctcagcccttagcaatcggggagtacagcaggtgtttgagtgcgccgtccgaactgccgtcaaccaggccaggagacgaaacagaaggaggctcttctccatcaatgagtgcaagatcttctaaaccccaagagacttcacacaacacttatgtatgcaccccaaagactaatggggagagggagggccgggaagccaggaaagcttggtgttttctctgggtacaccccaagcagcgtctccttttggatacagttattgatgaggcttgg

SEQ ID NO: 5015 - DNA, 524 bp, Homo sapiens
cctcacctcctcatttcatcacactggggatgaggtttcaaccactaatttttggtgggaggagacaaatatttagaccttagcaaagtacaacaaaatgttcctgtggttgctttctgatattcacccaatcaccctgaagggacaaacctttctaccacttcaaagagggagacaatcttactagcatgtaataatcagcactgttacccacagctcaagccctcaccctagaaacaaagccaagaccactaagtgggtaggtgtcctggctaagtgtggacacagggcacaatcagagatgtgaacacacaaagagcttcaccagcttctcacagaccctgcttgcctttcgaagtgatgaatacacatggcctggtcattccagagactaataagacccctctggcccattacctgaaactggggacccaataccatgcagatggactgagtcattacaaaggcaattaaatgcccaactccataaccaggtgccaacatgtaggcttttgtgcatggat

SEQ ID NO: 5016 - DNA, 432 bp, Homo sapiens
ctgaggccaccacacattacatacattcacgcacttcataaaaaacacctgagggagagaccctggctttgattagcaaataaggtatgaacctgggccagtgcccacattcacacagaccctggcccagggacatcctcctcatatgaagcattaaggcacatgctgtactgtgagccagcactccctgacctcagggtgtgtgaggagttggcactgtagagagaaaccaagactcttcctcaatgcctgccttattctgagcacccacccttagctctgataaggatatcctgagaccacattcaagatccaaaacctttcctcatagatgagggccgtcacccctgcaaacatgaccctgttctgtttgcagggtctccaagattttcacttctgagacaaaaattgaggagacttctgtctgcacca

SEQ ID NO: 5017 - DNA, 328 bp, Homo sapiens
  unsure (16): n=A,T,C or G
  unsure (54): n=A,T,C or G
  unsure (91): n=A,T,C or G
  unsure (186): n=A,T,C or G
cctacagacttatttnttcttggacacacccacggtgcggccacggcggccagnggtcttggtgtgctggcctcggacacgaaggccccanaagtgacgcagccctctatgggcccgaatcttcttcagtcgctccaggtcttcacggagcttgttgtccagaccattggctaggacctggctgtnttttccatcctttacatccttctgtctgttcaagaaccagtctgggatcttgtactggcgtggattctgcataatggtgatcacacgttccacctcatcctcagtgagttctcccgccctcttggtgaggtcaatgtctgct

SEQ ID NO: 5018 - DNA, 511 bp, Homo sapiens
  unsure (277): n=A,T,C or G
  unsure (471): n=A,T,C or G
  unsure (474): n=A,T,C or G
ccaaaagtttagcatattctgcagcctcttctttatttttcttggtacgctgcttcttcagagcaatacgccgccgtttgtgctgcaggacacgtggagtaacaagacgctgaatcttgggtgctttggtcctaggtttcttaccttctttatttaagggctttcttacaacatactggcggacatcatcttctttagagagattgaaaagtttgcggattctgctagctcttttggggcccaggcggcgaggcactgtggtatcagtcagtccagnaatatccttctctcctttttttacaataaccaagttgagaacgctcagatttgcatccacaatgcaaccacgaactgattttctctttctttctccagttctccttggtctgtaacaggaatgccccttactcagtagcaggcggacacggccatgggtcaagacaccctgcttcatggggaaaccttgtttgncgntcccaccactgattcggaccacataacccttccattc

SEQ ID NO: 5019 - DNA, 183 bp, Homo sapiens
  unsure (11): n=A,T,C or G
  unsure (14): n=A,T,C or G
  unsure (55): n=A,T,C or G
  unsure (100): n=A,T,C or G
aaaaccacttnacntgaaaatgaattttctgcaaatgtattctttataaatgtanagcatgcaagaatgtataaacataacagaagcatttgtaactggntaactcagttgacagcttgcaagataagtttttgttttgggaggaattggaagtctcccagattttgctggagtctttgctta

SEQ ID NO: 5020 - DNA, 217 bp, Homo sapiens
  unsure (63): n=A,T,C or G
ccatgagtgacaggtggcctcttggtgggagaggtggggcagggggaaggcagctcccactanaccagggcagtatttaggggaaggaggcagattggagcagttggctgccaacacctggcctcactcagggagaggggccttgggcctggatgatatctgggtgaggtacccacaccatctgctgcaacctctgtgtatccattatgggctcacg

SEQ ID NO: 5021 - DNA, 434 bp, Homo sapiens
  unsure (47): n=A,T,C or G
  unsure (74): n=A,T,C or G
  unsure (182): n=A,T,C or G
  unsure (204): n=A,T,C or G
  unsure (272): n=A,T,C or G
  unsure (339): n=A,T,C or G
  unsure (372): n=A,T,C or G
  unsure (373): n=A,T,C or G
  unsure (388): n=A,T,C or G
cccaggctgactccttctccctgactgcaagggctcactccctcctncaagctcccacaatgcttcatggctcntgccgcttacctagcttggcctagagtggcaaatggaacttctctgatctcccccaactagactggagcccccgaaggatggagaccatgtctgtgccatctctgttncccctgttttcccacatactangtgctcaattcatgcctgtgaatggcgtgagcccataatggatacacagaggttgcagcagatggtgngggtacctcacccagatatcatccaggcccaaggcccctctccctgagtgaggccaggtgttggcanccaactgctccaatctgcctccttcccctaaannctgccctggtctagngggagctgccttccccctgccccacctttcccaccaagaggccaca

SEQ ID NO: 5022 - DNA, 370 bp, Homo sapiens
  unsure (7): n=A,T,C or G
  unsure (9): n=A,T,C or G
  unsure (16): n=A,T,C or G
  unsure (22): n=A,T,C or G
  unsure (34): n=A,T,C or G
  unsure (38): n=A,T,C or G
  unsure (43): n=A,T,C or G
  unsure (49): n=A,T,C or G
  unsure (68): n=A,T,C or G
  unsure (76): n=A,T,C or G
  unsure (89): n=A,T,C or G
  unsure (95): n=A,T,C or G
  unsure (105): n=A,T,C or G
  unsure (116): n=A,T,C or G
  unsure (143): n=A,T,C or G
  unsure (145): n=A,T,C or G
  unsure (151): n=A,T,C or G
  unsure (176): n=A,T,C or G
  unsure (200): n=A,T,C or G
  unsure (207): n=A,T,C or G
  unsure (213): n=A,T,C or G
  unsure (243): n=A,T,C or G
  unsure (252): n=A,T,C or G
  unsure (258): n=A,T,C or G
  unsure (278): n=A,T,C or G
  unsure (286): n=A,T,C or G
  unsure (289): n=A,T,C or G
  unsure (302): n=A,T,C or G
  unsure (308): n=A,T,C or G
  unsure (324): n=A,T,C or G
  unsure (328): n=A,T,C or G
gccgccntnaatgacncctatngggttccaatancctnatgtncaaatntgactcgttagcaaatccncccaactnaacatcggtcatnttgacnttgcaggatnttcagcaagtntgaagtttttaatcgggaaggattttntnccgttnctgaacaaataaaggttctttgtancaatggctggaaatgcaacatganccctttnttcacnccaaaagaactcataaatagttcaccgggngaaccaaanactttntttttcaaaagcaggtaacnccaaagtnctntggggtatccatnttcgtngcaaaaatgataattnctgnaattttccaaacatcaaatgaagggggatcaatggttaccac

SEQ ID NO: 5023 - DNA, 471 bp, Homo sapiens
  unsure (233): n=A,T,C or G
  unsure (450): n=A,T,C or G
aaatttaggacacggtacattttccactgaaaatttacaatcatccaacataatgcacaccacccctcaaaggtaacattagctcatatacaaaatcatggaaaacctcacaacatccttggaaggtagatattgttatatccttacaaaaatttaatacacccattaacattcctatttcaaatagctcaatcgatatcaacacataagacagcccacaattgtgatacagnattaagaagaaactcaggccagccgcggtgcctcacgcctgtaaccccaacactttgggaggctgaggcgggcagatcacctgagcccaggagttcaggaccagcctggacaacatggtgagaccccgtctctacaaaaagtacaaaaattagctgggtgtggtgacccacgcctgtagtcccagctagttgggaggctaagacgggaggatggctngttgcttgagcccaaggaggt

SEQ ID NO: 5024 - DNA, 465 bp, Homo sapiens
  unsure (41): n=A,T,C or G
cctattctttctgtgggacagtggagtacatggcccctgangtcgtcaaccgccagggccactcccatagtgcggactggtggtcctatggggtgttgatgtttgagatgctgacgggctccctgcccttccaggggaaggaccggaaggagaccatgacactgattctgaaggcgaagctaggcacgccccagtttctgagcactgaagcccagagcctcttgcgggccctgttcaagcggaatcctgccaaccggctcggctccggccctgatggggcagaggaaatcaagcggcatgtcttctactccaccattgactggaataagctataccgtcgtgagatcacgccacccttcaagccagcagtggctcagcctgatgacaccttctactttgacaccgagttcacgtcccgcacacccaaggattccccaggcatcccccccagcgctggggcccatc

SEQ ID NO: 5025 - DNA, 485 bp, Homo sapiens
ccttgaaccaagtcacccagagagcctcccggagatcagactcagcctcctcagagcctgttgggatatatcagggtttcgagaagaagaccggagttgctggggaggacatgcaagacaacagtgggacctacggcaagatctgggagggcagcagcaagcgcaacatcaacaacttcatcttccacaaggtcctgggcaaaggcagcttcgggaaggtgctgcttggagagctgaagggcagaggagagtactttgccatcaaggccctcaagaaggatgtggtcctgatcgacgacgacgtggagtgcaccatggttgagaagcgggtgctgacacttgccgcagagaatccctttctcacccacctcatctgcaccttccagaccaaggaccacctgttctttgtgatggagttcctcaacgggggggacctgatgtaccacatccaggacaaaggccgctttgaactctaccgtgccacg

SEQ ID NO: 5026 - DNA, 297 bp, Homo sapiens
  unsure (230): n=A,T,C or G
aaaaaaaaaataccctaagtactctgtttacttctggtgaaacaaaaccagtcattagaaatggtctgtgcttttattttcccagactggagtggcttttctgaaacacacacacacacacacacacacacacacacacacacacgtacacacatccctcacttctcttaagccaagaagtttgctttccctagctgcagtgtagatggctcttgtttttgtttttttgntttaatcatttggcattcacatgtggctgttaatatgtgcttgtttttaattaaaacaagaagcttt

SEQ ID NO: 5027 - DNA, 411 bp, Homo sapiens
  unsure (60): n=A,T,C or G
  unsure (119): n=A,T,C or G
  unsure (174): n=A,T,C or G
  unsure (196): n=A,T,C or G
  unsure (220): n=A,T,C or G
  unsure (249): n=A,T,C or G
  unsure (254): n=A,T,C or G
  unsure (267): n=A,T,C or G
  unsure (272): n=A,T,C or G
  unsure (311): n=A,T,C or G
  unsure (363): n=A,T,C or G
caggaaacaaacactgcttgatttgaaatgaggtattcgtatacaaagcacactattgcnaagggtatgaaaggaagaacgtccgaacatgggcccctgccccaaccaatgcaggccanggctgggggcagccaagcaaggcaggctctcttccctaggtgattttctcagcanaacagacttatgagttgatgcngtgtctggaggacttgacgtcaanaagacctgtgcatggagaatctgataccnagcanctccaggatgatnacatngagaccaccaaggtggaaatgctgagactttctctggcncgaaatcttgctcgggcaattataagagaaggctcactggaaggttcctganaactgcttcaatgtggtatctttgtatggcaatgtatatagatttttt

SEQ ID NO: 5028 - DNA, 438 bp, Homo sapiens
  unsure (376): n=A,T,C or G
  unsure (423): n=A,T,C or G
ctgtttcccagactccaaaatacctggtcacacagatgggaaacgacaagtccattaaatgtgaacaaaatctgggccatgatactatgtattggtataaacaggactctaagaaatttctgaagataatgtttagctacaataataaggagctcattataaatgaaacagttccaaatcgcttctcacctaaatctccagacaaagctcacttaaatcttcacatcaattccctggagcttggtgactctgctgcgtatttctgtgccagcagccaacccaccttggggggctctggaaacaccatatattttggagagggaagttgactcactgttgtagaggacctgaaaaacgtgttcccacccgaggtcgntgtgtttgagccatcagaagcagagatctcccacacccaaaaggccncactggtatgcctgg

SEQ ID NO: 5029 - DNA, 461 bp, Homo sapiens
  unsure (57): n=A,T,C or G
cctactatgtgccaaggaggggtaaggcagctagctctcacagacacaccccacagngaaaatcacacacacacacacacaccccggcatctgtgctcactcacaggcagactgctcactttcttgcacctttcttgccatcacctcggccacacccacattcctccaataggcttgggaaccagcatggaagggtcaagtgtcatagaagaaaccccctagcctaccctactcccagacttcatgccagaggtttaactccacttcccttctgtttgcctgcctagatgctctccccttctccatccacaagcggtcagggcgacaggtaggcagactcctgagaaccagaagtccagaggctttgggtgtgtggagtgattccagtgccttcagattccttcaggctcctgggggtcccctctgccagccaccctatgttcagatcgtccatctgatgg

SEQ ID NO: 5030 - DNA, 258 bp, Homo sapiens
aaaagtttgaagactctcacaggtaagtgcagctcaggatcctgtgagtgcagcagaaagtcttaagaaatggcaggggctggttgaacccagattttccattggctgagcagatatccccagaggcgtagaaaattaaatttgttttatgttgttccaaaagaggagaactgaggccagaggagcacacttctgagacactcatttttgctgggtagaggaactctctggcaagcaggaccatcgatattagagcag

SEQ ID NO: 5031 - DNA, 133 bp, Homo sapiens
aaagcaagaaacagaatgcgagtaatcagaaagcactagcaggcatcagttaatccaagatactagctcttagttccaaaagcacttgcaaagaaaaccttttggggggaaggggtggagagggatggaagca

SEQ ID NO: 5032 - DNA, 187 bp, Homo sapiens
aaaagtcaactggattgcccagcagtttagatgcatgtgttttgttctttatcttatccacattgaagatgtaagtaggtcatctgaaagcatcgggtttgattacaccacataatgcatgtctttctgaagttaagtgttggtgttacacaaatggttcttatctcagaagcagagaagctgacag

SEQ ID NO: 5033 - DNA, 363 bp, Homo sapiens
  unsure (91): n=A,T,C or G
  unsure (94): n=A,T,C or G
  unsure (178): n=A,T,C or G
gagatgctgacgggctccctgcccttccaggggaaggaccggaaggagaccatgacactgattctgaaggcgaagctaggcatgccccagnttntgagcactgaagcccagagcctcttgcgggccctgttcaagcggaatcctgccaaccggctcggctccggccctgatggggcanaggaaatcaagcggcatgtcttctactccaccattgactggaataagctataccgtcgtgagatcacgccacccttcaagccagcagtggctcagcctgatgacaccttctactttgacaccgagttcacgtcccgcacacccaaggattccccaggcatcccccccagcgctggggcccatcag

SEQ ID NO: 5034 - DNA, 543 bp, Homo sapiens
ccacagaagttgctgctgacgctctgggtgaagaatggaagggttatgtggtccgaatcggtggtgggaacgacaaacaaggtttccccatgaagcagggtgtcttgacccatggccgtgtccgcctgctactgagtaaggggcattcctgttacagaccaaggagaactggagaaagaaagagaaaatcagttcgtggttgcattgtggatgcaaatctgagcgttctcaacttggttattgtaaaaaaaggagagaaggatattcctggactgactgatactacagtgcctcgccgcctgggccccaaaagagctagcagaatccgcaaacttttcaatctctctaaagaagatgatgtccgccagtatgttgtaagaaagcccttaaataaagaaggtaagaaacctaggaccaaagcacccaagattcagcgtcttgttactccacgtgtcctgcagcacaaacggcggcgtattgctctgaagaagcagcgtaccaagaaaaataaagaagaggctgcagaatatgctaaacttttgg

SEQ ID NO: 5035 - DNA, 461 bp, Homo sapiens
  unsure (419): n=A,T,C or G
  unsure (435): n=A,T,C or G
cctgcacccccatgttccgggagtactccctgcaggttctgaagaatgctcgggccatggcagatgccctgctagagcgaggctactcactggtatcaggtggtactgacaaccacctggtgctggtggacctgcggcccaagggcctggatggagctcgggctgagcgggtgctagagcttgtatccatcactgccaacaagaacacctgtcctggagaccgaagtgccatcacaccgggcggcctgcggcttggggccccagccttaacttctcgacagttccgtgaggatgacttccggagagttgtggactttatagatgaaggggtcaacattggcttagaggtgaagagcaagactgccaagctccaggatttcaaatccttcctgcttaaggactcagaaacaagtcagcgnctgggcggaggtgaangacgtccttccccaggagccgactgg

SEQ ID NO: 5036 - DNA, 491 bp, Homo sapiens
ctgctcatcttcagcagacggaaaccaagtgtgatgacccctactgagggcctggatacgggagagatgagtaatagcacatcctcactcaagcggcagagactcggatcagagagggcggcttcccatgttgctcaggctaatctcaaactcctggacgtgagcaagatcttcccaattgctgagattgcagaggaaagctccccagaggtagtaccggtggaactcttgtgcatgccttctcctgcctctcaaggggacctgcatacgaagcctttggggactgacgatgacttctggggccccacggggcctgtggctactgaggtagttgacaaagaaaagaacttgtaccgagttcacttccctgtagctggctcctaccgctggcccaacacgggtctctgctttgtgatgagagaagcggtgaccgttgagattgaattctgtgtgtgggaccagttcctgggtgagatcaacccacagcacag

SEQ ID NO: 5037 - DNA, 324 bp, Homo sapiens
ctgcccttctggcgagtacatgcacaggattgtaaatgagaaatgcagtcatatttccagtctgcctctatgatgatgttaaattattgctgtttagctgtgaacaagggatgtaccactggaggaatagagtatccttttgtacacattttgaaatgcttcttctgtagtgatagaacaaataaatgcaacgaatactctgtctgccctatcccgtgaagtccacactggcgtaagagaaggcccagcagagcaggaatctgcctagactttctcccaatgagatcccaatatgagagggagaagagatgggcctcaggacag

SEQ ID NO: 5038 - DNA, 570 bp, Homo sapiens
  unsure (296): n=A,T,C or G
  unsure (306): n=A,T,C or G
  unsure (401): n=A,T,C or G
  unsure (406): n=A,T,C or G
  unsure (522): n=A,T,C or G
tgttaacacttacatttttgtatatatagacactttttgtattttctacatttttcatatgtaaaccctccccactctccacacatcattattcattatgatcatgaggggtttatcccaggatattcattgatagaaaattaaaagagtaatttataaaatcactacatgaacaagtaaaaacacacacagcaaaatttacatcaaaattattacgtggtacagaatccaaaagtcataaaaagcaaaagctatctttttttcactctggcacccatctgttcttccctggagtnaaacactatnaccaatttttaggtatacttccaaagatacttactgcatttacaagcacagacttatattgattctaaaagaataagagacattttcagcatgtngtttngttcaacaccacagtatatcttaaagatggtcccccatcaatacatatagagatctctcttttttatggcttcatagtattatcatgtgctgatatgccaaaaactaatccattanacccttttgggtatatatttactattttgcagtcttctgctcttagga

SEQ ID NO: 5039 - DNA, 505 bp, Homo sapiens
  unsure (341): n=A,T,C or G
ctggagtaccaggaagaactgaggtcccactacaaggacatgctcagcgaactctccacagtcatgaatgagcagattacgggcagggacgacctgtcaaagcgcggagtggaccaaacctgcactcgagtaattagcaaagcaactccggccctacccacggtctccatctcatctagtgctgaagtctgagggctctgcagcatcagacccacctctaagagaactttctgaatttgcagctaatctcggggaagagaaagataggtttaatttatttgaagttttcatggtgttaatatttttgtttacctcgctagcttcagaattttgccaacctntgaatttgcacattttgtataatttttttttctttgagcagtgttgatcaagccaagttgaatatttgccatgaaattccagtgaatgtgtagctcaaatgcaaaccctaagtttgctgtcagttattgtatggtcagtgccccagtcctagtacacatatttt

SEQ ID NO: 5040 - DNA, 253 bp, Homo sapiens; identical to SEQ ID NO: 225

SEQ ID NO: 5041 - DNA, 430 bp, Homo sapiens
ctgaatgccactttcagatggaagggaaatgagatggaaaacaacaaaaaaggactgccaggcggaacagtttccaaccgagttttcgttgagtgaggatccagcagccatcaaactcaaacataggggcccgcagggaaactggaggaaatacttcagagacagcaaagctgaaggtttctgtgctctgagggatccgagagtggatgtcccactcctgtatcctcagccagacacagaactagccagattcattagggaagctcggatgctctcattctataaagtaaggcccccagcagggcacgtacatacattgggaaagaagaaaccccttagtaccatgttggtcaaaggcaagagagagaattctatttccatctggaatgtcattcttgtttacttcttccaacagtgaaatacttccagg

SEQ ID NO: 5042 - DNA, 381 bp, Homo sapiens
ctgggcctatgctggtcatgaacggtcctggaaaatgactcccttccttcagtatctgcatcctcatgaagtcattcattttggagattgtgtcttcacttttcttggtgaagaaactgctggatggagttgttggtggcatctgaggagtccgaaggtggctctcagggaaggttgtgctggcctctgaaggatttggaagctgactctgttcctggggtagcttcatgctcttggggtcattgtttctcgggtttgtttttttctttatctggataaaactatgcatttctgaaatcagttttgacatctggttcttttttctaagtcgaaagcagaaaagttggagcttatctccttcttcacaggggatattgtgac

SEQ ID NO: 5043 - DNA, 348 bp, Homo sapiens; identical to SEQ ID NO: 372

SEQ ID NO: 5044 - DNA, 318 bp, Homo sapiens
aaatatcacaagtaggtcttaagtgtcatctggcatcttctttctgtagccaggtaactcttagatcttattcatcagcctgctgaacagttcctttttcagagacatagataccatccaaaaatttcctgatatccttgtttttaactgttgtggcttgctgaatcaaagccgctgaatttgaaacaagctcaatgtcatttccttcaaggattaattcatctttctgggcttgagatactgaacaagcaacacctggtctcatccgaaccctgcggatgtatttttcacccaagaaatttcggatttcaacaagag

SEQ ID NO: 5045 - DNA, 568 bp, Homo sapiens
catggatcagtgcttccttccttttcatggctgcatcatattccacggtatggatggaggatggaccagtgatctacgggctggagttccaggcacgtgccttaacacctcaaactgcagaaacagatgccattcggtttttggttgggacgcagtctcttaaatatgataatcagatccatatcatagattttgacgatgaaaacaacattataaataaaaatgtcctcctccatcaagcgggtgaaatctggcatattagcgctagccctgcagacagaggtgtgctgacgacctgctacaacagaacttcagacagcaaagtcctgacatgtgcaaccgtgtggaggatgccgaaggaattggaatcaggcagccacgagtcccctgatgattcatccagcactgcacagaccctggagctgctctgtcaccttgacaacacagcccatggcaacatggcctgtgtcgtgtgggagccaatgggagatgggaagaaaatcatttccttggctgataaccatatcctgctgtgggatttacaggaaagctcgagccaggctgtgct

SEQ ID NO: 5046 - DNA, 598 bp, Homo sapiens; identical to SEQ ID NO: 226

SEQ ID NO: 5047 - DNA, 346 bp, Homo sapiens; identical to SEQ ID NO: 371

SEQ ID NO: 5048 - DNA, 556 bp, Homo sapiens; identical to SEQ ID NO: 490

SEQ ID NO: 5049 - DNA, 470 bp, Homo sapiens
aaataaagaagaaagctattgtacaaatatcgctcttcaggtttagcttacagagccatggctatggattcttagctctgtaaggaagtgcttctataaattcttaggtttagagatgataccatctgggtacctttgcttgaaccgtgcaaccacatctgggtctagtaggtggatcccatccagttggtttccaagggtgatccagttgggttgcacattgtgtggtcgtccaaataactcaatcttgcgagtgccaggagatagtctttcaatcatgccatagatttcatctggtttatgactggtggaacgaacctaggaaataaaaactagctgctttttaagttacacaagattgcaattctagccctttctattatgtttatgatctaaatgagaaaaatctgggatgagaatacacccaacatgaataactgataccaacaaaaatgtggaagctttggagg

SEQ ID NO: 5050 - DNA, 300 bp, Homo sapiens
  unsure (66): n=A,T,C or G
  unsure (89): n=A,T,C or G
  unsure (114): n=A,T,C or G
ctgcagggagtgccggctctgttcctgaaaatctgaacctgtttccggagccagggagcaaatcanaagaaataggcaagaaacagctntctaaagactccattctttcactgnatggatcccagacgcctcaaatgcctactcaagcaatgttcatggctcccgctcagatggcatatcccacagcctaccccagcttccccggggttacaccttctaacagcataatggggagcatgatgcctccaccagtaggcatggttgctcagccaggagcttctgggatggttgcccccatgg

SEQ ID NO: 5051 - DNA, 653 bp, Homo sapiens
ctgaacccaaacccacctttcttctcctctgggtctttctctttttcatcctctgttttgactctcttggcttttttgaagttggaagagttcttgcggcccccctctccctcctcttcagaatcggagaactcttcctcacaggcaattcgtttgtcagaggagcagactgggagggagtgggaagcatgggtgagagggcaggcgggtgctgatttagctcagcgtctatgcccagtgcttccctgcgtgtcctccaagagacaccaagggaaagggaaccagaagagggaggaactcgggctccctaacctgttcctacaggcactggaactcgaaaacagatttctctacaggtggggagcttggagggagtgtgcagccaggaatggtggtggaagtgtgagctgcctattgaatggaaggcatagggctctaggtctgggtctcactcgagatgcgcttgtcagggtcgtcttcgtcctcatcgccactctcctcagggatggcgtcctcaggaatcgcctgcatttggaccccaggtgcgtgcggcagcattctaaggttctcaaacagtcgctgtttgatcttctccaggtactcattcgtgttctggttagtcatattggaaggactgatgtggagcttgaaat

SEQ ID NO: 5052 - DNA, 278 bp, Homo sapiens
aaataaatacttagaacacgacttggctcctacaagcatctggactctaggtctcagtactgaagtgtctcacccatgggccccacgcagggacgccacggttccctcccaccccgtgatcaagacacggaatcggctgccgatggttggatcgcaatgcgccccttttctagagccttccccggccatctacaggcaggatgcggctgggaaaaagacaactggaatttctcgaaggttgatggtccgcacggttgaggattctacgtggttctctt

SEQ ID NO: 5053 - DNA, 171 bp, Homo sapiens
cgggcctgaggagggatgggagtaagaagtgctgtggaaaccgtcaggccatgaaccaggctgaccctcggctcagagcagtgtgcttgtggactctcacatctgcagccatgagcagaggcgacaactgcacggatctactcgcactgggaatcccctccataacccagg

SEQ ID NO: 5054 - DNA, 514 bp, Homo sapiens
ctggccgatttacaccttgataacaagaagcttggagagatgcgcctgaaggaggcgggcacagtggagcataacgcgctgtcaggatcgggggaattttccggtattttaatctgctgacatttggaatccgtgtgcagcccacatggtaaatgtggggagatttgctgatgatcggaacagatcaccaggggcctgctgtaggagacggagacatgctgttagtctgttctgtgagggtccatgacggatccacccaggcggcctgtgtgggagaggaggtgggcaggaggaacggccctttgtggcccggtttggatttgacgtggtgacgcgctgtggatacctcccccaggtgaatgactggcaggaggactgggtcgtgttctatgcccggcagcgcattcagccccagatggacatggtggagaaggagtctggggacagggaggccctccagctttggtctgctctgcagttaaagatccctgacctgttccgtgacctggagatc

SEQ ID NO: 5055 - DNA, 532 bp, Homo sapiens
aaataccataacctgtccctcccaccccccaactacattcgaaaaagtaagaacagcagaaagatcacgaaggccatgtaaaattaattcagatttaattttcttcagggctgtaatcactagggatcaaaactccttagtctggttgattgctgaatgggagaggagtaagtgagaaagatcatggcaggctggccctgcaattattcaaacccaggcccctggctgcctgggaacgggacttgggtgagatgaagtagtaaagacagtagttctgcccatggtgtggagactaaaaagcaaagcaggccaaacttagcttccatggttacatttggaagtttctattcatgacaccaaataaaagtggggaagaaggaagcatggcttactgaagtagtctcaggaagacagggcaagtgtgcaaaaagccacactgccaaagcaggctactagtgaggatcatcctgggtgacttcgaatgcacttgaggggaaaggctcaagtaccctgtagttgtagcaggaaaaag

SEQ ID NO: 5056 - DNA, 577 bp, Homo sapiens
ctgctgaagctcaactcccttttcgagcaggtgtggaagccctgaggcttctctgacatagcatgtgtttattttcttaggtgagacctgattcaggaaagtctgcagccgatatccatcttcaagtttgtggtcctttctccctctatatatccttgacctcagcagtcatgctggggtccagagtggatgattctctccgccttaggtagactcctccttaagagtgtaagtctctcagtctcacatattttgtgagacgtaagctgacattccacaaggagaggaggaaattctgtgggtcacatccaggggtgcttggaacctgattggttgtcaatcctccagttagtttgtcacgagtggaattctgtcctggattcccaaggatcaaggctgccccattagccaggaaatagggagatagaggaggtcacttgagaaagagctgcctctttgccgcctccaggttgtgtctgtttcctctcatatctgaagacagatgtgctggcagaagcaaagtcctttgtccggccacgtgcaaatgcatgggacataaatatgaacagagattctt

SEQ ID NO: 5057 - DNA, 647 bp, Homo sapiens; identical to SEQ ID NO: 571
  unsure (639): n=A,T,C or G

SEQ ID NO: 5058 - DNA, 426 bp, Homo sapiens
ctgcccttccatgtcgtcacaggcataccgggcgtggacccactgcttggtgcccttgccgaagtagtagcacttccgttggaaattgatccacttttcagggcacgtgttgcacacaaagccgctggacacctgcaactccatccttagctttgtcacctcctcccggagtctttccagcaaatctgaagcttcgttcctctcgttcaattcctgggacttgaagctgctcagatctgcttgaagcccgttcaggttccaggacagctccaagtcctgagatttcaatctctgctgttcagctcgaagttcctccagttcctgtgaaatctgcgtggactgggatttctgcgccatctggtcaccgtggtggctttccaagttcttggaaacttgagagacgttccgggcagccctctcttccag

SEQ ID NO: 5059 - DNA, 346 bp, Homo sapiens
aaaagtaagaacttcgttttgaaaatataaattaccaagatatacaaaggagctttcacattgtatttcatgcaatgtgtggatttttcttcaacttttcacttctcccttccatactgggttcttgaccagtgttttcatcagttgaacatataaatggtcttaaatttcctcgagcctccttcacaaaataatcaatgacactgaaaaggtttgggagtgttacaggtttttccagttcaatagtgtagttttgtcctacgctcatcactttgtagtgcttgattcttggaatgtctatctcctgccgaatagtgatggagtagtttctactgtcactaccagg

SEQ ID NO: 5060 - DNA, 514 bp, Homo sapiens
  unsure (233): n=A,T,C or G
  unsure (286): n=A,T,C or G
  unsure (419): n=A,T,C or G
  unsure (457): n=A,T,C or G
  unsure (459): n=A,T,C or G
  unsure (471): n=A,T,C or G
  unsure (506): n=A,T,C or G
ctgatgccaaaataataaaaatgttacaattgataacaaaatctattagaaaaacaggaatatgataaagctgcttcaatatgagaaaggtataataaaaacgaacacactttgtaaatatggatgaaatgttgcaatctttttacctaaaataggaactgatacatatgatatacatataacctttctgtgccttctattcaacattcaaaataaaaccttagctagtccanattcaatgcaatctgtatcaaaatgccagtgacattcttcacagaaatagcanaagcaatcctcaaatttatatggaaccacaaaacatccagtatagccaaagcaattctgagcaaaatatcaaagctggaggcatcacattacctgaatatactacaaagctacagaaaccaaaacagcatggngctcatattaaaacagacatacagaccaatgaatccananacaaatccattngtttacagacaactcacttttgacaaaggtgccangaacatac

SEQ ID NO: 5061 - DNA, 556 bp, Homo sapiens
ctgaagcaggggctccaggaggtgaagcaggtaaccctgtagtcctggtccaggtccagcttccaaaagggaatcacgtccaggaagcacagctctgcatggcggccttcaaggaaaccgtgtttatgtggagcctggttgcatagaaagcccctgcgctggttcagcaggacccaggtgtcattgtgcatgcgctccacctcataacacaggcaagtctcatgccgtcctctgacccaaggttcattgttaaagttgaaagtgaatgtgggtggatccatcgagtgtctgagaatctcccccagcatgatgtgcagtaatatataatatttaggcagattattccaaggctcaaatagctctctttggctgtacacgaacttgctccaacagtgctgaaattcgtcataattcatgatcttcatggtggcacgcggaccgtctcttttctgacacaggctgcgaagcgcctcctggtaatctgggtcccagaagtagtagaggcgggcaacgaagatggtcagggtaaccttcgggtcctcggccaggaacgtgg

SEQ ID NO: 5062 - DNA, 377 bp, Homo sapiens
ctgaaatgtctgcttaatagtgacgatggtgctattagcaggtgggtgagccagttcccaaggtacacgttcactatcaagagctaagcacacctgctaacaactcagtctcctacaaacctgatgtttctccagcaaaacaaattaaaattaaacctaatggtacttctggctgaggctccagaggtccccaggagggagggtgtttgcgtggagggggccttggttccacagaatggtggcttatggacgcttttaagacactaaagaaacccacatggtaaaaggctgggtgcggtggctcacgcctgtaatcccagcactctgagaggctgaggcgggcggatcacaaggtcaggagttcgagaccagcctgg

SEQ ID NO: 5063 - DNA, 270 bp, Homo sapiens
ccaacaataagaacttctctcccatgttgcacagcaagggtggcacgcccttctctccaagtccagaggctgctgctaagaacttttccaagagggcttccagtgttagtgagcgcacttcagggaaggcagattctaacagcttgaaggcccaagggaatcccgttatcagctctgatcctgagataatccctctgacttcctcccagaagccaagactctccagaactaagaagcaaaaaaagcaaaagggaaagagataatcacttt

SEQ ID NO: 5064 - DNA, 573 bp, Homo sapiens; identical to SEQ ID NO: 245

SEQ ID NO: 5065 - DNA, 280 bp, Homo sapiens
aaaatttattgcttgatacttttgacaacaaattaggttttgtacaattgaacttaaataaatgtcattaaaataaataaatgcaatatgtattaatattcattgtataaaaatagaagaatacaaacatatttgttaaatatttacatatgaaatttaatatagctatttttatggaatttttcattgatatgaaaaatatgatattgcatatgcatagttcccatgttaaatcccattcataactttcattaaagcatttactttgaaaaaaaaaaaa

SEQ ID NO: 5066 - DNA, 201 bp, Homo sapiens
ctgggggtcctgccgggcaagccgcagcagcatccctcgcttcaggtccatcccaaacttggagcacaggtcctccttcggggtcttgaggatgtaaaagtcgagcccataagcctcatcgatgaggtccagggtccgcatggtcacagtcactgtgaacttcttgtccaggatctcactgtagaactctcgctcaaacag

SEQ ID NO: 5067 - DNA, 295 bp, Homo sapiens
ccataaggaagaaattaaattaacactggtctttggtctctcagaaaccttcagccagaagaacctgtctttgaagaaaaagatcttatttcccacggtagtgacagcatcaaaactcaaattggggtcacagagagctggttctgaattgtcaggatttggcaagcgttggttctcttttgggtctccatacagggactgaatgccacgtatgtcatcagcagagaggcgaaatgtgttgatgtcaacatatttgtaggtggggaacattacggcctttggatcactagaatgg

SEQ ID NO: 5068 - DNA, 381 bp, Homo sapiens; identical to SEQ ID NO: 374

SEQ ID NO: 5069 - DNA, 372 bp, Homo sapiens
aaacacatgcatatatattgtcaattgtgggaagctttacaagttatattccatgcactttttggacagagttctaacagagccagccagtccacaaaacaggcagacaaaagttgaattaactggggcaaataggactcttatgcaacatccaaaatatctgacattctgccctgaaatacgttcagcacacctacaggactggggtgaaagtggataaagcaacatttatggttggcagctatggacctcggcctgaggagtatgagttcctcactccagagacaagtttatgtagtacttaatgtacatgatatgaatgtgaagcataaaattaaataaaatttttccccattggcttggttttatttt

SEQ ID NO: 5070 - DNA, 612 bp, Homo sapiens; identical to SEQ ID NO: 227
  unsure (544): n=A,T,C or G
  unsure (558): n=A,T,C or G

SEQ ID NO: 5071 - DNA, 443 bp, Homo sapiens; identical to SEQ ID NO: 563

SEQ ID NO: 5072 - DNA, 460 bp, Homo sapiens
ctgatctacgagtctgccatcacctgtgagtacctggatgaagcatacccagggaagaagctgttgccggatgacccctatgagaaagcttgccagaagatgatcttagagttgttttctaaggtgccatccttggtaggaagctttattagaagccaaaataaagaagactatgctggcctaaaagaagaatttcgtaaagaatttaccaagctagaggttctgactaataagaagacgaccttctttggtggcaattctatctctatgattgattacctcatctggccctggtttgaacggctggaagcaatgaagttaaatgagtgtgtagaccacactccaaaactgaaactgcggatggcagccatgaaggaagatcccacagtctcagccctgcttactagtgagaaagactggcaaggtttcctagagctctacttacagaacagccctgagg

SEQ ID NO: 5073 - DNA, 498 bp, Homo sapiens
aaagaaacttgaccaaaagacagtacaaaaacactggcacttgaatgttgaatgtcaccgtatgcgtgaaattatatatttcggggtagtgtgagcttttaatgtttaagtcatattaaactcttaagtcaaattaagcagacccggcgttggcagtgtagccataactttctgatgttagtaaaaacaaaattggcgacttgaaattaaatcatgccaaggttttgatacacttgtcttaagatattaatgaaacacttcaaaacactgatgtgaagtgtccagattctcagatgtttgttgtgtggattttgtttagttgtgtgtttttttttttttttcagtgaatgtctggcacattgcaatcctcaaacatgtggttatctttgttgtattggcataatcagtgacttgtacattcagcaatagcatttgagcaagttttatcagcaagcaatattttcagttaataaggtttcaaaaatcatgtaaggattt

SEQ ID NO: 5074 - DNA, 386 bp, Homo sapiens
ccaagcaggtagccagagagcgccatcagccaagaaaccatccactggttctaggtaccagcctctggcttctacagcctcagacaatgactttgtcacaccagagccccgccgtactacccgtcggcatccaaacacccagcagcgagcttccaaaaagaaacccaaagttgtcttctcaagtgatgagtccagtgaggaagatctttcagcagagatgacagaagacgagacacccaagaaaacaactcccattctcagagcatcggctcgcaggcacagatcctaggaagtctgttcctgtcctccctgtgcagggtatcctgtagggtgacctggaattcgaattctgtttcccttgtaaaatatttgtctgtctctttttt

SEQ ID NO: 5075 - DNA, 258 bp, Homo sapiens
ctgctctaatatcgatggtcctgcttgccagagagttcctctacccagcaaaaatgagtgtctcagaagtgtgctcctctggcctcagttctcctcttttggaacaacataaaacaaatttaattttctacgcctctggggatatctgctcagccaatggaaaatctgggttcaaccagcccctgccatttcttaagactttctgctgcactcacaggatcctgagctgcacttacctgtgagagtcttcaaactttt

SEQ ID NO: 5076 - DNA, 487 bp, Homo sapiens
  unsure (404): n=A,T,C or G
  unsure (406): n=A,T,C or G
  unsure (421): n=A,T,C or G
  unsure (423): n=A,T,C or G
ctgaggtagcaagaaccgcagactggagagatgtgtcagaacttcttaaacctcttggtctctacgatcttcgggcaaaaaccattgtcaagttctcagatgaatacctgacaaagcagtggaagtatccaattgagcttcatgggattggtaaatatggcaacgactcttaccgaattttttgtgtcaatgagtggaagcaggtgcaccctgaagaccacaaattaaataaatatcatgactggctttgggaaaatcatgaaaaattaagtctatcttaaactctgcagctttcaagctcatctgttatgcatagctttgcacttcaaaaaagcttaattaagtacaaccaaccacctttccagccatagagattttaattagcccaactagaagcctagtgngngtgctttcttaatgngngtgccaatggtggatctttgctactgaatgtgtttgaacatgttttgagatttttttacctgcc

SEQ ID NO: 5077 - DNA, 542 bp, Homo sapiens
  unsure (458): n=A,T,C or G
  unsure (486): n=A,T,C or G
  unsure (515): n=A,T,C or G
  unsure (532): n=A,T,C or G
cctgggcttgagcaatagcctcaggtatctccatcacttacacagcactcattcgttcagtgagatgtcatttattaagcagttacaatgctgcaggtgctgtgcaggagactggacatacaaaagaagaatttgacccagaccttccccctctggggtctcataatcttgtagggggaagggaatacaaatacaaattagcgaagaatgatagcagtatcttaggacactgtaactgtgtgctacgggacccaaggactggagagccatcccttcgtgaaggtcagggaagagctgggtggtggagagagctgagcctgtgtggacccctgatgcatgctctgatgctgagggagtacagtagagatggacactgatagtgacagaagagtttggccccaaagcagaagcggcatcctgcaccgactccccttagaatgaatgagtacgcacaaganaacaaccacaggcatcgccgcccttcantggatctctttgctggagaattgacagantgcgtgtcgcgcctgantgagccggta

SEQ ID NO: 5078 - DNA, 220 bp, Homo sapiens
ctgcctgaggaacccagcccctgacccctgccaccctccggtggcccaggtgcctacctccctcaagcctgggaaggtgggtctggggaaagtgggccaagtgatctgggggtaccccttgggttggtgtggggaaggagtgcctccttagtggtgcttgcagtcacaggaagcagcagcagtaaggacaaggggccggattccaggtcttcaacactgg

SEQ ID NO: 5079 - DNA, 518 bp, Homo sapiens
  unsure (147): n=A,T,C or G
  unsure (183): n=A,T,C or G
  unsure (220): n=A,T,C or G
  unsure (222): n=A,T,C or G
  unsure (257): n=A,T,C or G
  unsure (327): n=A,T,C or G
  unsure (370): n=A,T,C or G
  unsure (422): n=A,T,C or G
  unsure (458): n=A,T,C or G
  unsure (481): n=A,T,C or G
  unsure (487): n=A,T,C or G
  unsure (506): n=A,T,C or G
ctttttttttttttttttttttttgcaggtgaaccatagtctcactttatttcgaattttaggactgaacagaaagaaggttcacagatatttcttcagggaaggaaagtgggcaaatagcacaatgaggcaaaccacacaatctanacgtactttcccgggtaaacaaactgggaagcccanagctcacagaggaggagagcagagcttggggtggcananaggtgttccttgggaaggagtcaggaacacaaganaaatgttcatgagctcatccaggatagagaggactcttggggaaggggacctccttccccatgctgtctntgccccaagcccttaatgaagcaggagagggaagtctgtccanaaactcatctggttagacatttgcatcaggaatagggagggggtggaggcanagccactttggacatgggaaatcacagttgcagtanacagtgagctctagtcactccanaagctngacataatttgcagggaanagtccaaagtgg

SEQ ID NO: 5080 - DNA, 268 bp, Homo sapiens
ctgtatggctgggggctcctcgtatgcatggaacccccagaataaatatgctcagccaccctgtgggccgggcaatccagacagcaggcatagggcaccagttaccctgcatgttggcccagacctcaggtgctagggaaggcgggaaccttgggttgagtaatgctcgtctgtgtgttttagtttcatcacctgttatctgtgtttgctgaggagagtggaacagaaggggtggagttttgtataaataaagtttctttgtctcttt

SEQ ID NO: 5081 - DNA, 560 bp, Homo sapiens
  unsure (548): n=A,T,C or G
cctgctcctactatgtccttttccttctctcatatatttcagtcgtctggagttctcagaataaggaatccattatcaatgacctatcccatgaacattttttttgagaacctgtgtaagactatatagacatgaatatttgatgacctgacacctcaccgttcaaacctagatttgggttgtataaatatcaactcaaggctgtaagagcctcccatggtctaatgtttcaagagtaaagaagaatagacaaacacccatgttggaatcatctgttgcagaaaagaacacaaagatagttttattaatttagaacaaattttgagaactttacatagacagaaatcttctatctcctttttttctaattttggggaatgtcttccactagtggtcgctaaaaatgtagaaatatcatagggagtgcaaattacattgtctctttacctgccacaatctggcagcactcatcatgtagcaaatgcccaaataatagactacagattatagtgacttcaccctaggttaacattatttctaggtaaggnactagtatatct

SEQ ID NO: 5082 - DNA, 224 bp, Homo sapiens
ctgcctccgtttgggtggcagaaaatgtcacagggacctttcagccacaaagaggcttttaggccgtggttgggggtcttcagggtcttgctctgggcctggctgtatccatgctcaagagtggagaggggcagagggggtgggcaggcggccgtctgggtctggtcttgaatcaggtcccatggactccgcggaaccttcgctggctggcggcgtgcatgtgg

SEQ ID NO: 5083 - DNA, 288 bp, Homo sapiens
ctgtgagctggcaccgagaggggctgctgagctagaattcccacctatgtctttccaagggactgttcacggcttgggacttggtctctgtcctgccccatcctcgtcacttgggaccacgagccctggttcagtcacccagggaagcctcccagcggctcatgaagcatcgagctccaagcccagatgccaagctccctggctgagctgaatgatgtcactcatggtggacgcgttctgctcacgggcccagagccctgtgaaatgcatcaaggtcctctccgctgg

SEQ ID NO: 5084 - DNA, 181 bp, Homo sapiens
  unsure (11): n=A,T,C or G
  unsure (144): n=A,T,C or G
caacaatctgngtgcctctctggttgtttctcttttttattattactcctgagttgatgacattttttgttagatttcatggtaattctcaagtgcttcaatgatgcagcatttcttgcactaaaaaaaaaaaaaaaaaactanaaagttttgggacatggggttatattaaattattctt

SEQ ID NO: 5085 - DNA, 288 bp, Homo sapiens; identical to SEQ ID NO: 228
  unsure (9): n=A,T,C or G
  unsure (10): n=A,T,C or G
  unsure (176): n=A,T,C or G

SEQ ID NO: 5086 - DNA, 343 bp, Homo sapiens
ctggtctccctccaccctctcatatttacacccaaccccttccccaaagctagcttttaccaaagttcctggtaggaggtcaagaagtgtgtccacttagccggcagtcctagatgtagtggacgctgtttgtccccaggccagttgggcaccaggaagggctactctggggattcagggcatagactccgtactggggtcaagggaggcccccactcacagatactctcctttccttctggggctcaatgtacaccaaaaccttcagaaagcaaagttggagtggtggacccccaatgtcaagtttagtgctctctttgcttgtgaggacccacacaagtgg

SEQ ID NO: 5087 - DNA, 635 bp, Homo sapiens
  unsure (579): n=A,T,C or G
cctgattggttaaaaacatcaggctgtagctaaagcttaaactccctatatgattgggtgaagtttcaatcacttagtttgcagcagtgactcatttttgcttaggagaaagtcccctttgattggttgaagtttcaatcccttagcttgcagctatgactcattttggcttagaggaatgtccccttagggaagtccctgttgacccaggaagtctagctaacttagccacttagtgcctcagtaccccctctcaacaggaaagcccaagtgctgttgagaagttgggcaatgatcattctagctacttcctgctgaactggggcacagaaggggatctgcagttgagggttcctcaggaggggagtcttcttcagtgtcgtggtgttagaacaggttggtaggtcagtctaggggtcctcgatagtaggtgctagtggtggtcatttggggctccatttgtagaaccacttgcagtttcatggattctattcacttcagagaaatcccggacaggcccccagaaatgagatgagaagtctcttccgatcgaaggtttttatcaattgaagagtttgnggttccacgggcttcaaagaatgaaggcttggaccgcagcagtgagtgttacagct

SEQ ID NO: 5088 - DNA, 535 bp, Homo sapiens
aaaaacaaaaggttgatatactataaaataagatgcttcagtgcagctccaaaaacctttataaatacagccatttggaaggacgatcctggatcagaaattattccttgtgtatctatattatgtgcatgcctcatttcagttgtcataattgtctctgtaatttcctcctgagtagcggtcataaccaccctggtttctgccattatagtctctggaacgtccatatccatatccataccctccaggtcgactgtcataatacctgccactcccatagccctggtccccaccacctctagagtagctgcgaccacgcccatgggccccaaagccacctcctctggttccccgagcagacttgcctgcatgatccacacggatctgacgaccatccagagactaagtgtgggagacacaaggatgatgggttggcagtcagtcagggcaatggtgagggaagagcaggcaagggtaagtgggcaaaagaggccaaaaattcctgctgggcaccaggttctgggtgccatgttcc

SEQ ID NO: 5089 - DNA, 418 bp, Homo sapiens; identical to SEQ ID NO: 4915

SEQ ID NO: 5090 - DNA, 545 bp, Homo sapiens
cctagattttcaagaagtccaatatctctcacttgaagtgtcttttccctggagtagattgggagatttgagggatatctgtccaaagatgagacagtctgtttctagtttcccatccagcctgatggggcgtctacagtttttaccacaaggtgtcgctgttgaacagattctggtgcagtctagtgcatagctgtccacttctagagtgatcacttgctgggccaagttcctctccttaagtggtgtctcacattaaggttcccaaattacagactcattaattcaccctaataagctcatccaggcagtttaggtcttcaggggcttccagcctccaacacacattgggccaaaaccagcctgtaccaccagctccaagccctgtgttgaatctaggtcattggtccagatgccccttcattctgggcctgtggtgtcctttccagacagcagacctcagttaagggcatcccagtccatcagagaagttccaggatcacagaccctcaaaaggggcagtgttgaggattcagtctgttttc

SEQ ID NO: 5091 - DNA, 571 bp, Homo sapiens; identical to SEQ ID NO: 230

SEQ ID NO: 5092 - DNA, 584 bp, Homo sapiens; identical to SEQ ID NO: 231
  unsure (577): n=A,T,C or G

SEQ ID NO: 5093 - DNA, 409 bp, Homo sapiens
  unsure (359): n=A,T,C or G
cctctcctccactgcatgtggcggcagggcgggtaggtcgcagggctccatgattgtggggcagcttcaagggcacatggggcagaggccctcgaaggtcccctcctcagtaggggatgtcattctgatagtactggatcatgttgtaggtccggctcctgttgctgaggaagcagctctggatgaccttcatgatgaaatttgcagcctcgcgctcagtcatgttggggctaaacctgtgcttcaagaacttgattggccgcgaaaacagggcaggcccgtgtccaacatgatagtgaccagggagacgaccacatccatgtagggccgcacagccaggtagcctggacacacatctncatgaaccacttgaagggtgtggcctccatcttgccccccatgatcatca

SEQ ID NO: 5094 - DNA, 135 bp, Homo sapiens
aaaaaagagcattttattttaataaagaataaaagagatcaatatactgttttaatggatacaaaaataaatattcattcagcatattaaagatatgtgctttgacattcatttgaattggagattcaagcctat

SEQ ID NO: 5095 - DNA, 549 bp, Homo sapiens
ctgaggaaatgggcagtcccatcgctagaaccctgttcttagaaattacctggtctcttgctctgacagatgctgagctaatgctgggtcacatatttaacagctagcctaaagccataggctggaacagagttggcaagagcctggctcaggtgtagcgaggagtagagagggaagacaaagggagtatcagacccctcacacgggcctctcctccccaaagatggttccacctgggtgtgttcaggagtcactaccttcacgctccctcctcccccaccccagctcttccagggtatacctaaggggtccagagcaaggaagggggcttgagctgggcccgaggaggtgaggttggctggaatttagggtggctggcagaggagagctggggaggctgcagcctttacagcagacagcaggcacggaatatcagcaggtccttcggctcagtaagcttcagtgagacactctcattggccccaatgaagagcacgccaccacgttgcagagggattggtgtctgggttgtgggtgtgctggctatta

SEQ ID NO: 5096 - DNA, 276 bp, Homo sapiens
ccacaggcttctaccccgaccacgtggagctgagctggtgggtgaatgggaaggaggtgcacagtggggtcagcacagacccgcagcccctcaaggagcagcccgccctcaatgactccagatactgcctgagcagccgcctgagggtctcggccaccttctggcagaacccccgcaaccacttccgctgtcaagtccagttctacgggctctcggagaatgacgagtggacccaggatagggccaaacctgtcacccagatcgtcagcgccgagg

SEQ ID NO: 5097 - DNA, 443 bp, Homo sapiens
ctgttggggctctgccaggtcccctgggaccaactacagctccaatcagaaaccctgcgcttccttgagtgtggcttcccacttttcctgcattgtggagctgactgagtacaccggtgaggctggggtctctgcaggggaggtcactggaacagcgagcaagggactggtgcctcgctggtgctgggtctctggtttgctgcagagccgtaggacactcctggctcctcagtaggacagacagacgcaggcgggtttattttggaggggtacttgtggcattttcctgtattgtcttggacatgggatgtggggaggtggaaatgatgagcagtagcatcatttctccctgttgggttttagccagtttgccagcaagcgcatcctagcagggtccccgagcagcaggttgtgtggatgaagggacaggcacttgcatccag

SEQ ID NO: 5098 - DNA, 332 bp, Homo sapiens
  unsure (308): n=A,T,C or G
  unsure (309): n=A,T,C or G
aaatagaaaacagtatattgaaagtggtgggtttgatctttttatttagaaacccacaaaatcagaaacacagtacaaataaaacagaaatcaaactataagttgacttttagttcctaaaaagaaacatatttcaaaagcaatggaatctagaattcttataacatgaataacaaaatgtacagcaagcctatgtagttcaattaatatataaggaaaaggaaggtctttcttcatgatacaagcattataaagtttttactgtagtagtcaattaatggatatttccttgttaataaaattttgtnncataatttacaaattagttcttt

SEQ ID NO: 5099 - DNA, 594 bp, Homo sapiens; identical to SEQ ID NO: 229

SEQ ID NO: 5100 - DNA, 325 bp, Homo sapiens
  unsure (38): n=A,T,C or G
  unsure (43): n=A,T,C or G
  unsure (70): n=A,T,C or G
  unsure (83): n=A,T,C or G
  unsure (95): n=A,T,C or G
  unsure (99): n=A,T,C or G
  unsure (138): n=A,T,C or G
  unsure (147): n=A,T,C or G
  unsure (166): n=A,T,C or G
  unsure (171): n=A,T,C or G
  unsure (182): n=A,T,C or G
  unsure (196): n=A,T,C or G
  unsure (199): n=A,T,C or G
  unsure (229): n=A,T,C or G
  unsure (253): n=A,T,C or G
  unsure (268): n=A,T,C or G
  unsure (281): n=A,T,C or G
  unsure (283): n=A,T,C or G
  unsure (295): n=A,T,C or G
  unsure (300): n=A,T,C or G
  unsure (310): n=A,T,C or G
  unsure (316): n=A,T,C or G
gtacaagcttttttttttttttttttttttttttgcanaaaanaacacaaagatagttttattaatttanaacaaattttganaactttacatanacanaaatcttctatctcctttttttctaattttggggaatgncttccactngtggtcgctaaaaatgtanaaatntcatagggagngcaaattacattgnctntttacctgccacaatctggcagcactcatnatgtagcaaatgcccaaataatanactacagattatagngacttcaccctangntaacattatttntaggnaagggactantatatntgaattgaa

SEQ ID NO: 5101 - DNA, 166 bp, Homo sapiens
aaagccacacaaataagagtgctaaactgtggacttaaaagtaggtgtgtaaatatttttaatcagtattacttggaaaataaaatataacaaacccatagaccaatatgctattttttttacctgttaaatattgggagttctttacattttttaagtaaacttt

SEQ ID NO: 5102 - DNA, 574 bp, Homo sapiens; identical to SEQ ID NO: 380

SEQ ID NO: 5103 - DNA, 510 bp, Homo sapiens
  unsure (159): n=A,T,C or G
  unsure (189): n=A,T,C or G
  unsure (211): n=A,T,C or G
  unsure (215): n=A,T,C or G
  unsure (219): n=A,T,C or G
  unsure (361): n=A,T,C or G
ctggacacagacacttccccagccccagggccagagtggggctggagggaaggacagggctacagtagtagtgggggtatatgagggaaggctgcaaggatgtggtagctggagttttgagagatggataagagttttccaaggaggcaaaagtggcanaaaagctttgcaggtgaggaggagcagcanaagcttaacctgcatgagaatncctntcancagtcagaaagttgaccctgcacagccaaggggtaagctctgaccattttgcaggggacagaactgagacccagagagggaaaggaacttgcccactgtcacactgcatggaaggggcaaaactgtaggctccaatacttgngctcttaacctccttactctgagccttctcacgcttggcatgctgttccctctgccaggaatgcctttccttcccttgattgcgtgaaaagttcctgccaggtttggtgtcatccctttgtgccccttgtagggtgaggacagaaaggg

SEQ ID NO: 5104 - DNA, 130 bp, Homo sapiens
ctggcggtaaggctggaaaggactccggaaaggccaagacaaaggcggtttcccgctcgcagagagccggcttgcagttcccagtgggccgtattcatcgacacctaaaatctaggacgaccagtcatgg

SEQ ID NO: 5105 - DNA, 597 bp, Homo sapiens
  unsure (542): n=A,T,C or G
  unsure (593): n=A,T,C or G
ccagggatcagtctcatggccgtagaagcagccaaattcctctgcctttgccttcccttcaggagtcacatgctaaggcatccttgggcatttggaaaaggccgcttggggtgagagtgctctaggccactctgcaatgtccctgggcccgatgagtaacaaatgcaccccgggacccagagaagtggaaagacatgaaagggatttggaaacagatcgtaaaaataacctgtatgaaaatcacacagacaagaaaacaaacaaatccagctagccccttggatcctgccatccgtcttttctcccgggactgcctttgctttgtggagggtgagtcctgggacaggctttgggtgacaagttgtgggcatgttccatccaagcctggctctcccgactggcagagggaggtggctgacaatcaattcctctggatacattttcctgtgattgctcctgtgatcaaaggcagccaccgacaggtgcgggagcggttagttcaccacgtcatagtagtaattgcgcagccgcagttccactgntgcgaatccgggcctgttttccacatcgtatgtccagcacagattcatganatcg

SEQ ID NO: 5106 - DNA, 583 bp, Homo sapiens
ctgtttttaacccacgtttttataggacctacttctttgtagataaccagtattggaggtatgatgaaaggagacagatgatggaccctggttatcccaaactgattaccaagaacttccaaggaatcgggcctaaaattgatgcagtcttctactctaaaaacaaatactactatttcttccaaggatctaaccaatttgaatatgacttcctactccaacgtatcaccaaaacactgaaaagcaatagctggtttggttgttagaaatggtgtaattaatggtttttgttagttcacttcagcttaataagtatttattgcatatttgctatgtcctcagtgtaccactacttagagatatgtatcataaaaataaaatctgtaaaccataggtaatgattatataaaatacataatatttttcaattttgaaaactctaattgtccattcttgcttgactctactattaagtttgaaaatagttaccttcaaaggccaagagaattctatttgaagcatgctctgtaagttgcttcctaacatccttggactgagaaattatacttacttctggcataac

SEQ ID NO: 5107 - DNA, 123 bp, Homo sapiens
  unsure (8): n=A,T,C or G
  unsure (74): n=A,T,C or G
agctcttnttaagcctcttggatttccagattacaccaaagactgtttccaatttgactgagagcagctccaantccgtccagagcttcctgcagtcaatgatcaccgctgtgggcatccctg

SEQ ID NO: 5108 - DNA, 361 bp, Homo sapiens
ccagatggcgcagaaatcccagtccacgcagatttcacaggaactggaggaacttcgagctgaacagcagagattgaaatctcaggacttggagctgtcctggaacctgaacgggcttcaagcagatctgagcagcttcaagtcccaggaattgaacgagaggaacgaagcttcagatttgctggaaagactccgggaggaggtgacaaagctaaggatggagttgcaggtgtccagcggctttgtgtgcaacacgtgccctgaaaagtggatcaatttccaacggaagtgctactacttcggcaagggcaccaagcagtgggtccacgcccggtatgcctgtgacgacatggaagggcag

SEQ ID NO: 5109 - DNA, 343 bp, Homo sapiens
ccacttgtgtgggtcctcacaagcaaagagagcactaaacttgacattgggggtccaccactccaactttgctttctgaaggttttggtgtacattgagccccagaaggaaaggagagtatctgtgagtgggggcctcccttgaccccagtacgaagtctatgccctgaatccccagagtagcccttcctggtgcccaactggcctggggacaaacagcgtccactacatctaggactgccggctaagtggacacacttcttgaccccctaccaggaactttggtaaaagctagctttggggaaggggttgggtgtaaatatgagagggtggagggagaccag

SEQ ID NO: 5110 - DNA, 457 bp, Homo sapiens; identical to SEQ ID NO: 232

SEQ ID NO: 5111 - DNA, 547 bp, Homo sapiens
  unsure (483): n=A,T,C or G
ctgcagtttctcaatctctaggaatcctgcagtaaaacaagccccttggtgagctggaagatttgtgcccagtgacaaagagatagtttgtaaaatgctgtgtaattgtaagttaccacaaatgaaaatacatgacagcacaatgtggcccgtagaaaattcccctctccgcttctgcttttcctgaaggagagttctgagcatccaaaggctcctcacttacctcactgactccccttatttcctgggtttactttccccattaacactgacatctaaatctctagaggagtatgtcatcccttcctccctggttccatattctaagtttcagaatcatgatctttttctgcactaacgtcccacagtcctcagagtttctcacagttcattgatgtgtactgagtatataatttatacttagcccccacggcggggtggttctcagaagtggaagacaggtgggtctttggagaacacggngggaatcttggtgtactgactaacttgatgggcgcttggttcctcttccagccagacctcggcc

SEQ ID NO: 5112 - DNA, 256 bp, Homo sapiens; identical to SEQ ID NO: 233
  unsure (157): n=A,T,C or G
  unsure (187): n=A,T,C or G

SEQ ID NO: 5113 - DNA, 388 bp, Homo sapiens; identical to SEQ ID NO: 574
  unsure (321): n=A,T,C or G
  unsure (346): n=A,T,C or G

SEQ ID NO: 5114 - DNA, 259 bp, Homo sapiens
  unsure (18): n=A,T,C or G
  unsure (93): n=A,T,C or G
  unsure (223): n=A,T,C or G
cctatccaaggaacaggntagtaggaaatcacattctgaagcactcattctgcctttcttcagtgtaagaaagttgctcaaaagaagaagcgngacaacacaagctgctacaatggctacattctctacattcaatgtaagagagaaggagctatggtcactccatgcaaaggccagatagagatgtggtgcgtatgtgcagagtacctcaagaaatgaaagncagcatgtctcttggaagctatgaacactaatgttt

SEQ ID NO: 5115 - DNA, 143 bp, Homo sapiens
  unsure (135): n=A,T,C or G
  unsure (138): n=A,T,C or G
gaggtaaagctgttttacaatatgataacaagaacacccagcagatacaggttgtacagttaatcattttgactgtgtcagtaatataatcagaatactgtaacggtaagagaaaaatacttttttttttttttnganactgg

SEQ ID NO: 5116 - DNA, 364 bp, Homo sapiens
  unsure (182): n=A,T,C or G
  unsure (193): n=A,T,C or G
  unsure (209): n=A,T,C or G
  unsure (260): n=A,T,C or G
ccatgaacgcctttggagacatgaccagtgaagaattcaggcaggtgatgaatggctttcaaaaccgtaagcccaggaaggggaaagtgttccaggaacctccgttttatgaggcccccagatctgtggattggagagagaaaggctacgtgactcctgtgaagaatcagggtcagtgtggntcttgttgggnttttagtgctactggngctcttgaaggacagatgttccggaaaactgggaggcttatctcactgagngagcagaatctggtagactgctctgggcctcaaggcaatgaaggctgcaatggtggcctaatggattatgctttccagtatgttcaggataatggaggacctgc

SEQ ID NO: 5117 - DNA, 275 bp, Homo sapiens
  unsure (80): n=A,T,C or G
aaaaagcacaaaacttttggaatgttaatggataactactattagtctcaaaattctaggcatttctataaaacattggncaatgtgactagtaagttaacgggaccaaggtttcaaagatcaatactgaaccttgataaataataagaggaaatgtaactccacaaaatgtttctgattaagtttgtgcccatgcaaaattaacataaatttcttaactcaagaatgaggaatattaaagcaatgtattttttcaacataaagcatgcattttc

SEQ ID NO: 5118 - DNA, 247 bp, Homo sapiens
  unsure (14): n=A,T,C or G
  unsure (21): n=A,T,C or G
  unsure (63): n=A,T,C or G
  unsure (87): n=A,T,C or G
  unsure (100): n=A,T,C or G
  unsure (173): n=A,T,C or G
  unsure (177): n=A,T,C or G
  unsure (183): n=A,T,C or G
  unsure (203): n=A,T,C or G
  unsure (236): n=A,T,C or G
ctgtaattatttancctcaantgactttctccattgcttcacgctatgccactattttgcttntttaatttttttaaccttgcttantattctatagttngcccaaccagttttacgtccaaggaaaattagccaatgcataaaatatacaaactatgaaaggcaaggatcangaanccaganactttgccaccaaatctcanattattagaaactaggtgtcagggtttatcaanaaggccaggaa

SEQ ID NO: 5119 - DNA, 205 bp, Homo sapiens
ccatctccttcaccgcactgatcctgaccgagctgctgatggtggcgctgaccgtccgcacgtggcactggctgatggtggtggccgagttcctcagcttaggctgctacgtgtcctcactcgcttttctcaatgaatattttgatgttgcctttatcaccaccgtgaccttcctgtggaaagtgtcggcgatcaccgtggtcag

SEQ ID NO: 5120 - DNA, 320 bp, Homo sapiens
ccatcctccgccaagctcgagagcccaggcaagctgtgattgtcacaaggaagctgactccagaggtcatgcccgacctcaactcctccactgactctgcagcctcagcctctgcagccagtgatgtttctgtagaatctacagcagaggccacagtctgcacggtgacactggagaagatgtcggcagggctgggcttcagcctggaaggagggaagggctccctacacggagacaagcctctcaccattaacaggattttcaaaggagcagcctcagaacaaagtgagacagtccagcctggagatgaaatcttgcag

SEQ ID NO: 5121 - DNA, 161 bp, Homo sapiens
  unsure (9): n=A,T,C or G
  unsure (20): n=A,T,C or G
  unsure (29): n=A,T,C or G
  unsure (39): n=A,T,C or G
  unsure (88): n=A,T,C or G
  unsure (130): n=A,T,C or G
  unsure (131): n=A,T,C or G
  unsure (132): n=A,T,C or G
  unsure (147): n=A,T,C or G
tgtcagagnacggctcctgngacgctttngcttattttntgtacggctttttcgagttggcttaggcagaattctcctctgagcgatnaagacgacatgcttcccactgaactttttctccaattcgcgnnnctagccggacttggnttttctggaaagat

SEQ ID NO: 5122 - DNA, 258 bp, Homo sapiens; identical to SEQ ID NO: 5075

SEQ ID NO: 5123 - DNA, 318 bp, Homo sapiens
  unsure (9): n=A,T,C or G
tggggcgtntttgtgtttgagatattagctcaggtcaattccaaagagtaccagattctttcaaaagtcagatgagtaagggatagaaaatttgttcatcttaaggaacagccaggcgctagccagttaagtgaggcatctcaattgcaagattttctctgcatcggtcaggttagtgatattaacagcgaaaagagatttttgttaaggggaaagttattaagttgacactgtggatcaccttcggccaagggacacgactggagattaaacgtaagtaatttttcactattgtcttctgaaatttgggtctgatgg

SEQ ID NO: 5124 - DNA, 327 bp, Homo sapiens
ctgcagtgtccctttttatatcatgctagtgttgagacatacttgactaacttgggaacagttcgatatattgacaaccgtcaacttaagaaaatcaacagcttttggccccagcgtccaagtgaacttttcatggagtgcagaatctcaaatggacaaaatactttgtctttttaaatactgaaaatttaattattagtactatgactgaaagattcttcatggctaaaaagctctgcatcaaactcaattcaggaggccttccctccccaccaccatcaacctcttcaaaacctactccctccctctaagtatctctcaacacag

SEQ ID NO: 5125 - DNA, 421 bp, Homo sapiens
  unsure (16): n=A,T,C or G
  unsure (27): n=A,T,C or G
  unsure (41): n=A,T,C or G
  unsure (52): n=A,T,C or G
  unsure (62): n=A,T,C or G
  unsure (86): n=A,T,C or G
  unsure (118): n=A,T,C or G
  unsure (137): n=A,T,C or G
  unsure (172): n=A,T,C or G
  unsure (187): n=A,T,C or G
  unsure (232): n=A,T,C or G
  unsure (248): n=A,T,C or G
  unsure (269): n=A,T,C or G
  unsure (284): n=A,T,C or G
  unsure (306): n=A,T,C or G
  unsure (375): n=A,T,C or G
  unsure (385): n=A,T,C or G
  unsure (386): n=A,T,C or G
cttgctttgttatctnctacatatatnccaaagggataagntaggaacaccngaaactcagnagtaactcactttaaccttgcttntggggctccaattcaagtgatgctcaatttcnaggtacaaggaaaaccatnagaatataaagtcataatgccatttccactcagangaaaagatttatctntctttagatactcaaaattattcttggcattttagcacttttggnacacatttcctgatgnaggaaatagtaaaatttcagngcctatggcattggntttcaccacctatgcaattttntacacatctgaaaattaccaggttatctaactccttaaatgttcctctcttcaacaacaaaaaacacanacaaaaatgnngggagaaacaggaagcatccaggtccaaatgacag

SEQ ID NO: 5126 - DNA, 192 bp, Homo sapiens
  unsure (6): n=A,T,C or G
aagtgngctcctctggcctcagttctcctcttttggaacaacataaaacaaatttaattttctacgcctctggggatatctgctcagccaatggaaaatctgggttcaaccagcccctgccatttcttaagactttctgctgcactcacaggatcctgagctgcacttacctgtgagagtcttcaaactttt

SEQ ID NO: 5127 - DNA, 196 bp, Homo sapiens; identical to SEQ ID NO: 653

SEQ ID NO: 5128 - DNA, 323 bp, Homo sapiens
aaatttggggcgtttttgtgtttgagatattagctcaggtcaattccaaagagtaccagattctttcaaaagtcagatgagtaagggatagaaaatttgttcatcttaaggaacagccaggcgctagccagttaagtgaggcatctcaattgcaagattttctctgcatcggtcaggttagtgatattaacagcgaaaagagatttttgttaaggggaaagttattaagttgacactgtggatcaccttcggccaagggacacgactggagattaaacgtaagtaatttttcactattgtcttctgaaatttgggtctgatgg

SEQ ID NO: 5129 - DNA, 329 bp, Homo sapiens
cccggccaagagaagagattttcctaactgggcatatgcagcacatgtgtgccgatgggaatgatccactggaggaggagtagcgggaaacgacaggcactgtagagggggatacacaggggaggggcggagagaatcatccactctggaccccagcatgactgctgaggtcaaggatatatagagggagagaggaccacaaacttgaagatggatatcggctgcagactttcctgaatcaggtctcacctaagaaaataaacacatgctatgtcagagaagcctcagggcttccacacctgctcgaaaagggagttgagcttcagcag

SEQ ID NO: 5130 - DNA, 571 bp, Homo sapiens; identical to SEQ ID NO: 234
  unsure (483): n=A,T,C or G

SEQ ID NO: 5131 - DNA, 489 bp, Homo sapiens
ccgaagcgggagcggccaaaatgaagtttaatccctttgtgacttccgaccgaagcaagaatcgcaaaaggcatttcaatgcaccttcccacattcgaaggaagattatgtcttcccctctttccaaagagctgagacagaagtacaacgtgcgatccatgcccatccgaaaggatgatgaagttcaggttgtacgtggacactataaaggtcagcaaattggcaaagtagtccaggtttacaggaagaaatatgttatctacattgagcgggtgcagcgggaaaaggctaatggcacaactgtccacgtaggcattcaccccagcaaggtggttatcactaggctaaaactggacaaagaccgcaaaaagatcctcgaacggaaagccaaatctcgccaagtagggaaggaaaagggcaaatacaaggaagaaaccattgagaagatgcaggaataaagtaatcttatatacaagctttgattaaaac

SEQ ID NO: 5132 - DNA, 404 bp, Homo sapiens
  unsure (261): n=A,T,C or G
  unsure (265): n=A,T,C or G
  unsure (386): n=A,T,C or G
aaaagtgtcgtaaaattctcaactatatacaaaacattgtccacttaagctgcctgcctttcaagagtaactctcctcccatgcaaagggtactgttgcacataaaagatatcctcatctgcatgttttccagtacctctttctccaccctaaacagttgaaatttaattggtctcaaatttcaagtgaaactgatacatggcaaggctgacaccactgtatcatgtaggttttctaaataaagcattttatgtataattntaancattaaagtaagtagatagggatgccatttctaatatatcagcatggctgatggcagtgaaaccatccaagatagaaggcccacttttaacagagtttaaccagtatttatgggccttatnaaataaaaagataatttt

SEQ ID NO: 5133 - DNA, 413 bp, Homo sapiens
  unsure (314): n=A,T,C or G
  unsure (381): n=A,T,C or G
aaaattaaagtcatcacgaaatggaagttttcccaggatggaaaataagaggaagtgctgctgtaattgggagcacaaggggcctcccaaaaaggagccccacctcagcatcactgccttaatcgtggcctccctggggtgggtggggttctctcctccctccctccctcctcctggggtgggagggcgctcctgttcccatctctgtgttccctggaggcaggtatcacaaagcatttgtgaattgctttaggtgcagggacaccacccactcaggactcttccccatcatcccttccattgccacaccctanatccagcctcaggaactaacaagttttgagaaaagcaggtggtagagcagcagcttcgtgctctcancggtggctggctggcatttttctctagcgttg

SEQ ID NO: 5134 - DNA, 252 bp, Homo sapiens; identical to SEQ ID NO: 656
  unsure (40): n=A,T,C or G
  unsure (51): n=A,T,C or G
  unsure (91): n=A,T,C or G
  unsure (121): n=A,T,C or G

SEQ ID NO: 5135 - DNA, 379 bp, Homo sapiens; identical to SEQ ID NO: 657
  unsure (46): n=A,T,C or G
  unsure (55): n=A,T,C or G
  unsure (69): n=A,T,C or G
  unsure (78): n=A,T,C or G
  unsure (217): n=A,T,C or G
  unsure (338): n=A,T,C or G

SEQ ID NO: 5136 - DNA, 374 bp, Homo sapiens
  unsure (182): n=A,T,C or G
  unsure (321): n=A,T,C or G
  unsure (358): n=A,T,C or G
ccaggctgatcttgaactcctgacctcaagtgatctgcccacctcggcctcccaaagtgctgggattacaggcatgagccaccgcgcccggccagcattgtatcttaaaggtagcctttcagttgtttggatgacagttgtctccactggacatctgcttcatgccaggccctctcctgggngttggtgtgtccactcttccctccaaccaccatattcccttgaggccaggaatggacctaagggtgcctcaggcatgggaagacccgataccggcctctctggagctcgctggcttctggagttctgagttaaggaggnagttgaagagacccatgtatgacccccagatgccagnaaaactaatcatgtgc

SEQ ID NO: 5137 - DNA, 271 bp, Homo sapiens
  unsure (129): n=A,T,C or G
  unsure (226): n=A,T,C or G
  unsure (232): n=A,T,C or G
  unsure (258): n=A,T,C or G
aaacgcttcatgacagggtaattcatgtccaacatatcaaaaacatatttatagataactttagaaagaaaatacatactttttttgataatcacaagtagcaatgagattttctatattattttcagnctcactttagaaatgttttaattgtctaaatttaatcaattcatcgattaaaggaaagacaataaaatagtaaaattacatgtgtttatatataagngtgtgngtttcaaataacaaaacgcaggttgnaaactaaaatcac

SEQ ID NO: 5138 - DNA, 266 bp, Homo sapiens
  unsure (23): n=A,T,C or G
  unsure (168): n=A,T,C or G
  unsure (237): n=A,T,C or G
ctccaacacgaccatcgtagggngaagcccacgttttcttccatggcctcaaaggccctagaacttgcctacctttctggccttacctcctagctacttatccatctcttgaactttatactcttgtataaatttctaactttcagaaaatgccatactctgttttgncaccacacatgtatatttccccctggtacacttggaagactcttatccatctgtgaaaccctatgttgncatcacttggtccatgaaatattacctgg

SEQ ID NO: 5139 - DNA, 557 bp, Homo sapiens
ctgaggaaagacatcggaccgtcagagccggggactaccctcagcccagggagacacctgtgtttccagggctgggactgacctcacaggatcactgctggctctgctaacaaccccaaggacaccaacgtttcccattctgagtacttctccgcaaaccctttgtttcattaaggactgttttacatgaagggtgcaaaagtaggataaaaatgagaaccctagggtgaaacacgtgacagaagaataaagactattgaatagtcctcttctctacccatggacttggcatttttatattcgattttaaggaaatataacttagtagtaaagagatgagcattcaagtcaggcagacctgaatttgggtcaaggctgcgccactcaaaagctatatgacctctatatgagcagcttattcaacctcttttaacctccattttgtcatctgtagaatgatgataaatgcctagctcagaaggattcctaatgaataaatgagtgacagtgcatgtaaacagactagcttaattaatattaatatgattaggatgggc

SEQ ID NO: 5140 - DNA, 525 bp, Homo sapiens
gcaatttgagagcaagatcataaagtcctgcccagaatgccggatcacatctaactttgtcattccaagtgagtactgggtggaggagaaagaagagaagcagaaactcattctgaaatacaaggaggcaatgagcaacaaggcgtgcaggtattttgatgaaggacgtgggagctgcccatttggagggaactgtttttacaagcatgcgtaccctgatggccgtagagaggagccacagagacagaaagtgggaacatcaagcagataccgggcccaacgaaggaaccacttctgggaactcattgaggaaagagagaacagcaacccctttgacaacgatgaagaagaggttgtcacctttgagctgggcgagatgttgcttatgcttttggctgcaggtggggacgacgaactaacagactctgaagatgagtgggacttgtttcatgatgagctggaagatttttatgacttggatctatagcaaccttgcgtggcgtgtgaactggtctgctgacctca

SEQ ID NO: 5141 - DNA, 399 bp, Homo sapiens
  unsure (7): n=A,T,C or G
  unsure (13): n=A,T,C or G
  unsure (41): n=A,T,C or G
  unsure (44): n=A,T,C or G
  unsure (57): n=A,T,C or G
cagtggncttggngtgctggcctcggacacgaaggccccanaantgacgcagccctntatgggcccgaatcttcttcagtcgctccaggtcttcacggagcttgttgtccagaccattggctaggacctggctgtattttccatcctttacatccttctgtctgttcaagaaccagtctgggatcttgtactggcgtggattctgcataatggtgatcacacgttccacctcatcctcagtgagttctcccgccctcttggtgaggtcaatgtctgctttcctcaacaccacatgagcatatcttcggcccacacccttaatggcagtgatggcaaaggctattttccgccgcccatcgatgttggtgttgagtactcgcaaaatatgctggaactttt

SEQ ID NO: 5142 - DNA, 459 bp, Homo sapiens
  unsure (456): n=A,T,C or G
aaaaatggagagtctgaattttattagagctcacacaccatatattaacatatacaactgtgaaccagctaatccctctgagaaaaactccccatctacccaatactgttacagcatacaatctctgttcttgggcattttgtcagtgatgctgatctttgccctcttccaggaacttgtaatagctggcatcgttgagaatgaatggaaaagaacgtgctccagacccaaatctaacatagttctcctgtcagcagaagaaaaaaaagaacagactattgaaataaaagaagaagtggttgggctaactgaaacatcttcccaaccaaagaatgaagaagacattgaaattattccaatccaagaagaggaagaagaagaaacagagacgaactttccagaacctccccaagatcaggaatcctcaccaatagaaaatgacagctctccttaagngat

SEQ ID NO: 5143 - DNA, 248 bp, Homo sapiens
ccatggtcaagagaaaggatttctgaaggcagccctggaagtggagttaggagcttctaacccgtcatggtttcaatacacattcttcttttgccagcgcttctgaagagctgctctcacctctctgcatcccaatagatatccccctatgtgcatgcacacctgcacactcacggctgaaatctccctaacccagggggaccttagcatgcctaagtgactaaaccaataaaaatgttctggtctgg

SEQ ID NO: 5144 - DNA, 471 bp, Homo sapiens; identical to SEQ ID NO: 382

SEQ ID NO: 5145 - DNA, 452 bp, Homo sapiens
tgctgcccgagttatcgggaccctgttgggaactgtcgacaaacactcagtggaggtcaccaattgcttttcagtgccgcacaatgagtcagaagatgaagtggctgttgacatggaatttgctaagaatatgtatgaactgcataaaaaagtttctccaaatgagctcatcctgggctggtacgctacgggccatgacatcacagagcactctgtgctgatccatgagtactacagccgagaggcccccaaccccatccacctcactgtggacacaagtctccagaacggccgcatgagcatcaaagcctacgtcagcactttaatgggagtccctgggaggaccatgggagtgatgttcacgcctctgacagtgaaatacgcgtactacgacactgaacgcatcggagttgacctgatcatgaagacctgctttagccccaacagagtga

SEQ ID NO: 5146 - DNA, 425 bp, Homo sapiens
  unsure (338): n=A,T,C or G
  unsure (355): n=A,T,C or G
ctgcacactggcacacttgaccttcatgcagtcagaagctttggctgattccccatccaaaatattagagatgaaatgaaagcaaagtaggcatctgacaaaagttgctttttcccttctgcattttaggacctcaagtaatgtttatccagaaactgctatcataccagagattcactgtgtatttaacaacataggcatccaatctggcaaatttgaaaaactcttaacatacaccccaaatccctgcccaaatttaagaactagggtggacacagtgcttttttccatgtcgcatcttctgtgatggggctacgatatgtgggagcagagaatgnggagggtggagcgcatnccagatgaggatctatcagcaatgggagggggcctccactttagcatctccaccctgctcctctcagagg

SEQ ID NO: 5147 - DNA, 348 bp, Homo sapiens
  unsure (240): n=A,T,C or G
  unsure (275): n=A,T,C or G
  unsure (297): n=A,T,C or G
  unsure (335): n=A,T,C or G
aaagtttagacattaacaagtgatagattagcctcaaaaaaagacaatttggtaaggtttaggtcttttaatttggtgcttgttcacaacttgactggtgcttctttccttgctgtcttcacatcaagccatggggccaattctattttcagtaaatgtttgacagctttttacttagtaacagtctcagcacttttattaagcatgcaagactaacaaaaactttggcaatgcataagngtaacacagtgacaagagagcttttacaattaagncttctaatactgccttcacagngtggaaattgtgctacatccaccaaaagagggccccgnctactcaaatatt

SEQ ID NO: 5148 - DNA, 405 bp, Homo sapiens
  unsure (51): n=A,T,C or G
  unsure (257): n=A,T,C or G
  unsure (371): n=A,T,C or G
  unsure (387): n=A,T,C or G
ctgcccttccatgtcgtcacaggcataccgggcgtggacccactgcttggngcccttgccgaagtagtagcacttccgttggaaattgatccacttttcagggcacgtgttgcacacaaagccgctggacacctgcaactccatccttagctttgtcacctcctcccggagtctttccagcaaatctgaagcttcgttcctctcgttcaattcctgggacttgaagctgctcagatctgcttgaagcccgttcaggntccaggacagctccaagtcctgagatttcaatctctgctgttcagctcgaagttcctccagttcctgtgaaatctgcgtggactgggatttctgcgccatctggtcaccgtggnggctttccaagttctnggaaacttgagagacgtt

SEQ ID NO: 5149 - DNA, 130 bp, Homo sapiens
  unsure (103): n=A,T,C or G
cggatcagaaggccacaagcttccctctcctcccctatcttcccaggtctgtattccgggagcctgtgtaactcgggcctcaactccaggctcccggctgggnattctcattctctgcagtacttgaaaa

SEQ ID NO: 5150 - DNA, 345 bp, Homo sapiens
gagagagcgagctgagtggttgtgtggtcgcgtctcggaaaccggtagcgcttgcagcatggctgaccaactgactgaagagcagattgcagaattcaaagaagctttttcactatttgacaaagatggtgatggaactataacaacaaaggaattgggaactgtaatgagatctcttgggcagaatcccgcagaagcagagttacaggacatgattaatgaagtagatgctgatggtaatggcacaattgacttccctgaatttctgacaatgatggcaagaaaaatgaaagacacagacagtgaagaagaaattagagaagcattccgtgtctttcatttttc

SEQ ID NO: 5151 - DNA, 400 bp, Homo sapiens
ctgtcccttgaatatcatcattgaaagtacaatatttttctcggtactttctaaagaacctgaatgcattatgatttccaaagtcttcgaactgaatgagtgtgttccggccatatctgtcagtaatagctttcataaactcatcaatcaggtcatcatactgttgtgtgcgatctcgtttctggtacaagcccatgtaaaatgggtcttttaagagtgcgatattatcagttcccacatcaatacacactggcaggcatctatcaggccgtattcctgcacaagctgtatacaaacaaagttttcctactggaattcccattccatagacacccagatctccaagacccagaattctctctccatcagtcactacaacagccttaacatgattttctgg

SEQ ID NO: 5152 - DNA, 316 bp, Homo sapiens
  unsure (17): n=A,T,C or G
  unsure (46): n=A,T,C or G
  unsure (53): n=A,T,C or G
  unsure (107): n=A,T,C or G
  unsure (135): n=A,T,C or G
  unsure (137): n=A,T,C or G
  unsure (179): n=A,T,C or G
  unsure (186): n=A,T,C or G
  unsure (193): n=A,T,C or G
  unsure (221): n=A,T,C or G
  unsure (231): n=A,T,C or G
  unsure (232): n=A,T,C or G
  unsure (241): n=A,T,C or G
  unsure (295): n=A,T,C or G
  unsure (296): n=A,T,C or G
taatgaaaaagacttanaacaatgtattatttacatgtaaataacnaaaaganagcagaatccccatatcctcttcaaaggaagggagacggcaggccatttatganaagaaagtccatataaaccccattaagnanaatctggatctaaatacttccaaacaggagtacacagcaggngaacagnctccctnatcccactgatctgctgcttcagataanatcagcaacnntcatcggcntctcatcaatctgagtggaatagtactgctcgatatctctgaggatgcggatgnngtcattctttacaaagttaa

SEQ ID NO: 5153 - DNA, 408 bp, Homo sapiens
  unsure (32): n=A,T,C or G
  unsure (44): n=A,T,C or G
  unsure (82): n=A,T,C or G
  unsure (117): n=A,T,C or G
  unsure (131): n=A,T,C or G
  unsure (148): n=A,T,C or G
  unsure (164): n=A,T,C or G
  unsure (191): n=A,T,C or G
  unsure (199): n=A,T,C or G
  unsure (215): n=A,T,C or G
  unsure (223): n=A,T,C or G
  unsure (236): n=A,T,C or G
  unsure (277): n=A,T,C or G
  unsure (307): n=A,T,C or G
  unsure (313): n=A,T,C or G
  unsure (315): n=A,T,C or G
  unsure (335): n=A,T,C or G
  unsure (352): n=A,T,C or G
  unsure (354): n=A,T,C or G
  unsure (360): n=A,T,C or G
  unsure (377): n=A,T,C or G
  unsure (393): n=A,T,C or G
aaaaaaaaaaaaaaaaaaaaaaaaaaaaaaangaaaaacttctntttaggctgggtgcggttcctcatgcctataatcccancatttagggaggctgaggtgagtggattgcagganctcaggagttcganaccagcctgggcaaggnggcaaaaccccgtctntactaaaaaaaattagctgggcttggnggcaggcncctgtaatcccaggtnctcggganactgaggtagganaattgcttgaacctggaaggtggaggttgcagtgagttganatcacaccaatgcactccacccagggtganagtgananactgtctcaaaaaaaaaaancaaaagaaaaacttctntntagctntgtgacgggcagttcanataataccttcaccanatttacctgttttca

SEQ ID NO: 5154 - DNA, 327 bp, Homo sapiens
  unsure (5): n=A,T,C or G
  unsure (50): n=A,T,C or G
  unsure (97): n=A,T,C or G
  unsure (235): n=A,T,C or G
  unsure (275): n=A,T,C or G
caggncttattcatcagggaggaaagtttctttgaaaatagttattcagntataagtaatacaggattattttgattatatacttgttgtttaatgnttaaaatttcttagaaagcaatggaatgagaatttaagcctcaaatttgaacatgtggcttgaattaagaagaaaattatggcatatattaaaagcaggcttctatgaaagactcaaaaagctgcctgggaggcaganggaacttgagcctgtcaagaggcaaaggaatccatgtagnagatatcctctgcttaaaaactcactacggaggagaattaagtcctactttt

SEQ ID NO: 5155 - DNA, 426 bp, Homo sapiens
ctggaagagagggctgcccggaacgtctctcaagtttccaagaacttggaaagccaccacggtgaccagatggcgcagaaatcccagtccacgcagatttcacaggaactggaggaacttcgagctgaacagcagagattgaaatctcaggacttggagctgtcctggaacctgaacgggcttcaagcagatctgagcagcttcaagtcccaggaattgaacgagaggaacgaagcttcagatttgctggaaagactccgggaggaggtgacaaagctaaggatggagttacaggtgtccagcggctttgtgtgcaacacgtgccctgaaaagtggatcaatttccaacggaagtgctactacttcggcaagggcaccaagcagtgggtccacgcccggtatgcctgtgacgacatggaagggcag

SEQ ID NO: 5156 - DNA, 481 bp, Homo sapiens
ccacacagactcaccaagccacagacttgtcttccacaagcacgttcttaccttagccacgaagtgaccaagccacacgtactaaaggttgaactcaaagatatgtacagggtattaaacaaataccaaggggaacagttaacttcaatacaaggtcaaaatcagcaacaagttctacaatccagtgctgatatcagatacaagcttcaaggacaatttcttttcgaaggcttattccagtttcgtgaggctagcatgaggtgtgtgcatttgccaggggcaaatttctattctcaattaacccatgcagcaaatgctacgcatctgctgagtccgtttagaagcatttgcggtggacgatggaggggcccgactcgtcgtactcctgcttgctaatccacatctgctggaaggtggacagtgaggccaggatggagccaccgatccacaccgagtacttgcgctctgggggtgcgatgat

SEQ ID NO: 5157 - DNA, 463 bp, Homo sapiens
  unsure (380): n=A,T,C or G
  unsure (418): n=A,T,C or G
  unsure (437): n=A,T,C or G
ctgagattggctcagtgacccgggggcgtgaggctgaggcatgcggtactgactgaagattggctctggctcgtctgagggcacggatgtccttcccaatgcctcgtgtgagttggtaagtattgccagctaaggaaagaaagttggatatgttctcacccaaaaactccttcacctccttcaatttgtcaaggcttttgatgaccaggtcgtgggcttgggcttgtgtccaccacttctttccgtagtctatggtactgctggtaatcccggtcaaagctgctgtgattcccaactccatcccaggttccaagagtacaaggctgcctccctctgtgaagggtgccagacccatgccgacgagggtcaggatgccagangaaatgctgagagagccagacaccacattggcgatggnggtgcctttgtggaccttntgaaccccatctgcaagggcacggag

SEQ ID NO: 5158 - DNA, 326 bp, Homo sapiens
  unsure (100): n=A,T,C or G
cctgccttttacacaccagttgtgtgtttgttagtggctgctggatgccagtccacaccctcaaacacctctcagtcccaaacggggtgctcctacaggncccagggtcctgttagtggaagaaaggcagttccaggaagtcttcctctagccttcatgacaggaagtagttaatcctctgggaaatagacttgcagccctgggaagaaaagagttgttcctccttggggacatacaccatcatctgggctatttcatccagtgtctcttctttatacaggagctcctggctcaggaaggcatcccgtgcacacagcctcacgtga

SEQ ID NO: 5159 - DNA, 357 bp, Homo sapiens
  unsure (89): n=A,T,C or G
  unsure (224): n=A,T,C or G
  unsure (298): n=A,T,C or G
ttgtgttaatcccagttttagtgcagcttaggaggctgctagttaggaagatggcagtggctgtaggttgggttgccagaaaagatggnggcctagtcttattattcagatggagaacttagaaagcctgaagagtacccaaattggattgtattttaatggacaatggctgtattttttccatgttagaaggatcctaatgaaagcacctgttatttttaagnttctaagggtctagttgttcagaatccccaaggatatttccctaacctcactcagtcacattgtaggagccagngtagctatggaattatcttaggaactcaagcttctaaaactatccatgtagtcaaatct

SEQ ID NO: 5160 - DNA, 332 bp, Homo sapiens
  unsure (168): n=A,T,C or G
  unsure (193): n=A,T,C or G
  unsure (266): n=A,T,C or G
ctgtgtaaagtacagatcctaatataggtaactaactaatacctactaaatatgcattatttttagcttgttttagaagcagatacctatcgatttcagaagaatctgcgaatggcaaccaaaaggcaaaagaaaagtaaatgaacacagcagtgtttattaggtggnttttaatattgtttattagcacagnaacaaatgcagacttaagtagtccacaacatagaaccaatccactgagcaactcctattccacgccttacagntagttaacagcttaaggtatttcactacaggttttcacaagtcctgattcagaccttttttacctc

SEQ ID NO: 5161 - DNA, 452 bp, Homo sapiens
  unsure (396): n=A,T,C or G
gttttaaggatgataaaaaaaaataacaactagggacaatacagaacccattccatttatctttctacagggctgacattgtggcacattcttagagttaccacaccccatgagggaagctctaaatagccaacacccatctgttttttgtaaaaacagcatagcttatacatggacatgtctctgccttaacttttcctaactcccactctaggctattgtttgcatgtctacctacttttagccattatgcgagaaaagaaaaaaatgaccatagaaaatgccaccatgaggtgcccaaatttcaaataataattaacatttaggtatatttataatttccagatgacaaagtatttcatcaaataacttcatttgatgttccatgatcaaganagaatccctatctctattttacaagtaattcaaagaggccaaataacttgtaaaca

SEQ ID NO: 5162 - DNA, 292 bp, Homo sapiens
  unsure (225): n=A,T,C or G
ctgctggtgctgggcaggctggagactcacgggagaggcaggaggagaatcagcgtgttgagtccctcgctgtgttagtgtgaaaaattctcattactgttgcaaataaaagggatcacgatcactagccccggaaaccctcatctcccggaccatcaggatcgcactgaacagaatggtcccctaatggtccctgaggacagcgtcttgcagaacataaatgtnaacattgaatggcagacgactcccttccccttgaaatcttcacaaaagtgtgtacgagaaagtatgt

SEQ ID NO: 5163 - DNA, 464 bp, Homo sapiens
gagaaacataagctagactgaaacataggggcaacactttcactgtgcttttcaatccaaaataattttcctaagagcccactatgtaccacacactattgagcacttgggattaaaaaaaagttctccagaggctttccagtctagtaccatgtgtctcagtcttggtgctactggtattcggggcttcagaattatttgttggggattggtggggtggggagctttcctgtgcttcgtaggaggttcagcaacacctctggcttctaccaaatagataccagtaagcacatgcaccctcacagccagatgggacaatcagcaatgtcttcagccattgccaggggacagaatcatcctcgattgaaagcatctggtctaaggggaaagaccagtgtggaagtcagacaggaagtcactggcaggctagtatcctttggatgaacagtttacttactataagt

SEQ ID NO: 5164 - DNA, 505 bp, Homo sapiens
  unsure (486): n=A,T,C or G
cctcagggcctcttctggaaaatgaagaaattcaactagtagattcctgaggtctccccagcttaaaaaaaaaaaatctgccccgtgattctaacactcgcagtagtgatagtgtatctagttgttctgctggtgtccttccttggctaagtcttggccttcagttatcttcaaatgtaccagaacctgagccaacgcctccctgtgaaactgttgctgatctgtagtacagtaccaggaagaaacctcttttgttctctttagacatcttctacttgctcttggccttgagatcgtgtaacaaaatgaaggagggctctcttctttcttcctcatcctactcaaaaacttcccgagagcagtggtggttttgagggttttgacttctattacttttggcagcctggaaagttgtgtcttctgggaaagagacccggggaggccaggagtagctgagggtcctttctgtgcccttaaaccgcccanaggagccctattccactct

SEQ ID NO: 5165 - DNA, 489 bp, Homo sapiens; identical to SEQ ID NO: 235
  unsure (197): n=A,T,C or G
  unsure (273): n=A,T,C or G
  unsure (315): n=A,T,C or G
  unsure (316): n=A,T,C or G
  unsure (326): n=A,T,C or G
  unsure (386): n=A,T,C or G
  unsure (392): n=A,T,C or G
  unsure (425): n=A,T,C or G
  unsure (465): n=A,T,C or G
  unsure (478): n=A,T,C or G

SEQ ID NO: 5166 - DNA, 480 bp, Homo sapiens
caacatgccatccagactgaggaagacccggaaacttaggggccacgtgagccacggccacggccgcataggcaagcaccggaagcaccccggcggccgcggtaatgctggtggtctgcatcaccaccggatcaacttcgacaaataccacccaggctactttgggaaagttggtatgaagcattaccacttaaagaggaaccagagcttctgcccaactgtcaaccttgacaaattgtggactttggtcagtgaacagacacgggtgaatgctgctaaaaacaagacgggggctgctcccatcattgatgtggtgcgatcgggctactacaaagttctgggaaagggaaagctcccaaagcagcctgtcatcgtgaaggccaaattcttcagcagaagagctgaggagaagattaagagtgttgggggggcctgtgtcctggtggcttgaagccacatggagggagtttcattaaatgc

SEQ ID NO: 5167 - DNA, 395 bp, Homo sapiens
aaaaaaaaaaaaaaacaaaaaacagggtggagaggaggataggaaggggacagttgataaaaccccagggccacagcagaggcaaagggcatctggggagagggttcgaagctgtggcggactccactaatgtaaccctccaatgtcaagccatgggcgtgatcagtagctaagtgatgacaaggctgttgggggtggacggaaaagacttggggcaaagcagactgtttatagcctgagctggtagggcctggtgcagcagcctacccggaactggcactactctttcccaggttccctgactctctatcctggtctctgagagcgtgccctacttccgtttcccccactccaaacacacctgaggcatcttccagtgctaggccccatgctgg

SEQ ID NO: 5168 - DNA, 269 bp, Homo sapiens
  unsure (104): n=A,T,C or G
  unsure (221): n=A,T,C or G
ccaattatccatatgatgagacgcggagtggtagtgctcacgaatacagctcctccccagatgacgccattttccaaagcttggcccgggcatactcttctttnaacccggccatgtctgaccccaatcggccaccatgtcgcaagaatgatgatgacagcagctttgtagatggaaccaccaacggtggtgcttggtacagcgtacctggagggatgcangacttcaattaccttagcagcaactgttttgaaatcaccgtggagctt

SEQ ID NO: 5169 - DNA, 456 bp, Homo sapiens
ctggagtgaagggagctagtgtttaggtagcagtcaccattatgctcaaagcggtgatcctgattggaggccctcaaaagggaactcgcttcagacctttgtcttttgaggtgcccaaaccattgtttcctgtggcaggggtccctatgatccaacaccatattgaagcctgtgcccaggtccctggaatgcaggagattctgctcattggcttctaccaacctgatgagcccctcacccagttcctagaagccgcccagcaggagtttaaccttccagtcaggtacctgcaggaatttgcccccctaggcacagggggtggtctttaccattttcgagaccagatcctggctgggagccccgaggcattcttcgtgctcaatgctgatgtctgctccgacttccccttgagtactatgttggaagcccaccgacgccagcgtcaccctttcttac

SEQ ID NO: 5170 - DNA, 342 bp, Homo sapiens; identical to SEQ ID NO: 577
  unsure (36): n=A,T,C or G
  unsure (265): n=A,T,C or G

SEQ ID NO: 5171 - DNA, 363 bp, Homo sapiens
  unsure (21): n=A,T,C or G
  unsure (101): n=A,T,C or G
  unsure (132): n=A,T,C or G
  unsure (134): n=A,T,C or G
  unsure (178): n=A,T,C or G
  unsure (193): n=A,T,C or G
  unsure (210): n=A,T,C or G
  unsure (225): n=A,T,C or G
  unsure (229): n=A,T,C or G
  unsure (307): n=A,T,C or G
  unsure (318): n=A,T,C or G
  unsure (319): n=A,T,C or G
  unsure (333): n=A,T,C or G
acgcagcagcctatccgtcgncctatgccccagtgagcacagcttttccccagcagccttcagccctgccccagcagcagagagaaggccccgaaggctgnaacctcttcatctatcacctgcctcaggagntnggtgatgcggaactcatacagacattcctgccctttggagccgntgtctctgctaaagnctttgtggatcgagccnccaaccagagcaagngttntggggttgttaattttgacaatccaactagtgcccagactgctattcaggcgatgaatggctttcaaattggcatgangaggctcaagnnccagctaaagcggnccaaggatgccaaccggccttactgacctg

SEQ ID NO: 5172 - DNA, 272 bp, Homo sapiens
  unsure (127): n=A,T,C or G
  unsure (129): n=A,T,C or G
ctggaactggctcacagacaggacatctgcctcctcactcaactccactgctctctgggctaagaagatctcaagctccatgagctcatcaaggaactgattccgggtctcagtgtattcaagcagngncagggcatctgggcccctggcaacaccttctggagcctgggttcctgcttccagcactgtgatctgcaaagcaacagcatcgtctccccagtctatcccatcacctccaggatcctttgaatctgattccgggaagatgcccc

SEQ ID NO: 5173 - DNA, 275 bp, Homo sapiens
  unsure (50): n=A,T,C or G
  unsure (135): n=A,T,C or G
  unsure (179): n=A,T,C or G
caaagttgaaaattcatagtaagattgatatctataaaatagatataaanttttaagagaaagaatttagtattatcaaagggataaagaaaaaaatactatttaagatgtgaaaattacagtccaaaatactgntctttccaggctatgtataaaatacatagtgaaaattgtttagngatattacatttatttatccagaaaactgtgatttcaggagaacctaacatgctggcgaatattttcaactttttccctcactaattggtactttt

SEQ ID NO: 5174 - DNA, 560 bp, Homo sapiens; identical to SEQ ID NO: 237
  unsure (461): n=A,T,C or G

SEQ ID NO: 5175 - DNA, 306 bp, Homo sapiens; identical to SEQ ID NO: 236

SEQ ID NO: 5176 - DNA, 451 bp, Homo sapiens
  unsure (49): n=A,T,C or G
  unsure (57): n=A,T,C or G
  unsure (82): n=A,T,C or G
  unsure (96): n=A,T,C or G
  unsure (102): n=A,T,C or G
  unsure (114): n=A,T,C or G
  unsure (115): n=A,T,C or G
  unsure (169): n=A,T,C or G
  unsure (172): n=A,T,C or G
  unsure (196): n=A,T,C or G
  unsure (214): n=A,T,C or G
  unsure (237): n=A,T,C or G
  unsure (250): n=A,T,C or G
  unsure (252): n=A,T,C or G
  unsure (275): n=A,T,C or G
  unsure (286): n=A,T,C or G
  unsure (307): n=A,T,C or G
  unsure (320): n=A,T,C or G
  unsure (329): n=A,T,C or G
  unsure (339): n=A,T,C or G
  unsure (341): n=A,T,C or G
  unsure (366): n=A,T,C or G
  unsure (375): n=A,T,C or G
  unsure (379): n=A,T,C or G
  unsure (419): n=A,T,C or G
  unsure (430): n=A,T,C or G
  unsure (436): n=A,T,C or G
  unsure (445): n=A,T,C or G
ttttttttttttttttttttttttttttttttataaaagcttatttttntttattanaatacttttttcaattctgatttgncacaatttaaattntttttntaagaataagcnnaaatttacaaaatttaatttttatttatacatccatccgttcaatacacatttnaanaaagctgtattgcaccctttcagnggtagttacaggacaaanaaacaaaataatccaagagaganaccaacaaatgtntntttataacacagagtaataaacncaaataaatgnggagttatttaagcatgtaanatggtacatgctntaccaggtntgggggcttntntaagacacaagatcagattaaagtnttgaaaganaatntggggttagtcaagcaggtaaaagtgtgaaaagcactttntgagcggaatntccatntgccaagtntaaacc

SEQ ID NO: 5177 - DNA, 484 bp, Homo sapiens; identical to SEQ ID NO: 238
  unsure (407): n=A,T,C or G
  unsure (431): n=A,T,C or G
  unsure (471): n=A,T,C or G

SEQ ID NO: 5178 - DNA, 416 bp, Homo sapiens
  unsure (60): n=A,T,C or G
  unsure (141): n=A,T,C or G
  unsure (146): n=A,T,C or G
  unsure (162): n=A,T,C or G
  unsure (166): n=A,T,C or G
  unsure (170): n=A,T,C or G
  unsure (180): n=A,T,C or G
  unsure (215): n=A,T,C or G
  unsure (291): n=A,T,C or G
  unsure (321): n=A,T,C or G
  unsure (332): n=A,T,C or G
  unsure (342): n=A,T,C or G
  unsure (358): n=A,T,C or G
  unsure (369): n=A,T,C or G
  unsure (386): n=A,T,C or G
  unsure (389): n=A,T,C or G
  unsure (392): n=A,T,C or G
  unsure (397): n=A,T,C or G
ctttttttttttttttttttttttttttttttttatgacaaattttttatttcaaaaatntcaagttgtaaccagcatagcaccactgacatggatgccttgatagaactccttgatagaactttatgatctgttcaccanaaaanattctacatgatcacnccanactntaattaaggntaaccaatcaaaattcaggtacccaaaaccagttntaatccaggtagaaactacagatcataggaaccctgggactggttttccagggaaccctggaattattttttaagngctacagcatgtacaaggacactggcccanaagcttgcttntcacacgtanaaactgacagactaanaggtagatganagattccaggttccatntancantgganaggcagggctccagcatgt

SEQ ID NO: 5179 - DNA, 186 bp, Homo sapiens; identical to SEQ ID NO: 386

SEQ ID NO: 5180 - DNA, 439 bp, Homo sapiens; identical to SEQ ID NO: 240
  unsure (351): n=A,T,C or G
  unsure (429): n=A,T,C or G

SEQ ID NO: 5181 - DNA, 306 bp, Homo sapiens
  unsure (295): n=A,T,C or G
ccacccagactgaccagcgggagatggggccccacagggcctcctgcgtcaatgccatggaagggaagaaactggcccaggatgtcagagccaagggctacctggagtgctcagcccttagtaatcggggagtacagcaggtgtttgagtgcgccgtccgaactgccgtcaaccaggccaggagacgaaacagaaggaggctcttctccatcaatgagtgcaagatcttctaaaccccaagagacttcacacaacacttatgtatgcaccccaaagactaatggggagagggagnccgggaagcca

SEQ ID NO: 5182 - DNA, 320 bp, Homo sapiens; identical to SEQ ID NO: 388
  unsure (125): n=A,T,C or G
  unsure (139): n=A,T,C or G
  unsure (173): n=A,T,C or G
  unsure (240): n=A,T,C or G
  unsure (246): n=A,T,C or G
  unsure (266): n=A,T,C or G
  unsure (311): n=A,T,C or G

SEQ ID NO: 5183 - DNA, 173 bp, Homo sapiens
  unsure (14): n=A,T,C or G
  unsure (106): n=A,T,C or G
  unsure (158): n=A,T,C or G
ccttagcagtagcntgagctgcccccagggctgtgagctgctgaatcttctgactcatcatttccatgacggctgtttcatggcgtgcttctcctgaagagctggntggattttctccatctgcttggctagaaaatctatcttcctcttgaagaagnccttggcatcctcag

SEQ ID NO: 5184 - DNA, 228 bp, Homo sapiens
  unsure (26): n=A,T,C or G
  unsure (78): n=A,T,C or G
  unsure (81): n=A,T,C or G
  unsure (82): n=A,T,C or G
ctggaagatggccgcactctttctgnctacaacatccagaaggagtcgaccctgcacctggtcctgcgtctgagaggnggnntgcagatcttcgtgaagaccctgaccggcaagaccatcactctggaggtggagcccagtgacaccatcgaaaatgtgaaggccaagatccaagataaagaaggcatcccccccgaccagcagaggctcatctttgcaggcaagcag

SEQ ID NO: 5185 - DNA, 331 bp, Homo sapiens; identical to SEQ ID NO: 389

SEQ ID NO: 5186 - DNA, 439 bp, Homo sapiens
aaaagaggtgcctgcatgtcactattacccccctccccaaatgagaaaaggattttgtttccggaaactggatcagcttctcctcagttaaagaggaaacgggaagtgggcggctggccttctgaccaggcacccgtttgaaccaggatgctcagggcggcctaggcttggctttgtgaagtgtgtgctgctacgcgtcttgtttttggcagtttggtgtctctgagggaggggaggagagtggcaaccggccactggttaatggaagaggatgcgatgcggagatgcttgcttccttcctttggtccaccgccaccccgcctttggagagggcacccacgtaatagacctcatttgtctccaccagagctcactcttacaaaataagctttggattaataccgagttaggcgcagtatggcaggcagggggcgaaaag

SEQ ID NO: 5187 - DNA, 493 bp, Homo sapiens; identical to SEQ ID NO: 239

SEQ ID NO: 5188 - DNA, 435 bp, Homo sapiens
cctgtattatacgtgtcctcctgggggttggagatgatccctcaagtacacaaaggtcccctggcccttcatctgggaatcatatactccactctagctcccagaatctacagacctggctcctcggatctgaagcccagcacaaaataatctccccgtccaaggagcttgtggaacttgaattgggaactttggagtcttgtctcccatcccagcacattgaggatgtagttggtgaatggactcttccaggcatggagatcctccatcctaaaagtacctgcctccttcccagccatccctgacacattccagccagttggatctcacagcacagctatccacagggagactgggatgttcacgcagcactccattactcagtacctccatacccagccctatacgcagacccacaggtggggaaactgaggc

SEQ ID NO: 5189 - DNA, 377 bp, Homo sapiens
  unsure (370): n=A,T,C or G
ccgggttgacaaatggtggggtaacagaaaggaactggctaccgttcggactatttgtagtcatgtacagaacatgatcaagggtgttacactgggcttccgttacaagatgaggtctgtgtatgctcacttccccatcaacgttgttatccaggagaatgggtctcttgttgaaatccgaaatttcttgggtgaaaaatacatccgcagggttcggatgagaccaggtgttgcttgttcagtatctcaagcccagaaagatgaattaatccttgaaggaaatgacattgagcttgtttcaaattcagcggctttgattcagcaagccacaacagttaaaaacaaggatatcaggaaatttttggatggnatctatg

SEQ ID NO: 5190 - DNA, 345 bp, Homo sapiens; identical to SEQ ID NO: 498
  unsure (205): n=A,T,C or G
  unsure (245): n=A,T,C or G
  unsure (273): n=A,T,C or G
  unsure (276): n=A,T,C or G

SEQ ID NO: 5191 - DNA, 391 bp, Homo sapiens; identical to SEQ ID NO: 390
  unsure (27): n=A,T,C or G
  unsure (35): n=A,T,C or G
  unsure (44): n=A,T,C or G
  unsure (47): n=A,T,C or G
  unsure (56): n=A,T,C or G
  unsure (86): n=A,T,C or G
  unsure (95): n=A,T,C or G
  unsure (112): n=A,T,C or G
  unsure (133): n=A,T,C or G
  unsure (142): n=A,T,C or G
  unsure (243): n=A,T,C or G
  unsure (268): n=A,T,C or G
  unsure (276): n=A,T,C or G
  unsure (277): n=A,T,C or G
  unsure (321): n=A,T,C or G
  unsure (339): n=A,T,C or G
  unsure (376): n=A,T,C or G
  unsure (387): n=A,T,C or G

SEQ ID NO: 5192 - DNA, 178 bp, Homo sapiens
  unsure (6): n=A,T,C or G
  unsure (121): n=A,T,C or G
tctctntcacacacacagagcccctaccagaaccagacagctctcagagcaaccctggctccaacccctcttccctttccagaggacctgaacaaggtgttcccacccgaggtcgctgtgnttgagccaccagaagcagagatctcccacacccaaaaggccacactggtgtgcctgg

SEQ ID NO: 5193 - DNA, 490 bp, Homo sapiens
  unsure (24): n=A,T,C or G
  unsure (36): n=A,T,C or G
  unsure (44): n=A,T,C or G
  unsure (64): n=A,T,C or G
  unsure (77): n=A,T,C or G
aggagctgtgcccagtgcctgcanccttcataagcncacacgtncattccctactaaggcccanacctcctggtatntgccccgggctccctcatcccacctccatccggagttgcccaagatgcatgtccagcataggcaggattgctcggtggtgagaaggttaggtccggctcagactgaataagaagagataaaatttgccttaaaacttacctggcagtggctttgctgcacggtctgaaaccacctgttcccaccctcttgaccgaaatttccttgtgacacagagaagggcaaaggtctgagcccagagttgacggagggagtatttcagggttcacttcaggggctcccaaagcgacaagatcgttagggagagaggcccagggtggggactgggaatttaaggagagctgggaacggatcccttaggttcaggaagcttctgtgcaagctgcgaggatggcttgggccgaagggttgctct

SEQ ID NO: 5194 - DNA, 457 bp, Homo sapiens
  unsure (312): n=A,T,C or G
  unsure (370): n=A,T,C or G
ctgcttccagagtgctctgttactgactcagtgaacctggctgagcccatggaacagaatcctcctcagcaacaaagactagcactccacaatcccctgccaaaagccaagcctggcacacatcttcctcagggaccatcttcaaggacgcacccagaacctctagctggccgacacttcaatctggcccctctaggccgacgaagagttcagtcccaatgggcctccactaggggaggccataaggagcgccccacagtcgtgctgtttccctttaggaatctcggctcaccaacccaggtcatatctaancctgagagcaaggaagaacatgcgatatacacagcagacctagccatgggcacaagancagcctccactgggaagtctaagagtccatgccagaccctggggggaagggctctgaaggagaacccagttgacttgcctgccacag

SEQ ID NO: 5195 - DNA, 202 bp, Homo sapiens
  unsure (92): n=A,T,C or G
  unsure (156): n=A,T,C or G
  unsure (157): n=A,T,C or G
  unsure (172): n=A,T,C or G
tcctctatggcccctgccttcccaggagtacaccccaacagcaccctctccagatgggagggcccccaacagcaccctctccagatgagagnacaccccaacagcaccctctccagatgagagtacaccccaacagcaccctctccagatgagagnncaccccaacagcacnctctccagatgcagccccatctcctcagca

SEQ ID NO: 5196 - DNA, 565 bp, Homo sapiens
ctggcctgggtttctgacccattgagactgccgtgccacgatgctccgtcacctcctttgatcctcctgtatgctgggctggagagaacaggaagggctactgacccatttttatagaagcaaccctaacgatttgagcaatggagtctggcacaggctcagcaggtggaggaagagtaagctgtcaggaaagcagcaggggagagtagtagggtcctgacttgactcagggtctttggaaagttgggtgtggcctccaaggtgagaagataggtgtgggccaccaccaggccatgacaggcgggcagtattgcccaggcttctctctccagtctgtcctgcgtggcatctcctttgagggtcagagaagccagggagggaggcaagctggggtgggtctcattatagaaaagagaagactggggctaagaggggatgttcctgccagcatgccagcctctgatgccacctgcaaaactggtggcaccacctcaaactcagcaatggccttttcaaacctggctcagtacaaacaactcccaaaccatacactttaggaaaactt

SEQ ID NO: 5197 - DNA, 441 bp, Homo sapiens
ctgcaaatggttctgctgaaacatctgccttggacacagggttctcgctcaacctttcagagctgagagaatatacagagggtctcacggaagccaaggaagacgatgatggggaccacagttcccttcagtctggtcagtccgttatctccctgctgagctcagaagaattaaaaaaactcatcgaggaggtgaaggttctggatgaagcaacattaaagcaattagacggcatccatgtcaccatcttacacaaggaggaaggtgctggtcttgggttcagcttggcaggaggagcagatctagaaaacaaggtgattacggttcacagagtgtttccaaatgggctggcctcccaggaagggactattcagaagggcaatgaggttctttccatcaacggcaagtctctcaaggggaccacgcaccatgatgccttgg

SEQ ID NO: 5198 - DNA, 441 bp, Homo sapiens; identical to SEQ ID NO: 5197

SEQ ID NO: 5199 - DNA, 462 bp, Homo sapiens; identical to SEQ ID NO: 391
  unsure (11): n=A,T,C or G
  unsure (74): n=A,T,C or G
  unsure (78): n=A,T,C or G
  unsure (167): n=A,T,C or G
  unsure (182): n=A,T,C or G
  unsure (255): n=A,T,C or G
  unsure (269): n=A,T,C or G
  unsure (271): n=A,T,C or G
  unsure (299): n=A,T,C or G
  unsure (312): n=A,T,C or G
  unsure (326): n=A,T,C or G
  unsure (340): n=A,T,C or G
  unsure (350): n=A,T,C or G
  unsure (384): n=A,T,C or G
  unsure (396): n=A,T,C or G
  unsure (398): n=A,T,C or G
  unsure (433): n=A,T,C or G

SEQ ID NO: 5200 - DNA, 276 bp, Homo sapiens
ccaaggaatgcaggctgtactatctgcgaaatggagaacgtatttcagtgtcggcagcctccaagctgctgtccaacatgatgtgccagtaccggggcatgggcctctctatgggcagtatgatctgtggctgggataagaagggtcctggactctactacgtggatgaacatgggactcggctctcaggaaatatgttctccacgggtagtgggaacacttatacctacggggtcatggacagtggctatcggcctaatcttagccctgaagagg

SEQ ID NO: 5201 - DNA, 469 bp, Homo sapiens
ccatccactagcccagggggggacgcagaccccacactccatggagtctggaatgcatgggagctgcccccccagtggacaccattggaccccacccagcctggatctaccccaggagactctgggaacttttaggggtcactcaattctgcagtataaataactaatgtctctacaattttgaaataaagcaacagacttctcaataatcaatgaagtagctgagaaaactaagtcagaaagtgcattaaactgaatcacaatgtaaatattacacatcaagcgatgaaactggaaaactacaagccacgaatgaatgaattaggaaagaaaaaaagtaggaaatgaatgatcttggctttcctataagaaatttagggcagggcacggtggctcacgcctgtaattccagcactttgggaggccgaggcgggcagatcacgagttcaggagatcgagaccatcttgg

SEQ ID NO: 5202 - DNA, 362 bp, Homo sapiens
aaaaaacaaacaataggatagtacttgagctcaggtctggttctcagctacttcatttttattttgttttattttattattatttttgagagagaatctcgctctgttgcccagtggcacgatctcggctcactgcaagctccacctcccaggttcacgccattctcctgcctcagcctcccgactagctgtgactacaggcgcctgccaccacgcccggctaattttttttttttttgtatttttagaagagacatggtttcaccacgttagccaggatggtcttgatctcctgaccttgtgatccgcccacctcagcctcccaaagtgctgggactacaggcgtgagccaccgtgcctgg

SEQ ID NO: 5203 - DNA, 300 bp, Homo sapiens
aaaacgatcaaaatctgtcatcttggctttcctttctctggcttcaatcttcttggcccatcgtgtggctgcccattttgtattgatgtctgccttctgccaggcttgtcggacatacttctggtgggcactgtgcggaaacttgaggatgaaatcagtgagctgcatgcacttgaaaggcatggcctgtctcctcacttgagtgcaaggtccatcgaccaaagccctgttctgatcaataacatctacaatcgcgaccaattttccggcatgaggtccaaaggagacataggccacccg

SEQ ID NO: 5204 - DNA, 574 bp, Homo sapiens
  unsure (120): n=A,T,C or G
  unsure (318): n=A,T,C or G
ctggaagaccaagcccagaaattcagaggaaataatcttccaaacaaggaacaccaaggtgatcttcttccattccagccacaatactggtgatcataatggtgctagtcagttatccanattatcgagtgtttaccacatcatctattttcagaatgctccgaacagtttcagttgcaagagtcagagcactgactgataccaacagaggctggacaaccagttcctccaaaatgttggaaataccaccctttcggacattaatgcctgcagttttttctccctgggcatgccggtttcttagttctgttactgtanaaatgggattcaggccggcattttcagctagtgtagatggaatgacctccatagcatctgcaaaagcacgaacgcagtaggattccataccactcagtgttcgtgaatattcagttaatcgtagggccaactctatttctggagcaccacctcctgcaataagagccctcttcttcactaaacaacgaataacacatagggcatcatgaatggagcgctcagcttcttcaatcaccagtttgttagaaccacgaac

SEQ ID NO: 5205 - DNA, 88 bp, Homo sapiens
aaattacaaaagaatggggcactcctaggttcaggttgtgagtctgtccatcgcgaaatgcttccacagggtcagggctgaggcatgg

SEQ ID NO: 5206 - DNA, 607 bp, Homo sapiens
ccagggaacgactcagtggcacaaaggaaagagaagaaatgttacaggctgatgctgtcggggcaaatagccctgcaaccagccggacttactgtctaaaagtattaaccgtaatttcaaagacaaaccacaccccttccttttcccctaatggcctcagagatttgtaatgtactttggaaaattaacttctaaggcagagtggaagccaacctcaagtcctgccacttggactctgtgtcttctcttcgaggaagcagcattgtgcacccagcaggggcagatgctgaggcttgccttaacatctcagcagctacaaaatgaaatccactgatacagaaccccttgctgtgagcagtgaggagagagagctgtaaacagacacaaattgagatttttgcacttccaaaaaatacgaggtgaacattagtgctaaacagagagaatgttctaggaagggagaaatctgagaagaaaaagtaagatgagagagaagaaacatgatttttctaatgtacttgtttgagatcaacactttaagactactgataaaactaaatttcgtggggatagacagtgagcagtgagcatcagccagtgaatctgg

SEQ ID NO: 5207 - DNA, 537 bp, Homo sapiens
  unsure (180): n=A,T,C or G
  unsure (520): n=A,T,C or G
ctggctgggcccaagagctccatctgtttccccaaagtacaggcagcttctaggccattgagtggggcatgatattggatgcttggctcaggaaacaaccccagccaacccaaggggcagtgggacatgttggcctcaggttagaaattattgctcaaagcagaaacagttgtgtcctanagagggtctgttaaaccctctttccatgtgtatctctatgtagcaattgatgggccctgcggtcaggatccctggtttctccagctccatgaatgcctccctgtgaggccctggacagtttctccctcttcttctcctggcttcagtttccccgtatgtacattgagacagtaaggctggatgattctcaggttccctctggctttccattctggcatcccagagtggaggctctgggagggcagaaccctgttcctgcctcagtttccccacctgtgggtctgcgtatagggctgggtatggaggtactgagtaatggagtgctgcgtgaacatcccantctccctgtggatagct

SEQ ID NO: 5208 - DNA, 539 bp, Homo sapiens
ccagtgggttgatttctttattccaggagtctctgtggttggtgggttttcaatatgctccagtcccagactgctagaacaagagagagtgatagaattggcagtgaaatatacgaaccaccctcctgccctctgggttcacaatacgtgtacacttgactgtgaagtggctgtgagagtgggtggagagttcttctttgaccctcagcctgcggatgcctctagaaacctcgtgttgattgcaggaggagtcggaattaactctctgctttccatcctgcggcacgcagcagatctcctcagagagcaggcaaacaaaagaaatggatatgagataggaacaataaaactattctacagtgcaaaaaataccagcgaactcctgtttaagaaaaatatccttgatttagtaaatgaatttcctgagaagattgcatgcagtttgcatgttacaaaacagactacacaaatcaatgcggaactcaagccatacatcacggaaggaagaataacggagaaggagataagagatcatattt

SEQ ID NO: 5209 - DNA, 543 bp, Homo sapiens
  unsure (150): n=A,T,C or G
  unsure (282): n=A,T,C or G
  unsure (309): n=A,T,C or G
  unsure (311): n=A,T,C or G
  unsure (385): n=A,T,C or G
  unsure (405): n=A,T,C or G
  unsure (468): n=A,T,C or G
  unsure (514): n=A,T,C or G
  unsure (541): n=A,T,C or G
ctgtgtagtaaagatgccttctggtgaatttgcacgtatatgccgagatctcagccatattggagatgctgttgtaatttcctgtgcaaaagacggagtgaaattttctgcaagtggagaacttggaaatggaaacattaaattgtcacngacaagtaatgtcgataaagaggaggaagctgttaccatagagatgaatgaaccagttcaactaacttttgcactgaggtacctgaacttctttacaaaagccactccactctcttcaacggtgacactcantatgtctgcagatgtaccccttgttgnanagtataaaattgcggatatgggacacttaaaatactacttggctcccaagatcgaggatgaagaaggatcttangcattcttaaaattcaaganaataaaactaagctctttgagaactgcttctaagatgccagcatatactgaagtcttttctgncaccaaatttgtacctctaagtacatatgtagatattggtttctgnaaataacctatttttttctctattctntg

SEQ ID NO: 5210 - DNA, 424 bp, Homo sapiens
ctgctggctggctgggcccccgtagctggactggtttgctgttaagttaagaaaacattagaaccttttttcttatgtgatgtggtacctggtggtaccgggcttgtaattctatagctatcattttccagtcttgatcttacattactgtaaccctctgcctccttctgcctactgtctataaccaggccacccttctatccatcatttgagccagtcaaatattgataaaccaaagtgctaacggtaaacacatcagcaggactaaaatcaacatgattccgtaagtagaggcattttgtgaagatcttatgaaactgcttgactggatttagtgggttccccctcagtttgatacatcaaaggcatgtcaatacacctaattatgcccacatttatcttaatcctgttttgctattgattt

SEQ ID NO: 5211 - DNA, 308 bp, Homo sapiens
  unsure (168): n=A,T,C or G
  unsure (170): n=A,T,C or G
  unsure (171): n=A,T,C or G
  unsure (178): n=A,T,C or G
  unsure (181): n=A,T,C or G
ccatttaccagactccgacacaatgggccaccaccagtgtgacagcaggacatcctaatatatggatcttgatttttaagtttcagtatctgaacttcgtaaattagtaacttttagctgggaaagtataacatgaaaccagaggttctcagaatgactgtaagatancnnacatttnctntttttgcctttatctccccaactaaaatacaatggggaagaagtctgcctatgatctttgaatgagctttttaaggaagaaatattatatattgtttgttaaagtttattgaaataaagaatcattt

SEQ ID NO: 5212 - DNA, 327 bp, Homo sapiens
  unsure (222): n=A,T,C or G
aaaaaaggtctgaatcaggacttgtgaaaacctgtagtgaaataccttaagctgttaactaactgtaaggcgtggaataggagttgctcagtggattggttctatgttgtggactacttaagtctgcatttgttactgtgctaataaacaatattaaaaaccacctaataaacactgctgtgttcatttacttttcttttgccttttggttgccattcgcanattcttctgaaatcgataggtatctgcttctaaaacaagctaaaaataatgcatatttagtaggtattagttagttacctatattaggatctgtactttacacag

SEQ ID NO: 5213 - DNA, 237 bp, Homo sapiens
cctaccgtttcctctttggtttttctgccgtttccatcatgtacctggtgttggtgttggcagtgcaagtgcatgcctggcagttgtactacagcaagaagctcctagactcttggttcaccagcacacaggagaagaagcataaatgaagcctctttggggtgaagcctggacatcccatcgaatgaaaggacactagtacagcggttccaaaatcccttctggtgattttagcag

SEQ ID NO: 5214 - DNA, 525 bp, Homo sapiens
  unsure (62): n=A,T,C or G
  unsure (89): n=A,T,C or G
  unsure (324): n=A,T,C or G
ctgtcttctctacatagtacccagttcccacatcgatgagcacgtgttccacatcatgcagnttcccagggacatacatagaactcgtnagtgggacgagtaattctttccctgtgaaagcaatgaagacaaacacctggggaaggttagcggctccaacgtaagacgttaaagagagttccaacagggcacagcacccacagacagtgtgaaaagaacggaaacaggggcaataggagcagaggaatgtcctgtacttttcaattctaggcaggcaacatgcaaagggttcatgaagcggtatacgatatgtaatggattttntcgtttcaggtaagaaaaactgggttaggaggtgggacgagagaagcaggttcgccactttaggttaccctcacccgcctaccccataccctcgttgctcttgttcagcacgttcagacagtccttggcttccacatacttggtctgtaccactttgagctgagcaatggacgtggacaagaactccacttcctggtccag

SEQ ID NO: 5215 - DNA, 118 bp, Homo sapiens
aaaaaaatgttttttaactctcctttctgtcccactgaaaaatttattttgaaagggttaagaagagtctatcattgctggtcaaaatcggcctgaggatggccgccagggacagagg

SEQ ID NO: 5216 - DNA, 616 bp, Homo sapiens
  unsure (555): n=A,T,C or G
cctgtattatacgtgtcctcctgggggttggagatgatccctcaagtacacaaaggtcccctggcccttcatctgggaatcatatactccactctagctcccagaatctacagacctggctcctcggatctgaagcccagcacaaaataatctccccgtccaaggagcttgtggaacttgaattgggaactttggagtcttgtctcccatcccagcacattgaggatgtagttggtgaatggactcttccaggcatggagatcctccatcctaaaagtacctgcctccttcccagccatccctgacacattccagccagttggatctcacagcacagctatccacagggagactgggatgttcacgcagcactccattactcagtacctccatacccagccctatacgcagacccacaggtggggaaactgaggcaggaacagggttctgccctcccagagcctccactctgggatgccagaatggaaagccagagggaacctgagaatcatccagtcttactgtctcaatgtacatacggggaaactgaagccnggagaagaagagggagaaactgtccagggcctcacagggaggcattcatggagctggagaa

SEQ ID NO: 5217 - DNA, 392 bp, Homo sapiens
  unsure (12): n=A,T,C or G
  unsure (276): n=A,T,C or G
  unsure (295): n=A,T,C or G
  unsure (311): n=A,T,C or G
  unsure (345): n=A,T,C or G
  unsure (350): n=A,T,C or G
  unsure (376): n=A,T,C or G
cctggcctccanttgggactcctccatcatcagagtctgagcctgtgagaaccagcagggaacacccagtgcccttgctgcccattaggcagactctcccggaggacaatgaggagcccccagctctgccccctaggactctggaaggcctccaggtggaggaagagccagtgtacgaagcagagcctgagcctgagcccgagcctgagcccgagcctgagaatgactatgaggacgttgaggagatggacaggcatgagcaggaggatgaaccanagggggactatgaggaggntctcgagcctgaagantcttctttttcttctgctctggctggatcatcangctgnccggctggggctggggctggggctgnggctctggggatctca

SEQ ID NO: 5218 - DNA, 496 bp, Homo sapiens
  unsure (67): n=A,T,C or G
  unsure (99): n=A,T,C or G
  unsure (364): n=A,T,C or G
ctgttgactcagattcggcattttaattacattgtttccaagtatgatattctgagagtgtctatancacttagtgtctgcttcatataaactaccagntattatatatttatgatgcaagtagttttccaaatgtggtgaaagtctgagtctttttatccccatgggtaaaatctgaatctggctctctgtgtctctcagtgcttgtttattgctggtcagagagtaaattcttgataaaagctgttgacttggctcccacagtttatgcagacattggagagacaatttggttatttcaaacatcacaggatttgagtaagaagacctggttatgaaacaaggctctcataattactagttntgactgttgacaagttaccttttcttgtttacaagttatttggcctctttgaattacttgtaaaatagagatagggattctttcttgatcatggaacatcaaatgaagttatttgatgaaatactttgtcat

SEQ ID NO: 5219 - DNA, 504 bp, Homo sapiens
  unsure (242): n=A,T,C or G
  unsure (372): n=A,T,C or G
  unsure (420): n=A,T,C or G
  unsure (436): n=A,T,C or G
  unsure (451): n=A,T,C or G
  unsure (474): n=A,T,C or G
ccagcctcacgctggagtgcttcgtgcagatgttccccttggtggcggagcacgtgcgcaagtgcatgggggaggaactctaccagctcttcctgagcaacgctgaggacttgtacatgaaaatagacagcattcaggcggacatcttggcggccaacacagtcaatgttaccaaagccctgtgcctccatggcagctcctacagcatgaacactctctatggctcgcgcgattcggctcanatggcctacctcacacacttcgaggaggatgtagaatcaaaggagtaacagcccctgtggcaaaccaggaaggccaaggctgcggggcagggaagcctggcaagaggaaggcgcctggggtcaagctcanagccactccacttggctccaggggggagacggggattaggcatcccanaggggcagaggaaganccgctggctgcgaanagtcaataaacagccttgatacncaaaaaaaaaaaaaaaaaaaaaaaagcttg

SEQ ID NO: 5220 - DNA, 141 bp, Homo sapiens
  unsure (78): n=A,T,C or G
  unsure (134): n=A,T,C or G
aaaaacaatgtttgcattttggtatttttcagattcaaattcagtaatacggttcatacgggagctaatacgtgcatntaccaatgaaaagcattgtatctcatgatttgcaaggcacccctgggggggtgaanaccccag

SEQ ID NO: 5221 - DNA, 344 bp, Homo sapiens
ctgctcagagtcttctgcagggattccattcgggacacctctgccagcctccatcttctccttcaggttccgtttgaagaaaccaacctgtacaaagacaaaatttgaacgagcaaagaattcactgagcactttggccccaagaaaatgtgagaacaccttttttttttgagatggagtctcactgtgttgcccaggctggagtgcagtggtgcgatctcggctcactgcaacctctgcctcccagacttaagcaattctcttgcctcagcctcctcagtagctgggattacaggcatctgccaccacgcccggctaatttttgtatttttagtagagacagg

SEQ ID NO: 5222 - DNA, 162 bp, Homo sapiens
gtgtgcatgcacatagggggatatctattgggatgcagagaggtgagagcagctcttcagaagcgctggcaaaagaagaatgtgtattgaaaccatgacgggttagaagctcctaactccacttccagggctgccttcagaaatcctttctcttgaccatgg

SEQ ID NO: 5223 - DNA, 505 bp, Homo sapiens
ctggagtaccaggaagaactgaggtcccactacaaggacatgctcagcgaactctccacagtcatgaatgagcagattacgggcagggacgacctgtcaaagcgcggagtggaccaaacctgcactcgagtaattagcaaagcaactccggccctacccacggtctccatctcatctagtgctgaagtctgagggctctgcagcatcagacccacctctaagagaactttctgaatttgcagctaatctcggggaagagaaagataggtttaatttatttgaagttttcatggtgttaatatttttgtttacctcgccagcttcagaattttgccaacctctgaatttgcacattttgtataatttttttttctttgagcagtgttgatcaagccaagttgaatatttgccatgaaattccagtgaatgtgtagctcaaatgcaaaccctaagtttgctgtcagttattgtatggtcagtaccccagtcctagtacacatatttt

SEQ ID NO: 5224 - DNA, 555 bp, Homo sapiens; identical to SEQ ID NO: 393

SEQ ID NO: 5225 - DNA, 78 bp, Homo sapiens
  unsure (24): n=A,T,C or G
  unsure (54): n=A,T,C or G
  unsure (58): n=A,T,C or G
ctggatggtcctcatgtctcttanttgcttccttcagcctaagcacagcagccncagncctttctggctccattgctg

SEQ ID NO: 5226 - DNA, 554 bp, Homo sapiens; identical to SEQ ID NO: 392
  unsure (150): n=A,T,C or G
  unsure (183): n=A,T,C or G
  unsure (523): n=A,T,C or G

SEQ ID NO: 5227 - DNA, 533 bp, Homo sapiens
cctgtcaggtctccttgggaaaggcttcatatttgcaactttgatgattctatgtccagcttcagagctgctttcccagaaattcacgcttaaacaaccaaccggtaaccaccacttccccacaccgccgcccggtaattatttgcattacaaaccggaggcgccctcatttgcatttgtgtacagattaactagttaaggcttgagaagctctgaataattcaaaagtattagacccacacagccttggagagaccttcagaaactaaggaggagttttatattaagggagacattttagtcagtaagacgatataacctacttactccgtaaggggaaatgaaggcccagagaagggaagggacttgaccgaggtcccacttctgtttcgaggcagaagccagactaattttcatgcctcctgactcccaatcagtttcacaaagggattcaatctgtttatatacgttacattcctggatacgaggtcttttgatgttcagagtaactgactagttagtattagaagacc

SEQ ID NO: 5228 - DNA, 236 bp, Homo sapiens
ggaaaggagagtatctgtgagtgggggcctcccttgaccccagtacgaagtctatgccctgaatccccagagtagcccttcctggtgcccaactggcctggggacaaacagcgtccactacatctaggactgccggctaagtggacacacttcttgacctcctaccaggaactttggtaaaagctagctttggggaaggggttgggtgtaaatatgagagggtggagggagaccag

SEQ ID NO: 5229 - DNA, 267 bp, Homo sapiens
ctgtagacaggtccttttcgatggtacatatttctttgcctttataatcttttatacagtgtcttacagagaaaagacataagcaaagactatgaggaatatttgcaagacatagaatagtgttggaaaatgtgcaatatgtgatgtggcaaatctctattaggaaatattctgtaatcctcagacctagaataatactagtcttataataggtttgtgactttcctaaatcaattctattacgtgcaatacttcaatacttcattt

SEQ ID NO: 5230 - DNA, 618 bp, Homo sapiens
  unsure (617): n=A,T,C or G
cctcgccccgatacggtcgccatgcccaagagaggaaagcgactcaagttccgggcccacgacgcctgctccggccgagtgaccgtggcggattacgccaactcggatccggcggtcgtgaggtctggacgagtcaagaaagccgtagccaacgctgttcagcaggaagtaaaatctctttgtggcttggaagcctctcaggttcctgcagaggaagctctttctggggctggtgagccctgtgacatcatcgacagcagtgatgagatggatgcccaggaggaaagcatccatgagagaactgtctccagaaaaaagaaaagcaagagacacaaagaagaactggacggggctggaggagaagagtatcccatggatatttggctattgctggcctcctatatccgtcctgaggacattgtgaatttttccctgatttgtaagaatgcctggactgtcacttgcactgctgccttttggaccaggttgtaccgaaggcactacacgctggatgcttccctgcctttgcgtctgcgaccagagtcaatggagaagctgcgctgtctccgggcttgtgtgatccgatctctgtaccatatgtatgagccatttgctgnt

SEQ ID NO: 5231 - DNA, 333 bp, Homo sapiens
cctgcgttcagttggtgcttccagacaccaagggcccttgtgaatcccatcctggaatggaagggctgactgaaaccgtggctaagaattgggagactctcttgtttcaagccaatttaacatcatttaccagatcatttgtcatgtccagtaacacagaagcaaccaactacagtatagcctgataacatgttgatttcttagctgacgttaatatttctttcttccttgtgttcccacccttggcattgccacccacccctcaattaaggcaacaatgaagttaatggataccctctgcctttggctcagaaatgttatagcaaaaatttt

SEQ ID NO: 5232 - DNA, 193 bp, Homo sapiens
  unsure (15): n=A,T,C or G
  unsure (17): n=A,T,C or G
  unsure (23): n=A,T,C or G
  unsure (25): n=A,T,C or G
  unsure (28): n=A,T,C or G
  unsure (35): n=A,T,C or G
  unsure (41): n=A,T,C or G
  unsure (57): n=A,T,C or G
  unsure (63): n=A,T,C or G
  unsure (108): n=A,T,C or G
  unsure (126): n=A,T,C or G
  unsure (129): n=A,T,C or G
  unsure (187): n=A,T,C or G
ctggctccaaaggananagcggnancangggtgancccggntctgctgggccccaangtcctnctggtcccagtggtgaagaaggaaagagaggccctaatggggaanctggatctgccggccctncangacctcctgggctgagaggtagtcctggttctcgtggtcttcctggagctgatggcanagctgg

SEQ ID NO: 5233 - DNA, 546 bp, Homo sapiens
  unsure (290): n=A,T,C or G
  unsure (300): n=A,T,C or G
  unsure (486): n=A,T,C or G
aaaaattgtgtaattgttaaatgtccagttttgctctgttttgcctgaagttttagtatttgttttctaggtggacctctgaaaaccaaaccagtacctggggaggttagatgtgtgtttcaggcttggagtgtatgagtggttttgcttgtattttcctccagagattttgaactttaataattgcgtgtgtgtttttttttttttaagtggctttgtttttttttctcaagtaaaattgtgaacatatttcctttataggggcagggcatgagttagggagactgaanagtattgtanactgtacatgtgccttcttaatgtgtttctcgacacattttttttcagtaacttgaaaattcaaaagggacatttggttaggttactgtacatcaatctatgcataaatggcagcttgttttcttgagccacggtctaaattttgtttttatagaaattttttatactgattggttcatagatggncagttttgtacacagactgaacaatacagcactttgccaaaaatgagtgtagcattgttt

SEQ ID NO: 5234 - DNA, 281 bp, Homo sapiens
gttacatctaaaatacagaatgtcaaatggttgcatagcttgtttcccacaagaagaaaaaaaagaacagactattgaaataaaagaagaagtggttgggctaactgaaacatcttcccaaccaaagaatgaagaagacattgaaattattccaatccaagaagaggaagaagaagaaacagagacgaactttccagaacctccccaagatcaggaatcctcaccaatagaaaatgacagctctccttaagtgatttcttctgttttctgtttcctttttt

SEQ ID NO: 5235 - DNA, 508 bp, Homo sapiens
  unsure (339): n=A,T,C or G
  unsure (421): n=A,T,C or G
ccaggcgcaatggctcaagcctataatcccagcacttgggaacctgaggcaggcagatcacctgaggtcaggagttcaagaccagcatgtccaacatggtgaaaccccatctctactaaaaatacaaaaaaattagccaggcatggtggcacatgcctgtaatcccagctacttgggaggctgaggaggagactcactagaactcaggaagcagaggttgcagtgagccaagactgcgccactgcactctggcctaagcaacagagggagactccatctcaaaaaaaaaaaaaaagattatttctctaacttactggtttatcttttatagctcatttnaggtgatttgttgtgtttgtctatagagtaaaataacatgtctaatgagttataatttaatgtccttccattcaatcactgnatttcaaatttattccaatattttggaataagcttccaatattttaacttaaatagggaaggtcatacttggtatttttcctgacct

SEQ ID NO: 5236 - DNA, 446 bp, Homo sapiens
  unsure (38): n=A,T,C or G
  unsure (45): n=A,T,C or G
  unsure (95): n=A,T,C or G
  unsure (103): n=A,T,C or G
  unsure (208): n=A,T,C or G
  unsure (259): n=A,T,C or G
  unsure (266): n=A,T,C or G
  unsure (281): n=A,T,C or G
  unsure (327): n=A,T,C or G
  unsure (412): n=A,T,C or G
  unsure (442): n=A,T,C or G
aaaaatctatttatttatcaaaacagtattggcacagnaattctnatattatcatcaaataataaaattgctactttctgtactcaattctttanaatcctanaaattgcaaatgcattcaatttaacaatattgtaaataacaatacaaaagaaagaactctgcatatttatggaaacattgttgatggtacagttctactgaaacncatacacatttcactatttaatttacatatggtcttgttgaaaaaaaccantatgttntactttttcaatttncttatgctaaaatacatgtaattctaaaggatatctcttaggtgtnataaaaaccaaggaaggtccaccaccaagtcaaagttagagtcaaagatacttcaaagattccatgaaatgatctgaaaacaaanttaaccaaaaaatgtgtactgtattggggnacat

SEQ ID NO: 5237 - DNA, 538 bp, Homo sapiens
  unsure (509): n=A,T,C or G
ctgctgtgtgcctccacatggacttctcgtgtctctaggtcattggcattccttcctcctcctcctcctgggagtggggtggatttcaggcggtgtcaaaggctcaacggggctgcaacagtttttttttttttttgagacggagtttcgctcttgtcgcccaggctggtgtgcagtggtgtgatctcagctcactacaacctccgcctcccaggttcaagcgattctcctgcctcagcctcccaagtagctgggagtacaggcacatgccaccacgcccagctaattttgtatttttagtagagaaggggcttcactatgttggtcaggctggtcttgaactcctacctcaggtgatccacctgcatcggcctcccaaagtgctgggattacaggcgtgagccaccgcactgggctggaaagtctttttgagatcttcctcctccttctctccctttttcacagaagggacaaactaaggttgggaagcagcaagtcatgcaccctanatccacctgcccacccaggctcaaggacc

SEQ ID NO: 5238 - DNA, 340 bp, Homo sapiens; identical to SEQ ID NO: 325

SEQ ID NO: 5239 - DNA, 528 bp, Homo sapiens
aaaagaactggctggaatattcatcagcctactaatgtcatctcccaacccactctccaaactccatcccaaaaaagcatccagttcagaattgcccactgttggcaaagaaagaatgtcactaatttatttacaggtgagtattaacactttctgccaatgtgtattttaagcaattacatttagcaattacaattagattcttggcatcctcaagggttccatcatcttcaatctgtcctaagcctcagtttccccatctctaaaatgaggataatagtacctacatcataaggtggttctgagtattaagtaagatgatccatgtaaagcacttagcacaatgcctggcacataaaaacactcagtaaatattagctattattttgcatagatttatttacctggtttggaattttgaggatccacctcaaaagctgatctttgtaattttcctgaagcagggctcagaacagcccacttgataagagacagagtatgtgagtcttatcaaaggagtgaacccag

SEQ ID NO: 5240 - DNA, 443 bp, Homo sapiens
aaaaagttccatacccatcattcagcagcatgcctttttttccttactcaacagtgtttttgagattctgttgtataaatatattctaattttatttagccagtctcctgctgatggacagttaagcagcttccagttgttcactatcacaaacaatgctgcaatgggcatctgtgtatatggcttcctgggcgcagggaagccaccatgatgcctctctgggcaccaaactgctggatcggaaggtctggtggatattactaaaccataccccaacaccaccaccaccaaacttctgcctctgtctttaatacaagttgagagactggatgggctccagggtgaagtgagaggttcttcaaggtgaactgtttctgcatccagtgccaggtctcctgtctcaaactgcaggggtgcaggcagaagcggggagctatgcccag

SEQ ID NO: 5241 - DNA, 529 bp, Homo sapiens; identical to SEQ ID NO: 241
  unsure (517): n=A,T,C or G
  unsure (520): n=A,T,C or G

SEQ ID NO: 5242 - DNA, 544 bp, Homo sapiens
  unsure (33): n=A,T,C or G
  unsure (93): n=A,T,C or G
  unsure (458): n=A,T,C or G
  unsure (536): n=A,T,C or G
gttttcatactgctgtggtttgaatgttccctncaacactcatgttgagacttaatccctaatgtggcaatactgaaaggtggggcctttganatgtgattggatcgtaaggctgtgccttcattcatgggttaatggattaatgggttatcacaggaatgggactggtggctttataagaagaggaaaagagaactgagctagcatgcccagcccacagagagcctccactagagtgatgctaagtggaaatgtgaggtgcagggagaatggcgtcaacccgggaggcggaggttgcagtgagccaggattgtgcgactgcactccagcctgggtgacagggtgaaacgccatctcaaaaaataaaaattaaaaaaataaaaaaagaacctggatctcaatttaatttttcatattcttgcaatgaaatggacttgaggaagctaagatcatagctngaaatacagataattccacagcacatctctagcaaatttagcctattcctattctctagcctattccttaccacctgnaatcttga

SEQ ID NO: 5243 - DNA, 589 bp, Homo sapiens
  unsure (568): n=A,T,C or G
aaaataagctgttttaagaggaacagaagggaaatctgctacctagtctatacacagcgtgaacctcacagggggcttctgataccctcaaacatggagaacagtaagggagcagagtggttaaggactttcaggaacttaactattctggaataaggaatgaatcaactgaccttgggccagcaggtttttaactaaattgttacttgcctttctcacccagctaatcagtctctgtacttgtttccctttttgaaacaagtgtcttggttaactaattctgttttatggttgtgctaaattcatagcaggtgccttattctttgcttttagtcaaaccattccatatcagaattttccttggtttactatagatatttggctttaagttgttgtttgtgttttttaatgtacaatgttctgataaatttgactgttaaattgctatagctagcaatcattttacatatgtaaaattgcattccctttgtatttcatgtgtaattcaccaattaagtgcagtttatattcaggttggattatgcatgtttaggtaaacgaaagctgngtcttacttgatttattcttt

SEQ ID NO: 5244 - DNA, 498 bp, Homo sapiens
atagcaaatgcagttgttaaagaacttgctgagactataaaatgtcgtacattattttcaactcactaccattcattagtagaagattattctcaaaatgttgctgtgcgcctaggacatatggcatgcatggtagaaaatgaatgtgaagaccccagccaggagactattacgttcctctataaattcattaagggagcttgtcctaaaagctatggctttaatgcagcaaggcttgctaatctcccagaggaagttattcaaaagggacatagaaaagcaagagaatttgagaagatgaatcagtcactacgattatttcgggaagtttgcctggctagtgaaaggtcaactgtagatgctgaagctgtccataaattgctgactttgattaaggaattatagactgactacattggaagctttgagttgacttctgacaaaggtggtaaattcagacaacattatgatctaataaactttatttttcaaaaaaaa

SEQ ID NO: 5245 - DNA, 482 bp, Homo sapiens; identical to SEQ ID NO: 395

SEQ ID NO: 5246 - DNA, 440 bp, Homo sapiens; identical to SEQ ID NO: 242

SEQ ID NO: 5247 - DNA, 265 bp, Homo sapiens
  unsure (8): n=A,T,C or G
  unsure (32): n=A,T,C or G
  unsure (50): n=A,T,C or G
  unsure (55): n=A,T,C or G
  unsure (80): n=A,T,C or G
  unsure (87): n=A,T,C or G
  unsure (91): n=A,T,C or G
  unsure (120): n=A,T,C or G
  unsure (128): n=A,T,C or G
  unsure (138): n=A,T,C or G
  unsure (165): n=A,T,C or G
  unsure (195): n=A,T,C or G
  unsure (205): n=A,T,C or G
  unsure (218): n=A,T,C or G
  unsure (252): n=A,T,C or G
  unsure (253): n=A,T,C or G
ctggcctnaggagggagtaagagccccatccntgaaggtacacaagttgnggcancaaccatctggcctgcagtttccanaggggantcangcgtggggtgggactggagtgaacgggtngatgcttncacatgcggnagttggcactgacggcaggaacacggnggtggcttaatgggtcctggggctcccctntggccctcangaaggcaggagcntgaggggcttgggatgcagcacctgcaaatttgnncgttcctggcct

SEQ ID NO: 5248 - DNA, 167 bp, Homo sapiens
  unsure (34): n=A,T,C or G
  unsure (80): n=A,T,C or G
  unsure (94): n=A,T,C or G
  unsure (96): n=A,T,C or G
  unsure (101): n=A,T,C or G
  unsure (111): n=A,T,C or G
  unsure (115): n=A,T,C or G
  unsure (141): n=A,T,C or G
  unsure (152): n=A,T,C or G
  unsure (154): n=A,T,C or G
  unsure (161): n=A,T,C or G
cttttttttttttttttttttttttttttttttncggataaaataagtttttatttatagtcttatagtaaagggggaanccttaacttgcaananaattnttcggcagtntgtncaacatactttttatttccatggaanggaatcaaacncnaactganactaca

SEQ ID NO: 5249 - DNA, 438 bp, Homo sapiens
gtaactatccgcactagaaagttcatgaccaaccgactacttcagaggaaacaaatggtcattgatgtccttcaccccgggaaggcgacagtgcctaagacagaaattcgggaaaaactagccaaaatgtacaagaccacaccggatgccatctttgtatttggattcagaactcattttggtggtggcaagacaactggctttggcatgatttatgattccctggattatgcaaagaaaaatgaacccaaacatagacttgcaagacatggcctgtatgagaagaaaaagacctcaagaaagcaacgaaaggaacgcaagaacagaatgaagaaagtcagggggactgcaaaggccaatgttggtgctggcaaaaagtgagctggagattggatcacagccgaaggagtaaaggtgctgcaatgatgttagctgtgg

SEQ ID NO: 5250 - DNA, 345 bp, Homo sapiens; identical to SEQ ID NO: 243
  unsure (154): n=A,T,C or G
  unsure (335): n=A,T,C or G
  unsure (337): n=A,T,C or G
  unsure (340): n=A,T,C or G

SEQ ID NO: 5251 - DNA, 368 bp, Homo sapiens; identical to SEQ ID NO: 244
  unsure (40): n=A,T,C or G
  unsure (56): n=A,T,C or G
  unsure (60): n=A,T,C or G
  unsure (79): n=A,T,C or G
  unsure (85): n=A,T,C or G
  unsure (102): n=A,T,C or G
  unsure (108): n=A,T,C or G
  unsure (118): n=A,T,C or G
  unsure (125): n=A,T,C or G
  unsure (126): n=A,T,C or G
  unsure (134): n=A,T,C or G
  unsure (152): n=A,T,C or G
  unsure (196): n=A,T,C or G
  unsure (197): n=A,T,C or G
  unsure (203): n=A,T,C or G
  unsure (209): n=A,T,C or G
  unsure (234): n=A,T,C or G
  unsure (245): n=A,T,C or G
  unsure (247): n=A,T,C or G
  unsure (258): n=A,T,C or G
  unsure (263): n=A,T,C or G
  unsure (267): n=A,T,C or G
  unsure (271): n=A,T,C or G
  unsure (273): n=A,T,C or G
  unsure (282): n=A,T,C or G
  unsure (292): n=A,T,C or G
  unsure (301): n=A,T,C or G
  unsure (311): n=A,T,C or G
  unsure (336): n=A,T,C or G
  unsure (339): n=A,T,C or G
  unsure (346): n=A,T,C or G
  unsure (354): n=A,T,C or G

SEQ ID NO: 5252 - DNA, 304 bp, Homo sapiens
  unsure (149): n=A,T,C or G
  unsure (279): n=A,T,C or G
  unsure (297): n=A,T,C or G
aaaagagaagggttgaaaaagattgtgtgtgtgtgtgtgtgtgtgtgtttaattggcccagggttacttaaataaatcataaccattttgccacattctgtaactgtttagctaaggtcaaattaagtttaccctatggattttgtttnatcttttgtttcgtgtatatactgtttgcctttttcataaaaatcttggatttgttatatattgttcctgttatttttgacatctttgctattgtaaataaattactattttgttttaagtgaaaaaaanaaaaaaaaaaaaaaaaanaaagctt

SEQ ID NO: 5253 - DNA, 272 bp, Homo sapiens
ctggcctcaggagggagtaagagccccatccctgaaggtacacaagttgtggcagcaaccatctggcctgcagtttccagaggggagtcaggcgtggggtgggactggagtgaacgggtagatgcttccacatgcggcagttggcactgacggcaggaacacgggggtggcttaatgggtcctggggctcccctctggccctcaggaaggcaggagcatgaggggcttgggatgcagcacctgcaaatttgcacgttcctggcctcaggagg

SEQ ID NO: 5254 - DNA, 191 bp, Homo sapiens
  unsure (113): n=A,T,C or G
  unsure (124): n=A,T,C or G
  unsure (130): n=A,T,C or G
  unsure (132): n=A,T,C or G
  unsure (147): n=A,T,C or G
  unsure (159): n=A,T,C or G
  unsure (161): n=A,T,C or G
caccttgaaggcccaagggaatcccgttatcagctctgatcctgagataatccctctgacttcctcccagaagccaagactctccagaactggctggttgtcctttgcagatntgttgaggcancaagtnantaggaagagaatatnaatatatacagntntggtcaccaaacatggattttgcctcttgg

SEQ ID NO: 5255 - DNA, 156 bp, Homo sapiens
  unsure (7): n=A,T,C or G
  unsure (10): n=A,T,C or G
  unsure (24): n=A,T,C or G
tttacantcncatgttcattgtgncactcttcacaatcactgtttccaaagttatggaaacaacccaaatttccattgaaaaataaatggacaaagaaaatgtgcatatacgtacaatgggatattattcagcctaaaaaaagggggaatcctgtt

SEQ ID NO: 5256 - DNA, 448 bp, Homo sapiens; identical to SEQ ID NO: 396

SEQ ID NO: 5257 - DNA, 577 bp, Homo sapiens
  unsure (497): n=A,T,C or G
aaagaatatgtagaatctaggtaagtggataaaaggtctgggggcaggggaaaggagagcatttcattgtgaatcaaggaatttctccacctgttttaactcttccatatgacatcaaagagatgtcacttgcagctagcatttcagtgatgttttcttactaataatatcgtgataaaagaaacattgactataagaaataggaatgggtctcataaaaggaaacagcaaaacccccaaactaaaaaacagcgcaggctgtttctctcttctctccttttgcttggcactcatgagatgctaggtgtggaagtcagccaactgaaaaagagaggtggctgaagaaggtggggaggctgaagccagttaaataggatggtccaattcacagacggcgaggctacagtgcaaataggactctttcaacttgagcaggaccccattacttcactggagttagaaagaaaggagagcgtagactttttgaactttctatnaagagtgtacctccacagtatacagaagacgacgtgaaatttgatctgcaagaaaactgagtccatattcacatatgtat

SEQ ID NO: 5258 - DNA, 525 bp, Homo sapiens
cttcgagtgcatcgaggacctgtctgaagacttggaatggaaaattatctatgtgggctctgcagaaagtgaagaatacgatcaagttttagactctgttttagtgggtcctgttcccgcaggaaggcatatgtttgtatttcaggctgatgcacctaatccaggactcattccagatgcagatgcagtaggcgtaactgttgtgctaattacttgtacctatcgaggacaagaatttattagagttggctattatgtaaataatgaatatactgagacagaattaagggaaaatccaccagtaaaaccagacttttctaagcttcaaaggaatattttggcatctaatcccagggtcacaagattccacattaattgggaagataacacagaaaaactggaagatgcagagagcagtaatccaaatctacagtcacttctttcaacagatgtattaccttcagcatcaaagggatggtccacatcagaaaactcactaaatgtcatgttagaatcccacatgga

SEQ ID NO: 5259 - DNA, 562 bp, Homo sapiens
  unsure (467): n=A,T,C or G
  unsure (503): n=A,T,C or G
  unsure (540): n=A,T,C or G
ccacacacagaaggaaagttgatccccagggcagcctttcccaccaaaaaaatcaggcccaatccaggagagtttgccagtagctccccagggttccagggtgtctgccagccttcctaggaatcgtgggcaggcttctaggtgccagtgactcaaactcctttttccacttcccagttcaacctggtcactctcatccccacaagttcccaatctgaatcccattctctgaccattctctgcttccttgtttttaatctcatttgagagtgatcctcacgggttcccctggcccctgcactcattttccttactgggtatgctaacgtttgtcttctaattcaggaaatccttccaaccctgttttcagctctgcctccaaacccttccatttccccatttcacctcccagtctcctcactcctggagcaaagagctctgcacttggattgctaagcatgcatggntcatgtggagcaggggagtgggaagatgtccctcanggcagaaagcctgcttttggtggggaacctacgtatnattcaaacaggcttagctgtag

SEQ ID NO: 5260 - DNA, 422 bp, Homo sapiens
ccaccaaggctatcgatgagtacatgaagctcgtggcacgggattacctccaggagaccctgggtgagctgggggagagtccatgtcagcggcctgctggtgagctaggggacctgggtgaagttctaagagtccttgagcaacctggattctggtagtgagtggtgttttgggggtgctaggatcctggggacaattgggagctccccaagatgttgggtgcctctggaataacctgaagacaaggttggaggatgggtgtggcaggttttggtggtcatggccccagcccctatctggctgtgctgggctgcaggacaggttgtgcggcgtctctgtgcttctactgaggactgtgaagtggaccccagcaaatgtccagcctcggagctgccagagcaccaggccagacttcggaacag

SEQ ID NO: 5261 - DNA, 573 bp, Homo sapiens; identical to SEQ ID NO: 245

SEQ ID NO: 5262 - DNA, 426 bp, Homo sapiens
  unsure (184): n=A,T,C or G
  unsure (205): n=A,T,C or G
ctggaagagagggctgcccggaacgtctctcaagtttccaagaacttggaaagccaccacggtgaccagatggcgcagaaatcccagtccacgcagatttcacaggaactggaggaacttcgagctgaacagcagagattgaaatctcaggacttggagctgtcctggaacctgaacgggcttnaagcagatctgagcagcttcnagtcccaggaattgaacgagaggaacgaagcttcagatttgctggaaagactccgggaggaggtgacaaagctaaggatggagttgcaggtgtccagcggctttgtgtgcaacacgtgccctgaaaagtggatcaatttccaacggaagtgctactacttcggcaagggcaccaagcagtgggtccacgcccggtatgcctgtgacgacatggaagggcag

SEQ ID NO: 5263 - DNA, 354 bp, Homo sapiens
aggtctgagggaggggtcagggtgggtgcgcggtgacggggagggcaaaggtggtgtcagtatcttcattttgaggattggggttcagagcacttctggggtgtcagctcctccttgtccccccgtggggctccgtaggactggaaagaggacatgaagagctctgacagagagcagcagaaactctggaactgtttccagagggcctgcactgcatggaccagggccaccaccttctccttcacccaggccagaaccccgtgccaccaggtctgcagccgctgcagcatggcctggaaccatctcatgaccttgtcacaaaagctctccccaggctcctcggttgcgggatcc

SEQ ID NO: 5264 - DNA, 268 bp, Homo sapiens
ctgtatggctgggggctcctcgtatgcatggaacccccagaataaatatgctcagccaccctgtgggccgggcaatccagacagcaggcataaggcaccagttaccctgcatgttggcccagacctcaggtgctagggaaggcgggaaccttgggttgagtaatgctcgtctgtgtgttttagtttcatcacctgttatctgtgtttgctgaggagagtggaacagaaggggtggagttttgtataaataaagtttctttgtctcttt

SEQ ID NO: 5265 - DNA, 342 bp, Homo sapiens
ttgataaaaccccagggccacagcagaggcaaagggcatctggggagagggttcgaagctgtggcggactccactaatgtaaccctccaatgtcaagccatgggcgtgatcagtagctaagtgatgacaaggctgttgggggtggacggaaaagacttggggcaaagcagactgtttatagcctgagctggtagggcctggtgcagcagcctacccggaactggcactactctttcccaggttccctgactctctatcctggtctctgagagcgtgccctacttccgtttcccccactccaaacacacctgaggcatcttccagtgctaggccccatgctgg

SEQ ID NO: 5266 - DNA, 450 bp, Homo sapiens
  unsure (12): n=A,T,C or G
  unsure (13): n=A,T,C or G
  unsure (20): n=A,T,C or G
ccgaggtccaannttttccntgatgaggaatgggttggaaagctggcctacttatcagatatattttcacttataaatgaattaaatttaagtctccaaggaactttgactactttcttcaatttgtgtaataaaattgatgtatttaagagaaagttaaaaatgtggttgaagcgcacacaagagaatgattatgacatgttcccttcattttctgaattctcaaattcatcaggcttaaatatgacagacatcacaaggattatttttgagcacctggaaggactttctcaagtgttcagtgactgttttccaccagaacaagacttgcgttcaggaaatttgtggataattcacccttttatgaatcaccaaaataataatctcaccgacttcgaagaagaaaagctaacagagctatcttcagatttaggattacaagcactattt

SEQ ID NO: 5267 - DNA, 421 bp, Homo sapiens
ctgctgaagctcaactcccttttcgagcaggtgtggaagccctgaggcttctctgacatagcatgtgtttattttcttaggtgagacctgattcaggaaagtctgcagccgatatccatcttcaagtttgtggtcctttctccctctatatatccttgacctcagcagtcatgctggggtccagagtggatgattctctccgccttaggtagactcctccttaagagtgtaagtctctcagtctcacatattttgtgagacgtaaactgacattccacaaggagaggaggaaattctgtgggtcacatccaggggtgcttggaacctgattggttgtcaatcctccagttagtttgtcacgagtggaattctgtcctggattcccaaggatcaaggctgccccattagccaggaaataggg

SEQ ID NO: 5268 - DNA, 250 bp, Homo sapiens
  unsure (239): n=A,T,C or G
ctgttgaaacagaagaagttgagcctgatgaagaagaatttcaggaagagtctttggtggatgactcattacttcaagatgatgatgaagaagaagaggacaatgaatctcgttcttggagaagatgatttgactgatcattgatctacatatgctagaactctacctgtgtttcattagtattatctaatgtacttttacatatttgtaaaaacaatttttggtaaaatgtgatgaanatggatttcac

SEQ ID NO: 5269 - DNA, 395 bp, Homo sapiens
aaatgaaatggggttgaagtgaacatgattttgttgaccatgttcgtgaattacagatgcaatatgcattggtagaatcgtgtgatggtcttttgtgatacttaatttttacatatcccagtctctgtatgtatctgcatagacaaagaaaaaacaaactcctgctttgcttttattgaagggtttccaggactgcgtgtctgctcctgagctctgttttaagtatgtgtatcctttgcttgtattttgtattaaaaaaataagaaaaagaagcctttattgttgagcatgttggcattgtcccctttatttttttctctttttgggacatatgaagcaagttattctttttctgtatctttttttcttttgtaaactttttttttgttttgttt

SEQ ID NO: 5270 - DNA, 340 bp, Homo sapiens; identical to SEQ ID NO: 325

SEQ ID NO: 5271 - DNA, 425 bp, Homo sapiens; identical to SEQ ID NO: 246

SEQ ID NO: 5272 - DNA, 593 bp, Homo sapiens; identical to SEQ ID NO: 247

SEQ ID NO: 5273 - DNA, 453 bp, Homo sapiens; identical to SEQ ID NO: 248
  unsure (420): n=A,T,C or G

SEQ ID NO: 5274 - DNA, 504 bp, Homo sapiens; identical to SEQ ID NO: 400

SEQ ID NO: 5275 - DNA, 303 bp, Homo sapiens; identical to SEQ ID NO: 580

SEQ ID NO: 5276 - DNA, 363 bp, Homo sapiens; identical to SEQ ID NO: 581
  unsure (188): n=A,T,C or G

SEQ ID NO: 5277 - DNA, 584 bp, Homo sapiens; identical to SEQ ID NO: 582
  unsure (340): n=A,T,C or G
  unsure (529): n=A,T,C or G
  unsure (534): n=A,T,C or G
  unsure (547): n=A,T,C or G

SEQ ID NO: 5278 - DNA, 591 bp, Homo sapiens
ctgttccctgaatggcttccctgggttatgtagaaacagcctggggaggaggtgatacaacatacttaatggggcctctgggcagaaaacagactgaatcctcaacactgccccttttgagggtctgtgatcctggaacttctctgatggactgggatgcccttaactgaggtctgctgtctggaaaggacaccacaggcccagaatgaaggggcatctggaccaatgacctagattcaacacagggcttggagctggtggtacaggctggttttggcccaatgtgtgctggaggctggaagcccctgaagacctaaactgcctggatgagcttattagggtgaattaatgagtctgtaatttgggaaccttaatgtgagacaccacttaaggagaggaacttggcccagcaattgatcactctagaagtggacagctatgcactagactgcaccagaatctgttcaacagcgacaccttgtggtaaaaactgtagacgccccatcaggctggatgggaaactagaaacagactgtctcatctttggacagatatccctcaaatctcccaatctactccagggaaaagaca

SEQ ID NO: 5279 - DNA, 365 bp, Homo sapiens
ctgtacaatactttggtgttaacctgtggtcttccttcacctcagtgaactctgccctgcccatctgtccagaggaagtcttagctcctaccccccaccctccctggcgcttggatgggaggcgacacagtatgggattgtgaaatccctgctgcgatgctgggtatctggaaggggagaagggggtggaagcagcgcagggaatgctgtgagatgagaagagctcacatcgatgggaaatggccctggcccaggctccagaatgtgacagcaacagtggcctggctgttttcccggggggcggggggcgggactggcaaactgggaggagaggcaattaagacgcaacaatcaaaccaaccttt

SEQ ID NO: 5280 - DNA, 553 bp, Homo sapiens
  unsure (487): n=A,T,C or G
ccacaactgtgaagttagaaaagccctgtcaaagcaagagatggctagtgcttcatccagccaaagaggtcgaagtggttctagaaactttggtggtggtcgtggaggtggtttcggtgggaatgacaacttcggtcgtggaggaaacttcagtggtcgtggtggctttggtggcagccgtggtggtggtggatatggtggcagtggggatggctataatggatttggtaatgatggaagcaattttggaggtggtggaagctacaatgattttgggaattacaacaatcagtcttcaaattttggacccatgaagggaggaaattttggaggcagaagctctggcccctatggcggtggaggccaatactttgcaaaaccacgaaaccaaggtggctatggcggttccagcagcagcagtagctatggcagtggcagaagattttaattaggaaacaaagcttagcaggagaggagagccagagangtgacagggaagctacaggttacaacagatttgtgaactcagccaagcacagtggtggcagggcct

SEQ ID NO: 5281 - DNA, 577 bp, Homo sapiens
ccagaggatcagtgtccgatgaggaaatgatggagctcagagaagcttttgccaaagttgatactgatggcaatggatacatcagcttcaatgagttgaatgacttgttcaaggctgcttgcttgcctttgcctgggtatagagtacgagaaattacagaaaacctgatggctacaggtgatctggaccaagatggaaggatcagctttgatgagtttatcaagattttccatggcctaaaaagcacagatgttgccaagacctttagaaaagcaatcaataagaaggaagggatttgtgcaatcggtggtacttcagagcagtctagcgttggcacccaacactcctattcagaggaagaaaagtatgcctttgtcaactggataaacaaagccctggaaaatgatcctgattgtcggcatgtcatcccaatgaacccaaacacgaatgatctctttaatgctgttggagatggcattgtcctttgtaaaatgatcaacctgtcagtgccagacacaattgatgaaagaacaatcaacaaaaagaagctaacccctttcaccattcaggaaaatct

SEQ ID NO: 5282 - DNA, 70 bp, Homo sapiens
  unsure (5): n=A,T,C or G
  unsure (10): n=A,T,C or G
  unsure (16): n=A,T,C or G
  unsure (19): n=A,T,C or G
  unsure (31): n=A,T,C or G
agaanctgcnaaagtnggngggagcgccccnggagaacaaacagcaagccttatttcccctagcccatcc

SEQ ID NO: 5283 - DNA, 484 bp, Homo sapiens
ccacattcattttgaagtaacctttccagccctggtggaaatccagtcggtctttctttaccgcctctgcctgtagatacttggcaatatgcttagggcagcggcggtttagggtacgctgcgagtcaaaataggtgatggtgcgtcgcctcacatcaacagagatgagggaccaatgcacctccaggtggatggggattagcagtagctccttattgaagatgtccacgtttttggtccaccttttcaccccatcataacccttggtacggagtttatcatagaagaaactattgaagaaatgcaccttttcagggactgtgtccatgaccaggtctccatacatgttcatcacctggtcattgagccagttctgtccatacaaggtccccaagtcatccatggtcagcacatgccgcttataagccactcggaagcccctcaccatggcattgcctggcatccgctggtaagactggatcag

SEQ ID NO: 5284 - DNA, 298 bp, Homo sapiens
  unsure (89): n=A,T,C or G
  unsure (99): n=A,T,C or G
  unsure (103): n=A,T,C or G
  unsure (122): n=A,T,C or G
  unsure (249): n=A,T,C or G
gcaagggaggacagtggatgacagggaagatgagtgggggcagagctgctcaggaccatggctgaggccatcacctatgcagatctgangtttgtgaangctnccctgaagaagagcatctncagccggttaggacaggacccgggggctgatgatgatggggaaatcacctacgagaatgttcaagtgcccgcagtcctaggggtgccctcaagcttggcttcttctgtactaggggacaaagcagcngtcaagtcggagcagccaactgcgtcctggagagccgtgacgtcaccag

SEQ ID NO: 5285 - DNA, 439 bp, Homo sapiens
ctgccgctcatccaccatcagtgactttgtgctgttatcattcatgtgcaccttgacgacgagcttcttaaccttggcctccttcagtttttccagcgccagcttaattttatcagccttggcttgggcttcttcctcttcctgagagagaggttcaggaggtggtggtggcagtggaaggtctaacacaggatcggctggtggaggtggtaagtcatcctcatattggctgataccagtggcagcaacatttgttccataaccaagagaggctgcaccactgaaaattgatgcttgtagagatgctgaatgatgttgattctgcaaggactctttctgtgcctggattgtcctctgctcagcctcacttatgtctgctaccagatctgccatgagagcatctaaatcttggtcttccagtgcatttaaggactcattt

SEQ ID NO: 5286 - DNA, 257 bp, Homo sapiens
  unsure (12): n=A,T,C or G
  unsure (14): n=A,T,C or G
  unsure (37): n=A,T,C or G
  unsure (51): n=A,T,C or G
  unsure (57): n=A,T,C or G
  unsure (70): n=A,T,C or G
  unsure (79): n=A,T,C or G
  unsure (81): n=A,T,C or G
  unsure (87): n=A,T,C or G
  unsure (89): n=A,T,C or G
  unsure (95): n=A,T,C or G
  unsure (121): n=A,T,C or G
  unsure (128): n=A,T,C or G
  unsure (129): n=A,T,C or G
  unsure (157): n=A,T,C or G
  unsure (165): n=A,T,C or G
  unsure (219): n=A,T,C or G
  unsure (242): n=A,T,C or G
ccaaaaacaatnanggtcataaccatccatgcagacntggaggctcggctnaaccangactcctcactgnctacctgananaatgancncccctnatccatctcagcatcaacacaatttncaggggnnctcaggtctacctcaggactgaacgccncacctcangattcctcctccttgaatctgagactggctgcccattctgagatggggatgaangtaagatgccgcatcaccaggcncgccgcccctgacag

SEQ ID NO: 5287 - DNA, 496 bp, Homo sapiens
ccaacaggagcctgacagcaacaaggagattgagagctttgcccgccgcacctacagtgtctcattccccatgtttagcaagattgcagtcaccggtactggtgcccatcctgccttcaagtacctggcccagacttctgggaaggagcccacctggaacttctggaagtacctagtagccccagatggaaaggtggtaggggcttgggacccaactgtgtcagtggaggaggtcagaccccagatcacagcgctcgtgaggaagctcatcctactgaagcgagaagacttataaccaccgcgtctcctcctccaccacctcatcccgcccacctgtgtggggctgaccaatgcaaactcaaatggtgcttcaaagggagagacccactgactctccttcctttactcttatgccattggtcccatcattcttgtgggggaaaaattctagtattttgattatttgaatcttacagcaacaaataggaactcctgg

SEQ ID NO: 5288 - DNA, 628 bp, Homo sapiens
  unsure (602): n=A,T,C or G
  unsure (624): n=A,T,C or G
cctcagggcctcttctggaaaatgaagaaattcaactagtagattcctgaggtccccctagcttaaaaaaaaaaaaaaaatctgccccatgattctaacactcgcagtagtgatagtgtatctagttgttctgctggtgtccttccttggctaagtcttggccttcagttatcttcaaatgtaccagaacctgagccaacgcctccctgtgaaactgttgctgatctgtagtacagtaccaggaagaaacctcttttgttctctttagacatcttctacttgctcttggccttgagatcgtgtaacaaaatgaaggagggctctcttctttcttcctcatcctactcaaaaacttcccgagagcagtggtggttttgagggttttgacttctattacttttggcagcctggaaagttgtgtcttctgggaaagagacccggggaggccaggagtagctgagggtcctttctgtgcccttaaaccgcccagaggagccctattccactctggttttaggctgatctgagagggtctccctttgctcctttctggagcatttctctaacgtttattacaattaggagggggaccccacatctgngagattctgtttcatttgaggnttac

SEQ ID NO: 5289 - DNA, 611 bp, Homo sapiens
ctggacacagacacttccccagccccagggccagagtggggctggagggaaggacagggctacagtagtagtgggggtatatgagggaaggctgcaaggatgtggtagctggagttttgagagatggataagagttttccaaggaggcaaaagtggcagaaaagctttgcaggtgaggaggagcagcagaagcttaacctgcatgagaatccctctcaccagtcagaaagttgaccctgcacagccaaggggtaagctctgaccattttgcaggggacagaactgagacccagagagggaaaggaacttgcccactgtcacactgcatggaaggggcaaaactgtaggctccaatacttgggctcttaacctccttactctgagccttctcacgcttggcatgctgttccctctgccaggaatgcctttccttcccttgattgcgtgaaaagttcctgccaggtttggtgtcatccctttgtgccccttgtagggtgaggacagaaagggtcccattggacaggtgggaaaactgaagccctaggacactcagataccattagggtggactgggaccccagcctttcctgccccctttcaggatcccaaag

SEQ ID NO: 5290 - DNA, 597 bp, Homo sapiens
  unsure (526): n=A,T,C or G
ccattgcccgggcccttgtacgagacccgcgggtcctcatcctggatgaggctactagtgccctagatgtgcagtgcgagcaggccaatgggttctgggtgggtcccctgggtggtggctctgctagtgaatctgacccgactggattcctccatgactcaaggcacagactctccagtgatgtggggatgtttgtggcattgaccaagctggggcagccagatgctgagcagtggaacagccggctggatctcttggagaggagcagacaggccgtggatggggtctgtagacacaactacaggctgggcgcacccttcactgtggggagaaaagtgcaaccagaggtgacagtgtacccagagaggaccccactcctgcaccagcataatctgctgcactgctctgtgacaggcttctatccaggggatatcaagatcaagtggttcctgaatgggcaggaggagagagctggggtcatgtccactggccctatcaggaatggagactggacctttcagactgnggtgatgctagaaatgactcctgaacttggacatgtctacacctgccttgtcgatcactccagcctgctga

SEQ ID NO: 5291 - DNA, 590 bp, Homo sapiens
  unsure (505): n=A,T,C or G
aaaggatttattttccagcagtcctgaggggcaaggacaggacaggagggagaaggagatcccaggacgcttgagggccccgttcatgggcagtaggcagattcgtccttctagtgcctgtggcaggcaggttgaccctgggttcgggagggacacaggccctggatgacactgagctggatgcctaggcagtgtcactccccacactttcaacctgagccccacagcaagcctataaggtgaacattctcactgtgatttgtcaggctgggttcagggagtgaaatggcctcctccaattccacaggttcaaataccctgcagagcggcaccagcctccctcagaaaggaccagacacttgtaacatttatgtcctttacctgggacactgctgtcccatacttgctgtatgaaaagaatatttctcaagaggaagaggaagccaggcgcagtgactcacgcctgtaatcccagcactttgggaggctgagccaggaggatcgnttgagcccaggagtttgagaccagcctgggtaacatggcaaaaccccgtctctacaaaaatcagccagaaaggcatagatagacc

SEQ ID NO: 5292 - DNA, 369 bp, Homo sapiens
ctgcaggaggcgctctgagtcagcctggaggaggcaggacttgctggtggacaccacctcaaagcagaaccgcctttctgagtcagggtagagtttcactgtgcagagacgaaggtcatccaccaccacagtcacagggtccttgtacttcttctggtaaaccagttggttgctctgaatggtgaaccagcgtctgctccaggtcttaaatgcgttgctggcccgtttgaagagatgtccttccatcaccaggccaccaggcccctctcttaagcttggttctggctcctccccacccagctccttctgtttcagcagcacgtgtctctgctccatgcccctcttctctcgtgctgaattcaagaccag

SEQ ID NO: 5293 - DNA, 608 bp, Homo sapiens; identical to SEQ ID NO: 249

SEQ ID NO: 5294 - DNA, 333 bp, Homo sapiens
  unsure (9): n=A,T,C or G
ccagtacanatctttgagaggtctgtgtacagtgacaggctccactttgaggctctgatgaacattccagtgctggtgttggatgtcaatgatgatttttctgaggaagtaaccaaacaagaagacctcatgagagaggtaaacacctttgtaaagaatctgtaaccaataccatgatgttcaggctgtgatctgggctccctgactttctgaagctagaaaaatgttgtgtctcccaaccacctttccatccccagcccctctcatccctggagcactctgccgctcaagagctggtttgttaattattgttagactttgccattgttttct

SEQ ID NO: 5295 - DNA, 345 bp, Homo sapiens; identical to SEQ ID NO: 4886

SEQ ID NO: 5296 - DNA, 581 bp, Homo sapiens; identical to SEQ ID NO: 654
  unsure (532): n=A,T,C or G
  unsure (574): n=A,T,C or G

SEQ ID NO: 5297 - DNA, 574 bp, Homo sapiens
ctcagcaatcagactgtcgacattccagaaaatgtcgacattactctgaagggacgcacagttatcgtgaagggccccagaggaaccctgcggagggacttcaatcacatcaatgtagaactcagccttcttggaaagaaaaaaaagaggctccgggttgacaaatggtggggtaacagaaaggaactggctaccgttcggactatttgtagtcatgtacagaacatgatcaagggtgttacactggagaatgggtctcttgttgaaatccgaaatttcttgggtgaaaaatacatccgcagggttcggatgagaccaggtgttgcttgttcagtatctcaagcccagaaagatgaattaatccttgaaggaaatgacattgagcttgtttcaaattcagcggctttgattcagcaagccacaacagttaaaaacaaggatatcaggaaatttttggatggtatctatgtctctgaaaaaggaactgttcagcaggctgatgaataagatctaagagttacctggctacagaaagaagatgccagatgacacttaagacctacttgtgatattt

SEQ ID NO: 5298 - DNA, 547 bp, Homo sapiens; identical to SEQ ID NO: 583
  unsure (8): n=A,T,C or G
  unsure (9): n=A,T,C or G
  unsure (516): n=A,T,C or G
  unsure (522): n=A,T,C or G

SEQ ID NO: 5299 - DNA, 531 bp, Homo sapiens
aaaattatttcttgaatctctccatacacaggcaaaaataagtgtgttacttaacatactggaaattgcctaacttaatcattgcctaaagaagagaaaattatccccaaaacgtgcttaaccaggaggccaatgcatttgccgacctccaagaacatggagatgaacgtgatagacagactgtccaccatctgaaccttcattcaccaccattcgataacccttattcaggcccagatcagcagcacatttcttgccaacaatcattaagtgtccaagaagactttcatcatcatcttctgccacagaaatctgggatatatgtttcttgggtatcaccagaaaatgtgttggtgcttgaggggaaatgtcatggaaagcaaggcaccggtcatcctcaaaaatgattttggctggtatttccttgcggatgatcttcccaaagatcgtgtcgccaccaggccgagcgacctgagccttggcaatctcatctgccatctcggcctctctcccgcgcggcggccagaggag

SEQ ID NO: 5300 - DNA, 246 bp, Homo sapiens
ctgagctggggatactcaggtcctggggtgctgaggagatggggctgcatctggagagggtgctgttggggtgtactctcatctggagagggtgctgttggggtgtactctcatctggagaaggtgctgttggggtgtactctcatctggagagggtgctgttgggggcactcccatctggagagggtgctgttggggtgtactcctgggaaggcaggggccatagaggagcgggagatgtgtcag

SEQ ID NO: 5301 - DNA, 410 bp, Homo sapiens
cctttgaccaggttcacgaagttctccaccgacttggcaatggttgggtgctctgcagcacattccatcaggattgactccaggagctgcatgtactgctcgtcgcctcggcccccttctacctcgtggtccagcttcaggatgatttcgttttcaaactttttgaaatccccacttctttgatattcacacagcatcatgtcgaagaagattggtatggtggctttccggagctcagcctcagggataagtgtcatctctaatataggtcctaccatgcctgggatgaagcagattttgttctgaccaagcttgtaccacatatcacggatggagaagccaattagccgtctcatgtccccatacttattcaggattttgttgtatttggcgtgtgagaactgctccag

SEQ ID NO: 5302 - DNA, 424 bp, Homo sapiens
  unsure (37): n=A,T,C or G
  unsure (83): n=A,T,C or G
  unsure (90): n=A,T,C or G
  unsure (139): n=A,T,C or G
  unsure (141): n=A,T,C or G
  unsure (145): n=A,T,C or G
  unsure (160): n=A,T,C or G
  unsure (209): n=A,T,C or G
  unsure (215): n=A,T,C or G
  unsure (228): n=A,T,C or G
  unsure (237): n=A,T,C or G
  unsure (251): n=A,T,C or G
  unsure (261): n=A,T,C or G
  unsure (266): n=A,T,C or G
  unsure (281): n=A,T,C or G
  unsure (291): n=A,T,C or G
  unsure (307): n=A,T,C or G
  unsure (309): n=A,T,C or G
  unsure (315): n=A,T,C or G
  unsure (359): n=A,T,C or G
  unsure (414): n=A,T,C or G
tacaagcttttttttttttttttttttttttttttgntttttttttttggatctcttaaagggaatttattgcttccatgganattttanatcgatgttactgaggaattaggtagctgggcggcttaccccaggcatntnttantaggtaacacctganaaaagaaaaaaaaatcaggaggtcagggaaagaattcaaaggcatttgngagctntgaggggatacanaagcttaanaaaaaaaagcaganaaaaggtaanagganaaacatttgcagganaaaaagggtntgataaatcgggccananaatagngctaggtcatgtagcaagtccactcttccgctgctgtaaatggngatgcaccttccttttcaggatgggattcacaagggcccttggtgtctggaagcnccaactgaac

SEQ ID NO: 5303 - DNA, 263 bp, Homo sapiens
cctaggaaatctgtgagggaatccccaggggaatctcgtgaccagccaggtgtgaaatctgctaactggaagatctcaaagcttccttcactttttgtgattttgtggtcatgtaacgttactgtattattctacgtaaatgtgggtacttggatgtttatcatactgtttctctgtgtttacatactaatttgtgtaagaaatgcattttagtctgtgtacctcaacctgctgtttgtttcctagaggtgttagtagtcttt

SEQ ID NO: 5304 - DNA, 606 bp, Homo sapiens
  unsure (525): n=A,T,C or G
ccaggacccctggcggacatggcacccacaaggaaggacaagctgttgcaattctaccccagcctggaggatccagcatcttccaggtaccagaacttcagcaaaggaagcagacacgggtcggaggaagcctacatagaccccattgccatggagtattacaactgggggcggttctcgaagcccccagaaggtgaggcgaaggacaaagccggaggtggaggaagtggtgtgggagctcagggcagaagccatacctccaggcaggagaggaggctgggcctgggttcggatgatgatgccaattcctacgagaatgtgctcatttgcaagcagaaaaccacagagacaggtgcccagcaggagggcataggtggcctctgcagaggggacctcagcctgtcactggccctgaagactggccccacttctggtctctgtccctctgcctccccggaagaagatgaggaatctgaggattatcagaactcagcatccatccatcagtggcgcgagtccaggaangtcatggggcaactccagagagaagcatcccctggcccggtgggaagcccagacgaggaggacggggaaccggattacgtg

SEQ ID NO: 5305 - DNA, 536 bp, Homo sapiens
ccagggccacaacttcttctgtcgtggggaagagggatgaaaagacaagaccagggctggagctggggtggaagaggggagggggacactggctgcattcccccgcccccaggaagcacctctaggccctggacccctcgctcaccctggcccctaagactccatctcttctctgcctctggccctcctggctcttcctcctgctccccttgactttttcccctgacagattctcaagtaggacgatgttcagggcctgaccccaaccccccataccaccttatgaaggtacaacctttaccggccctgcttctgcccctcctcaaacctcaccgctttccctctttgggacagctctgatccccctccttcctctcctccctccccctggaaaaaaaaaaggaaaagaaagcaccaactccccggggaggggctgcagacagcagggggagaggactggaaggagagaagaggaccgtcgagggaagaggctcacaagtccctgggaagacagggcatgggcttacagagaggag

SEQ ID NO: 5306 - DNA, 400 bp, Homo sapiens; identical to SEQ ID NO: 250

SEQ ID NO: 5307 - DNA, 493 bp, Homo sapiens
ccagggatcagtctcatggccgtagaagcagccaaattcctctgcctttgccttcccttcaggagtcacatgctaaggcatccttgggcatttggaaaaggccgcttggggtgagagtgctctaggccactctgcaatgtccctgggcccgatgagtaacaaatgcaccccgggacccagagaagtggaaagacatgaaagggatttggaaacagatcgtaaaaataacctgtatgaaaatcacacagacaagaaaacaaacaaatccagctagccccttggatcctgccatccgtcttttctcccgggactgcctttgctttgtggagggtgagtcctgggacaggctttgggtgacaagttgtgggcatgttccatccaagcctggctctcccgactggcagagggaggtggctgacaatcaattcctctggatacattttcctgtgattgctcctgtgatcaaaggcagccaccgacaggtgcgggagcg

SEQ ID NO: 5308 - DNA, 393 bp, Homo sapiens; identical to SEQ ID NO: 251

SEQ ID NO: 5309 - DNA, 361 bp, Homo sapiens; identical to SEQ ID NO: 5108

SEQ ID NO: 5310 - DNA, 620 bp, Homo sapiens
ctgagggaggggtcagggtgggtgcgcggtgacggggagggcaaaggtggtgtcagtatcttcattttgaggattggggttcagagcacttctggggtgtcagctcctccttgtccccccgtggggctccgtaggactggaaagaggacatgaagagctctgacagagagcagcagaaactctggaactgtttccagagggcctgcactgcatggaccagggccaccaccttctccttcacccaggccagaaccccgtgccaccaggtctgcagccgctgcagcatggcctggaaccatctcatgaccttgtcacaaaagctctccccaggctcctcggttgcgggatcctcaacatccgggacaggggatctgttgcctcggcaccgtaatccatctctttctttttcaagtagaggagtgagctctgggtgctgctcctcataataagccgccactgtctccaggtagccctctttgaagtcgtcctccagctctgccaggctcgacatcacctgtccacgtcctgattctgcattttgcattttatcataaaatctttctatggcctggtgcattcgggccttcagcttcttcatgtcatcagagaggaccttcggg

SEQ ID NO: 5311 - DNA, 514 bp, Homo sapiens
  unsure (68): n=A,T,C or G
  unsure (71): n=A,T,C or G
  unsure (75): n=A,T,C or G
  unsure (81): n=A,T,C or G
  unsure (84): n=A,T,C or G
  unsure (91): n=A,T,C or G
  unsure (94): n=A,T,C or G
  unsure (102): n=A,T,C or G
  unsure (104): n=A,T,C or G
  unsure (108): n=A,T,C or G
  unsure (153): n=A,T,C or G
  unsure (164): n=A,T,C or G
  unsure (185): n=A,T,C or G
  unsure (212): n=A,T,C or G
  unsure (216): n=A,T,C or G
  unsure (226): n=A,T,C or G
  unsure (251): n=A,T,C or G
  unsure (279): n=A,T,C or G
  unsure (281): n=A,T,C or G
  unsure (313): n=A,T,C or G
  unsure (324): n=A,T,C or G
  unsure (333): n=A,T,C or G
  unsure (347): n=A,T,C or G
  unsure (407): n=A,T,C or G
  unsure (413): n=A,T,C or G
  unsure (415): n=A,T,C or G
  unsure (434): n=A,T,C or G
  unsure (442): n=A,T,C or G
  unsure (450): n=A,T,C or G
  unsure (462): n=A,T,C or G
  unsure (469): n=A,T,C or G
  unsure (472): n=A,T,C or G
  unsure (475): n=A,T,C or G
  unsure (488): n=A,T,C or G
ttttttttttttttttttttttttttttttttattttttttttttttttgctttcatgtttattaaanaanatcnctaaanatnttgactnganaatgctgngngctntttcaattacatttgtttttcttttattaacaggaattttgattnttcaaggaagnggctcaatttcaatttcaggngaccaggtttatcgggacttttccttnttgnttacttttcnctaggaaggggagttgtaggggcanattcaggttttggaataggaaaattacntntaaaccatggaaatcttggaaatggaattggnggaagtgggcnaaatggatntgggtaagggaacncaaaaaaccctgaagctaattcatcgctggcactgatacttcttttttctcgttcctggncttgananactgggaaaccaacagccnctgccaanatggctgngatcaggagganaactttnttnatntcaaacgtttcantcagttaccttgggcgggaacacgct

SEQ ID NO: 5312 - DNA, 588 bp, Homo sapiens; identical to SEQ ID NO: 402

SEQ ID NO: 5313 - DNA, 571 bp, Homo sapiens
  unsure (561): n=A,T,C or G
aaatggttctggcaaactgctcaagattacaggctgtgccagccctggaaaaacagttacaattgttgttcgtggttctaacaaactggtgattgaagaagctgagcgctccattcatgatgccctatgtgttattcgttgtttagtgaagaagagggctcttattgcaggaggtggtgctccagaaatagagttggccctacgattaactgaatattcacgaacactgagtggtatggaatcctactgcgttcgtgcttttgcagatgctatggaggtcattccatctacactagctgaaaatgccggcctgaatcccatttctacagtaacagaactaagaaaccggcatgcccagggagaaaaaactgcaggcattaatgtccgaaagggtggtatttccaacattttggaggaactggttgtccagcctctgttggtatcagtcagtgctctgactcttgcaactgaaactgttcggagcattctgaaaatagatgatgtggtaaacactcgataatctggataactgactagcaccattatgatcaccagtattgnggctggaatg

SEQ ID NO: 5314 - DNA, 637 bp, Homo sapiens
  unsure (619): n=A,T,C or G
atcgctgtgtcttgttccgccccctccctgacaccccagcttcccaggatgtggaaagcctggatctcagctccttgccccatatcccttctgtaatttgtacctaaagagtgtgattatcctaattcaagagtcactaaaactcatcacattatcattgcatatcagcaaagggtaaagtcctagcaccaattgcttcacataccagcatgttccatttccaatttagaattagccacataataaaatcttagaatcttccttgagaaagagctgcctgagatgtagttttgttatatggttccccaccgaccatttttgtgcttttttcttgttttgttttgttttgactgcactgtgagttttgtagtgtcctcttcttgccaaaacaaacgcgagatgaactggacttatgtagacaaatcgtgatgccagtgtatccttcctttcttcagttccagcaataatgaatggtcaacttttttaaaatctagatctctctcattcatttcaatgtatttttactttaagatgaaccaaaattattagacttatttaagatgtacagacatcagaaaaaagaagcacataatgcttttggtgcgatggcactcactgngaacatgtgtaaccacat

SEQ ID NO: 5315 - DNA, 255 bp, Homo sapiens
ctgcatggtgagctgcagagtggtcagaggggctggggccctgccaagagagcaaggccagacctgcccagcgggaggcaggaaggccctgatccagcaaggagaagtagaggaagtccacagccacctctgttactcatcgctactgggacatctggggacaggctctgttcttgggagagcaggccaccaggatttgtagggctgcctgccggtgacagacacgtaagtcacagggagaggccgggatccagg

SEQ ID NO: 5316 - DNA, 108 bp, Homo sapiens
  unsure (8): n=A,T,C or G
  unsure (18): n=A,T,C or G
ccctggcnaactgctcangattacaggattatggaaaggcaaagtatatacagtaatgtgagagaaactcaaaccaagtaagggtaaaaatgaaatgattaacaccac

SEQ ID NO: 5317 - DNA, 546 bp, Homo sapiens
ctgtggccctggatacggagatccctaatgagcttccatacaatgactactttgaatactttggaccagatttcaagctccacatcagtccttccaatatgactaaccagaacacgaatgagtacctggagaagatcaaacagcgactgtttgagaaccttagaatgctgccgcacgcacctggggtccaaatgcaggcgattcctgaggacgtcatccctgaggagagtggcgatgaggacgaagacgaccctgacaagcgcatctcgatctgctcctctgacaaacgaattgcctgtgaggaagagttctccgattctgaagaggagggagaggggggccgcaagaactcttccaacttcaaaaaagccaagagagtcaaaacagaggatgaaaaagagaaagacccagaggagaagaaagaagtcaccgaagaggagaaaaccaaggaggagaagccagaagccaaaggggtcaaggaggaggtcaagttggcctgaatggacctctccagctctggcttcctgctgagtccctcacgtttct

SEQ ID NO: 5318 - DNA, 425 bp, Homo sapiens; identical to SEQ ID NO: 252

SEQ ID NO: 5319 - DNA, 459 bp, Homo sapiens
ctggaacagtatatgaagacctgaggtataagctctcgctagagttccccagtggctacccttacaatgcgcccacagtgaagttcctcacgccctgctatcaccccaacgtggacacccagggtaacatatgcctggacatcctgaaggaaaagtggtctgccctgtatgatgtcaggaccattctgctctccatccagagccttctaggagaacccaacattgatagtcccttgaacacacatgctgccgagctctggaaaaaccccacagcttttaagaagtacctgcaagaaacctactcaaagcaggtcaccagccaggagccctgacccaggctgcccagcctgtccttgtgtcgtctttttaatttttccttagatggtctgtcctttttgtgatttctgtataggactctttatcttgagctgtggtatttttgttttgtttttgtctttt

SEQ ID NO: 5320 - DNA, 603 bp, Homo sapiens; identical to SEQ ID NO: 404
  unsure (511): n=A,T,C or G
  unsure (514): n=A,T,C or G
  unsure (549): n=A,T,C or G
  unsure (572): n=A,T,C or G

SEQ ID NO: 5321 - DNA, 603 bp, Homo sapiens; identical to SEQ ID NO: 253

SEQ ID NO: 5322 - DNA, 397 bp, Homo sapiens
gaaagagtaaaaccttttatgacaggggctgcagaacaaatcaagcacatccttgctaatttcaaaaactaccagttctttattggtgaaaacatgaatccagatggcatggttgctctattggactaccgtgaggatggtgtgaccccatatatgattttctttaaggatggtttagaaatggaaaaatgttaacaaatgtggcaattattttggatctatcacctgtcatcataactggcttctgcttgtcatccacacaacaccaggacttaagacaaatgggactgatgtcatcttgagctcttcatttattttgactgtgatttatttggagtggaggcattgtttttaagaaaaacatgtcatgtaggttgtctaaaaataaaatgcattt

SEQ ID NO: 5323 - DNA, 595 bp, Homo sapiens; identical to SEQ ID NO: 587

SEQ ID NO: 5324 - DNA, 444 bp, Homo sapiens
ctggaggggcagagaggccagggccaatgggagaggctgaaaagggggcagtacttgcccagggtcagggagatggtactgtttccaaaggaggaaggggccccggttcccagcataccaaagaagcagaagataaaattcccttggtcccctcaaaagtgagtgtcatcaagggcagcagaagccaaaaggaggcttttcctttggcaaagggagaggtagacactgcaccacagggtaataaagacttaaaggagcatgtgcttcaaagttccttatcccaggagcataaagacccaaaagcaacacccccatgatacaggtctgtggggaagagtgtttatatccctacgttaactttgcctagtagaggcccttctttgcacttgcttctcatttggctattcttttcctaaggaagtccattctcctctgtacagacag

SEQ ID NO: 5325 - DNA, 386 bp, Homo sapiens
ctcttctccggctccctgcccctccagattgcctggtgatctattttgtttccttttgtgtttctttttctgttttgagtgtctttctttgcaggtttctgtagccggaagatctccgttccgctcccagcggctccagtgtaaattccccttccccctggggaaatgcactaccttgttttggggggtttaggggtgtttttgtttttcagttgttttgtttttttgttttttttttttcctttgccttttttcccttttatttggagggaatgggaggaagtgggaacagggaggtgggaggtggattttgtttatttttttagctcatttccaggggtgggaatttttttttaatatgtgtcatgaataaagttgtttttgaa

SEQ ID NO: 5326 - DNA, 272 bp, Homo sapiens
  unsure (47): n=A,T,C or G
  unsure (73): n=A,T,C or G
  unsure (105): n=A,T,C or G
  unsure (110): n=A,T,C or G
  unsure (142): n=A,T,C or G
  unsure (163): n=A,T,C or G
  unsure (193): n=A,T,C or G
  unsure (203): n=A,T,C or G
  unsure (243): n=A,T,C or G
  unsure (253): n=A,T,C or G
cacacattcaccgttggcctgcctctgttcaccctccatggccctgntactggccctcagcctgctggttctntggacttccccagccccaactctgagtggcancaatnatgctgaagactgctgcctgtctgtgacccanaaacccatccctgggtacatngtgaggaacttccactaccttctcatcaangatggctgcngggtgcctgctgtagtgttcaccacactgaggggccgccngctctgtgcncccccagaccagccctggg

SEQ ID NO: 5327 - DNA, 307 bp, Homo sapiens
aaatattttttacacagatttgatgctgtgcaaatgccctctccccttttaggtgttgcttgttcagtatctcaagcccagaaagatgaattaatccttgaaggaaatgacattgagcttgtttcaaattcagcggctttgattcagcaagccacaacagttaaaaacaaggatatcaggaaatttttggatggtatctatgtctctgaaaaaggaactgttcagcaggctgatgaataagatctaagagttacctggctacagaaagaagatgccagatgacacttaagacctacttgtgatattt

SEQ ID NO: 5328 - DNA, 600 bp, Homo sapiens
ctgtgcttttcacatcaagttggcttagttcttggaggaaagtcttagtgactaaaattgtacacagatcacaagacaagagaactagtctaacaaattcaataagaaatcaggacaactgtagactatataaaaactgtcttagaaaattatttacaactttatcatagtgtaaatactctaaatgtaaaataaatctatggattttatacaaaaatactctaaagtacaaatgtaagttaaatgctgaataaaacattttcaccttttccagtggatgctattactaagactataatctaggtgtcaaaacttaaagtgataaccacaaagcaatgttttcttaatcactcataattttacatttgttagtagtcatcacaaggtttagagttccactgaaaaagtctcatttttacaaatgcaactcatgcactttccttcatggaccctttctctgtttaacacatgttaaaaaagtaaaacaaaattcttagtcaaaagttgacatgctatgtgaagcatataaattgtaaaattatcagtcttaaatacctagttgattctctttacaaaagaaacagtcatgtaatacatcag

SEQ ID NO: 5329 - DNA, 232 bp, Homo sapiens
aaacaagttagtattaatgcgttggcccacgtagcaaaaagatatttgattatcttaaaaattgttaaataccgttttcatgaaagttctcagtattgtaacagcaacttgtcaaacctaagcatatttgaatatgatctcccataatttgaaattgaaatcgtattgtgtggctctgtatattctgttaaaaaattaaaggacagaaaccataaaaaaaaaaaaaaaaaaa

SEQ ID NO: 5330 - DNA, 442 bp, Homo sapiens
  unsure (62): n=A,T,C or G
  unsure (66): n=A,T,C or G
  unsure (109): n=A,T,C or G
  unsure (120): n=A,T,C or G
  unsure (141): n=A,T,C or G
  unsure (170): n=A,T,C or G
  unsure (176): n=A,T,C or G
  unsure (185): n=A,T,C or G
  unsure (189): n=A,T,C or G
  unsure (202): n=A,T,C or G
  unsure (220): n=A,T,C or G
  unsure (230): n=A,T,C or G
  unsure (238): n=A,T,C or G
  unsure (241): n=A,T,C or G
  unsure (248): n=A,T,C or G
  unsure (250): n=A,T,C or G
  unsure (286): n=A,T,C or G
  unsure (311): n=A,T,C or G
  unsure (323): n=A,T,C or G
  unsure (352): n=A,T,C or G
  unsure (357): n=A,T,C or G
  unsure (358): n=A,T,C or G
  unsure (381): n=A,T,C or G
  unsure (387): n=A,T,C or G
  unsure (413): n=A,T,C or G
  unsure (420): n=A,T,C or G
  unsure (421): n=A,T,C or G
  unsure (424): n=A,T,C or G
acaagctttttttttttttttttttttttttttttttgattcttcagctaaaacagcggaanaggngatttattatatggttgttacactcggccacaaataaacacanaaatagtccanaatgtcacaggtccagggcanaggaccaacatgggcattttgtttatgancaaggngggtctcanaggngatcggcgatcanagggcgatgaagttctanatccattganacaagctntanacagtantntgcagtcccacaacttgtaccagcatccccagcgtntggcattccatgtttctgctcctgnggcctccacggngcaacaagctagcggtttacttggacctntgccnnatctttcttcttttgcgcttcancctgcncattcgcttcttcctccacttggctntcatggnncanaggtttccaaaaaaatgg

SEQ ID NO: 5331 - DNA, 114 bp, Homo sapiens
  unsure (37): n=A,T,C or G
  unsure (43): n=A,T,C or G
  unsure (78): n=A,T,C or G
  unsure (89): n=A,T,C or G
ctttttttttttttttttttttttttttttttcgggngcaaanattcactttatttattcattctcctccaacattancataattaaanccaaggaggaggaggggggtgaggt

SEQ ID NO: 5332 - DNA, 483 bp, Homo sapiens
  unsure (15): n=A,T,C or G
  unsure (17): n=A,T,C or G
aaatctttgcctttnanatacaggaaaaataatggcattaaattgctttaatttgcattattttagttatccagtttgcacatatttttataggtatcttaggcatcgattggtattttttaactgggccaagcccattaaggtctttcttctgttgggtgctatcattttctgattaagtctttttgactattgacatacagtctttcacagatggtggagtgtttttcccccaaatctgttgtttgtcttataatgttgtatatgaggttttatggtgtatgaatatgaatgcttctgtaatgtcaaacagatccctagtaaactccttcttcacttttactgtcagatttacaaaggtcctcccattgcaaagcagtgtttgtcctaatttatatattgtttttctagttcattttgtgtttccaacttttcatgtaaaattttaattatttttgaatgtgtggatgtgagactgaggtg

SEQ ID NO: 5333 - DNA, 319 bp, Homo sapiens
ccaagggtctctggtcacagtgccgaggtgggcctggcttttccacagtggagtccattgatgattacgtgaacgttccggagagcggggagagcgcagaagcgtctctggatggcagccgggagtatgtgaatgtgtcccaggaactgcatcctggagcggctaagactgagcctgccgccctgagttcccaggaggcagaggaagtggaggaagagggggctccagattacgagaatctgcaggagctgaactgagggcctgtggaggccgagtctgtcctggaaccaggcttgcctgggacggctgagctgggcag

SEQ ID NO: 5334 - DNA, 593 bp, Homo sapiens
ccacttttttttttctgtaaacctcaaatgaaacagaatctcacagatgtggggtccccctcctaattgtaataaacgttagagaaatgctccagaaaggaacaaagggagaccctctcagatcagcctaaaaccagagtggaatagggctcctctgggcggtttaagggcacagaaaggaccctcagctactcctggcctccccgggtctctttcccagaagacacaactttccaggctgccaaaagtaatagaagtcaaaaccctcaaaaccaccactgctctcgggaagtttttgagtaggatgaggaagaaagaagagagccctccttcattttgttacacgatctcaaggccaagagcaagtagaagatgtctaaagagaacaaaagaggtttcttcctggtactgtactacagatcagcaacagtttcgcagggaggcgttggctcaggttctggtacatttgaagataactgaaggccaagacttagccaaggaaggacaccagcagaacaactagatacactatcactactgcgagtgttagaatcatggggcagatttttttttttttaagctagggggacctc

SEQ ID NO: 5335 - DNA, 568 bp, Homo sapiens; identical to SEQ ID NO: 255

SEQ ID NO: 5336 - DNA, 485 bp, Homo sapiens; identical to SEQ ID NO: 254

SEQ ID NO: 5337 - DNA, 546 bp, Homo sapiens
ctggaactgaagcctgggtggactatggagccctggttgggacccccagggagtcaaaggctgcgggccaagaggccagaggtccttgagcctgggtgggcaggtggatctagggtgcatgacttgctgcttcccaaccttagtttgtcccttctgtgaaaaagggagagaaggaggaggaagatctcaaaaagactttccagcccagtgcggtggctcacgcctgtaatcccagcactttgggaggccgatgcaggtggatcacctgaggtaggagttcaagaccagcctgaccaacatagtgaagccccttctctactaaaaatacaaaattagctgggcgtggtggcatgtgcctgtactcccagctacttgggaggctgaggcaggagaatcgcttgaacctgggaggcggaggttgtagtgagctgagatcacaccactgcacaccagcctgggcgacaagagcgaaactccgtctcaaaaaaaaaaaaaaaaactgttgcagccccgttgagcctttgacaccgcctgaaatccacccca

SEQ ID NO: 5338 - DNA, 578 bp, Homo sapiens; identical to SEQ ID NO: 406

SEQ ID NO: 5339 - DNA, 475 bp, Homo sapiens; identical to SEQ ID NO: 4646

SEQ ID NO: 5340 - DNA, 450 bp, Homo sapiens
cgagcttctcgatcctcttggaggaatgggggtagtctttcctttgatgctgctgtggccctagcccgggaccgccaaaggactgaggctcaaggagttcggcgaacccagacctgtactgagggtggggattactgcctcatccccagaacctccccttgtagcatgatctctgcccattctcctcggccccttagctgcctggagctcccatctgaaggtgcagaagggtctggatcccggagtcgtcttagtctgccccccagagaaccccaggttcctgaccccctgttgtcctctcagcgcaggtcatatgcatttgaaacacaggctaaccctgggaaaggtgaaggactgtgattaggaccacagccctgggcaaaggggaccagcaagttgtcttgaatctccagggttcctgactagctgtctcctctgcagcatgagcag

SEQ ID NO: 5341 - DNA, 293 bp, Homo sapiens
cctacagcattccatcagtgtctttgcatcccaagtgtctgctttactgccacaaaggagctgatccagttcctccgggtagaagtactgaagatgactgagtgggaagactgattcaaatccatctctgaacgaatcaaattgcctagaaacgccttcatttagtgcccagaatataaccagtcttagatactcctctaaattgtggatagtgactggtatatccttccctcctttcttcagttcgatattgggaaaccctggcagagtgaaatccagtcctagatcttcaa

SEQ ID NO: 5342 - DNA, 525 bp, Homo sapiens
  unsure (472): n=A,T,C or G
ctggaatcagaaaagcagcaaataatggaaaagcattatggcttcaatgaaatacttaagcatatcaatgaattgtccatgaaaattgatgtggaagatatactctgcaaggcagaagcaatttctctacagatggtaaaatgcaaggaattgccacaagcagtctgtgagatccttgggcttcaaggcagtgaagttacaacaccagattcagacgttggtgaagacgaaaatgttgtcatgactccttgtcctacatctgcatttcaaagtaatgccttgcctacactctctgccagtggagccagaaatgacagcccaacacagataccagtgtcctcagatgtctgcagattaacacctgcatgatcactgttcttgcttttttgggaagagacactttgttgcaaccctttttcaagtacttgaaagttgaaaatttgaaatcttggtattgatcatgctttaaggnttatgtaaagaaagtgtactgatgttcttacattaaagctttacaaagattta

SEQ ID NO: 5343 - DNA, 429 bp, Homo sapiens
  unsure (107): n=A,T,C or G
tcaaccccaacttcgtggcgcgtatgatacctaaagtggagtggtcggcgttcctggaggcggccgataacttgcgtctgatccaggtgccgaaagggccggttganggatatgaggagaattaggagtttctgaggaccatgcaccacctgctgctggaggtggaagtgatagagggcaccctgcagtgcccggaatctggacgtatgttccccatcagccgcgggatccccaacatgctgctgagtgaagaggaaactgagagttgattgtgccaggcgccagtttttcttgttatgactgcgtatttttgttgatctataccctgtttccgaattctgccgtgtgtatccccaacccttgacccaatgacaccaaacacagtgtttttgagctcggtattatatatttttttctcattaaaggttt

SEQ ID NO: 5344 - DNA, 125 bp, Homo sapiens; identical to SEQ ID NO: 408
  unsure (81): n=A,T,C or G
  unsure (82): n=A,T,C or G
  unsure (89): n=A,T,C or G
  unsure (95): n=A,T,C or G

SEQ ID NO: 5345 - DNA, 637 bp, Homo sapiens
cctgtattatacgtgtcctcctgggggttggagatgatccctcaagtacacaaaggtcccctggcccttcatctgggaatcatatactccactctagctcccagaatctacagacctggctcctcggatctgaagcccagcacaaaataatctccccgtccaaggagcttgtggaacttgaattgggaactttggagtcttgtctcccatcccagcacattgaggatgtagttggtgaatggactcttccaggcatggagatcctccatcctaaaagtacctgcctccttcccagccatccctgacacattccagccagttggatctcacagcacagctatccacagggagactgggatgttcacgcagcactccattactcagtacctccatacccagccctatacgcagacccacaggtggggaaactgaggcaggaacagggttctgccctcccagagcctccactctgggatgccagaatggaaagccagagggaacctgagaatcatccagtcttactgtctcaatgtacatacggggaaactgaagccaggagaagaagagggagaaactgtccagggcctcacagggaggcattcatggagctggagaaaccagggatcctgaccgcagg

SEQ ID NO: 5346 - DNA, 412 bp, Homo sapiens
ctgacattgataccagatctgaattctacaaacacattgtgctttctggagggtctactatgtatcctggcctgccatcacggttggaacgagaacttaaacagctttacttagaacgagttttgaagggtgatgtggaaaaactttctaaatttaagatccgcattgaagacccaccccgcagaaagcacatggtattcctgggtggtgcagttctagcggatatcatgaaagacaaagacaacttttggatgacccgacaagagtaccaagaaaagggtgtccgtgtgctagagaaacttggtgtgactgttcgataaactccaaagcttgttcccatcatacccgtaatgctttctttttcctttattgccaatctttgaactcattcaactccaggacatggaagagg

SEQ ID NO: 5347 - DNA, 518 bp, Homo sapiens; identical to SEQ ID NO: 256

SEQ ID NO: 5348 - DNA, 440 bp, Homo sapiens
  unsure (175): n=A,T,C or G
  unsure (190): n=A,T,C or G
  unsure (358): n=A,T,C or G
tgcaaatggttctgctgaaacatctgccttggacacagggttctcgctcaacctttcagagctgagagaatatacagagggtctcacggaagccaaggaagacgatgatggggaccatagttcccttcagtctggtcagtccgttatctccctgctgagctcagaagaattaaanaaactcatcgaggangtgaaggttctggatgaagcaacattaaagcaattagacggcatccatgtcaccatcttacacaaggaggaaggtgctggtcttgggttcagcttggcaggaggagcagatctagaaaacaaggtgattacggttcacagagtgtttccaaatgggctggcctcccangaagggactattcagaagggcaatgaggttctttccatcaacggcaagtctctcaaggggaccacgcaccatgatgccttgg

SEQ ID NO: 5349 - DNA, 272 bp, Homo sapiens; identical to SEQ ID NO: 5253

SEQ ID NO: 5350 - DNA, 533 bp, Homo sapiens
aaaattctaagtatgcatgcaatctgtaaaaattccaatttaggatagctaaattcattacatttttttttttgcttatattaccttactattttacctgtctccttgttattaatagcaagacatatgttccttttagaaatgtttgattctcttatttgcttagaaatagaattcaatgagtgattaatgtacaccatgattcagaaaaacaaatgcaaatttccatacattaactctacacataatggcttgcaatattttatctaaaacattcattttattttccaattcttaaagatagtttttgctataggtggcatctctgtgaacgcagagctctaaattaaaactgccaaagcaacaaaagatataatatattgggactttataagctaagaaacataaatacaggcgggaaaaagcatagcttatgtagattgctgctgggttaaatgaatatgaattcacactaaaattgtcaatcagctacacatctctcaccaaatcattctttttggtcgtgcataatt

SEQ ID NO: 5351 - DNA, 387 bp, Homo sapiens
ttgttttatcactggacaagaaatgtattaggtttgatatttacaaagatgtttatgttgtctgctattttctattataggtttattcaaagagaatatcacctatagcataaataattaaatttttcaataaaaacaaactaaaaaaaccctagaaacatttgacatcaccaaattcaacagctctcactagaaatccaagcaataaacttagatatttgaaataaacataaattatgattatataactctaagtcacatacataattttgaattatggtaatagcactgtaaacatgaatacaaaggattacagttttatacagaattttttttgtttttcttcttttaggcttatttctccttgaaagaacagaatgatctttt

SEQ ID NO: 5352 - DNA, 440 bp, Homo sapiens
  unsure (150): n=A,T,C or G
  unsure (151): n=A,T,C or G
aaaaaacccacaaaatgctgattcagttcaaaattaatgcaaatgtttcaaaactgggtttctgatatttgtaaatgtgtttctttattagataagagtgtattaccattaaagtcattagtataatattgctttcaaaaagagatggtnnacaaaactataatccagcatcttttattgcattggaaagactggcaaagtcttttggatgggttgggagatgtggctggaaagtactttggaaaatatacaatcaagatatctcatggcatattaaaagaaaaatcttaatagcagtgttggcttttatttggattttttcatctcagttttttctgtggaatctccttcattggcattgttatttaatcataaacggggcagatgtctacttgttcagtttttcaaatctgttttcctgagtataaataagagtattt

SEQ ID NO: 5353 - DNA, 306 bp, Homo sapiens
aaatacaagtataattttggaaggggtatttgacaaattcagcattaactgccaactctatagacatgttttaacaaaaagcaaaacaaaacaaaacaaaaaaacaaaacaaggcatttactcttggccctttcagtacaggcgaagtgttctattgcatcacaagtgctagtgatgcagtaacagatccaagggcataatattaaatatgtttttttccaactgcgatttagttgaaaaataacataatacaaacatatattaatggctatcaagaccagcagtgatctgcagaatacctagagg

SEQ ID NO: 5354 - DNA, 347 bp, Homo sapiens
cctgtactgaagacagcaagctgttagtacagaccagatgctttcttggcaggctcgttgtacctcttggaaaacctcaatgcaagatagtgtttcagtgctggcatattttggaattctgcacattcatggagtgcaataatactgtatagctttccccacctcccacaaaatcacccagttaatgtgtgtgtgtgtgttttttttaaggtaaacattactacttgtaactttttttcttagtcatatttgaaaaagtagaaaattgagttacaatttgattttttttccaaagatgtctgttaaatctgttgtgcttttatatgaatatttgttttttatagttt

SEQ ID NO: 5355 - DNA, 603 bp, Homo sapiens
  unsure (13): n=A,T,C or G
  unsure (514): n=A,T,C or G
aaactagtaatanaattttctgaagaatatccaaataaaccaccaactgttaggtttttatccaaaatgtttcatccaaatgtgtatgctgatggtagcatatgtttagatatccttcagaatcgatggagtccaacatatgatgtatcttctatcttaacatcaattcagtctctgctggatgaaccgaatcctaacagtccagccaatagccaggcagcacagctttatcaggaaaacaaacgagaatatgagaaaagagtttcggccattgttgaacaaagctggaatgattcataatagacaactggtctgttaatctttttcatcattgttgtgtataatttacctctcattagaaaggctaacaaattttaagtgccacaggttttaaggattctgcagaaaaaaaagaaaaaagtccttcagtttagaacctacaaaagcttgtgtatcttgattaatgtactttttattgcatggtgtgaactaagttattgctgcataaatttgnaatatatcctgtttgtatttttttccaagtgtataatgttgggtgtggagttttcatgacagaatatacacattttgtaaatctgtact

SEQ ID NO: 5356 - DNA, 444 bp, Homo sapiens
aaagataccatctaccttactcaggtgatgcaggcccagtgtgtcaaaacagaaactgaattctaccgccgtagtcgcagcgagatagtggatcagcaagggcacacgatgggggcactttattggcagttgaatgacatctggcaagctccttcctgggcttctcttgagtacggaggaaagtggaaaatgcttcattactttgctcagaatttctttgctccactgttgccagtaggctttgagaatgaaaacatgttctatatctatggtgtgtcagatcttcactcggattattcgatgacactcagtgtgagagtccatacatggagctccctgtggcccgtgtgctctcgtgtgactgaacgttttgtgatgaaaggaggagaggctgtctgcctttatgaggagccagtgtctgaattgctgaggagatgtgggaat

SEQ ID NO: 5357 - DNA, 332 bp, Homo sapiens; identical to SEQ ID NO: 4110

SEQ ID NO: 5358 - DNA, 640 bp, Homo sapiens
  unsure (616): n=A,T,C or G
ccaacatggtgaaaccccatctctactaaaaatacaaaaattagccgggcatggtggcagttgcctgtaatcccagctactcaggaggctgaggcaggagaatcgcttgaacctgggaggcggagatttgcagtgagccgagatcacgccattgtactccagcctgggcaacagagagagactcagtctcaaaaaaataaaaattaaaaagtaagcatgtcttattgtttatttttccccagtgctaaaaatgactattttgaaacaatgctgatagagtttacagttcaatttttactttgaggtactaattttgcatttggccggatgctcttaaaaattaaaaagtagacatgtcacctagtaatatgcctattttaattttctaagaagttttgttaaaaattctattaaaatatacatatcctagttaccaatcacattcatacagagaaaatgaacattaaacatattactgtacaaacaatttggacttcagttccagctttggagtcccctccattctattaattagggtgataaacatggcatttagcagggaattaactgtggataccagcacatgcctaagatctaaacaactgaaaaagtattnaagagttctactttggagcagagt

SEQ ID NO: 5359 - DNA, 562 bp, Homo sapiens; identical to SEQ ID NO: 346

SEQ ID NO: 5360 - DNA, 416 bp, Homo sapiens
cctagtatgaggagcgttatggagtggaagtgaaatcacatggctaggccggaggtcattaggagggctgagagggcccctgttaggggtcatgggctgggttttactatatgataggcatgtgattggtgggtcattatgtgttgtcgtgcaggtagaggcttactagaagtgtgaaaacgtaggcttggattaaggcgacagcgatttctaggatagtcagtagaattagaattgtgaagatgataagtgtagagggaaggttaatggttgatattgctagggtggcgcttccaattaggtgcatgagtaggtggcctgcagtaatgttagcggttaggcgtacggccagggctattggttgaatgagtaggctgatggtttcgataataactagtatggggataaggggtgta

SEQ ID NO: 5361 - DNA, 287 bp, Homo sapiens
aaatctttaatcctttgattaagcagcaagcatatcactcttccaggccaaacactgcttaaacaaaaaagaaaaataatgacgtgcaaaatatttacaaaatatgcaaagcacacaataaagacatctcactatatacatgtgtcatattactaatgaagctaacgtttttctactgtgtgctctaatgcatgtaaatcaaattacagcacatccctcagatacagcaccttggcccatgtctgggatagaagagattttttaatgaatcacaatatactgaacag

SEQ ID NO: 5362 - DNA, 334 bp, Homo sapiens
cctggcctcttcagagtaccccccattccactttccctgcctccttccttaaatagctgacaatcaaattcatgctatggtgtgaaagactacctttgacttggtattataagctggagttatatatgtatttgaaaacagagtaaatacttaagaggccaaatagatgaatggaagaattttaggaactgtgagagggggacaaggtggagctttcctggccctgggaggaagctggctgtggtagcgtagcgctctctctctctgtctgtggcaggaggcaaagagtagggtgtaattgagtgaaggaatcctgggtagagaccattctcag

SEQ ID NO: 5363 - DNA, 420 bp, Homo sapiens; identical to SEQ ID NO: 644
  unsure (343): n=A,T,C or G
  unsure (404): n=A,T,C or G

SEQ ID NO: 5364 - DNA, 452 bp, Homo sapiens
  unsure (103): n=A,T,C or G
aaaaatctatttatttatcaaaacagtattggcacagtaattctcatattatcatcaaataataaaattgctactttctgtactcaattctttagaatcctanaaattgcaaatgcattcaatttaacaatattgtaaataacaatacaaaagaaagaactctgcatatttatggaaacattgttgatggtacagttctactgaaactcatacacatttcactatttaatttacatatggtcttgttgaaaaaaaccagtatgttttactttttcaatttccttatgctaaaatacatgtaattctaaaggatatctcttaggtgttataaaaaccaaggaaggtccaccaccaagtcaaagttagagtcaaagatacttcaaagattccatgaaatgatctgaaaacaaatttaaccaaaaaatgtgtactgtattggggcacatccatgg

SEQ ID NO: 5365 - DNA, 549 bp, Homo sapiens
ccacagaagttgctgctgacgctctgggtgaagaatggaagggttatgtggtccgaatcagtggcgggaacgacaaacaaggtttccccatgaagcagggtgtcttgacccatggccgtgtccgcctgctactgagtaaggggcattcctgttacagaccaaggagaactggagaaagaaagagaaaatcagttcgtggttgcattgtggatgcaaatctgagcgttctcaacttggttattgtaaaaaaaggagagaaggatattcctggactgactgatactacagtgcctcgccgcctgggccccaaaagagctagcagaatccgcaaacttttcaatctctctaaagaagatgatgtccgccagtatgttgtaagaaagcccttaaataaagaaggtaagaaacctaggaccaaagcacccaagattcagcgtcttgttactccacgtgtcctgcagcacaaacggcggcgtattgctctgaagaagcagcgtaccaagaaaaataaagaagaggctgcagaatatgctaaacttttggacctcg

SEQ ID NO: 5366 - DNA, 471 bp, Homo sapiens
atcactaagtcaagttctttacttcccagaagtgatggctaaggggagggaggagggtgagaagaggaagacagaaagagccagagagaatgaggaggtgagaagggggggacagtaaaccactgttctatgaagtctcacgaggcaagtgctcaaggtaaaaaaagagtcctggagaatcgtccacggctgcgggaagcatctcggtttccttctgcttttaagtcctctcagggaaggctgtcgccgctaccgctgcattaaatagttatgtacatcgcagagagtcccaggccatgggcaggtgggggaggggcgtcatttcaccaggggccgagttttatcatcgtcaccgcactggtgagctttgtactttttcacttctgccatgtacttggcccacgcgtcacctttacttgttaatacctcatcctccgtcttctgcttcttggctactattcccgtcttgag

SEQ ID NO: 5367 - DNA, 152 bp, Homo sapiens
ccaattgaaacaaacagttctgagaccgttcttccaccactgattaagagtggggtggcaggtattagggataatattcatttagccttctgagccttctgggcagacttggtgaccttgccagctccagcagccttcttgtccactgcttt

SEQ ID NO: 5368 - DNA, 574 bp, Homo sapiens
aaagaaaaaggtgtttatttaggccatcaactaggatcataataaataacgtaatatactaatgtaataacagatcttctcatgcatttatcgtgtttataaatatagaagaaagctggcttacagggctgttgggacaaatttggaaaagtgtatttggcaattacacagtaaaagttaacagtgttgactatcagattctcttttctgtcagtttttagaatacatcccctatacatctgtgaataaatggtaatggtctcttagagtttctactttttgtgaacatgccagagttaagtaaattgtcaaaggatccaggttgacaatgtgttatttgtcaatatttctaatgaaaaacagatcttagaaaaatgaactcttctgcatttcattgtagaggctgatatattacaagccggaatcattcaaacaataaaaaaagtgcctcaatgaaataaaacccaaaagtagtttatcaatagtaactgtgatacttaatatacaaatgctgtagtattgcgtttgtaatttggtaagtaaatgaccaagtatctgaatgcaaaagtgatga

SEQ ID NO: 5369 - DNA, 446 bp, Homo sapiens
  unsure (409): n=A,T,C or G
aaacaagttttttttagtgtttgtacacaatttgtcaatttttcaatattcaattttctgtacaggtacttttgggacaattcttatagttacataatgtgaattcatcaaaatgcagttaagaaacttacaggaatatatacacttgaacccaagacccaaacctgacattatatacaacctatttacaaatacatatggacagacaatatatgtacatagattatcataaatattgaaaaataggttagctttaatggattaatgttgttctataaataacattacagttgtaactgaaacatccacggaagacagtaatgcaaaatgaggtgacaagacagtggttttaatactgaagactgctcattaatgtgaggaagctcctccaatcctctggctatttaangttcaaaatcaagtgcctagggaaaattccaatggat

SEQ ID NO: 5370 - DNA, 565 bp, Homo sapiens; identical to SEQ ID NO: 204

SEQ ID NO: 5371 - DNA, 367 bp, Homo sapiens
aaagttgaactaagattctatcttggacaaccagctatcaccaggctcggtaggtttgtcgcctctacctataaatcttcccactattttgctacatagacgggtgtgctcttttagctgttcttaggtagctcgtctggtttcgggggtcttagctttggctctccttgcaaagttatttctagttaattcattatgcagaaggtataggggttagtccttgctatattatgcttggttataatttttcatctttcccttgcggtactatatctattgcgccaggtttcaatttctatcgcctatactttatttgggtaaatggtttggttaaggttgtctggtaataaggtggagtgggtttggg

SEQ ID NO: 5372 - DNA, 519 bp, Homo sapiens
ctggcttttcgatataaagagaattctaaagtggatgacaaatgggaaaagaaatgccagaagattttttcatttgcccaccagactatcagtgctttgatcaaagcagagctggcagaattgcccttaagactttttcttcaaggagcactagctgctggggaaattggttttgaaaatcatgagacagtcgcatatgaattcatgtcccaggcattttctctgtatgaagatgaaatcagcgattccaaagcacagctagctgccatcaccttgatcattggcacttttgaaaggatgaagtgcttcagtgaagagaatcatgaacctctgaggactcagtgtgcccttgctgcatccaaacttctaaagaaacctgatcagggccgagctgtgagcacctgtgcacatctcttctggtctggcagaaacacggacaaaaatggggaggagcttcacggaggcaagagggtaatggagtgcctaaaaaaagctctaaaaatagcaaatcagtgcatg

SEQ ID NO: 5373 - DNA, 205 bp, Homo sapiens
ctgtggatttcaaaacacagtgtattctagatcatctaagatccatgctgatttttattgcacaagaattaggtttgaactcttgagctggaacctcagcaaactagagtatatattgttcagtatttctttggaaacatttcattaatgtacttgtcttacagaaatttctgaactttagtaaaaaaaataaagttaaactttt

SEQ ID NO: 5374 - DNA, 332 bp, Homo sapiens; identical to SEQ ID NO: 4110

SEQ ID NO: 5375 - DNA, 90 bp, Homo sapiens
  unsure (10): n=A,T,C or G
  unsure (13): n=A,T,C or G
aaataactcnctnaaccctgcccattaagatcacggtaaacatacaataatttttattatggaaattaatctttacatacaaaatcagct

SEQ ID NO: 5376 - DNA, 408 bp, Homo sapiens
  unsure (165): n=A,T,C or G
ctgtgcaagaaaaattaaatgaaatagtagatcagataaaaactagaagagaagaagaaaagaaacaaaaagaaaaagaagcagaagaagctgaaaagcaattattccatggtactccagttacaattgagaatttcttaaattggaaagccaagtttgatgcanaactcttggaaattaaaaagaaaaggatgaaagaagaagaacaagcaggaaaaaataaattaagtgggaaacaactatttgaaacagatcataatcttgacacatctgatatccagttcttggaggatgctggaaacaacgtggaggtagatgagtctttgttccaagaaatggatgacttggagctggaggatgatgaagatgatccagactataatcctgctgacccagagagtgactcag

SEQ ID NO: 5377 - DNA, 238 bp, Homo sapiens
  unsure (34): n=A,T,C or G
  unsure (79): n=A,T,C or G
  unsure (104): n=A,T,C or G
  unsure (127): n=A,T,C or G
acaagcttttttttttttttttttttttttctanaaaaatttaacaggtttatttataattattataaagttgaaccgntaaaacttgttcactgaaacatttnaacttgcattaatgctttacgtntccgcatttatattaaaaattcacacacaaatgaaaatggaaaaactgccaatacctgatttctgtcccctatttttccactcgcaatcatatacttaggtaccttttggc

SEQ ID NO: 5378 - DNA, 342 bp, Homo sapiens
ctgctgatacccaggcagtagctgatgctgtcacccaccagctcggtttccacagcattgaactgaatgagcctccactggtccacacagcagccagcctctttaaggagatgtgttaccgataccgggaagacctgatggcgggaatcatcatcgcaggctgggaccctcaagaaggagggcaggtgtactcagtgcctatggggggtatgatggtaaggcagtcctttgccattggaggctccgggagctcctacatctatggctatgttgatgctacctaccgggaaggcatgaccaaggaagagtgtctgcaattcactgccaatgctctcgctttgg

SEQ ID NO: 5379 - DNA, 397 bp, Homo sapiens
  unsure (130): n=A,T,C or G
  unsure (131): n=A,T,C or G
  unsure (142): n=A,T,C or G
  unsure (185): n=A,T,C or G
  unsure (286): n=A,T,C or G
  unsure (293): n=A,T,C or G
  unsure (304): n=A,T,C or G
  unsure (305): n=A,T,C or G
  unsure (306): n=A,T,C or G
  unsure (320): n=A,T,C or G
  unsure (363): n=A,T,C or G
gaaaagccttgtaaatgcctatattgtgggcttttaacgtatttaagggaccacttaagacgagattagatgggctcttctggatttgttcctcatttgtcacaggtgtcttgtgattgaaaatcatganngaagtgaaatngcattgaatttcaagggaatttagtatgtaaatcgtgccttanaaacacatctgttgtcttttctgtgtttggtcgatattaataatggcaaaatttttgcctatctagtatcttcaaattgtagtctttgtaacaaccaaatnacctttngtggtcactgnnnaattaatatttggnagacagaatccatgtacctttgctaaggttagaatgaataatntattgtatttttaatttgaatgtttgtgcttttt

SEQ ID NO: 5380 - DNA, 314 bp, Homo sapiens; identical to SEQ ID NO: 3212

SEQ ID NO: 5381 - DNA, 332 bp, Homo sapiens; identical to SEQ ID NO: 347

SEQ ID NO: 5382 - DNA, 330 bp, Homo sapiens
caaaactttttatatcaaaaggctttgcacatttctatatgagtgggtttactggtaaattatgttattttttacaactaattttgtactctcagaatgtttgtcatatgcttcttgcaatgcatattttttaatctcaaacgtttcaataaaaccatttttcagatataaagagaattacttcaaattgagtaattcagaaaaactcaagatttaagttaaaaagtggtttggacttgggaacaggactttatacctcttttactgtaacaagtactcattaaaggaaattgaatgacaaaaaaaaaaaaaaaaaaaaaaaagcttgta

SEQ ID NO: 5383 - DNA, 570 bp, Homo sapiens
cttttgtaaagagaatcaactaggtatttaagactgataattttacaatttatatgcttcacatagcatgtcaacttttgactgagaattttgttttactttttaacatgtgttaaacagagaaagggtccatgaaggaaagtgtatgagttgcatttgtaaaaatgagactttttcagtggaactctaaaccttgtgatgactactaacaaatgtaaaattatgagtgattaagaaaacattgctttgtggttatcactttaagttttgacacctagattatagtcttagtaatagcatccactggaaaaggtgaaaatgttttattcagcatttaacttacatttgtactttagagtatttttgtataaaatccatagatttattttacatttagagtatttacactatgataaagttgtaaataattttctaagacagtttttatatagtctacagttgtcctgatttcttattgaatttgttagactagttctcttgtcctgtgatctgtgtacaattttagtcactaagactttcctccaagaactaagccaacttgatgtgaaa

SEQ ID NO: 5384 - DNA, 356 bp, Homo sapiens
caagcacatccttgctaatttcaaaaactaccagttctttattggtgaaaacatgaatccagatggcatggttgctctattggactaccgtgaggatggtgtgaccccatatatgattttctttaaggatggtttagaaatggaaaaatgttaacaaatgtggcaattattttggatctatcacctgtcatcataactggcttctgcttgtcatccacacaacaccaggacttaagacaaatgggactgatgtcatcttgagctcttcatttattttgactgtgatttatttggagtggaggcattgtttttaagaaaaacatgtcatgtaggttgtctaaaaataaaatgcattt

SEQ ID NO: 5385 - DNA, 397 bp, Homo sapiens
  unsure (155): n=A,T,C or G
  unsure (156): n=A,T,C or G
ctgtcggaattaaaggatcagatgacagaacaaaggaagcagaaacaaagaattggtcttctaggacatcctcctcacatgaatgtcaacccacaacaaccagcataagcaaatgaaagaaaggaattgtatttaccttttataattattattanngtgggtatggctaatgagttctgattcacccacgaaggttacatttatgctgaatacatttgtaaatactcagttttatactgtatgtatatgattgctactctaaaggtttggatatatgtattgtaattagaattgttggcatgatgacatttcatttgtgccaaaaatattaaaaatgccttttttggaaggactaacagaaagcacctgatttgcacttgaaccagattatagattt

SEQ ID NO: 5386 - DNA, 314 bp, Homo sapiens
  unsure (12): n=A,T,C or G
  unsure (13): n=A,T,C or G
  unsure (14): n=A,T,C or G
  unsure (43): n=A,T,C or G
  unsure (45): n=A,T,C or G
  unsure (46): n=A,T,C or G
  unsure (56): n=A,T,C or G
  unsure (57): n=A,T,C or G
  unsure (94): n=A,T,C or G
  unsure (102): n=A,T,C or G
  unsure (114): n=A,T,C or G
  unsure (115): n=A,T,C or G
  unsure (135): n=A,T,C or G
  unsure (181): n=A,T,C or G
  unsure (252): n=A,T,C or G
  unsure (270): n=A,T,C or G
gaaagtggtggnnntgatctttttatttagaaacccacaaaancnnaaacacagtnnaaataaaacagaaatcaaactataagttgacttttanttcctaanaagaaacatatnncaaaagcaagtggaatctanaattcttataacatgaataacaaaatgtacagcaagcctatgtagntcaattaatatataaggaaaaggaaggtctttcttcatgatacaagcattataaagtttttactgtagtantcaattaatggatatttncttgttaataaaattttgtgtcataatttacaaattagttcttt

SEQ ID NO: 5387 - DNA, 499 bp, Homo sapiens
  unsure (19): n=A,T,C or G
  unsure (20): n=A,T,C or G
aaaagttgtattcgtctcnnattcaaaatattatcacacaggtgatttatcttaaaaatccatgtgagtactgacctatatgtcattttttgcaaatctaaaacaaaaatatttcaaaatgttcagtggcagagagtactggtaccacaaaatcagagcagtagaagcaaaggggatataagatgtggacattttgtagcttgaggagatggcacctagggaaaagagaattaagtgtttatttgggaaaatgttaatgatatacacagaacataggagctggaataaagaaggcatgcttaggttatagcaaggtatactcctggcctaaaatatcaccatctttctctgcatgcctgggacaaagtaagaatgggggcagaaaaaaagggaagactgagaacacagagcacttagtctacttattagcaaaaataaagtgagattttctaaaatcaggtataatgtcatctgcctctccaaaaaactgttctttttg

SEQ ID NO: 5388 - DNA, 570 bp, Homo sapiens
ctgtagctttttcattcagaaactggagaccatcttttcactgagttgttattccttcctcttcccttagcttagggatatgttgaaaaaggcttttcaacaagtattttattttttacaagttgctatgaaattaaaatttatatatatatcttaagtgtttataaagcactcaaaattgtagcttacatgtatatgacttctgaaaataaaaatcacacttctaacataatctttctgctctgcaaaaatattctacatacatgcatatgatcaaaacaatcttttcatgtttggggtatttcttacacatagtaaaagaaaagtcaacaattgtatcagtacttcccctgttaagataactgagtgccacctagtgttcaatttctgcaactactaagcttacaaattcaatactgctattaaaacccaggttctgaaaacggcattttggaaatctttttttttttttttttatgtttacggtggcaaaatacgactatgaaaagaacatgatatcaaaatcagtataaaaatagccacaggctacttaaatatgacaaacagact

SEQ ID NO: 5389 - DNA, 453 bp, Homo sapiens
tttttttttttttggtgggttttggggatgtttaccctattgttttttatttggatgccctaaggcatataaagcgcatagtgaattacctactggaatgtaaatggttctaaaattaaaactgttaaaatagaaagagggaaaaggaaggcccaagaactcttaaagagaggctgagaacaagaacaaaaaaacccagaagtgtaggtaatacataacagcgcagacagaaccgttgtaggccatgtataataaataatgcatgccccaaatttcagttaatcatataatttcaacttgagttctaatactggaaccagccaaccacttgggcttcaacactgtactagatgtcagtagaatcgcttgatggaattacagccttgttacagttgagatcaagagagggtgcttttttttttccttcttttattaaagctatcattccaggct

SEQ ID NO: 5390 - DNA, 520 bp, Homo sapiens
aaattggctttgcccgcttcagtagtcacaggtagctacctgaccgagaagccgacttgggaattactgttacttgtgggtgatactgtcataaaggggttgaaagtacttgttagctgtatatgtcagaattgattaaagagaaccaactattcttgtgcaagggatggtattgtagttaattatgacatttggagaaactaatttctgtctgtcgacactatctctgttccatttagacttagagacttacatgggcaatgcttgactttttgcattcagcacagaaagttaagtaatccactgtggtaaaatattaactaaatttatatgacttcttgactgctgtaagtagagaatatttatcatataagcaccattttcctgaattttttgttactgcatattttatcttactgtcactattgtgtaaaatctttgaaaggaaaatgaatactgtgtaatagttaaacccattcataggttgcaatagagtgtcagccaaatgtgtcatacatca

SEQ ID NO: 5391 - DNA, 519 bp, Homo sapiens
ctggcctgtcatataaaacatactgtcattgagcttaagctccgcttgttctgaggtttcacctccatgtgtttcattggtgcaaaagtggatctcttagttggtcacttaattctttctttttcagaaagatagtatgttcactggtatatttggtcactcttagaaccttccttcacattgttttttatgggacccatgaatggttagcctttcttttctattgtagaaggaaataaataggagtaaaaagaccattgtagtaaataagttcaaggggaacttgggaccagaaaccactgttatgtacaaaaaatggcaaattcaataaactcaaatttaaaataatttttaaattaacagttatgataaattttatattttatacaaatagattgcttagaatggttctcaagaattataagagaaatgaactcacagtacaaaaattttataattactatacttgtgttttgtttgggggctgggaaatgtatttttacattgtagccaatcatt

SEQ ID NO: 5392 - DNA, 522 bp, Homo sapiens
  unsure (35): n=A,T,C or G
  unsure (121): n=A,T,C or G
  unsure (159): n=A,T,C or G
  unsure (175): n=A,T,C or G
  unsure (193): n=A,T,C or G
  unsure (237): n=A,T,C or G
  unsure (241): n=A,T,C or G
  unsure (245): n=A,T,C or G
  unsure (272): n=A,T,C or G
  unsure (297): n=A,T,C or G
  unsure (303): n=A,T,C or G
  unsure (360): n=A,T,C or G
  unsure (372): n=A,T,C or G
  unsure (379): n=A,T,C or G
  unsure (384): n=A,T,C or G
  unsure (470): n=A,T,C or G
  unsure (482): n=A,T,C or G
  unsure (495): n=A,T,C or G
  unsure (496): n=A,T,C or G
  unsure (498): n=A,T,C or G
  unsure (521): n=A,T,C or G
caagctttttttttttttttttttttttttttttnattcaatttcctttaatgagtacttgttacagtaaaagaggtataaagtcctgttcccaagtccaaaccactttttaacttaaatnttgagtttttctgaattactcaatttgaagtaattctntttatatctgaaaaanggttttattgaaacgttngaaattaaaaaatatgcattgcaagaagcatatgacaaacattntganagtncaaaattagttgtaaaaaataacatantttaccagtaaacccactcatatanaaatgngcaaagccttttgatataaaaagttttgtacaccaagcacctatttttataacttancttcccatgganagataanggctngcgtgcattttatgtatccataacatacatacaaggctcggtcttttcaatgggataacagttcacaactcttcgatttgaattgnaatgaatctggngacaaggattttnntntaatggattccaaagttagccana

SEQ ID NO: 5393 - DNA, 336 bp, Homo sapiens
ctgtgttatttgatttcttgcttttcggagctccttaagaattacaagcaattgatgctgcacatgttgacggtcgagtttttcattttcaaagtctaaagtacatgcctgcatctgttgttccaacagagctacccttgtttgttcttcttgctgctttagcagagatgtgtaaagaaactggacctgagataagagctcttcggatctcttcttctcttcttcaagttttcccctagcaatatcattctcttccctgagtttttgtatcttctctgttttatgcctatcatcttccagatgttgcacatctgcccttctttgtgaatacaacag

SEQ ID NO: 5394 - DNA, 275 bp, Homo sapiens
aaatcctttactaattatataatttgaaagcaaaaagaagggcctatattaaatgctgaaagtgaaaagtgatgacattattagcagacactgcttaaaggagaccatttgtagcagttggcttaacctcaacttctaaaactacattgaaaatgtaaatacatagcttagttttttgtaatatatggtgacttcagatttttttgtacagtattttgaatgtgagatgattgtcaggactaactgcctttttaacaaaacattttcagtatttt

SEQ ID NO: 5395 - DNA, 168 bp, Homo sapiens
ctgcggagcatgtcgaccccggcccggaggaggctcatgcgggatttcaagcggttacaagaggacccacctgtgggtgtcagtggcgcaccatctgaaaacaacatcatgcagtggaatgcagttatatttggaccagaagggacaccttttgaagatggtactttt

SEQ ID NO: 5396 - DNA, 126 bp, Homo sapiens; identical to SEQ ID NO: 348
  unsure (3): n=A,T,C or G
  unsure (14): n=A,T,C or G

SEQ ID NO: 5397 - DNA, 469 bp, Homo sapiens
cctcaggcaaattatagtcaaatacatcacccccctcaggcatctgtggcaaggcatccctctagagaacaactaattgattacttgatgctgaaagtggcccaccagcctccatatacacagccccattgttctcctagacaaggccatgaactggcaaaacaagagattcgagtgagggttgaaaaggatccagaacttggatttagcatatcaggtggtgtcgggggtagaggaaacccattcagacctgatgatgatggtatatttgtaacaagggtacaacctgaaggaccagcatcaaaattactgcagccaggcgataaaattattcaggctaatggctacagttttataaatattgaacatggacaggcagtgtccttgctaaaaactttccagaatacagttgaactcatcattgtacgagaagtttcctcataagcactgtggacaaaaaaagcgggga

SEQ ID NO: 5398 - DNA, 408 bp, Homo sapiens
  unsure (274): n=A,T,C or G
atcccattgaaaagaccgagccttgtatgtatgttatggatacataaaatgcacgcaagccattatctctccatgggaagctaagttataaaaataggtgcttggtgtacaaaactttttatatcaaaaggctttgcacatttctatatgagtgggtttactggtaaattatgttattttttacaactaattttgtactctcagaatgtttgtcatatgcttcttgcaatgcatattttttaatctcaaacgtttcaataaaaccatttttcanatataaagagaattacttcaaattgagtaattcagaaaaactcaagatttaagttaaaaagtggtttggacttgggaacaggactttatacctcttttactgtaacaagtactcattaaaggaaattgaatgat

SEQ ID NO: 5399 - DNA, 307 bp, Homo sapiens
ctgagggtctccgcaggaacaccatcacccggcatgactgccaagtcccaggtctgtctggaagccagcgggaggatcagcatcctgccccctttggtccatcctgtgggctgtggggaccaggcccctgctactcaaggccaaggtaggaaacagtctttcctgttttcttcagggttgcaagcagagtgtccatgctgtgctcagattcaatgcagaccttcttgttgggcaggtcaatgtcatacttaactccggcatgactgaggcagcggcggtgtggcggcggtgtggcggcggtgtcagc

SEQ ID NO: 5400 - DNA, 350 bp, Homo sapiens
ccttcactgcccctccagtttttatagacctgaggttccagtgtctcctggtaactggaacctctcctgagggggaatcctggtgctcaaattaccctccaaaagcaagtagccaaagccgttgccaaaccccacccataaatcaatgggccctttatttatgacgactttatttattctaatatgattttatagtatttatatatattgggtcgtctgcttcccttgtatttttcttcctttttttgtaatattgaaaacgacgatataattattataagtagactataatatatttagtaatatatattattaccttaaaagtctatttttgtgttttgggcattttt

SEQ ID NO: 5401 - DNA, 620 bp, Homo sapiens
  unsure (12): n=A,T,C or G
  unsure (396): n=A,T,C or G
  unsure (421): n=A,T,C or G
  unsure (594): n=A,T,C or G
agaatggcaacngacaccaagtactttgtagagattgacttcctaagctacttaagacaacttgcatcactaagaaaaaaatgtagaaccatttggaaaaatgaaatttagtagttccaagtttcaaagaaatgtcaacattttattccattcaataaagaacaaaaccaatagtgtttttattactttcatctgaaacattccatgttttaatctgagccttgcagactttcatttggagtttgaacccgttttggttgcatttcatttttggagaacttaattaacgtgagattggcaattgaaatgcaggtgcagttttctgttaatgtcatgctgttgttttaggtaataagaaatattaagtaattggctttagattttgtaatttttttnccctgagtttcctgctagatttcgnattctagtagtcaatgtattttcagtgaaatgcaaaaatattcccattatcttttgaccagtattaatttttgagatcttactgcttgtcacttgaatcccgtgattgtcatacatctctggtataagcaacatttgatttttgaagtgtgtagaccatctcttcatattttncagatgtaattttacatttctgcatt

SEQ ID NO: 5402 - DNA, 408 bp, Homo sapiens
aaacttaaggaaagagtgggaaagtgagggcaaaataatcctatggtgaaaaaaatcaacaagataatctctgcttgagaaaaaggaccaaagacaagtgaattttctgagggtgatgaaagtgttgcttcgaaaaggggcgaagtttatatgggtctatttatttgtctaacatgtacagttaaggtttatgccttgcaatgtatgtacatcttcacaaaaaaaatcttaaaaaaattaaatgggtgggggtagggaaagggttgaagtatagatgaagcagaagtggtacatgattagtagttgaagctgggggcaggtctatatattttatttttatgtctttaatagcatttgtataaatgtacaatattcgtttacaatgttagctcaggatcttgtttacct

SEQ ID NO: 5403 - DNA, 314 bp, Homo sapiens; identical to SEQ ID NO: 3212

SEQ ID NO: 5404 - DNA, 147 bp, Homo sapiens
agaatcattttgttctttactaacaataatttgaaaattggtaatttaatatcttgtgaatatgaaaatattatggtatagattagcttctaggagaagttaagtgtagcatgatttcttgaagattaaaaaaacatttaacttttt

SEQ ID NO: 5405 - DNA, 524 bp, Homo sapiens
ccaattatttccaatttttattttattcttaaaacttaagcatggtaaaatgttaagctgttttcatccactgatattattctactataaaaagcccttcttgagcagatttgatgataaaaaggagaacatttctaaggtataattagagaagctgttgcatgagaaatcatgtctccatctccattttgctatgcgttatctgaggattgtttctgaaagagatctatttaggcagtgtatgtatgtgtcagcatgtaaaaagtaaagaactgaaaatagacaaaccttgtaaatgcacttcaaaaccaattgtggctcaagtgtaggtggttccccaaggctggtaccaatgagactggggtttgggaattagttggtcatcatccctcctgctgcccagcagtggtcagtcatttttcatgagggatggactaggaaaatgaagtgtctattataaggagagttcctgtaacttaaggagcaagctcactacaaaacccagctacctgcttatcgtagtg

SEQ ID NO: 5406 - DNA, 526 bp, Homo sapiens
ccacagaagttgctgctgacgctctgggtgaagaatggaagggttatgtggtccgaatcagtggtgggaacgacaaacaaggtttccccatgaagcagggtgtcttgacccacggccgtgtccgcctgctactgagtaaggggcattcctgttacagaccaaggagaactggagaaagaaagagaaaatcagttcgtggttgcattgtggatgcaaatctgagcgttctcaacttggttattgtaaaaaaaggagagaaggatattcctggactgactgatactacagtgcctcgccgcctgggccccaaaagagctagcagaatccgcaaacttttcaatctctctaaagaagatgatgtccgccagtatgttgtaagaaagcccttaaataaagaaggtaagaaacctaggaccaaagcacccaagattcagcgtcttgttactccacgtgtcctgcagcacaaacggcggcgtattgctctgaagaagcagcgtaccaagaaaaataaagaagaggctgcaga

SEQ ID NO: 5407 - DNA, 349 bp, Homo sapiens
aaagagtaaactgaaaaattatgaaggatttttcccagtaatgcatagccttcattaattatttttttaataaataaactagtttagcattttttttttttaaccctacaaaatgctactattcatcatgtcttatttaaggtagccttttattctgattaattaagatacatctttaagggttattctggtggtaagaacatttatcttgacttatgtttaatttttttaatgctttggcagatgaagtaacgtttgaaaactgtttgtgaaaatagtatgagactggaaagattacgtcgtggtaaaagtttcacagttttccaggtatttccttatactgaagagg

SEQ ID NO: 5408 - DNA, 201 bp, Homo sapiens
cctagcctccattttatttatttgttctgcaaattcgatgcgtctaccttcaaataaagcgttcatttttctctgtgactcttctattagtttttgggtagctggacacattcttccaggaatataaaacaaatggggctttgtcttagttcttatatatttaattattttggcattatgttcattccattcttcttgcag

SEQ ID NO: 5409 - DNA, 246 bp, Homo sapiens
aaatatttgtgactctttcctaaagccaaagtttctgttgaattatgttttgacacacccctaagtacaaggtggtatggttgtatacacatgctgccttcttggggattcaaaaacaggtttttgattttgaatagcaattagtgatatagtgctgtttaagctactaacgataaaaggtaataacattttatacaatttccatatagtctattcattaagtaatctttttacagttgcatcagg

SEQ ID NO: 5410 - DNA, 307 bp, Homo sapiens
  unsure (236): n=A,T,C or G
aaaaaattaacagccaagtcacaaaggtaatggattgcacatagactaaggaataaacttcagatttgtgatttttgtttctaatcttgatgtaaatttacactatttataaatacatatttattgcttgaaaatatttgtgaatggaatgctgttattttttccagatttacctgccattgaaattttaaggagttctgtaatttcaaacactactcctattacattttctatgngtaaataaaactgcttagcattgtacagaaacttttattaaaattgtttaatgtttagaaaaaaaaaaaaa

SEQ ID NO: 5411 - DNA, 331 bp, Homo sapiens
aaatagaaaacagtatattgaaagtggtgggtttgatctttttatttagaaacccacaaaatcagaaacacagtacaaataaaacagaaatcaaactataagttgacttttagttcctaaaaagaaacatatttcaaaagcaatggaatctagaattcttataacatgaataacaaaatgtacagcaagcctatgtagttcaattaatatataaggaaaaggaaggtctttcttcatgatacaagcattataaagttttactgtagtagtcaattaatggatatttccttgttaataaaattttgtgtcataatttacaaattagttcttt

SEQ ID NO: 5412 - DNA, 251 bp, Homo sapiens; identical to SEQ ID NO: 4543

SEQ ID NO: 5413 - DNA, 128 bp, Homo sapiens
  unsure (13): n=A,T,C or G
  unsure (14): n=A,T,C or G
aaaatggttgaanngaattcaaagaataataatattttgggacatgttaaaattatgtgaaattcaaatttcagcatccataaataaagttttattgaaacacagccaaaaaaaaaaaaaaaaaaaaa

SEQ ID NO: 5414 - DNA, 533 bp, Homo sapiens
  unsure (8): n=A,T,C or G
  unsure (9): n=A,T,C or G
  unsure (511): n=A,T,C or G
  unsure (512): n=A,T,C or G
ctggcctnncatataaaacatactgtcattgagcttaagctccgcttgttctgaggtttcacctccatgtgtttcattggtgcaaaagtggatctcttagttggtcacttaattctttctttttcagaaagatagtatgttcactggtatatttggtcactcttagaaccttccttcacattgttttttatgggacccatgaatggttagcctttcttttctattgtagaaggaaataaataggagtaaaaagaccattgtagtaaataagttcaaggggaacttgggaccagaaaccactgttatgtacaaaaaatggcaaattcaataaactcaaatttaaaataatttttaaattaacagttatgataaattttatattttatacaaatagattgcttagaatggtttctcaagaattataagagaaatgaactcacagtacaaaaattttataattactatacttgtgttttgttttgggggcttgggaaatgtatttttacattgnngccaatcattttatatttgtc

SEQ ID NO: 5415 - DNA, 563 bp, Homo sapiens
aaaaaaagaaaaataaaataaagtgttttgattatttagggctgacttacatttcagtatgtgacaaaaattcaaacccaaatgcatctagctcactcagtttcagacaggtcctatgttcagcccctaaacgaatggcacaatgccaccaattttgggattcctgagtttggttcccttaagttctcagagttttcccaactctcaaaaccaaagcatcatgggagtgacagggccactggcaagactttttgccagtcagcctagttcttcttttaagatgcagtagtctcaaagcttaaagtcagaaaatcttgcaatacaagagtaactgcaagaacatataaagaaggaaaagaaaggacggggtttctagttgctaagatttgccaaacatggctacaaaactggtaaacaaacctttcttgagtgcaaagtccattagcccaacttgccatgaagagatttgaaataaaaatgaacaaatcaatttctgttgtagatacaaagcgaaaaaataaaattcaatcaatatattgaatttctctgagtttatcactaga

SEQ ID NO: 5416 - DNA, 292 bp, Homo sapiens
aaaaaattaacagccaagtcacaaaggtaatggattgcacatagactaaggaataaacttcagatttgtgatttttgtttctaatcttgatgtaaatttacactatttataaatacatatttattgcttgaaaatatttgtgaatggaatgctgttattttttccagatttacctgccattgaaattttaaggagttctgtaatttcaaacactactcctattacattttctatgtgtaaataaaactgcttagcattgtacagaaacttttattaaaattgtttaatgttt

SEQ ID NO: 5417 - DNA, 309 bp, Homo sapiens
ctgctgctgccgttgaccatcctgaactctgggggagaggaggagtcagcctggcttgcagacggccgacccagaacatggctgtctgtggtcatttccttccttcacacccagtgggatgggcacagagcccagccttggtctcaccagctcccccaccctcctctgcatcagcatccagctcacacagctctccagaagaatttgatcttagctgcagccttggggtacatcactctacacccagtctcttccctgcgcttctttcaaccaacagaagcaaacatcaaaagcacccacacctactgg

SEQ ID NO: 5418 - DNA, 388 bp, Homo sapiens
agcacttatggcaaggcatctcgagggggtggcaatcaccaaaacaattaccagccatactaaaggagaacattggagaaaacaggaggagatgttaaagtaacccatcttgcaggacgacattgaagattggtcttctgttgatctaagatgattattttgtaaaagactttctagtgtacaagacaccattgtgtccaactgtatatagctgccaattagttttctttgtttttactttgtcctttgctatctgtgttatgactcaatgtggatttgtttatacacattttatttgtatcatttcatgttaaacctcaaataaatgcttccttatgtgattgcttttctgcgtcaggtactacatagctctgtaaaaatgtaattt

SEQ ID NO: 5419 - DNA, 344 bp, Homo sapiens
  unsure (50): n=A,T,C or G
  unsure (77): n=A,T,C or G
  unsure (124): n=A,T,C or G
  unsure (141): n=A,T,C or G
  unsure (199): n=A,T,C or G
  unsure (239): n=A,T,C or G
  unsure (272): n=A,T,C or G
  unsure (284): n=A,T,C or G
  unsure (308): n=A,T,C or G
  unsure (309): n=A,T,C or G
  unsure (324): n=A,T,C or G
  unsure (326): n=A,T,C or G
  unsure (336): n=A,T,C or G
tttttttatctttaacctgggactttatttgtacaactaagacatttgtntaaaacaaacagaaaatgaaagaagcnttaagccatgggagagtagaaatgggagctgagaaacttaagagtanaaatgggagctgagganatgaagtgaactcctatcctcaaacccgcaagttcccggccccaaaggaagccctcanagactgatatgccttctgggaactggacagcccctctcancaagcctcattcccaacctgcacctggcctctntgcgaggaaggncagccccagcctgggaagaccaannagggagccagcccancntcaccccatnaaagaccc

SEQ ID NO: 5420 - DNA, 458 bp, Homo sapiens
  unsure (13): n=A,T,C or G
  unsure (355): n=A,T,C or G
ctgccatcttganaacagttttctgagagatttcccacacagttttataaagttgcttcaggtcatcaggaatttctggtatgctctgaatagagccattgcatgcaataatctggtttttcatctcttcatgccataggccccgctcggtaagatctttcaataagtgaggatttacaatctgaaattctcctgacaagactctgcgagtatagatgttgctggtgtaaggttcaatggactcattattccccaggatctgagcagtggaagctgtaggcatcggggcaataagtaaactgtttcttataccatactttgcaatcttctccttgagaaccttccagtcccatangtctgtaggagtaacattccacatatcatactgaagaattcctttgctaactggagagccctcataggtttcgtatgggccctgctccttggcaaggtcacag

SEQ ID NO: 5421 - DNA, 243 bp, Homo sapiens
  unsure (17): n=A,T,C or G
  unsure (67): n=A,T,C or G
ctggatgggtccagacnaagtggaatccctggaacctttaactgagcagtgaaggtcagtgtctcanagcctgagagatgaacaggaccagagagagaggtgggcaggcaggcacaaggttatgtcttcctcagactcggaacccttgagatccttcctgaaggctgtgtacattctgtttatctgtgtcctgtatcactgcactcctgtgtgtacacctctgtttgcacatgcgtggcatgg

SEQ ID NO: 5422 - DNA, 548 bp, Homo sapiens
ctgtttcagaggaggggggaggaggtagcagatgtcaagggatttccatttctctttcgatgccgacatacttcagggcatcagcctggctgtatctgtaatcaaaaaacagctcttcgccagtctggatggctctcttggcaaaaatacctatcctgtgatcaccgttaaccatcataacttttgcatagcagtttggatttaccgaatgatttgcaaaacgaattttgttacccttgcgggttgcatccaccacaaaatcattgttcaagttgaacagaaagctgcacatgtatttatcatacactttccctcttctgtcagcttcatcttgagaaataatctctccacagtattctgagatgaattcatttttctgcacaggatctttgataaaaatcccccagcctgccacgtcagatggtgccagcaatagatgctttttggagccccgctgaatactgcagttcttgcaggacacatttttactgtcccaatggtcagcggctccacaagtaagacagaggtcagggtcacactctcggaca

SEQ ID NO: 5423 - DNA, 203 bp, Homo sapiens
ccagagggccctctacagggaagtgatgctggagaaccacagcagtgtggctggactaggattcctggttttcaagcctgagctgatctctcggctggagcagggagaagagccatgggtcctcgacctgcagggagcagaggggacagaggcaccaaggacctccaagacagattctacgattaggactgaaaatgagcagg

SEQ ID NO: 5424 - DNA, 513 bp, Homo sapiens
  unsure (14): n=A,T,C or G
  unsure (15): n=A,T,C or G
  unsure (40): n=A,T,C or G
  unsure (478): n=A,T,C or G
aaagttcatatggnnccaaaaaagagcccacatcgccaangcaatcctaggccaaaagaacaaagctggaggcatcacactacctgacttcaaactatactacaaggctacagtaaccaaaacagcatggtaccggtaccaaaacagagatatagatcaatggaacagaacagagccccagaaataacgctgcatatctacaactatctgatctttgacaaacctgagaaaaaaaagcaatggggaaaggattccctatttaataaatggtgctgggaaaactggctagccatatgtagaaagctgaaactggatcccttccttacaccttatacaaaaatcaattcaagatggattaaagacttaaacgttagacctaaaaccataaaaaccctagaagaaaacctaggcattaccattcaggacataggcatgggcaatgacttcatgtccaaaacaccaaaagcaatggcaacanaagacaaaattgacaaatgggatctaagtaaacta

SEQ ID NO: 5425 - DNA, 167 bp, Homo sapiens
aaagaaacaccaccaaaaggggattagcttagtccatcccttcctcagtcatctgcttcccaccttcctccaaatgttatcccagaacattctggaggcagggagaaggggaggcagctaatcagagtctgagagcacgatgatctcttctggatcgcattgtgtgg

SEQ ID NO: 5426 - DNA, 306 bp, Homo sapiens
  unsure (14): n=A,T,C or G
ctgaggagcggcgncgggactttggagagaagttaactcgtctgcgggaacttatgggggagctgcagcggcggaaggcagccttggaaggtgtctccaaggaccttcaggcaaggtataaagcagttctccaggagtatgggcatgaggagcgcagggtccaggatgagctggctcgctctcggaagttcttcacaggctctttggctgaagttgagaagtccaatagtcaagtggtagaggagcagagttacctgcttaacattgcagaggtgcaggctgtgtctcgctgtgactacttcctgg

SEQ ID NO: 5427 - DNA, 487 bp, Homo sapiens
ctggctcaagacctctcctttctcagagcctggcccaggccccccactgcctgcagctcccttccggacattttgggtggtcagtgtcgtcctgggagcccttcttggtcttctccttctgggcctcatggcttttctgattctgcctcgagtcacacaagccatgcagaggggtctgggaagatccgaggtatctcctggagaagccatctatgatgtcattggggaaatgccgctagcaggactgtacgaggaaatcatggaggccgaggctgtgctccaagatgaggaggacggaagtgtggtgaaggtggacacagaagccgcagtttcaggggaggtgtctaacctcctggagggacagtctatacgtgcggagggaggacacagcagacctgtttctcagggatatgacgaggctgcgtttcctctggaggagatgacgttgtaaagcaacctgaggatgagatacaccagacctcggccg

SEQ ID NO: 5428 - DNA, 312 bp, Homo sapiens
gatgtgatggtgtccaccttccacaagtactcgggcaaagagggtgacaagttcaagctcaacaagtcagagctaaaggagctgctgacccgggagctgcccagcttcttggggaaaaggacagatgaagctgctttccagaagctgatgagcaacttggacagcaacagggacaacgaggtggacttccaagagtactgtgtcttcctgtcctgcatcgccatgatgtgtaacgaattctttgaaggcttcccagataagcagcccaggaagaaatgaaaactcctctgatgtggttggggggtctgccag

SEQ ID NO: 5429 - DNA, 292 bp, Homo sapiens
aaatttagcaataccatctcaaacctggagcaatcctggaacagttaccaggatcaccttttcccttcaatccttgtggcttctgggaatcttcagagcctgggtctgaaaggtgtttcctacatgtctcagggctggatgcaaacctggctggggacctgagcatcaactcccatttagaatcagacatctcccttccctgcaaatgtctacaactaccaaattgctccccaacagttagctcaatggattgaatttgcagaagccaactcctaaaatggggactgcctgg

SEQ ID NO: 5430 - DNA, 443 bp, Homo sapiens
  unsure (386): n=A,T,C or G
cctagtgcagctcgacgacgtttagtgcaatgttccgcggtctcttgcatacctggacgctactgtttctccaactcagtcacatagatcaggtggtcctcgggagacttgccgtgggtcttactaaggtgcagtttgactgcgtgcttgctcgcaaaagtccggttgcagagcttacattggaatgtggagcccaagtcttcctcggtggcccccagtgggcccagagttttgttggtgaggactttcgaaacattctgctgttcttgaatctgattgagtggcagcttggagagatccttcaggctgaagcccaagtgtgtctccaaatgacttatgtatgtagaagcagttctgaactgagaggcacaatcgttgcaaaaganaacaggatgccctgtgtccaggttctttaggaatttcgttccccctgtcctcctcaa

SEQ ID NO: 5431 - DNA, 342 bp, Homo sapiens
ctgcacaaaaacacttcagccaattctaacgcagagggagcatagacatggaggggctgggggttaggctgggggagaccagccttccctgctaagggctcgtggtccaagcccacaaccagagggtgctctgggtggtgtccaggaacatgcagtgccggctccggggaggagggacgagaagagaaaggggagtcacagaggaggctgcagatgagcacgagtttattggactctggcctcgcgctgctgcttgatgaagttgatgagcccattggtagaagcgtcgtgagaggtcacttgagcactgccatcaagctcaggctctattttcttagccag

SEQ ID NO: 5432 - DNA, 247 bp, Homo sapiens; identical to SEQ ID NO: 2922

SEQ ID NO: 5433 - DNA, 371 bp, Homo sapiens
  unsure (14): n=A,T,C or G
  unsure (15): n=A,T,C or G
  unsure (16): n=A,T,C or G
aaacatctgcctannntcccccattcctccaacacctagaatgtgctgaaactctattcctcttccaaagtgcatctcagcctcatgaagcttttactggtcctctttccggacagagttaaccttcacaccgagggattctaaacgttttctcaatcttggagtcatgggatattcacaatcaccctgtgagatactaaaggatggaaccagggctctaggggcagagccattttactaagctgacagagttggtgagtggcggtggctctgtattgactctgagctggttcccaagcctagcgcctttccactcggaccctggctcactgtccctgcagcgtctggctggatggtggtgttggtgtgtc

SEQ ID NO: 5434 - DNA, 313 bp, Homo sapiens
  unsure (178): n=A,T,C or G
  unsure (239): n=A,T,C or G
  unsure (267): n=A,T,C or G
  unsure (273): n=A,T,C or G
  unsure (275): n=A,T,C or G
  unsure (295): n=A,T,C or G
ctgagttcccttcccgaaggtcagctcggggctcccgacgatcatgcagaagtagatgccactgtcttccggcttcacgcttgtgagattgagaatgaaccggcttgcatcccgaaacacagctatcttctcctgttccacctcttcaccgtggatagtcccttttgcggaatcccanagggccaggaactcgtggtgactgtcactgctcggtgcctggcgctgtctcagccagtaanatgcgcatgttactgagggagattttancctcgnangacagcatcaccatcttgtnggtttgcacctttatata

SEQ ID NO: 5435 - DNA, 386 bp, Homo sapiens
ctgtcaatgcattccaggaagcagctagtcttttaggtaagaagtatggagagacagctaatgagtgtggagaagccttctttttctatgggaaatcacttctggagttggcaagaatggagaatggtgtgttgggaaacgccttggaaggtgtgcatgtggaagaggaagaaggagaaaaaacagaagatgaatctctggtagaaaataatgataacatagatgaaactgaaggctcggaagaggatgataaagaaaatgataagactgaagaaatgccaaatgattcagtccttgaaaacaagtctcttcaagaaaatgaggaggaggagattgggaacctagagcttgcctgggatatgctggatttagcaaagatcattttt

SEQ ID NO: 5436 - DNA, 372 bp, Homo sapiens
cgctgcctcagcctctgcctcccagcctctttctgagggaaaggacaagatgaagtggaaggcgcttttcaccgcggccatcctgcaggcacagttgccgattacagaggcacagagctttggcctgctggatcccaaactctgctacctgctggatggaatcctcttcatctatggtgtcattctcactgccttgttcctgagagtgaagttcagcaggagcgcagacgcccccgcgtaccagcagggccagaaccagctctataacgagctcaatctaggacgaagagaggagtacgatgttttggacaagggacgtggccgggaccctgagatggggggaaagccgagaaggaagaaccctcaggaagg

SEQ ID NO: 5437 - DNA, 407 bp, Homo sapiens
aaaatacattcaaataaaaagatataagttacttgcagtgaatgcacacatacaacagcagggagagctgagaacataattaaccaatactcttgtgttcagagaataaatagtctgaaaccgtgggactgaggcttgttccttaggggctttctcaaagtatccttggtggacataaggttaccctcactcaatggaaggacacatcttctgctgccggggaggacacagcatgacagtttcatttatatgggatgttttccttccataaatgtctggaacacggtgtcacaggacaccatggtgtacagtgcagccctcaaattagaataaataagtcacatggttggactggaatgccacagacacactatgactgaaactggaaggaacgagaatgtttattt

SEQ ID NO: 5438 - DNA, 332 bp, Homo sapiens
  unsure (227): n=A,T,C or G
tttttttttttttttttttttttaggacaggaagtagaatttattggtgagtattaagaggggggcagcacattggaagccctcatgagtgcagggcccgccacttgtccagagggccacgactggggatgtacttgaccccacagccatctgggatgagccgcttttcagccaccatgtcttcaaattcatcagcattgaacttggtgaagccccacttctttganatgtggatcttctggcggccaggaaacttgaacttggccctgcgcagggcctcaatcacatgctccttgttctgcagcttggtgcggatggacatgataacttgg

SEQ ID NO: 5439 - DNA, 428 bp, Homo sapiens
ctgtcaaacttggcctgggcctgctcccctccaatgccctggctgaagagcttggtgcagtcactctccagtgtcttcttcagagtggagatgttttcactgcagacttccacgttgttcagagtcaccaggaaggacatcttcgcctcgtcagtactctcgatgccttttgtgtcaaatttgccttgctggaggctgctgtgcatgatgttcacggcacttgtcaccccgcgctggatgtcctggaaggtggtggcaggaaagcccatccgcagcttattacacagaacatccctgaagtcagactccagctctgtggtggcgaggttgatcatggcacagagacagtcaatgctggagctggacagagcccgcccaatgcacttcttaacaatgtagaagacatcatccaccatgctggatgtcag

SEQ ID NO: 5440 - DNA, 360 bp, Homo sapiens
ccagaactgttacaaggccaccccttgcttcaagggaggttagagcagtgaatattcagcttctcctttctctactgtagaggtcagcgaggatgaagagagccagaaatgggcattgggtcagtcaagccatgcttctgacctgcaaagcctccatatcagacccaaaaattcacgagtaagtaagtaagagcttcaaagaacttctctccctcagccagggttaactataaaatgacccaaatatgcttaacagaccaaaaaaaaaaattggctaatgaatggaactatttacaactgtatttttgcaaatagaatcaaaagctagatattgaattaaatgaattgtttctacagttt

SEQ ID NO: 5441 - DNA, 333 bp, Homo sapiens
  unsure (20): n=A,T,C or G
  unsure (27): n=A,T,C or G
  unsure (99): n=A,T,C or G
  unsure (192): n=A,T,C or G
  unsure (216): n=A,T,C or G
  unsure (228): n=A,T,C or G
  unsure (245): n=A,T,C or G
  unsure (280): n=A,T,C or G
  unsure (291): n=A,T,C or G
  unsure (296): n=A,T,C or G
aaaagaaatgcaaactgcanattatanagtgcagctacacatatatataatggggtggatagtttatagtgtgctcattgctgctttgttattattagngttgagagttcctgtgctgtgtggaattcaacactaatctgctgtaagtatggagctgggtatgtggaacatttgcagggaagtttgtttctncgcttgtttttccaggggtattcnagatgacattgnagaggaagatgaccaantgagttcctatgcagtatttctatcttttattttnatccacaaagnctatnctggggacaagctagagcttgccttcactcaaaatgg

SEQ ID NO: 5442 - DNA, 333 bp, Homo sapiens
cctgaggtgcacaagcccatcagtggaagatatgaggtgtttgaccaggtcactcaggagggcgctggacatgacccagcccctgagggccaagcagactatgatcccgtcactccatatgtcacggaagctgagtctgtggttggagagaacaccgtgtatgcacaagtgttcaacttacagggaaagaccccagtttctcagaaggaagagagctcagccacaatctactgctccatacggaaacctcaggtggtgccaccaccacaacagaatgatcttgagattcctgaaagtcctacctatgaaaatttcacctgaaaggaaaagcag

SEQ ID NO: 5443 - DNA, 231 bp, Homo sapiens
  unsure (17): n=A,T,C or G
ctgcagaatagcaggtnagagggatcccagacttgaccaaatagccagaactggctacggttctgagaaatctatggaagcagtcttgctatgggcggcagaggagagtgaaaacagtcttcaaaatttaatcgtagaataattctatcaaattaagccctttattagagctgaaaaaattgagtttaagagcacagctagtttagcataaagtgcagattatacagtttt

SEQ ID NO: 5444 - DNA, 206 bp, Homo sapiens
gccgtgcgtggaccgcatcctcaagctctgccaggacatcttcctggtgcgggagactcgggagctggagctggaggaggagttgtacgccaagctcatcttcctctaccgctcaccggagaccatgatcaagtggactcgtgagaaggagtaggagctgctgctggcgcccgagagggagggagccggcctgctgggcagcgtgg

SEQ ID NO: 5445 - DNA, 384 bp, Homo sapiens
  unsure (14): n=A,T,C or G
  unsure (17): n=A,T,C or G
  unsure (215): n=A,T,C or G
  unsure (315): n=A,T,C or G
  unsure (319): n=A,T,C or G
  unsure (340): n=A,T,C or G
  unsure (361): n=A,T,C or G
  unsure (374): n=A,T,C or G
aaaagatactttgnatncaattaagaagagtttttaagaaaaaagaggaaggttctggcatggggagctctgcaacccactgctgggtgccagaagcgagctgtggagcggaagatgaagatggcaccatgtgtctctaaaccacaaatggaaccactgatttctatgtgtatttgcatttgctgtaatgtgtgggaaatctgaaggttacacancacaactgtccacagcagatggccctcgaaggggatgaggtttagaaccaggcagggcctggaaggactggattttacatggacatgggggacattgcanaganaaaggcatccaaggtgttctnacgaaatccactacaattgtncaagaaaatgaanagctgtgatt

SEQ ID NO: 5446 - DNA, 557 bp, Homo sapiens
  unsure (13): n=A,T,C or G
aaaaaaggcattngaatgaatgtttgactcaggtttgttaaattaaccttcagtaactgcagtaccaaaaattacactcaactgatgaaaaaaacgaattgtatgatttaggaatcaaaaactaaaataagtggaattatgtatcttttctaaagttaaaaaagtaaaatattttattatgagttattataaaaattggttaattgtataggaagatgacagcatttttttcaagttatcataaaaagtaattcagatgacatttgagaagtaggggaaagggaatcatgttgacagttttagttctgtgaacactaatttgtgtgaagctattaaaatgattgtaaagttgactactgtaaatttcccataattatgtgtgtatatgtgtcatatgtatgtacatgtatatgtctaaaaattactttacacatgtgcctacatagacacaccaagaagtggatgtatataatatagaaagtatatagcaaagtaattttactctgataataaaaattgtttgacatgtattttgttatgaatagtttatcttccaa

SEQ ID NO: 5447 - DNA, 496 bp, Homo sapiens
  unsure (12): n=A,T,C or G
  unsure (13): n=A,T,C or G
aaaaaaggcatnngaatgaatgtttgactcaggtttgttaaattaaccttcagtaactgcagtaccaaaaattacactcaactgatgaaaaaaacgaattgtatgatttaggaatcaaaaactaaaataagtggaattatgtatcttttctaaagttaaaaaagtaaaatattttattatgagttattataaaaattggttaattgtataggaagatgacagcatttttttcaagttatcataaaaagtaattcagatgacatttgagaagtaggggaaagggaatcatgttgacagttttagttctgtgaacactaatttgtgtgaagctattaaaatgattgtaaagttgactactgtaaatttcccataattatgtgtgtatatgtgtcatatgtatgtacatgtatatgtctaaaaattactttacacatgtgcctacatagacacaccaagaagtggatgtatataatatagaaagtatatagcaaagtaa

SEQ ID NO: 5448 - DNA, 229 bp, Homo sapiens
ccaatcaaggcttgctggagtgtctcccagccaatcagggccttgaggaggatgtatcctccagccaatcagggcctggggaatctgttggcgaatcagggatttgggagtctatgtggttaatcaggggtgtctttcttgtgcagtcagggtctgcgcacagtcaatcagggtagagggggtatttctgagtcaatctgaggctaaggacatgtcctttcccatgagg

SEQ ID NO: 5449 - DNA, 137 bp, Homo sapiens
aaacactgttataaaatgtagccaaagctcacctttgaacagatcccggtgacattctatttccaggaaaatccggaacctgattttagttctgtgattttacactttttacatgtgagattggacagtttcagagg

SEQ ID NO: 5450 - DNA, 221 bp, Homo sapiens
ctgtctccacccaggaaaaggaaagccaggtacacttctcatcacagtaagactagcctaacaggggaaaacagatttacatgtttcgttcattagcatattagggaaggggaaaccttttgggctctggccccgtggttgggaaacccttcctaagagcatggagccacactctggccttgatacagtagatgggacttaacacactctgatgctcaagg

SEQ ID NO: 5451 - DNA, 234 bp, Homo sapiens
cctacagatgaaggccaaataatccccaaacagccctgtttgatcacagaactaccattcataggaaattgtatgtaaaaacacaggactgtttctgggggcttatccaataaagaaaacaaacaacaaaaaacaaaccccaaaggattagatcagctactgcctaagcagattccacgtggactatattatcaacatttaatgggaacaactattcaaagctcccactcattt

SEQ ID NO: 5452 - DNA, 492 bp, Homo sapiens
  unsure (478): n=A,T,C or G
ctggtacacggcagggtcagggttctggatatcaggtaaaacagtcaattgtgtcccagatccaaaggtcagttgccttgcagaaccagaagactccatgtcacccacgaggcagtagtacacagcagtgtcgctcagggaaacccggggcaggctcagagtgctggactttctgtcggcagggataaacagggaggccacttcgtttgtaacttttgtcttgtatccttgaataataaatcgtggtccttggctgggaaactgttggtaccacgtgatataatcatttgtagcaatgttgttgtggctacaggttatgttcacttcttgtccttcatatgagtccatggagatgggctgggtggtcttagcaaggctcaaagtactcagggtcaggaacacgatcactctcgccacttgcctcatattctaggtgcaaactaggacccaggttctaggctcttttgctgtgtctganctgcaatgagccca

SEQ ID NO: 5453 - DNA, 218 bp, Homo sapiens
  unsure (29): n=A,T,C or G
cctcttgaaaaaccttaatcacagttaantgatggcatgggcaatgaattttaatcatatttaggaataaaatactagatattagtgtataacaattagatatatgttaattgagcactacaaagcctgaaagcttaacaaagtggggctataactagtaattttttggtaaaaatatagtgatctttttctacagggtattattataagggacaaat

SEQ ID NO: 5454 - DNA, 271 bp, Homo sapiens
  unsure (14): n=A,T,C or G
aaatttaacagcgncctcttgaaaaaccttaatcacagttaagtgatggcatgggcaatgaattttaatcatatttaggaataaaatactagatattagtgtataacaattagatatatgttaattgagcactacaaagcctgaaagcttaacaaagtggggctataactagtaattttttggtaaaaatatagtgatctttttctacagggtattattataagggacaaattatacgttgtaaattagattaatgaattttgtgagtttt

SEQ ID NO: 5455 - DNA, 297 bp, Homo sapiens
aaatgactgtgctgcccctttcacatcaaagaactactgacaacgaaggccgcgcctgcctttcccatctgtctatctatctggctgacagggaaggaaagaacttgcatgttggtgaaggaagaagtggggtggaagaagtggggtgggacgacagtgaaatctagagtaaaaccaagctggcccaaggtgtcctgcaggctgtaatgcagtttaatcagagtgccattttttttttgttcaaatgattttaattattggaatgcacaatttttttaatatgcaaataaaaagttt

SEQ ID NO: 5456 - DNA, 369 bp, Homo sapiens
aaaagtttttcttctgtaattgttgaacgggtgattattattaactctagataagcaggtactagaaaccaaaactcagaaaatgtttactgttagaattctattaaattttaagtgttgtattctttttcattgggtgatgtcagggtgataaccagacattcatggaaaggcatgcagtttgtccattgtgacagtttgtttaataaaaccacatacacactttatttaagattaaaatctaactggaaagtcagcttggaaaatggacatttccaagtatgtttggtgagtcacagatataaaaatagaaattctgatgagaggtttcagtttttaataccaagtccttaggagtcttaacattgg

SEQ ID NO: 5457 - DNA, 437 bp, Homo sapiens
  unsure (11): n=A,T,C or G
  unsure (12): n=A,T,C or G
  unsure (14): n=A,T,C or G
  unsure (410): n=A,T,C or G
aaattgtatgnncncacaagttttggacatgtctgaagtaaaagctaaggtacagtcactggaccttattttgggtgcacttcaattatgactgtgactttagtggtgggttagtatggtttattgcaatgatgcttttttaagccctttaatacagatgatgggtaccatggatgccagatgaatacatatttcaactagtattttacattcattccaaaagtgcctattatatgccaggcactgtcctattccacaaggatatataacagtaaatgaaccagataaatccctgccaccgaggaacttacatgaccaccagttaaaatcaaaacaattggaagagtaatgtaagaataaggatggtaagaatcatcagactggtatacgccattaccagaagcacagantgagattataagcctgttagaacacag

SEQ ID NO: 5458 - DNA, 207 bp, Homo sapiens
ccttgtcctacggccagaagccctacaagaagatgaaagggccggaggtcatggccttcatcgagcagggcaagcggatggagtgcccaccagagtgtccacccgaactgtacgcactcatgagtgactgctggatctacaagtgggaggatcgccccgacttcctgaccgtggagcagcgcatgcgagcctgttactacagcctgg

SEQ ID NO: 5459 - DNA, 390 bp, Homo sapiens
cctgaggcttctatctatcttggaacatgggctttccatcttagtcctcgggtctcaagtctcaaaccatctgtcttatactttgggccttctatccatatgagccttccaccttctgccctacttgagttctgggttttactgcagtctagggccttgttttggtcttggatcatctcacatggcagcctggcataaggaaccgctccacaatgcttgctctgatagccgacgttctgcacctatcaggcaggggttaggaagcccctctgccacacatgacacacacacacgtacacttgcccacatatgcaaagaaatatttaaggagagattacatgaaatcaaagagagggagatagattcatgaagaggctgaaatactcaaag

SEQ ID NO: 5460 - DNA, 610 bp, Homo sapiens
  unsure (579): n=A,T,C or G
aaatttgaacatgtactgtgacacttttgacacttttctgaagatttatcccgtttttctagcctttaaggtaatgctgaaggaatacatatactttaatatcaccttttttagaaacttaaaattgaatcaaaataatcagttttaaggaagctttttctcctccttccttttttgtagaggaaagaacacttgataaaaattagatttgttcttaaaaacacccatgattaccatcacattttcagcctgggagagattctcaaggaggtgatatagatcgcaatgatgtgatttatcaccctcaagaaaattcactaaaggctttttctccccaaagatcatattgaaagtaatcatttggagtaaattagaattattaactttaataagcttttatggaatcatgtactggatttactaattctcaaaatctttcactataaagatattttgttgaaacttactatttggcaaaagtttgcactgagcgttaactgctttcaacagtcttggcagattgagagtttgtggcagggaagagagggcactagtctcttcattaagattataaatttnataaaacaaaaaccaaatggagatctggaat

SEQ ID NO: 5461 - DNA, 314 bp, Homo sapiens
  unsure (23): n=A,T,C or G
  unsure (42): n=A,T,C or G
  unsure (66): n=A,T,C or G
  unsure (70): n=A,T,C or G
  unsure (85): n=A,T,C or G
  unsure (124): n=A,T,C or G
  unsure (127): n=A,T,C or G
  unsure (247): n=A,T,C or G
tgaacataacctgtatccacaanaacattgctacaaatgatnatatcacgtggtaccaacagtttnccanccaaggaccacgatntattattcaaggatacaagacaaaagttacaaacgaagnggnctccctgtttatccctgccgacagaaagtccagcactctgagcctgccccgggtttccctgagcgacactgctgtgtactactgcctcgtgggtgacatggagtcttctggttctgcaangcaactgacctttggatctgggacacaattgactgttttacctgatatccagaaccctgaccctgcc

SEQ ID NO: 5462 - DNA, 236 bp, Homo sapiens
ctgggcttgccttggagacctgcccctgctcagttctgttcctgttctcctggccctgggtggcccctactcgtcctctgtggtggatgtcagcatccctttgtcgatcagatgagaccgcagcgtgttgaagatgtggagctgctgatctggccgtaaagtcaggaactgctgaatcagtttgcttgggttagggcctctgataaaactggcgatgtatacattgacaaaggtgg

SEQ ID NO: 5463 - DNA, 292 bp, Homo sapiens
ccagcagccaggagggaggtaggctgatgtgatgggatgggatcttgccctgggttggtctcatggtgcagaagagcagtgttggaatcattctaatgcttcaggatgcctcatgtgccccatggagctcagacatcaggaggtgctgggactctatttagccgttcgatgatgcggttgttgtccaggaggtcagatgccggcagcttcatcccctcgcagagctcttgcatgtggagaagcaggccctttcgtgtagggctggggtaaggagctatgggaggcggcgagg

SEQ ID NO: 5464 - DNA, 284 bp, Homo sapiens
ctgagacccctgccctgtgagcccttctatccccacaagttgtcaggacaatcccttgtggttagggggaggggcggggagagagctctatttctcagccagtgccgagctaccctccctcctgggctgtgatttcatttgtgcaatgggggtgtgcaggagtcactagcttctcggggcctgtcccgcacatacacgcacttatgcgacatccagacatttgctacattttccaagggcttggcctctcccctccagcctccagaagggagggcaggacacag

SEQ ID NO: 5465 - DNA, 427 bp, Homo sapiens
ctgagaagatccttgaggacaattttggcctattcagaagaggacacagccatgcagatgactccttttcccacccaggtggaggaacttctctgtaatctgaatagcatcttatatgacacagtgaaaatgagggaatttcaggaagatcctgagatgcttatggatctcatgtacagaattgccaagagttaccaggcatctcctgatctgcggctgacctggctccagaacatggcagagaaacacaccaagaagaagtgctacacggaggctgccatgtgcctggtgcacgccgctgcgttagtggctgagtatctgagcatgctggaggaccacagctacctgcccgtgggcagtgtcagcttccagaatatttcttccaatgtgctggaggagtctgtggtctctgaggacaccctgtcac

SEQ ID NO: 5466 - DNA, 167 bp, Homo sapiens; identical to SEQ ID NO: 3712

SEQ ID NO: 5467 - DNA, 236 bp, Homo sapiens; identical to SEQ ID NO: 3713

SEQ ID NO: 5468 - DNA, 326 bp, Homo sapiens
ctggctgataagaagggcctccatgttgtggaaatccgggaggaatgtggccctctgcccattgtggttgcgtccccccgggggcccttgaggaaggatccagagccagaagatgaggttccagacgtcaaactgactgggaagatgtgaagactgcacagggaatgaagcgctctgtgtggtctaatttgaagagagccgccacgtaacctctctggccttgtgcagccagttcctgtgctgccctgcacctaggagagactcagcccctcacagcttgggatgttaccttgccttttgtttgttttgagggaagtttaatcttt

SEQ ID NO: 5469 - DNA, 87 bp, Homo sapiens
  unsure (15): n=A,T,C or G
  unsure (25): n=A,T,C or G
  unsure (62): n=A,T,C or G
cctggaaggtgtgcnggagtttggnagaggagtgatctaggtgaggggaatggaaggtgcanagaccatagctgagagggcctgagg

SEQ ID NO: 5470 - DNA, 461 bp, Homo sapiens
ccagagggaaggcccaagagacgtctctgaagccaccgttcctgattattcagaggcagggtccacagtgagtgactcggtggggctggaggaacccagggtgacccagagggggctctggagcgggtccctaacatctgaaaaagtcctcccagggaactcggagctggaacttccaggcagcttcgggggtgacatttgtatccggccagccgagcggggaaaggagaccttgtgtcctggcaacagggagagccgggactgggatggccacagctcagcctccaggtgaggagcccagggccctgctcgagctgtgacctccacggtcacggagtcctcggaaaaagagaagttgagcttgttcccctggtagaagatgccggagacgctcactctggagatccccgacagacacacagggtcaaaggtcacacccgctcgggtgaccctgaaccccg

SEQ ID NO: 5471 - DNA, 294 bp, Homo sapiens
ggccgcttctgtgtggtgtggggagacgctggtcctccccgtcctcccatagcgcttattgcctcaccctcaccccctaggggccggatccaaaggcgctgcactccccaagccttggggcatcagccaggaaggtttcctacctcctaattcaggggcaggactcctcttttccccccacggggaaaagaggcagaaacttaggggtttccctcctttcttagggtcagacgctcttagggtccacttcttcaggggcggaagcctctcctacccttcccataggggcacagg

SEQ ID NO: 5472 - DNA, 176 bp, Homo sapiens
cttttgtaatggaaatctcgcgagggttaatcttctcttgagaatggcagtcaagaaatgagatggttcacttgactactgagcagttacaccaaggagagcgtgaaggagatgattgagccagagaagaaacgggttgtgatggcaatggtgtgggggaaatgaacttgagcttt

SEQ ID NO: 5473 - DNA, 247 bp, Homo sapiens
  unsure (16): n=A,T,C or G
  unsure (18): n=A,T,C or G
  unsure (19): n=A,T,C or G
cctggaaggtgtgcangnntttggtagaggagtgatctaggtgaggggaatggaaggtgcagagaccagagctgagagggcctgaggcactttccagagcgtggggaggggcctccaccaaggcgagaagggctgcaggtccagatcaccagcgtttgtagacagtagtgtggcgcttggagtttacctgagggccagtggagctccagggacctatcaggacggggacctgtggggactgggaagg

SEQ ID NO: 5474 - DNA, 345 bp, Homo sapiens
aaaaagaccacatgaaatgctgattctaattgtgtgtaggtcttgaggattaagcacacaaatttcacaaacttctgtttgagtaaacaaactcggccttctgtaaatatacatgcaagtttggaaacagtaatactgtacctataaatatatgctgtctgttttgtgtacagtatgtaaaaactccttttctgccacactaaaaatgcaagccatttatgggaatcctaaaactagtattgaactaaaactttgctaatgatctttattagaggatcgtccaacttttcacttaccttgggttttcttttcaattcactcttacactagtctgcttatttccag

SEQ ID NO: 5475 - DNA, 369 bp, Homo sapiens
cctaatcttttcttcccacccccacccagccatcctgtgtgccctcttccccttggaggccactgccctaagtgaggatcagcatcgactccaccacagcccactttagtggtgacaacttttaatccacggaagcagtttttcaaagtgaaaactgtttcaaatcacgaagcttaccacttagacaattcagacaaggtaatgctcatttagactgacacaggtatgaaaattccaatcccttcttttcactatcattgtatctgacacacacatcaccttcctaggcactatgacactatcctgggagaagcaaatgtgtacaaagaagcacaatcctgctctctccccacacttcacataaaccag

SEQ ID NO: 5476 - DNA, 315 bp, Homo sapiens
aaagaggccacacatcttttttctgacttgaataaactgaaaccagatgactcaggagttaatatagcagaagctgctgcccagaacgtgtactgcttgagaacagaatacattgctgattatctcatgcaggaatcacctcctcatgtagaaaattactgtctaccagaagctatttcatttattcagaataataaggaacttgggactggattatcacaaaagaggaaagctcctacagaaaaaaataaaatcaaacgacctagagtacactaatcgcatctaccctttagttaccaaacattaaatgttttt

SEQ ID NO: 5477 - DNA, 257 bp, Homo sapiens
ccaaatcttttgccgtctaggcccagccaggcttttctgactaaataagcaataagaggctctaagctgactgagttgcaaggaccctttccgccctcccttggatctccatgtttttccagatggcggaagagcatgtgccaccccctttcctaacagacttgtccaagtgcttggcgtgggacccatgaccaaagcccaggatggcttggtgggagtgtccctgctgcatctgcatgaagcccctgctttttagg

SEQ ID NO: 5478 - DNA, 178 bp, Homo sapiens
  unsure (11): n=A,T,C or G
  unsure (12): n=A,T,C or G
  unsure (80): n=A,T,C or G
  unsure (99): n=A,T,C or G
  unsure (100): n=A,T,C or G
  unsure (109): n=A,T,C or G
  unsure (110): n=A,T,C or G
  unsure (176): n=A,T,C or G
ccagagggaanncccaagagacgtctctgaagccaccgttcctgattattcagaggcagggtccacagtgagtgactcgntggggctggaggaacccanngtgacccanngggggctctggagcgggtccctaacatctgaaaaagtcctcccagggaactcggagctggaacttnca

SEQ ID NO: 5479 - DNA, 344 bp, Homo sapiens
aaaaatggaactctgaaaattaagcatctgaagaccgatgatcaggatatctacaaggtatcaatatatgatacaaaaggaaaaaatgtgttggaaaaaatatttgatttgaagattcaagagagggtctcaaaaccaaagatctcctggacttgtatcaacacaaccctgacctgtgaggtaatgaatggaactgaccccgaattaaacctgtatcaagatgggaagcatctaaaactttctcagagggtcatcacacacaagtggaccaccagcctgagtgcaaaattcaagtgcacagcagggaacaaagtcagcaaggaatccagtgtcgagcctgtcag

SEQ ID NO: 5480 - DNA, 320 bp, Homo sapiens
aaaagcctgagggaacctggaggggggctcccactctctaccttctttcctccgagtttgtgactccgagatggacaaagtgtgtgctgtttttggaggctcccgaggcattggcagagctgtggcccagttaatggcccggaaaggctaccgactggcggtcattgccagaagcctggaaggggccaaagccgccgccggtgacctcggcggagatcatttggcatttagctgtgatgttgctaaagaacatgatgttcaaaatacatttgaagagatggagaaacatttaggtcgagtaaatttcttggtaaatgcag

SEQ ID NO: 5481 - DNA, 188 bp, Homo sapiens
ccacagcgcatcactttccttgcaaatgttcactgacagcagcacggtggaaagcatctcgctccagtgtgcgtgcagcctgaaagccatgatcatgtgccaaggccgcggtgcgttctgtcacgatgactgtattggaccctcaaagctctgtgtattgtgccttgtggtgagataataaattatgg

SEQ ID NO: 5482 - DNA, 347 bp, Homo sapiens
ccattcttgcactggcagagagtacactcagtgccatgtttgatccaagaggacccggtgaagcgaaccacattcatttcgtccaggcaagtcttggtgatgtcattgcggatggtgtcagcctggcaagggtctgtgacacagcgcgggcagcactcattctctgggagaatgctgaattcacactccacatctgggcaaggcaggggccaacaatcaacttccccttgctacaaggaaagcagatgtgcaagggcagagggagagggaggaggaaatggagggaggccaggaaaaagcagatgagcacagtgtttactgaatactcaattatttgattgatattt

SEQ ID NO: 5483 - DNA, 319 bp, Homo sapiens
ctgacagttctccatggcaactcagtcctccagcagacccctgcatacataaaggtgcaaaccaacaagatggtgatgctgtcctgcgaggctaaaatctccctcagtaacatgcgcatctactggctgagacagcgccaggcaccgagcagtgacagtcaccacgagttcctggccctctgggattccgcaaaagggactatccacggtgaagaggtggaacaggagaagatagctgtgtttcgggatgcaagccggttcattctcaatctcacaagcgtgaagccggaagacagtggcatctacttctgcatgatcg

SEQ ID NO: 5484 - DNA, 373 bp, Homo sapiens
ctggctttcctgtcccaaatcagccagtgtataatcagccagtatataatcagccagttggagctgcaggggtaccatggatgccagcgccacagcctccattaaactgtccacctggattagaatatttaagtcagatagatcagatactgattcatcagcaaattgaacttctggaagttttaacaggttttgaaactaataacaaatatgaaattaagaacagctttggacagaaggtttactttgcagcggaagatactgattgctgtacccgaaattgctgtgggccatctagaccttttaccttgaggattattgataatatgggtcaagaagtcataactctggagagaccactaagatgtagcag

SEQ ID NO: 5485 - DNA, 490 bp, Homo sapiens
aaaaacagaaaatctttattgtgccataactgatttttagtatacaaaaaacctaatataacctaatttcctggaccaaataatgtaaaataggccaaaatcaagccacagcacaaaggatactattggatatggacctttttgctttggtgaaaacttcaaagtaaggagacactgtcaatcaattccactaaaattgcatttattttcctgtcatagtaaaaaaaggaaaaacagtagcaaatactgggcttcgttttccccctcaacggcacgccttccacaacagcacaggtggttctctgcttcactggcagaaccacacaagcttatcctagagaaaatctgctgtcgtaagtccacaaggaagagttgactgggcccaccgctatagccaatacttccagaatcaccagcccaccttcgtcaaagggctgactgtggcagcaaggggtgtctgtcacattcgtcctggctcactgagcccagg

SEQ ID NO: 5486 - DNA, 241 bp, Homo sapiens
ctggaaagcattggggagcttttctcaagatcagtcacacatagacaactctctgaagtatatattaagtggcagaaacactcccagcttctcaaggacagtgattttagttttcaggagcctatcatggctctacgcacagtcattttggagatcctgatggaaaaggaaatggacaactcacaaagagaatgtattaaggacattctcaccaaacaccttgtagaactctctatactgg

SEQ ID NO: 5487 - DNA, 232 bp, Homo sapiens
ctgatgaagacggagcggccccggcccaacaccttcatcatccgctgcctgcagtggaccactgtcatcgaacgcaccttccatgtggagactcctgaggagcgggaggagtggacaaccgccatccagactgtggctgacggcctcaagaagcaggaggaggaggagatggacttccggtcgggctcacccagtgacaactcaggggctgaagagatggaggtgtccctgg

SEQ ID NO: 5488 - DNA, 506 bp, Homo sapiens
tgctctttcagctttgaacgtcctttcccattctccatcatccacattcacctatcctgcctgccccagttaaaatcctgtttcttctaggaagtccctcatcccacccgcttaccccagggagactgagcttgttccttctcctagtaagaccctcagcccatggagtcctgtgtgatgttgtgagcgtgggaggacagactgaactgctcggcccgtggagtcctgtgtgatgttgtgagcggggaggacagactgaactgcgtggtgcttcgcacatagacctcaacagggattggcattttgaagctgttggcgggggctgtggactgcttttcttcctttctagctcaacggcagctaaagccactgcatacaatgcaaggactggctcctgtttggccgcgactgattgcagcccctggtgaaatgagaaccctgtgggtcggaacaaagtttggattatttatgttgcaagtaactaaaatctcaagtgaaactggttt

SEQ ID NO: 5489 - DNA, 282 bp, Homo sapiens
tgctcactcaccctggcacattcagcccccctaacccaccttgaacattgaccaccacacactccctggcacgctcttctcaccctcaacttctgccacctctccctgggcaatactgccagcctttccctaatctcagagctgcagccctgccctgtcactcacctcaaacctgccatgtccctggggctactgaaattccaggcagtgggtgaagaggacgaggaggatgaggagggggagagcctggactctgtgaaggcactgacagccaagctgcag

SEQ ID NO: 5490 - DNA, 326 bp, Homo sapiens; identical to SEQ ID NO: 3635

SEQ ID NO: 5491 - DNA, 480 bp, Homo sapiens
aaatcacagcttttacctatttgttaggctatagtgttttgtaaacttctgtttctattcacatcttctccacttgagagagacaccaaaatccagtcagtatctaatctggcttttgttaacttccctcaggagcagacattcatataggtgatactgtatttcagtcctttcttttgaccccagaagccctagactgagaagataaaatggtcaggttgttggggaaaaaaaagtgccaggctctctagagaaaaatgtgaagagatgctccaggccaatgagaagaattagacaagaaatacacagatgtgccagacttctgagaagcacctgccagcaacagcttccttctttgagcttaggtgagcaggattctggggtttgggatttctagtgatggttatggaaagggtgactgtgcctgggacaaagcgaggtcccaaggggacagcctgaactccctgctcatagtagtgg

SEQ ID NO: 5492 - DNA, 307 bp, Homo sapiens
aaatccttagcactgagtttgaatggtataaaaagtataacttccatagatgagctgttgttaggaaggcaccaaagaacctcctctgcactaaacaggagaatggaaagaaaagtctccattgagtacatatcatgtcagtttagtaatcaattatgttgatattgttaaactggttcaaagaaataaactggcaatatgtaaagtaattcctcatttgtgtcactatgatatagagatattaaaggaatgttggtttgctaaatagtatagatgtccatttgtactatagtttactgagcatttt

SEQ ID NO: 5493 - DNA, 258 bp, Homo sapiens
ctggaaagaccaatagctgactggaaagaagaaaggaagcagtttctattttcaatgtagaaaaaaaatctaatcgctacaaaggtcttgtaaaatcctcaaaacaaggtctagccaagtttattgtttggtaatttttttctttttttaaggggaaaaaaagcaagatttaatgtgaatactactggttacaactaatataacagcttgaaaaaatcatgacacagaagcataaatataatataaaaagacaatttt

SEQ ID NO: 5494 - DNA, 197 bp, Homo sapiens
cctacagggggggactatgtctagagtaggctgaacctgtaaagtggggctcccagataaattgggggcccctgagcaggaaggacctgactggcttaatttgacctggcccaggacagttccctttctgaaagaagggggcattctatgaaacacctgggtagaagtccagcagtgaagagttgggtcagtgtgta

SEQ ID NO: 5495 - DNA, 268 bp, Homo sapiens
ccatcatgtttaagttgaggaaaactcagttcttaaattatctgggaagggtctggattctctatttttgagattgactttatcacaatatgattcttacatctttataccatttacaattgtgttttagatctacagagttagaaattcgaaaactattccaggactaattcttaatcggcattatttatacaagaggtcaagtaacatttactagcgcaatactgcacttgtaaatgaattataaacgctcttctggaatatattt

SEQ ID NO: 5496 - DNA, 490 bp, Homo sapiens
  unsure (11): n=A,T,C or G
  unsure (12): n=A,T,C or G
  unsure (14): n=A,T,C or G
  unsure (49): n=A,T,C or G
  unsure (137): n=A,T,C or G
  unsure (276): n=A,T,C or G
  unsure (398): n=A,T,C or G
  unsure (418): n=A,T,C or G
  unsure (438): n=A,T,C or G
  unsure (464): n=A,T,C or G
  unsure (482): n=A,T,C or G
ttttttttttnntntttttttgcatcaagattcctgtactctaccctanaactaatacatctgaatctctgggaatggagtataacaatcagatttgaaaaggtttctttagtaattttaaggactgaccagtttanacactgctttgttagagtaaaatgattaggtacctagtatcaacctagccatccaaccttatattaataactaggaaaataaagggttggagcctctgtgtttctttgttgaaaaatctgctactattattagatctgngaaaacaattgaaaattcggttattatcaccttaaaagtacaaaacctatagattttgaaaatgtaattatttttctgtaggcatagttaaaaagattttgtaaatgttataaatcagtttntttataagcggtttatttanataaattttgttatactganatgattcactaatttttctaaatatnaatggttcagcctcttanttattttt

SEQ ID NO: 5497 - DNA, 489 bp, Homo sapiens
  unsure (282): n=A,T,C or G
  unsure (308): n=A,T,C or G
gccgccgcttgtgctgcagccatgtctctagtgatccctgaaaagttccagcatattttgcgagtactcaacaccaacatcgatgggcggcggaaaatagcctttgccatcactgccattaagggtgtgggccgaagatatgctcatgtggtgttgaggaaagcagacattgacctcaccaagagggcgggagaactcactgaggatgaggtggaacgtgtgatcaccattatgcagaatccacgccagtacaagatcccagactggttcttgaacagacanaaggatgtaaaggatggaaaatacanccaggtcctagccaatggtctggacaacaagctccgtgaagacctggagcgactgaagaagattcgggcccatagagggctgcgtcacttctggggccttcgtgtccgaggccagcacaccaagaccactggccgccgtggccgcaccgtgggtgtgtccaagaagaaataagtctgtagg

SEQ ID NO: 5498 - DNA, 159 bp, Homo sapiens
  unsure (11): n=A,T,C or G
  unsure (12): n=A,T,C or G
  unsure (14): n=A,T,C or G
  unsure (74): n=A,T,C or G
  unsure (98): n=A,T,C or G
  unsure (101): n=A,T,C or G
  unsure (102): n=A,T,C or G
  unsure (141): n=A,T,C or G
  unsure (142): n=A,T,C or G
cctcctgcagnntnccgcacagcaaaccgcacgctatggctgacagccgggatcccgccagcgaccagatgcancactggaaggagcagcgggccgcncannaagctgatgtcctgaccactggagctggtaacccagtannagacaaacttaatgtta

SEQ ID NO: 5499 - DNA, 528 bp, Homo sapiens
ccatctcccagaaagtttaacaaaacccgaccaggttgcccccttcaccttcttacaacctcttcccctttccccaggggtcctgtcctccactccagatcattcctttagtttagagctgggcagtgaagtggatatcactgaaggagataggaagccagactacactgcttacgttgccatgatccctcagtgcataaaggaggaagacaccccttcagataatgatagtggcatctgtatgagcccagagtcctatctggggtctcctcagcacagcccctctaccaggggctctccaaataggagcctcccatctccaggtgttctctgtgggtctgcccgtcccaaaccttacgatcctcctggagagaagatggtagcagcaaaagtaaagggtgagaaactggataagaagctgaaaaaaatggagcaaaacaagacagcagccactaggtaccgccagaagaagagggcggagcaggaggctcttactggtgagtgcaaagagctggaaaagaagaacga

SEQ ID NO: 5500 - DNA, 406 bp, Homo sapiens
cggccgaggtaaagctggctcaagactggcccaggcataatactgtcaatctaaaggtaaccggcaacatcaaaaagtacatctcaaaagaatcaggcttaaagataaacaggagaactggaaatatctaagagtaagaagtgtaaacaatagaaaagaggtagggtttagggttctcatcttgggatttccccaggtcttcaagcttctatccttcccgggttctgggtcatgggcctccagattccggccgttagtcttgagatacctttttcgcttgggtcctctatccatctaggtaggctttgtgacaggggccttccatccttgggttgtaggtcttccagctacaaccctgggctaatcttaggtcgttggccttgtgtcacaagtctcagttcttagg

SEQ ID NO: 5501 - DNA, 377 bp, Homo sapiens
cgccaacatgggccgcgttcgcaccaaaaccgtgaagaaggcggcccgggtcatcatagaaaagtactacacgcgcctgggcaacgacttccacacgaacaagcgcgtgtgcgaggagatcgccattatccccagcaaaaagctccgcaacaagatagcaggttatgtcacgcatctgatgaagcgaattcagagaggcccagtaagaggtatctccatcaagctgcaggaggaggagagagaaaggagagacaattatgttcctgaggtctcagccttggatcaggagattattgaagtagatcctgacactaaggaaatgctgaagcttttggacttcggcagtctgtccaaccttcaggtcactcagcctacag

SEQ ID NO: 5502 - DNA, 367 bp, Homo sapiens
gttttttaccgccttgtctggcactatgaccacgcttcagggttgcttctgggggtcttggtccctggatgtgccatttccttgcccttctgaccctcacacttcttccaaagtcttgagcagagttgggggccaatggtagcattgctgtcatctctgggaggagagtgagtatacaagtcagtgacagttcagccaggctcccttgggtttgggaagaggcactgcccttctgtgctgtggatcctgcttgtctgctctggagtccccccacccttgccaggagcttcacaaaccagagacgggctgtcagcaagagctcagacaggatgtggtgcaagtgcaggtgcacgagtttaaccctcag

SEQ ID NO: 5503 - DNA, 381 bp, Homo sapiens
ctgaaggccaaaggaatgtgcctgtgggatgccaaagccatcagtagctggaagaaagaatacctctttctagaggtttggtgtcctcttgctggcctgtcattatttggaaatacgcgcttttggaatttccttcattttcgctatttccaggttcagaaatcatacctaccacttgttctttctttgcccagtaaaactcagggtttctcttattcagagttaccatgttgcacacccccggtgctcagcctgcccagaagcccttctctgatctcagcaagatcttagtagtaaagctaacggatccattgaaattcatactcagcatctgtgactactagacaaagcccatttactgaaccataagtgtgcactttt

SEQ ID NO: 5504 - DNA, 264 bp, Homo sapiens
ccaacattggagaccacttctgtcaaatggtgatttctgaaaaggaagctatgtcaactattgagccacacagacaggttgcttggaagcgagctgtcaaaggtgttcgagaaatgtgtgatgtgtgcgacaccaccatcttcaacctgcactgggtgtgtcctcggtgtgggtttggagtatgtgtggactgctaccggatgaagagaaagaattgccaacagggtgctgcttacaagactttctcttggctaaaatgtgtga

SEQ ID NO: 5505 - DNA, 279 bp, Homo sapiens
gtgtgagaggtgtggtagcagattgcaatgctctgcacctcttccttgcaagtgagcaacttcaggctctctgggcagaggctggcccactgtagtttgcagacatgctctccagatggttttactaagtcccctctccctgatagggaatcctgctggaccagcgcagccctggtgtggagaggttaaaagacttgcacaggatcaccaagtcatgctgtagagccaggattcctagacccagggctctgcactctcaaggctggccccatgtgctca

SEQ ID NO: 5506 - DNA, 406 bp, Homo sapiens; identical to SEQ ID NO: 5500

SEQ ID NO: 5507 - DNA, 270 bp, Homo sapiens; identical to SEQ ID NO: 2914

SEQ ID NO: 5508 - DNA, 497 bp, Homo sapiens
ctggtgatcaagtctgggaacagccgtaacaggtcaaccttgtggagccatcgcgagttagagggtgaaagatggcagaaaaaaaagtcttgtgtgtgagtgtgttttttgagtttgcatcaatcttaatgtctcttcataatacttttataatacattaagcctcttgtctacatatttggagagaatatgactttactagcagagaaatacaatatatcttgtctactggactgtaaaatatatgtatgaaataaaattagttccatttggtcttctagtatattaaagtgctatctgacgttgttatcctgtttttgcaaaaaaaaaaaaaaagttaactacagaccattgtttctaataagcagagagatctattttagtagtaaactgaaggtttagttgtgagcttcagattttgtgaactccagatgttgtgcggtgttttttttttttttaagacaacaactaaaaaaatgcaaggaatatgtacactg

SEQ ID NO: 5509 - DNA, 286 bp, Homo sapiens
aaatgaacacattccaggcaatgtaagacagtcaaaagacaaactcaaatccctgagaatggctgggaagggaagatggtggtaaaaattccaaatgagtgaaacttacaaagggcagtctcccctgcctgggctctgtcctagacagaagtgacagtgatgactttggtgatgttctccccagtgcagagaactgcattcagaattagacaacctcagtgacgagtatctctcctgcctgcgtaagctgcagcactgtcgagaagagctgaaccagagccagcag

SEQ ID NO: 5510 - DNA, 419 bp, Homo sapiens
ccttctaattagtctaacttaaacggacgggattcacctaacaaaagcaagaagaaaagcacaagaacaggtgtcttaatgcatttggataatttatttggggtgtgtgcgtgtgtgtgtgtgtcttggtggaggtgggggccgtgttctcaccaagccttttcataatcaagtttgctttgcaaactttatggccttacacccagcagaacagtccttgctaataaaaggaggatgccctgtcacagttctctgtaaattatcatgtgttgggaagttctgttgatgcttagtttgatcttccatggtggacacatctgttctgtatgtacaaggcattacatgtgtgttttagcggatgggaattgaagcctttccacagtccttgtgctctgagatggctgttgagctctgctcag

SEQ ID NO: 5511 - DNA, 264 bp, Homo sapiens; identical to SEQ ID NO: 5504

SEQ ID NO: 5512 - DNA, 275 bp, Homo sapiens
ctgggcgacatcggcacgtcctgttacaccaaaagtggcatgatcctttgcagaaatgactacattaggttatttggaaatagcggtgcttgcagcgcttgcggacagtcgattcctgcgagtgaactcgtcatgagggcgcaaggcaatgtgtatcatcttaagtgttttacatgctctacctgccggaatcgcctggtcccgggagatcggtttcactacatcaatggcagtttattttgtgaacatgatagacctacagctctcatcaatgg

SEQ ID NO: 5513 - DNA, 335 bp, Homo sapiens
  unsure (16): n=A,T,C or G
cctgcttcacttgcanataagtttattataattctccagaaatgtgcaggatgtgcattagcaaattgcactgtacttttcactccagcctgggtgacagagcaagactcccgtctcgggggcttaaaaaaaaaaaaaatgctgtatctaaatgaatctgtgtaattgggcccagatgtgggtttgctcagtattagtagacaaggtctttgttcagacgattaggtgcctaactggcaaatgccttagtttcttaaaacgtattttctgatgtggctttacatttcaaaagtgaacttgattcaacctgagaaaactgattaaaaaattagttt

SEQ ID NO: 5514 - DNA, 294 bp, Homo sapiens
ttggcatttcaagcaggaaatgaaatgcttgctttaatggcaaagcagcgttaacatttttcctgtcgtgtagcagagagtacaagaatcatttcagcaaagcagtgactcaccatgagacgttatctccgtggagctgcgttttgacttttcccactctcttactcatagaaggaggacaaaggaacgaaatgaaatcatgctcacaatgaactgttcattacatcaactgatctctctctctctctcttcctctctttctctttctcccataccccaaggcaaaattttttt

SEQ ID NO: 5515 - DNA, 93 bp, Homo sapiens
ttttttttttttagataatatatattaaaaaataaacctccaattcagggtataaaaacagagcgaaggcacttgggggtgggggtggagggg

SEQ ID NO: 5516 - DNA, 188 bp, Homo sapiens
cctgggacctggcctgcacccagtctgtggcccagggaggcatggcaccctagcagcaaagcctgggcaaaggctgagccataccagacacagtagcccaggctacacagggcagagctgcgagtgctacctagccctggggccaaggcgggcaccacaatgctgaagagggcactgcccacagccag

SEQ ID NO: 5517 - DNA, 286 bp, Homo sapiens
aaatgaacacattccagacaatgtaagacagtcaaaagacaaactcaaatccctgagaatggctgggaagggaagatggtggtaaaaattccaaatgagtgaaacttacaaagggcagtctcccctgcctgggctctgtcctagacagaagtgacagtgatgactttggtgatgttctccccagtgcagagaactgcattcagaattagacaacctcagtgacgagtatctctcctgcctgcgtaagctgcagcactgtcgagaagagctgaaccagagccagcag

SEQ ID NO: 5518 - DNA, 356 bp, Homo sapiens
ctgacagttctccatggcaactcagtcctccagcagacccctgcatacataaaggtgcaaaccaacaagatggtgatgctgtcctgcgaggctaaaatctccctcagtaacatgcgcatctactggctgagacagcgccaggcaccgagcagtgacagtcaccacgagttcctggccctctgggattccgcaaaagggactatccacggtgaagaggtggaacaggagaagatagctgtgtttcgggatgcaagccggttcattctcaatctcacaagcgtgaagccggaagacagtggcatctacttctgcatgatcgtcgggagccccgagctgaccttcgggaagggaactca

SEQ ID NO: 5519 - DNA, 405 bp, Homo sapiens
ccttattttgtcatactaagtgtctcctgtaattttcaggaagatgatttgttctttccagaagaggagacaaaagcaagatagccaaatgtgacatcaagctccattgtttcggaaatccaggattttgaattcgagatgaaacaaccagcaatcacagttaaatcttaactttgcctgcactctttgtaggaatgatcagaaatttatctttatcattctgagtgcttcaggagtacaataggaagaaagatactggagaaagcacaagtgtaatcaccatgaagtctgacaacaggagcccattatttgcgtactgtcccaccctgtatcatggttctctgggaacaagctttatgattctcattagagtttatttgttgattgtcagtagttgcgactttt

SEQ ID NO: 5520 - DNA, 208 bp, Homo sapiens
aaaataacctaaattagaactacatataaacagggagttttctcatacattcagaacccaagcaacagcaactatccttaaagctcaaaactgattacagctaacatcaggtccgacgtgacttacgtaaagctgaacccagagttagttcaagttaagattttacgaattttacaaaacatgaactttgatcttggcctctgtcttt

SEQ ID NO: 5521 - DNA, 488 bp, Homo sapiens
cctgcttgatccataggctcacatttgatcccaactggcggctgcttcttggcattaactttggattcccaaccagtaaatcttagcaagatctgagtttctccaggtatgatattattttgtttgaccatccttatcttcaagggctgtgggatctggcagctcttcatttggcccacaccgtgtgaggttgctcttggtgcaccgaatggggaagtttctacatcagtacctcggagagtccactggaagccctggacagtgggaattggtggcacccccagcatggaggccaagaacacacagcactgaagctccaggacaccctcaggaggacggtaagggacggtaaggtgagagcctgggtcaccaggaaccttcgcctgcatctaaacaggatttgctttcagattgcctgtaggtcccagctacttgggggctgaggcaggaggatcacctgagccttgggaggtcaaggttgcggtcag

SEQ ID NO: 5522 - DNA, 236 bp, Homo sapiens; identical to SEQ ID NO: 3713

SEQ ID NO: 5523 - DNA, 287 bp, Homo sapiens
cctctcctgtgggttccagaccctgttccagcaacaattgctgggacacctgggccgactgctccacctcgccaggccctggccctctccatctcagccctgacagccacccagtgataaacacagcaggcttcctaagcaatgtgacgcaccagaggggtggtggtacacgctccccttgaagtcatctgaaaattagagaacagatttgcctcagagctgaagagagaccctattccaagcatgaatggccttgacaatgttcctgcccagtgagcgacccttgg

SEQ ID NO: 5524 - DNA, 312 bp, Homo sapiens
ctgccgggcctgcttagctcctccctaggcagaagctttgttccagccccacttccacatcccaactccacagtcaggatgggaggcacatggttgctagcaggggaaagaatactgtagttccagcctctgctcctttcagtctcagcctggatggtggtcactcatccctctgcagctagttcctcacttgtcccagcccaggagccaggagggcactcaatcacacccaaaggagcaggcagtgtgacttcagtcatcttcagatgactcctcttctgcctcttttagccactggatgaacctctgcag

SEQ ID NO: 5525 - DNA, 269 bp, Homo sapiens
aaaaatgaatttcctgagtattaatactaaaatactgttacatgatcagctcttgatataattgaagagatttcagatacctgatgagtctcattctcacactaattcagaaccttggaaggcactgagtgttcaaaaaaggtagctcttaactgaggaccctctgttgaaccattgtgcgcacccctggctcttgggcagtgtagtagcaggaagacagggttgttgccattagaaatggaggctttaactctccctgtcccccattt

SEQ ID NO: 5526 - DNA, 329 bp, Homo sapiens
aaagtaacgttactgctatatccttaggcacggtaagctgaggatattgtgagtgttcgcaaatatacagagaccaccctcacatgtagaaccgtagaatcctagagttggggaaaagaggtcttgggggacatctggacggctcccctccagagtagaaccttctcccccgtgggttccacattgctctgtggggggcagagcatggtacggtgtgcaagaaacaagctctccaagtcacctccccccatacctccatctccttatctggaaaaggaggggagtcatccacatgacctttgaaagcatttccagctcagttactttgg

SEQ ID NO: 5527 - DNA, 346 bp, Homo sapiens
ctgggcccgggggaccactaccaccaattcgcggagaccagtagtggccccgaatgtctagctgcgctgttatttattggatacaaagcaaaaggggcagggtaaagagtgtgactcatctccaatgatatgtaaggttacgtgggtcacgtgtccactggacagggggcccttctctgcctggcagccaaggcagagagagagaggaagagagagagacaggcttatgtcattatttctgcatatcagagacttttagtactttcactaattttgctactgctatctaaaaggcagagccaggtgtacaggatggaacatgaaagtgggtggaccaggagcgtgg

SEQ ID NO: 5528 - DNA, 142 bp, Homo sapiens
cctgcccgtccgccagtgagtccttggtttttaataatgagaagtcctttcccccaaggtgtgagcattgcagcgcagtgtgtgtgtgtggttagagccagcttagtccttcactttgtcgaccgaagtgggagctcaacag

SEQ ID NO: 5529 - DNA, 470 bp, Homo sapiens
  unsure (259): n=A,T,C or G
  unsure (316): n=A,T,C or G
  unsure (317): n=A,T,C or G
  unsure (318): n=A,T,C or G
  unsure (402): n=A,T,C or G
aaatgatctgccaaatctctttgatagtttaggaatgttgtggggagggttcattaataaaagttcagcaattttttaactgaaatagtttatctcttttacctagtcacaaaaaaggtatgtaaacaaggccattatatgtgtttattgctctttatttccctatctagattttctaagtatcttagctttcttaatataagtttaacttggtacttactgaaaatgcctttttacccctgttaacggtattttgagncttttgaaaagaacttggttgacactgcttttattgtggataaaggagagatggtcnnntaattaatggcttgaagtattattggagtggtttatcatttctgaaactaatcgtggtcagaattgactttgaaaagcattgcntttttacagaagtatattaactttttaggagtaatttctaggttttggattgtaatatgaaataattt

SEQ ID NO: 5530 - DNA, 281 bp, Homo sapiens
tggccccgaatgtctagctgcgctgttatttattggatacaaagcaaaaggggcagggtaaagagtgtgactcatctccaatgatatgtaaggttacgtgggtcacgtgtccactggacagggggcccttctctgcctggcagccaaggcagagagagagaggaagagagagagacaggcttatgtcattatttctgcatatcagagacttttagtactttcactaattttgctactgctatctaaaaggcagagccaggtgtacaggatggaacatgaaa

SEQ ID NO: 5531 - DNA, 319 bp, Homo sapiens
ctgcatttcagggctttctatcgatgggcgtgcctgcgcctgcagctcctggccttataggaaatgtgatgggacagagtccaagcatgatggtgggcatgcccatgcccaatgggtttatgggaaatgcacaaactggtgtgatgccacttcctcagaacgttgttggcccccaaggaggaatggtgggacaaatgggtgcaccccagagtaagtttggcctgccgcaagctcagcagccccagtggagcctctcacagatgaatcagcagatggctggcatgagtatcagtagtgcaacccctactgcaggttttgg

SEQ ID NO: 5532 - DNA, 404 bp, Homo sapiens
  unsure (14): n=A,T,C or G
cggccgaggtaaanctggctcaagactggcccaggcataatactgtcaatctaaaggtaaccggcaacatcaaaaagtacatctcaaaagaatcaggcttaaagataaacaggagaactggaaatatctaagagtaagaagtgtaaacaatagaaaagaggtagggtttagggttctcatcttgggatttccccaggtcttcaagcttctatccttcctgggttctgggtcatgggcctccagattccggccgttagtcttgagatacctttttcgcttgggtcctctatccatctaggtaggctttgtgacaggggccttccatccttgggttgtaggtcttccagctacaaccctgggctaatcttaggtcgttggccttgtgtcacaagtctcagttctta

SEQ ID NO: 5533 - DNA, 391 bp, Homo sapiens
cctacagtgagattgggatgaaaggcgagcgccggaggggcaaggggcacgatggcctttaccagggtctcagtacagccaccaaggacacctacgacgcccttcacatgcaggccctgccccctcgctaacagccaggggatttcaccactcaaaggccagacctgcagacgcccagattatgagacacaggatgaagcatttacaacccggttcactcttctcagccactgaagggccagaagatgaacagactgaccttgatgagctgtgcacaaagtggcataaaaaacagtgtggttacacagtgtgaataaagtgctgcggagcaagaggaggccgttgattcacttcacgctttcagcgaatgacaaaatcatctttgtgaagg

SEQ ID NO: 5534 - DNA, 277 bp, Homo sapiens
ccaggatggtttcgatctcctgacctcgtgatccaccggcctcagcctcccaaagtgttgggattacaggcgtgagtcaacgtgcctggatgtaacagttctcagtttagcagttatccgtccagttctttttcaattgatctgtgctttttaacccataaaaataggatagatagtagtatctgtctcacaggaaaagaacagaagtgaaatgcaaagtgggtaatgttttcctttttctcgttcctaagagctgagacctactgcagaaacacag

SEQ ID NO: 5535 - DNA, 274 bp, Homo sapiens
caggtaaacacctatagagatcttcaattccttgagtctgagcttgtgggtggaattctaaatttgtatcataatctgtcttttgtgaaacattttgaaaatatgtatatataatattgtatatgcaaattgtgttgtttcacttgtaaagggaaaaggcttatttttctttatatttctgataacttgttttgcatatgaccagcactgactgaaaggcatgtgtagctgcaaacactgttgctttttttgtgaaatgaaaataaaagtattt

SEQ ID NO: 5536 - DNA, 261 bp, Homo sapiens
  unsure (34): n=A,T,C or G
  unsure (58): n=A,T,C or G
  unsure (69): n=A,T,C or G
  unsure (140): n=A,T,C or G
  unsure (144): n=A,T,C or G
  unsure (149): n=A,T,C or G
  unsure (176): n=A,T,C or G
  unsure (186): n=A,T,C or G
  unsure (195): n=A,T,C or G
  unsure (197): n=A,T,C or G
  unsure (200): n=A,T,C or G
  unsure (205): n=A,T,C or G
  unsure (216): n=A,T,C or G
  unsure (225): n=A,T,C or G
ctcttttttttttttttttttttttttttttttncggctaattttgttttttaatganaaacatctganttgtacatatcacaaacagcttcaagtttctgtaccaacccccggcccccacccccgccggggaaaccttnactntgtanagcctaaaggatgatggaaaaagggcnaggaaagcanaaagagaancncancatantacaaactacnccgcgcggnttatttaggatttggaaattcaacatgctcagggac

SEQ ID NO: 5537 - DNA, 198 bp, Homo sapiens
ccaaggccccttttgcagcccacggctatggtgccttcctgactctcagtatcctcgaccgatactacacaccgactatctcacgtgagagggcagtggaactccttaggaaatgtctggaggagctccagaaacgcttcatcctgaatctgccaaccttcagtgttcgaatcattgccagccaggaggaagttcaca

SEQ ID NO: 5538 - DNA, 546 bp, Homo sapiens
ccttgctctattactgtgaagcactaacaaagacaaacctccagctccagaaagcagcttgcctggctctgaaaatccttgaggctactgaaagcattaaaatgctggtgacattgtgtcaatctgatactgaagaaatcagaaatgtggcctcagaaaccctcttgtctctgggagaagatgggcggctggcatatgaacaattggacaaatttcctcgagactgtgttaaagtcggaggtcgtcatggaactgaagttgccacagccttttaattacaggttaactgcctaacagacctgcccgggcggccgcccgggcaggtaaatttcaccagttaaattaggtcaaatggaaggaactcaaatgagtattgcccaatcagagcccattatttgtaagtcatcagtaaccttaaaactccacttagacctaattattgaaaacttgcatataatgaagtgaaagaatttccattcatcaacctctcaatcccaggttttcaaagaaaaacctatctaaggaatacttaccaaaatcagataa

SEQ ID NO: 5539 - DNA, 236 bp, Homo sapiens
cgcccggcacccaggccgcaccaaaggctataactcagatgacaacctctgtgagccatccctggagtttgaggtccccaaccacaggcagtacgtgtcgcggccaagtagcttagagagcagtagaaacacatccagcaacagctcacctcttaacctaaaaggctcctccgagcagctccatggccggtctgagagcttcagcagcgaagacctgatccccagcagggacctgg

SEQ ID NO: 5540 - DNA, 322 bp, Homo sapiens
ctgctcatgctgcagaggagacagctagtcaggaaccctggagattcaagacaacttgctggtcccctttgcccagggctgtggtcctaatcacagtccttcacctttcccagggttagcctgtgtttcaaatgcatatgatctgcgctgagaggacaacagggggtcaggaacctggggttctctggggggcagactaagacgactccgggatccagacccttctgcaccttcagatgggagctccaggcagctaaggggccgaggagaatgggcagagatcatgctacaaggggaggttctggggatgaggcagtaatcc

SEQ ID NO: 5541 - DNA, 415 bp, Homo sapiens
  unsure (362): n=A,T,C or G
  unsure (363): n=A,T,C or G
  unsure (364): n=A,T,C or G
  unsure (375): n=A,T,C or G
  unsure (377): n=A,T,C or G
  unsure (388): n=A,T,C or G
  unsure (400): n=A,T,C or G
aaacgattttgccttaaattgttgctaaatgtttatctacacatgctgtcagaaataaccttgttaagaaggtgaagctggtgtctcagcaaatcagaccccttggagaaggcgtcgaatggcctgtgccccgttttcctttttctctttccgcaccatcaaaaggaaaagtgagaaaatagcagaaacattagttaaatcctgaattataccccataacctacaggaataatctcactacactgaaagctgacaatatttgtaggattttttgaaataattaggatcctaattattaataaactggtaattttggctaggtttacatctttaactaataatactttcaattaaaaaccttnnngaaaaaaacananggttgcttttnactatttatggnttacctgacttacca

SEQ ID NO: 5542 - DNA, 498 bp, Homo sapiens
aaattgaaatgaataaagttagcaccttgcttgttgatgtgaaatttcttcaactccacaagtgttaccattcataaatctaatttccatgaatggaaagtggaggaacatgtgttcaaatgcctggctgaagggtgcagcaaggttcttaccagccaagaggtggggtgatctgtccaacaccacccggagacaagggataaaaagtagggatatcaggagctggaggatgtctggacatgccttgtttggagttgacatctgatgggatgtgcgacgggtgtgatcctggagaaaagtgctcgtcactgtaagtgatgaggggggtgagaggatggaccgcatgggatggctgcaccacgggcactttatttgatgttctcgggatgggtggagaaagagatccatttgacatgtatgggtcgttattcatatttggcatcattatgtacccggaataactcgagtaggagggtcccttgttgtagaggacctcgg

SEQ ID NO: 5543 - DNA, 245 bp, Homo sapiens
ctgaacggtctggggtgagttggaggtcaaaggaggttgaagggttcgggggagaacaggacggtcggcgtgcagagttcctggagtgctggggggcctgagatggttgtatgacgtctggaggattcaggagggtgtatggggtctcaaggacacagcagtcccgcttcctcccctttcccacaggacccccaaggaagtgggagatgtgatcgccctgagcgacatcacctcctcgggggcag

SEQ ID NO: 5544 - DNA, 491 bp, Homo sapiens
ccctatagggcgaattgggccctctagatgcatgctcgagcggccgcccgggcaggtctgcttttgagtcccgcctggagaaacgcagtgaatttcggaagcagccagtggggcattccaggcaaggtgattttatcaaatgtgtggaacagaagacagatgccttggggaaacagtctgtgaacagaggattcactaaggacaagactctcagttcaatctttaacattgagatggtaaaagaaaaaactgcagaagaaataaaacagatttggcagcaatattttgcagcaaaagatacagtctacgcagttattcctgcagaaaagtttgatttgatctggaaccgggctcagtcctgtccaacatttctatgtgctctgccaagaagggaaggttatgagttttttgtaggacaatggacaggtactgaactccacttcactgcacttataaatattcagacccgaggggaagctgcagccagccag

SEQ ID NO: 5545 - DNA, 452 bp, Homo sapiens
aaaacttgctttgtttagaattcccacctcatttttccatggacaaaagtattctttatgtcctagtgcacttacaatttggtattacctgggagtgaaaagaaatattacagccatgcctaactgacttcttgaggtaagattgttctgtcagaaaaccctctcccagttcccctgcagctcttcaggaatccacatctctccagagctctttgttctcatgggtggcacctccagagtgaagaagatcctttgtcaagaagggaaacagaggggaaatgagagggtcctgcaggcagagctggaatcaacttccactctgcctcttgcaagctgtgtgaccctgggcacaatttctccttcctctggaaacctctgttttcttagatttggagcaggatggtcacactgaccttgcagagttctgagaatcagagacagaacataaaagg

SEQ ID NO: 5546 - DNA, 338 bp, Homo sapiens
aaagaaatacagaaaaagaatgttaagtattctcagtccaacgtgctttgcatcatcaacaaaatgacaagtcaaagtattttgcagggatcagatatcaatcaacctccataacaagttaggtatatcaaatactgctgtaaaacccatccagcaaaaactgattattgtggatttcagtacaaatttccaagttgtcacacattactgatgatgatcagggcaggcatggaattctgctgacttgtttcaaacactgtaacttggtccgataacttggcaaataccctaggagttccaaggttataaacacctgtatgaacaaagcatgctttcag

SEQ ID NO: 5547 - DNA, 488 bp, Homo sapiens
  unsure (403): n=A,T,C or G
  unsure (448): n=A,T,C or G
  unsure (452): n=A,T,C or G
caattatttccaatttttattttattcttaaaacttaagcatggtaaaatgttaagctgttttcatccactgatattattctactataaaaagcccttcttgagcagatttgatgataaaaaggagaacatttctaaggtataattagagaagctgttgcatgagaaatcatgtctccatctccattttgctatgcgttatctgaggattgtttctgaaagagatctatttaggcagtgtatgtatgtgtcagcatgtaaaaagtaaagaactgaaaatagacaaaccttgtaaatgcacttcaaaaccaattgtggctcaagtgtaggtggttccccaaggctggtaccaatgagactggggtttgggaattagttggtcatcatccctcctgctgcccagnagtggtcagtcattttccatgagggatggactaggaaaaatgaantgtntattataaaggagagttcctgtaacttaaggagcaa

SEQ ID NO: 5548 - DNA, 549 bp, Homo sapiens
ccaagtctacttttgaaataagacatggagttttcttgcataacccagggctgagctgctcagttaggagtcagagttggcaacatgagaggaagaggaggaaaaattatcctctctgcacattaacttgctctggaagctctcacataattacacctagaagttctaagggtcatataagggtctgatctttgggtcatatgtcaaaacagagcagctctgatgataagatctctctctctccacatccccatctcctttgtcatctctatctctgcacatatatttctcaacttgctttgctcaaagcagcctatacgttctggataaaaacctcataatccttatgttccccacgtttcatttcagaatttatcaaagagtatggcatgaatctaactgttcctttcactttccttgctcttgtagatcaattattacctaccgaacacaaggattagaatcataatgtgagatgtaggattatctaattttacaaaccttcaactcgaaaaacttcacattccaaatactgacggtggacctcgg

SEQ ID NO: 5549 - DNA, 273 bp, Homo sapiens
ccttccaattcaggccacatgtacctccagatactatgtggctggctgcctctgcctttttgggcaatctcagttccaaatattctatcatgttgtcatgccagcttttggcttgggaaatatggtcagtatgtctgtggggaaactgattctgtgtgccggccgcagaggaaggactctgggctggaggaaaggggtagggctcagcgccagtgctaggactggttgaactgtagggtgcagccctggctagtgaccacaccccatgtccag

SEQ ID NO: 5550 - DNA, 207 bp, Homo sapiens
  unsure (11): n=A,T,C or G
  unsure (12): n=A,T,C or G
  unsure (109): n=A,T,C or G
  unsure (176): n=A,T,C or G
ccagagggaanncccaagagacgtctctgaagccaccgttcctgattattcagaggcagggtccacagtgagtgactcggtggggctggaggaacccagggtgacccanagggggctctggagcgggtccctaacatctgaaaaagtcctcccagggaactcggagctggaacttncaggcagcttcgggggtgacatttgtatccg

SEQ ID NO: 5551 - DNA, 291 bp, Homo sapiens; identical to SEQ ID NO: 409

SEQ ID NO: 5552 - DNA, 293 bp, Homo sapiens
ctggcctctcctgacgtgttcctctttaggagcaacaggtgaaaaaatgatacggttctggggcaggcccatgttttgtgcatactgttgaatattaggttctcctactgctggaaaacgcaacagccagagtacactattgggaacacgcttcagaatgtttgcccacatctgcaaagtagaagggtcaattttatacaactgattaaagttacagtatacgatggcatcttctggtaacccgtactgagaacgggtggttacaataatggtacggggaacctcctctccag

SEQ ID NO: 5553 - DNA, 399 bp, Homo sapiens
aaaatgactgtctgactcaccatggtaatttttcacaaattaaaaacacattttgggttgtgcaacagtgttctcatctttccaggcaggcagattattttaatgctgttatacagggaattgggactctcggattttcttttttaacctttttatgcctttcagtaggggaagtttccttgaaagttagagagctgcaaatctctaagtatcaatgtaaagaagccgatgacccaattcggaaggtggttcaagtgttctgtttgtttacaaaggcacagaccacgaccatggacacacccagtggaagtaaccacacccggtgtgttcctagaagctcatctgtgacagttcaacaagaacttactattctagaaaagtattacacaaagttatttt

SEQ ID NO: 5554 - DNA, 245 bp, Homo sapiens
ggagtgcgcttcccagggcaccattcgcttaaagtgtgttaatgacttgtccagcaagtttctttaccttcccacacccctcttctcaacgtccccccagagtcctcaggggggccttcgacctgcaaaagcctcacaggagtgcgaggggccccagctcccagggcggccgatggagcctcacacggtcaccttctccatcacgctttcagccacgtggacttcgtctgcctggacggtgacag

SEQ ID NO: 5555 - DNA, 472 bp, Homo sapiens
ctgacgctgacctggactgcctcagtctagaagcaggccagagagcagaggcacgtggcatcccagggcgacctcagacggccagccggttagctagttctgctgttgcttcacgagttctgagcattctctgctagcctatggaagctgcagccctcggaggacagaagtgttgtgcgcccaacagaaccctctgagacgcaagctgctcccttggctagctcatatgtggaaatagccctgtaattcgaggtaactccttccgctcgtgtccacatccctcttgttgagagctcactgaaagtcatgtgcccggggaatgttcctgtgactgttttttgtttttccttttttttttaactttgtttttgtttttttcaattaagctggaactaaagtcaggcccagccattacgctccccacgtgcagccaggtgcagcctgggcccagtcatgcctggctcatagatga

SEQ ID NO: 5556 - DNA, 215 bp, Homo sapiens
ccactgtgggcgtgagcttctttatcacctgcatcaccctggtgtacagcatggctcactctttcggggagagctaccgggtgggcagcacctctggcatccacgccatcaccgtcttctgctcctgggactacaaggtgacgcagaagcgggcctcccgcctccagcaggacaatattcgcacccggctgaaggagctgctggccgagtggcag

SEQ ID NO: 5557 - DNA, 156 bp, Homo sapiens
aaaagataagccatttctatcaccatcccctcagtgcccagaattccagatgggaagtgataccgttttagagttaaaatttccggcctcacgcgtgtaatcccagcactttgggaggccggatcacttgaagtcaggagcgtcagaccagcctgg

SEQ ID NO: 5558 - DNA, 250 bp, Homo sapiens; identical to SEQ ID NO: 2938

SEQ ID NO: 5559 - DNA, 335 bp, Homo sapiens
ttgaagacatgcacattttgttatgtctatgcagccctcagagcagtcacaggaatcagtaaacatgctggaaaagttggttagattatatgctcgaggccacacagtctttctgtacttaaactgtgggagctttctactgtcaatttcattacagaaagaaatgggcactgattccactccattgctaatatccacatcagaaacaacttctttttgctttgggtaattccgagccaactgaacataggtattgaaagaaaagttatgtggagtgctgaagaatgagagtttgtctttgcatgtcgtctttggaagtgacatttgattggcag

SEQ ID NO: 5560 - DNA, 380 bp, Homo sapiens
ctgaggaggttcctgaggatgatccactgctcactgagcgtggtcagggagcgccgctgtcggacgagcatcttcatcaaatgtgctgagaaccctctgcacctctccacgttgcccatgcccatttccttggcaggagttgctagtgctgcgttaagcctggcatgccgtgcaagagagcgataaaaatacttctggcatccatcccatgaagacgagatttctgtaagcagcctagaatcagcctcctgagtgctgctgacgatggacaatgcgctctggagatctaatgggtgaagatgaagcatctcttgagggttttttgaacgggcccaagcaagacctttgcgatacgacaaaccaatttttgcaaggtgttt

SEQ ID NO: 5561 - DNA, 331 bp, Homo sapiens
aaatattgctaagaaagaacttggagagagaagttggtgataccggagacagcaggcaacagacagagtgagaggcccgaagaacaagaggaggagggagtctcttctgggagcagaaggagtgtcgacttaaatattagggagccaaagatgaacctcgcagagaacctgcaaaacccagttgcagaaatacctgcccacacctaaaaactcagtcactgaaagtctgaagtcaaatgattatgtgaaatcttagtagtgggtacatgtggtttcattagattattctttgtatctatatttgtactatcttataagcactataagtttt

SEQ ID NO: 5562 - DNA, 293 bp, Homo sapiens
ccttccagggctgaccagtttgagtatgtaatgtatggaaaagtgtacaggattgagggagatgaaacttctactgaagcagcaacacgcctctctgcgtacgtgtcctatgggggcctgctcatgaggctgcagggggatgccaacaacctgcatggattcgaggtggactccagagtttatctcttgatgaagaagctagccttctgaacctcgcctgaagccagcctctctgccaagtcactcaggtcatgggcattgttcaagcctgagtggcagccgctcttgctcac

SEQ ID NO: 5563 - DNA, 342 bp, Homo sapiens
  unsure (271): n=A,T,C or G
  unsure (274): n=A,T,C or G
  unsure (280): n=A,T,C or G
  unsure (294): n=A,T,C or G
  unsure (295): n=A,T,C or G
  unsure (314): n=A,T,C or G
  unsure (330): n=A,T,C or G
ctgagttcccttcccgaaggtcagctcggggctcccgacgatcatgcagaagtagatgccactgtcttccggcttcacgcttgtgagattgagaatgaaccggcttgcatcccgaaacacagctatcttctcctgttccacctcttcaccgtggatagtcccttttgcggaatcccagagggccaggaactcgtggtgactgtcactgctcggtgcctggcgctgtctcagccagtagatgcgcatgttactgagggagattttagcctcncanggacancatcaccatcttgnnggtttgcacctttatgtangcagggggtctgctgngaggactgagtt

SEQ ID NO: 5564 - DNA, 201 bp, Homo sapiens
ttgaggtttggaaggtggaggtaaacttgaggccaccttcttcactttggccgtcttccgctgccagagctgtggatgagcttgactctcctccctctcacacctgacatggaatctatcagcagatcacgtgtgtgctacccttgaaatcagtatctagaatccaatcacttcccagtgcccctgctgttagcggcctgg

SEQ ID NO: 5565 - DNA, 258 bp, Homo sapiens
ttgagatttcccaggactggctttaatttgaaaaatctgattggggtctcttcccgtatcagagaaggaacagcccaagctatgaccccagggccagggaattcagtccccaccagaccctgtcattccatcactagggggtaattccaggctccccctgccagccctgagacaggaggacggatgtgaagttgcccaggactagattctgtctctccaaagtggcccaagccctgttctctgtactagggaagccag

SEQ ID NO: 5566 - DNA, 348 bp, Homo sapiens
ccaggtgccggccctggccccctctaaggccaaactcccccctgcagggctggatcttcaacgtggttccttggttggtggcgattccggccagtctattcagcgggtttctctctgatcatctcatcaatcagggttacagagccatcacggtgcggaagctcatgcagggcatgggccttggcctctccagcgtctttgctctgtgcctgggccacacctccagcttctgtgagtctgtggtctttgcatcagcctccatcggcctccagaccttcaaccacagtggcatttctgttaacatccaggacttggccccgtcctgcgccggctttctgtttggtgtgg

SEQ ID NO: 5567 - DNA, 383 bp, Homo sapiens
  unsure (15): n=A,T,C or G
  unsure (16): n=A,T,C or G
  unsure (88): n=A,T,C or G
gtacaagcttttttnntttttttttttttttttttacagtcttcaaatattttttattggaaggccatgcattgccttcatttattgnatttcaaatcactgtacatttacttttgtgaaaacactgcctgcattttctagtacaaaaaaaacctaaaaattgtttcaggaatgtagagaaatatccaacttaaatagcgaaaaagtgcaccataattactgctgcactgcagtcatttctgcaattcccatgtttcttaaataactatcttgtcagataacacacaatataaagagcaattatgaaaaacagacatttacatatacttctaaagtcttattgggaatatcctgttggcattggataaccaatcataggtgca

SEQ ID NO: 5568 - DNA, 206 bp, Homo sapiens
  unsure (12): n=A,T,C or G
  unsure (20): n=A,T,C or G
  unsure (23): n=A,T,C or G
  unsure (27): n=A,T,C or G
  unsure (32): n=A,T,C or G
  unsure (148): n=A,T,C or G
  unsure (162): n=A,T,C or G
  unsure (166): n=A,T,C or G
  unsure (167): n=A,T,C or G
  unsure (179): n=A,T,C or G
ccagagggaagncccaaganacntctntgaanccaccgttcctgattattcagaggcagggtccacagtgagtgactcggtggggctggaggaacccagggtgacccagagggggctctggagcgggtccctaacatctgaaaaagtnctcccagggaactngganntggaacttccangcagcttcgggggtgacatttgtatcc

SEQ ID NO: 5569 - DNA, 383 bp, Homo sapiens
ccaactgctctttcaactccaagcttttcttctcctaaggaaagtgttccaagaagacatctttcagaaggaacaaattcttatgcgacaagacttctaaataatcatcaagttccacctcagtctgaacctgagagcaacagcttgaaacggagactttctactcgttcctcaattttgaatgcaaagaatcggagattgagtagtcagtttgaaaattcagtttataaaggtgatgatgatgatgaagatgtcatcatcttagaagaaaacagtacccccaaacctgcagtagatcatgatattgacatgaaatcagaacagagtcacgttgagcaaggtggtgttcaggttgagtttgtgggtgacagtgaaccttgtgg

SEQ ID NO: 5570 - DNA, 128 bp, Homo sapiens
ccaagtcccttcaattctctgtgcctcaactttctcatctgtaaaaaactatctcgtcaggaaaataataggttacgaggttggaaaggctcacgggtgtgcgggcactccaaaaaaaagaaaaggac

SEQ ID NO: 5571 - DNA, 251 bp, Homo sapiens
aaactcttaaacctggaactccttaaatggggtaggtgggtgagattatcaaagctgaagctggctttgctgagaagctccctacctccctgcccttctcctccttcctgctggaatgaactaaagcagatgtcaagcaggggctggtgggggtgcctactcccttttccactctatctttagatttcaaaccttaggcttacagcccctcaatatctctctgctaacaccagtgtctctttctagttagg

SEQ ID NO: 5572 - DNA, 111 bp, Homo sapiens
ctggcctgcgtctgtcccagagtcctgcctgcggggccttgtgttagctgtgttgtgcctggggagactgttgctagtggaaggtgcctctggagatggggtggggcccag

SEQ ID NO: 5573 - DNA, 300 bp, Homo sapiens
ctgttgaacactgcagaaatctcccctgatagcaagctgcttgctgctgggtttgacaactcctgtataaaactttggagcttacaatccaggaagttaaaatcagagtcctgtcaagtagacatgtcccgcatccatttggcttgtgatattctggaggaggatgtgtgaataccgttttttcttccctgcacctgccttcctagtttgcttagaatgtccttaccaaacacgacatatcttagaatggacttcctaattttcctcatcatatagctaaagccagactaatgccatgta

SEQ ID NO: 5574 - DNA, 242 bp, Homo sapiens
aaaagcttcctgtattttattagtggtccttgaaaaactgtgaatgtttgggaattggtagaaaggcaaaaagtaggatattttgacctgactggaaagatggttgtgtttttattgccaggtaataagtgtgatcattgttgaacttcagctccagtgtctctccagaataagacattggcattcaaatgtctatatcttgttacttacaaaataaaaaacagattaattagtggcttttt

SEQ ID NO: 5575 - DNA, 170 bp, Homo sapiens
  unsure (9): n=A,T,C or G
gttggtgangctgccagcatgtgcgatgagacgtgcacctacctggagagagagtcaaggaagcagtcagagaaatgaactgctgacctgcccagttgcacgacagccctgctccccacctccccatcaagcacaactagggaagacatggtgggtcacgaaatacagca

SEQ ID NO: 5576 - DNA, 365 bp, Homo sapiens
ctgcaggggcaggcggattcagaactttttttgcattttcccgctggactgtaggtaacccctgaggagactcggtcctgctgacctggtttgcgctggctacagaagtctgcttgggttgtgtctcgcatgctttgctttgggaagctggcatttctggagctccctgtgcatcaacggctacttgactgactgaggggattaaggtgggcaatgctatgttcaagatctggagacctggaatgtgtgcctgaggggcggggctgctttgtgatgaagggtttgcagtcagaacctgcagtccgacagcattcagagccagtcctggtggatggacttgtggggccatatttgtattggctagg

SEQ ID NO: 5577 - DNA, 248 bp, Homo sapiens
ccaagctccagctaatctacttggatgggttgccagctatctggagaaaaagatcttcctcagaagaataggcttgttgttttacagtgttagtgatccattccctttgacgatccctaggtggagatggggcatgaggatcctccaggggaaaagctcactaccactgggcaacaaccctaggtcaggaggttctgtcaagatactttcctggtcccagataggaagttaaagtctcaaaaacaacc

SEQ ID NO: 5578 - DNA, 334 bp, Homo sapiens
ccttcgtgcagtttgcttcacaggaaatagctgaaaaggctctaaagaaacacaaggaaagaatagggcacaggtggggatggatggttggttggatatgtcacttttcttatggtaaacaattaaatccatattctctctgcttaaaagaagaaattaatgttttgtagtcctaggtaattgatgttttgccatgatttccaaacttgtgtcagtcccacgttacacgcaaactaaattttaggtttgaaatttgtccctagttaattggtctgcttgacaattttgtgagtcttattaaccccaatcaatagagttgagagactatggcttt

SEQ ID NO: 5579 - DNA, 168 bp, Homo sapiens
  unsure (40): n=A,T,C or G
  unsure (112): n=A,T,C or G
ctgattgtcagagccttagacccagcacgccttggattanctctgcagagtgtcttggttgagagaataacctcaccgtacccacatgacacgtgatttggaaagagactanaggccacacttgataaatcatggggaacagatgtgttccacccaacaaatgtgata

SEQ ID NO: 5580 - DNA, 303 bp, Homo sapiens
  unsure (11): n=A,T,C or G
ctgcggcccanacctcagccaccagcaccaatgcaaaccctctctctgccacgagcagcgccctgggagccctcacgagtcccgtggctgcttcaacccccaactccactgctggtgcagccatgaactccttgacctctcttgggactctgcaaggactggctggagccactgttggactgaataatattaatgcactagcagttgctcaaatgctctcaggtatggcggctctgaatggaggacttggcgccacaggcttgacgaatggcacggctggcaccatggacgccctcacccagg

SEQ ID NO: 5581 - DNA, 627 bp, Homo sapiens
  unsure (559): n=A,T,C or G
  unsure (580): n=A,T,C or G
  unsure (587): n=A,T,C or G
  unsure (603): n=A,T,C or G
cctgtgcacgaggtgaagtccaccttggtctgaaagcagaagatggtgactgaaatggataccaccgcagtgatgatcattgcaatgatgacggctttggtttggtacatactggaaatggtgcccgtcatgaagcccatggcaaaagtaaaaagggtcagcagaatgatgttccatgggaaacggcgtctgggtccctggcagcaggcaaggatcaggtaggtgacaacgaaggcagcataggacacgtagtagacagccacatttctcctcacaaaggcgctgacaggttccacaaaggtgaagatagcaatgatggacctgcccgggcggccgcccgggcaggtgtgctcaacattatctgctgcagggcattctcagacacagactgagatattcaggatgggatccgaagcacctagaacctggtagccttagaaagctgggctgacctaagggcagagttggtgtttctgcacgtcatcctcctcgtcatcctcatagtcatcctcatcatctgagtactgctggggtgggcggactggaactcggctgcggnccacacctgccgccaggtctncttcctnctgggacaaagaccanggcagttacaaacaagtgctgctc

SEQ ID NO: 5582 - DNA, 421 bp, Homo sapiens
ctgccgtgttctgggactgtctcatggggcaatgtgtcctcacccccagcagtgccagcccaggtcagaaggcttcattcagaaggggggtgtcacagcacctggctgagcccccatggaggatggagacccacagatacacacaaacacacagagacatctccaaatctctgactcagactcgcacacaggcacacacagacgcacgctcaacacagacacacgcaggcctttattctattacacagagtagggctggggccagggcaggtcattctcaggctgcgtcagaaggtgcagagcgttcgggggacacaggccgaaccccaaagtgataataagttacggggggatttctcaggctgttgtcaggctggagcaagggcaggacgccatgtgaggaccccagagccacttccag

SEQ ID NO: 5583 - DNA, 262 bp, Homo sapiens
gccagggctggggggaagagctaggcttaatgaacagagcttgaggggaggagcctggactggtgggaggagctaggtttgatggacagagcttaagggacagagccaagactgatgataggaggagctaggtttgatggacatagcttaagggaaggagccaagactgataggagctaggcttaatggatagcgcttgaggggaggagccagacctcgtgggaggaactaggcttaatagcgcttgaggggaggagccagg

SEQ ID NO: 5584 - DNA, 301 bp, Homo sapiens
ccagtgattgtagcagctttactcttttgctgcatgatattgtttggtcttggagtgagaaaatggtgtcagtaccaaaaagaaataatggaaagacctccacctttcaagccaccaccacctcccatcaagtacacttgcattcaagagcccaacgaaagtgatctgccttatcatgagatggagaccctctagtctcgtgagactttgccccatggcagaactctgctggaatcctattgagaaggtagacattgtgctttattaatatagtcgctcttcagccatgcctttactgcag

SEQ ID NO: 5585 - DNA, 189 bp, Homo sapiens
ccagagatgggagaaataactaatttagttttattgtctctttttattgtcccaatagttgaaattgcccacaaccacagaaggcagagttatcctcgttgaagcaagctaacacaaatgagttccttttagcaaacttctctgtcttgcccattctttggatcatagcacaagtttttgagagatcag

SEQ ID NO: 5586 - DNA, 395 bp, Homo sapiens
  unsure (62): n=A,T,C or G
  unsure (152): n=A,T,C or G
ccaacagagcaagaccatgtctcaaaaaaaaaaaaaaaaaaaaaaagtaggcattctattanacgtcagacccatgatcacatcactcattgtacggcctctggaaaactccgagatacactggtgagtgaatgggaatgggaagggcttantattattatgaaaaattctgacccagtgaacctcctaaaagggtcttgagcacccttagggagcctgcagactgcactttgagaaccaccactttagctggctgggtgaatactaaaattagtctagctaattttttgtattttttgtagaggcagagggtttcaccatgttgcccagactggtctcgaactcctgggctcaagtgatccacccaccttggcctcccaaagtaccctctcttt

SEQ ID NO: 5587 - DNA, 174 bp, Homo sapiens
cctttccttgagctgcacgtgaacctgtgtgggcaggcagcgtttgcaggcgtgtttacgggcaggcagcgtttgcaggcgtgtttaccggcaggcagcgtttgcaggcgtgtttacatgcaggcgtagcaccatgtgagaccactggtccagggtttcagaggtcctgctcag

SEQ ID NO: 5588 - DNA, 204 bp, Homo sapiens
  unsure (11): n=A,T,C or G
ctggaggccanctttgccagaactgtcaacaaagaatatccaggacttgcagacccagtgtttcgaaccctggtgtcccaaattctggaccgggctgagcctctgctttcctccagcctgtcctcggaagtcgtcactgttttccagtattacagttacttcaccagccacggcgtcagtgacctggagagttacctgagccag

SEQ ID NO: 5589 - DNA, 155 bp, Homo sapiens
  unsure (13): n=A,T,C or G
  unsure (14): n=A,T,C or G
cctcagtaggganngccttctctactatgataatgctcctgctcatccttctcatcaaacaagggcaattttgtgagagttttgatggaaaattattggcatcctccttgcagtcctcatttggctccttctgccttctttttatatccttattt

SEQ ID NO: 5590 - DNA, 467 bp, Homo sapiens
ctggtgccggacgtcaacatggaagagaacttggaccctttctttaactgagctcatgccccacggagacttagcaggttccaggagtgagcgagggcagcggaaaggagttcttccgggggacacgaattgcctggctgagtagcaagaaagacacactcttaagtttcttggttcagagcaggaaaaccttcaaggagctgactgaccacgtagcatgggggcaagaggcgtgggatggggattggggtgagatggatgggagcccgctggagcttgtcttccctaacatagcctgggagaccaccccttgccacttgggccacttccgcctaccccacttttcattttgttccaaaatagttgcagatcctgacagaatcaaaactctctgcctcaaacacacatcctggcatcgcactgttagcatttaacttcttgttaggattcagggaaggaacagttgg

SEQ ID NO: 5591 - DNA, 319 bp, Homo sapiens
ctgggggaaagggagaagacaggggtcccctgagagcctccagaaggagccaggcctgccgaccccttggttgagggcctctggcctgcagcactgtaagacagtaggtttctgtggtttaagccattcagtctgtggtcacatgttacagtagccctaggaagctaatgcgggggctgctggtaccctgcccactccttgactggtgcctactggcccagctcccacctgcggctctgctcgaaactgtccccactctgctgtgctcaaaaggtcagagtgccagggaatcaaggcccagccctttctcagggagcag

SEQ ID NO: 5592 - DNA, 278 bp, Homo sapiens
ctgctgagggggagcctggtaggacatgctctcatccatgccggggactgggggctggttcagagtcccttggtgttggggtgcggatggctgctggggtgtggctgagccataggagccggccatcccatactgggaaggggagccatagctctggtacatgctcatgggatagtagtagctgtaggggtaggcatagttgtactgctggtaccactggtagtactgctgctgctgcaaagctgaggcttctgcctgggacacgtactgtgcactgg

SEQ ID NO: 5593 - DNA, 313 bp, Homo sapiens
ctggaaaaaatgtacggacatggatgaagctggaaaccatcatcctcagcaaactatcgcaaggacaaaaaaccaaacaccgcatgttgtcactcagtactgccgtaaccctgatggtgacatcaatggtccctggtgctacagagtgaatccaagaaaactttttgactactgtgatatccctctctgtgcatcctcttcatttgattgtgggaagcctcaagtggagccaaagaaatgtcccagaagcattgtagggggttgtgtggcccacccacattcctggccctggcaagtcagtcttacaacaagg

SEQ ID NO: 5594 - DNA, 382 bp, Homo sapiens
ccatttcattctgttctccatggactaaaatcacatgaggcggtttcaaagcacgaataaattcactggtttgctggtaatccgtgtgagctgagaaagaaatgtaatcaacagacattttcagtggtaacttctgtccagacatagtagtgatttcttcaggttcagacatgatgtgcttggcaagtgtcccttctacacagtatcccgctataatgacaccattcctcttatcagtacaccagctttcaaataattctctggataagccactttgcatcatgcctggggaggccattacaacactgggaccaatgtcatcaaaatgatccatgctctaagagagaaaacagaatgggaaaagtatgttagctaccagcag

SEQ ID NO: 5595 - DNA, 548 bp, Homo sapiens
  unsure (482): n=A,T,C or G
  unsure (489): n=A,T,C or G
ctgaaaggaggtggatggggacagagcaccaaggggaaggggccctcggcccaaggggggaggaacctagcccccaccccgctacagctccccactgaattcacagcacagagaacacctctcgcccaacaactccacatggaggtataccaagtccaggggtcaaaggagcaggtggatgacagatgggcaggggcagtgaagatgacagcaggctcaggaggggaggtggcagaaacttcctcctacccatgggaggagacgatggggcgactgatattgctgttggtggtcatggcattcagctcccacctgatatcatgaggcaaacaggactggtctaggttatactgaatcacggccagtttgcacagagtcttcagactagggctaaagtccaaaatgtgtaagtcagaatgatctataaggtcaaattcatctcccaggacctgcccgagcggccgcccgggcaggtcctgaangacccanggccctctggctggatgcgtttgcctatcaggacccagaattacttacagacctgttta

SEQ ID NO: 5596 - DNA, 386 bp, Homo sapiens
cctaacttgggtggagagcccagcctgagcaccagaattagttgcttccacttgtgcagcctgctgaagagccggactcaggttgaagcagctttcctcccagtcttcactgatctccacagggagaaaacagaagtccccacaagtaccaagctcttcctgagactgcagccaccacacctcgggaaaggggaggctgggaggagaggagtacactgtcccggtgacccacaccaaggtggctccaagtgtaaacaaagccaataagagtgagcactggccctgagccccactatatgattgggtcaaaaggctcctttaattcaggagagttgggcccacagagtcttgttatcaggattttgctggttggcctgccttccagg

SEQ ID NO: 5597 - DNA, 184 bp, Homo sapiens
  unsure (8): n=A,T,C or G
attctgtnctccatggactaaaatcacatgaggcggtttcaaagcacgaataaattcactggtttgctggtaatccgtgtgagctgagaaagaaatgtaatcaacagacattttcagtggtaacttctgtccagacatagtagtgatttcttcaggttcagacatgatgtgcttggcaagtgtc

SEQ ID NO: 5598 - DNA, 266 bp, Homo sapiens
ctgctccgagggcctatcttcagccaggatgcccacagagagggacgccagtgcggttactgcctccacttcttctttgtcagcccctggcactctaggcacccaggagtctggacaggaggccaggcgctgcatgcagccccagtatttactgtgcacccggatcacggcctccagagagcggatggcattgaggttgggtttctgtttccagccttcttctgaaaggggatccaccctgttacccagaagagcagccacacagg

SEQ ID NO: 5599 - DNA, 237 bp, Homo sapiens
ccacattgacagtgtttccccagatgtcatactgaggttttcgggccccaatcactccagcaatcacaggcccatggtttatgccgacgcggaggcggaaggagttgaaggagtgcctgttgatgccgtccagcttactcatcagggcgatgctgaactccaccatgacaccaatgtgggcatgctgccgctccagctcctggttctcgtgccctgaggcgacgctgagccctgcag

SEQ ID NO: 5600 - DNA, 284 bp, Homo sapiens
cctccagtgtctacaatgttgatggtccccttttgttcagtcaagttttaataaaaataaaactgttctacagttaattgcactttgttcagtgtaaatttccaatgaccaagagcaggttaaacgatgtgtgtggtctattaaactgtggtcactcgtgctaaggcacacttggcctggagtgagttactgtttgggaagccaaagatagatcaagtgcaggagctgatcatacaatgttttctctctaacttacttacctgaactttaaccccaccccattt

SEQ ID NO: 5601 - DNA, 350 bp, Homo sapiens
gggaaaggaggtctcactgagcaccgtcccagcatccggacaccacagcggcccttcgctccacgcagaaaaccacacttctcaaaccttcactcaacacttccttccccaaagccagaagatgcacaaggaggaacatgaggtggctgtgctgggggcaccccccagcaccatccttccaaggtccaccgtgatcaacatccacagcgagacctccgtgcccgaccatgtcgtctggtccctgttcaacaccctcttcttgaactggtgctgtctgggcttcatagcattcgcctactccgtgaagtctagggacaggaagatggttggcgacgtgaccggggcccagg

SEQ ID NO: 5602 - DNA, 191 bp, Homo sapiens
  unsure (126): n=A,T,C or G
  unsure (142): n=A,T,C or G
  unsure (152): n=A,T,C or G
  unsure (158): n=A,T,C or G
  unsure (159): n=A,T,C or G
  unsure (169): n=A,T,C or G
  unsure (172): n=A,T,C or G
ctgcaatccacttaggatttcacacatgatcttcaaacactctgcatcggggatcatagggtcaaactgaccagcaatgtcaaaatcacactggcagaactccctataacggccttggactatggntgggctctctcgccgncacacctttncaacannataacgtttnatnttcttcaccttattcatgg

SEQ ID NO: 5603 - DNA, 343 bp, Homo sapiens
cctttgcactccgctctttccactcacatgtcacctcagggctgtccccggcctctcctttcccatctctcccagtacattatggtccctccttcctagcatctggtgctatctacggtaggcatgtttagctgctggtacgatccctcctccactgaaatatgggcttcatgtctggcccctgtgggactgccagagcctggtcctcagtcatgtttagttgggctagtgaatcaactcttggtcaaagggacaaaagcagatgaggagatgtggcttcaatcaggatcagtgtggaacagtgagacctgcgcatggcactgctaggagggatgggttccac

SEQ ID NO: 5604 - DNA, 115 bp, Homo sapiens
atctaggactgccggctaagtggacacactccttgacctcctaccaggaactttggtaaaagctagctttggggaaggggttgggtgtaaatatgagagggtggagggagaccag

SEQ ID NO: 5605 - DNA, 378 bp, Homo sapiens
ctgagagtagtcgactattacagagccggccatcttgcactgcgctgatatccaagctcattttgggattataagtatgtggataaagagattcaggaagatgtttacactcttgggcacaatctaaaagccagtgctcggaaacaatgtgtactcctctttcttttacagatttatactcccgattagtgtcatttggccgcccttgatagatgaaatgagtcactgtttcatcaaaactccacctgtaatctgctcctagagaggctgcgatcccatttagttcactctgcttcttactgagttttttactaacacataccactacttgtgaagtggctttggggcttcttccttctctgactgggcctctttcgg

SEQ ID NO: 5606 - DNA, 371 bp, Homo sapiens
aaaaggtagtataagaaatgaggaaaaagaggtaatatcagggcttctgctgttttttatttttaacatgttcataattaaaaagtattttccagcagtccaaagatgtaagttatcttacacataaaatgttttattttgttatttggttatgaaaatggaatccttgttcttgcacaactgtaaatgttttgttgctagataatacgatttgagacctgaattggtctttggtttccagtgcatcacagcatattttgtaaaatcatctactactgcacttgagcatgaatgggtagtagccaaactcacaaattggagtgatgaacctgcttatacctaagggcaggggcaagcccctcacaatgcag

SEQ ID NO: 5607 - DNA, 158 bp, Homo sapiens; identical to SEQ ID NO: 3737

SEQ ID NO: 5608 - DNA, 95 bp, Homo sapiens
  unsure (72): n=A,T,C or G
  unsure (77): n=A,T,C or G
  unsure (87): n=A,T,C or G
ctgaagacagcggcaatgctgacaaatgctaagaagataattgataaatacatattgatatagatgaggcangctgntacttggcantggaatat

SEQ ID NO: 5609 - DNA, 279 bp, Homo sapiens
  unsure (14): n=A,T,C or G
  unsure (19): n=A,T,C or G
ctgaattatctatncatcntctttattaatcactattgttccagcagttttcaagtcaaattaataatcttattagggagaaaattcaattgtaaattgaatcagtataaacaaagttactaggtaacttcatattgctgagagaaatatggaacttacattgttcaattagaatagtgttctgcaaaaatatttataaaacttctcaagatactgctactgtaattttatatgaagataagtgtatttttcaataaaacatttataaattaagaagaa

SEQ ID NO: 5610 - DNA, 152 bp, Homo sapiens
aaaaagctattagtatttattaatgaattttactgagacatttcttagaaatatgcacttctatactagcaagctctgtctctaaaatgcaagttggccttttgcttgccacatttctgcattaaacttctatattagcttcaaaggctttt

SEQ ID NO: 5611 - DNA, 273 bp, Homo sapiens
  unsure (19): n=A,T,C or G
  unsure (20): n=A,T,C or G
  unsure (213): n=A,T,C or G
  unsure (214): n=A,T,C or G
  unsure (228): n=A,T,C or G
  unsure (252): n=A,T,C or G
gtctgcaattcccattctnnatggtattgtttgtagcagttagagattttaattttgatggtatctaatttatcagtttttcttttttgtggcttgtgattctggctttctaattttacttaacctgggaaacacacacacactccagccaagttaaatacatttttatgtaagattctaaatcctgtgcatacttatttgtatacatattcnnatttttttctgtanaatatgtacctagaagtggaattnctggctcgaagaatgtatttt

SEQ ID NO: 5612 - DNA, 392 bp, Homo sapiens
aaaacttacgaattgtttatttccggaattttccatgtagtattttcagaccacggttgacctcaggtaactgaaacagcgggtaaggggggacaactgtacttccaggttctgcagcctgagaatgagagaagggactgtgcaggctgaaggcgtgggggaagagccagggccctggggagcagacgtcagggactaaactggaaggcaagcaggaagaaccgtgacccactccaaaccgccactgaagattgatcccaactgcaagccggtgccaagccccgcgtccacggaagtcacacagcctatgacgccttcctctccaaatggaagcaaagaggagaagaggctgctggagtcttcaattgcagccgtgagcaatctccaactgg

SEQ ID NO: 5613 - DNA, 354 bp, Homo sapiens
cctccttcgatggcactttcctgtggaagatcaccaatgtcaccaggcggtgccatgagtcggcctgtggcaggaccgtcagcctcttctccccagccttctacactgccaagtatggctacaagttgtgcctgcggctgtacctgaatggagatggcactggaaagagaacccatctgtcgctcttcatcgtgatcatgagaggggagtatgatgcgctgctgccgtggcccttccggaacaaggtcaccttcatgctgctggaccagaacaaccgtgagcacgccattgacgccttccggcctgacctaagctcagcgtccttccagaggccccagagtgaaaccaacgtgg

SEQ ID NO: 5614 - DNA, 266 bp, Homo sapiens
ctgtcaggtggagcctgcaagcctgggagcatctgcatgacccataccacaccctgcccaggagcatatattacctggtctctgggtctaccttaaccatccgatgccgattgcgttgccggtcccaatactcatctagccggtgggacgaaaggtgcatgacatggcaggcgaggcggcttggggtgctggggtccggagtaaccatgatgctgaagcagtgcatctcagcccgcccccccgcagacaccacatgggcagtcagg

SEQ ID NO: 5615 - DNA, 300 bp, Homo sapiens
  unsure (21): n=A,T,C or G
ccagcactggctatgtagtanagccctacaggaagtaccctactttgcttgaggtgctactgaattttctgaagactgagcagaaccagggtacacgcagagaggccatccgtgtgttagggcttttaggggctttggatccttacaagcacaaagtgaacattggcatgatagaccagtcccgggatgcctctgctgtcagcctgtcagaatccaagtcaagtcaggattcctctgactatagcactagtgaaatgctggtcaacatgggaaacttgcctctggatgagttctacccag

SEQ ID NO: 5616 - DNA, 231 bp, Homo sapiens; identical to SEQ ID NO: 257

SEQ ID NO: 5617 - DNA, 240 bp, Homo sapiens
ccagcctacaatggggatgttgtgtttctgttcaccttcgtttactatgcctgtgtcttctccaccacgctggggtctgggaggaatggacagacagaggatgagctctacccagggcctgcagggcctgcctgtagcccactctgctcgccttagcactaccactcctgccaaggaggattccatttggcagagcttcttccaggtgcccagctatacctgtgcctcggcttttctcag

SEQ ID NO: 5618 - DNA, 252 bp, Homo sapiens
ccagtttcttccctgtgcaccggagcccacggaccctcagcgactttcttcttctgaagagactgagagcactcagtgctgcccagggagccctgttgcacagactgaaagtccctgtgatttgtcaagcatagttgaggaggagaatacagaccgttcctgtaggaagaaaaataaaggcgtggaaagaaaaggggaagaggtggagccagcacctattgtggactctggaactgtatctgatcaagacag

SEQ ID NO: 5619 - DNA, 79 bp, Homo sapiens
  unsure (25): n=A,T,C or G
  unsure (26): n=A,T,C or G
  unsure (37): n=A,T,C or G
  unsure (38): n=A,T,C or G
cccccccccctttcctttttttttnnttttttttttnnttttttttttttttttttttttttttttttttttttttttt

SEQ ID NO: 5620 - DNA, 260 bp, Homo sapiens
atcgaggccgagctggggccgatgaagatgacaaggggcctagggcaccccgcccacctcagcctaagaagtccaagaaagcaagtggcagtgggggtggcagtgctgctttaggcccttccggctttggaccttctggaggaagtggcaccaagctccccaaaaaggccacaaagacagccccacctgccctgcctacaggttatgattcagaggaggaggaagagagcaggcccatgagttacgatgagaagcggcag

SEQ ID NO: 5621 - DNA, 269 bp, Homo sapiens
ctgcctcctgagggtgtggggttattagggtctcaatactttctcaaggggctacactccccatcaggcagcatcccaccagcctgcaccacaggctcccctgggaggacgagggaaacgctgatgagacgctgggcatctctcctctgtgacactaggacatctgtccaggaggctgggcggaggtgggcaggatgtgagaggtggggagtactggctgtgcgtggcaggacagaagcactgtaaagggctctccagccgcagctcag

SEQ ID NO: 5622 - DNA, 485 bp, Homo sapiens
ccactgcagtgaagttttacaggtctagtggttaggggcatccaggggtgtcccttccaatgtgaaagacaaactgttgcatcttgcatcctcatgcaaggaaggaagcacactgcctggtgagcctgtttgagttctgacatcacattctacatgtaggtgtattgctttgacccacactctaggtgacataggaggatgccagctttgagtggagcctccacaggaaaggacactgcagcagatccaggccatggcgcagtcaccatccttcagaccccctggtgctgaaagtgccagtggtggggtaagatttggggtggagctgaaccaagcaccagtaggagagtcacagtggagggcctgggattctggagtaaggccatgtcatccacagcacagaaatatgccccatccaaagcagagaaatatgttggaagcaacttttggcatgttactgtaggccctgataagatagaatgctt

SEQ ID NO: 5623 - DNA, 463 bp, Homo sapiens
  unsure (14): n=A,T,C or G
ctgaaaaccataantgtcagcggcaggagatcaatgtccccactcatgcagtgaggcagagagtgaatttcaccttcccctacttttttagtctattcaagccctaatggattgcatgaagcccaccaacactgagaagggcatgtgctttactcagtccatcaactcaaacactaatctcctccagaaacactttcacagacataccccgccatcatgtttaaccagctacctgggcatcccatggcctagtcaagtcgacacataaaattaaccatcacatagtgttccccacatacaatggccccacaaacaggaactaaacaattagcaaagctctatggctcaattctagaattgagggtgttaatctgttttctgttaaggaactctaggctctatgtaaactgaaactgtatcaaaatgctgacactaaaattagaaatgggaagaagtagctttt

SEQ ID NO: 5624 - DNA, 193 bp, Homo sapiens
ccttcatcgacctgcactctgctgggaatatgctgttcaggacgtggatcgccatggcctactgctcccccaagcagggtgtgtccctccaaatggactttggcttggacctggtgacggagcttaaagaaggtggagatgtcactgagctgctggcagccctctgcaggcagatggagcacttccttgacag

SEQ ID NO: 5625 - DNA, 308 bp, Homo sapiens
  unsure (14): n=A,T,C or G
  unsure (15): n=A,T,C or G
  unsure (189): n=A,T,C or G
  unsure (190): n=A,T,C or G
  unsure (228): n=A,T,C or G
  unsure (231): n=A,T,C or G
  unsure (235): n=A,T,C or G
  unsure (297): n=A,T,C or G
ctgacagttctccnnggcaactcagtcctccagcagacccctgcatacataaaggtgcaaaccaacaagatggtgatgctgtcctgcgaggctaaaatctccctcagtaacatgcgcatctactggctgagacagcgccaggcaccgagcagtgacagtcaccacgagttcctggccctctgggattcnncaaaagggactatccacggtgaagaggtggaacagganaanatancggtgtttcgggatgcaagccggttcattctcaatctcacaagcgtgaagccggaagacagnggcatctactt

SEQ ID NO: 5626 - DNA, 167 bp, Homo sapiens; identical to SEQ ID NO: 5425

SEQ ID NO: 5627 - DNA, 404 bp, Homo sapiens
ccataggaacgcactcaggcaggtggtttgttctggatgcagaaaccagagatctagtttctatccacacagacgggaatgaacagctctctgtgatgcgctactcaatagatggtaccttcctggctgtaggatctcatgacaactttatttacctctatgtagtctctgaaaatggaagaaaatatagcagatatggaaggtgcactggacattccagctacatcacacaccttgactggtccccagacaacaagtatataatgtctaactcgggagactatgaaatattgtactgggacattccaaatggctgcaaactaatcaggaatcgatcggattgtaaggacattgattggacgacatatacctgtgtgctaggatttcaagtatttggtgtctgg

SEQ ID NO: 5628 - DNA, 504 bp, Homo sapiens
  unsure (14): n=A,T,C or G
tgctctttcagctntgaacgtcctttcccattctccatcatccacattcacctatcctgcctgccccagttaaaatcctgtttcttctaggaagtccctcatcccacccgcttaccccagggagactgagcttgttccttctcctagtaagaccctcagcccatggagtcctgtgtgatgttgtgagcgtgggaggacagactgaactgctcggcccgtggagtcctgtgtgatgttgtgagcggggaggacagactgaactgcgtggtgcttcgcacatagacctcaacagggattggcattttgaagctgttggcgggggctgtggactgcttttcttcctttctagctcaacggcagctaaagccactgcatacaatgcaaggactggctcctgtttggccgcgactgattgcagcccctggtgaaatgagaaccctgtgggtcggaacaaagtttggattattttatgttgcaagtaaactaaaatctcaagtgaaactg

SEQ ID NO: 5629 - DNA, 517 bp, Homo sapiens
aaaaaagagccgtttgtccacttccagttcttttctgataatgaaaaacttaatccaatccaaaacagaattgctttgtcacgtatcaggttctgtgtgtgtatcaattcatccttatctcgaataagcagcaggctggattctttggtggaacaatcagctagactgttattccaagggttgacagtgtgagaaaataacaagcatttctctcggagttgctgccaatatattgggcagtttaagagacccggtctctctaaagtaaaaaacagaaataagaaataaatgttatatttctaacctatccctgacacaccacaaccaatcacacacacacaggtcattataaatgctcaaagtttttgattatcactgtgagaacaatgaatttgttataaagttgagatttttgagacctactgttcattctagtaccaagaattgggaattagtgaccagttatcttgagcataaatggaatcataaaatattaaaataggaaaacaccatcaga

SEQ ID NO: 5630 - DNA, 386 bp, Homo sapiens; identical to SEQ ID NO: 5435

SEQ ID NO: 5631 - DNA, 408 bp, Homo sapiens
  unsure (14): n=A,T,C or G
  unsure (15): n=A,T,C or G
  unsure (207): n=A,T,C or G
  unsure (281): n=A,T,C or G
  unsure (329): n=A,T,C or G
  unsure (336): n=A,T,C or G
  unsure (343): n=A,T,C or G
aaacattccacctnnttctcgcatgtgcaggtcaagtgtacagtagtgaaaacaacatgcaatgtcttcactgcagaatcataatacagctaggacattggtgttcttcccctcccaccccaaattaaaaactaattgctaaaaaaaattgcattgccaaacggcactggagtgaaagcttggcggtactctacgataaatgctcantttccagtgcatgaaataaaactatagcaaatgggaggctttggtggcatccaaagaagaaaaaggcaaaccanggggaaagagctgcagtctaaagtttggtctttacctgcccgggcggncgcccgngcaggtnctggtttagaggtgtggtgcttttggcagtgagtattgccttgaattcatggcaatgaattcaat

SEQ ID NO: 5632 - DNA, 374 bp, Homo sapiens
aaaatactgagcggtattgaatacttcgaagcagaacaggcaatgtgcagccctcatttatgagaaaaccctcaggaaactcccagggtgatgcttggagaagctgtgagttgagctgaagctggagaacttcctccagagcaaagggcttaagaaagaaagaagaactctaagctgggtctgctaacatcactccagtttagatggatcttggcagagagacatgcttgttcctctggattggaaagatgatttactctcgggaatcttctctgtcagcctgtacatctaaaggcatgaagcactcaattgggcaattaacattagtgtttgttctctgatggtatctctgagaatactggttgtaggactgg

SEQ ID NO: 5633 - DNA, 231 bp, Homo sapiens
  unsure (38): n=A,T,C or G
ttctctcttgtttcctctctatttcagcctagtatcanaaggccaggcgagactgcaacactgctcatcgccccgcggcgtgatccctgctcttaggtgctgggcagaggggaagggtggtcagggtgaggatggtgagggagggctggtgaggggctcagaggaatacttggaacaacagcagtgttattgtagtgtggcagtttcttttatacataggtgagagttttt

SEQ ID NO: 5634 - DNA, 284 bp, Homo sapiens
ctgtgtcctgccctcccttctggaggctggaggggagaggccaagcccttggaaaatgtagcaaatgtctggatgtcgcataagtgcgtgtatgtgcgggacaggccccgagaagctagtgactcctgcacacccccattgcacaaatgaaatcacagcccaggagggagggtagcttggcactggctgagaaatagagctctctccccgcccctccccctaaccacaagggattgtcctgacaacttgtggggatagaagggctcacagggcaggggtctcag

SEQ ID NO: 5635 - DNA, 279 bp, Homo sapiens
aaaaattaattaacaaatgaagtatacatttccttccccaaaatatcaacaaatgtaaaaaatataaaatatctgaggccatgttttatcatgtcaaggcaattgtcccagaatgtaataaaacatttgaactgaaaacatgcacatattagagttttttttaattaaagaaagaagaacttttacgtagttgtgcatgaacaccaaataataattacaggttgttttaccagatgactattgaataatattgcttataaaatttgttggtacactttt

SEQ ID NO: 5636 - DNA, 433 bp, Homo sapiens
ctgtccagtgagtactctcctagtactggatacaaaggaagaggccacggcccacgatcttctgaactcacaataggtggaggctggggctctggcgccacctctgcggaatcccaagcccgcttcacacagccaagaaaatgttgctccatccctcaagcctcagaccaacgtttgcgctgatcaaggagggagagtctctgcactaccatcagcctgagtatttatgctctgcagagcccgtgggcggaggccagtcagatattaagaaactcagtagtaacaaatgcacgaaaattagtagacaaatgaaaaacgataacattttagagagtacatagaaccaaaacgaaccgtaattccgacagaaaaacatggcgagaaaagaaaccgaaatgaaatgacactaagcaaatcttgaagagaactagcg

SEQ ID NO: 5637 - DNA, 175 bp, Homo sapiens
ctgagtgtggttgatttccttcccaccactccccagcccaccaagaagtccaccctcaagaagagagtgtgccggttacccaggccagagacccagaagggcccactttgtagccccatcacccttggcctgctggtggctggcgtcctggttctgctggtttccctgggagtgg

SEQ ID NO: 5638 - DNA, 315 bp, Homo sapiens
ccaagggtccctccaacgtggctggagaagcggtcagtgtcacgcagaaggagccggagcccctccccacggccatcccagaacaacaggccgatggtcactttgtctgggtcactgagcagcaggagacccgtcttgtccatggtcatcttcaggccgggcatcactgagaatagcgtctccttccacttgtacgcagagcttcttcggttccgagtcaccaccacgtgttcaggggatgcgtgaacccataccagggggttcttgaaggtcacttcgatccatgagaacccagccttctccctctcatactgg

SEQ ID NO: 5639 - DNA, 284 bp, Homo sapiens
aaattatttttgtgttaatagtacactttgagtatctttttccacattaaaaactttctgaattataaatgttttccttacattatttaacaatgtacactgttaaaaataaaaataaaaattcaaactttgggggtttctcagcagccgttaattgtacattttgcactaactctgggtgttgcgcttcttgtaagattgcgctttgtgcttcagtttgttacctttgtagacttatttaatgaaaccattcaaataaaccaaacttgcttttgttaaaaaaa

SEQ ID NO: 5640 - DNA, 342 bp, Homo sapiens
ccacttgtgtgggtcctcacaagcaaagagagcactaaacttgacattgggggtccaccactccaaccttgctttctgaaggttttggtgtacattgagccccagaaggaaaggagagtatctgtgagtgggggcctcccttgacccagtacgaagtctatgccctgaatccccagagtagcccttcctggtgcccaactggcctggggacaaacagcgtccactacatctaggactgccggctaagtggacacacttcttgacctcctaccaggaactttggtaaaagctagctttggggaaggggttgggtgtaaatatgagagggtggagggagaccag

SEQ ID NO: 5641 - DNA, 181 bp, Homo sapiens
ctggttggggagggcagcaaaacccacgtactccttgtccatgactccgccagccatcactgcacctgccgtctctccccacttcctctggtggggcaggaagctgagtgcggcttcaaccctccatccttcacacatctggattccaagtcccactgtagctccatcatcgtggtgagac

SEQ ID NO: 5642 - DNA, 551 bp, Homo sapiens; identical to SEQ ID NO: 258
  unsure (16): n=A,T,C or G

SEQ ID NO: 5643 - DNA, 71 bp, Homo sapiens
  unsure (22): n=A,T,C or G
aggtggaagccacagccattangtgtccccttgttggggggcggcgggagtgctggatttttgccctgtca

SEQ ID NO: 5644 - DNA, 231 bp, Homo sapiens; identical to SEQ ID NO: 259

SEQ ID NO: 5645 - DNA, 406 bp, Homo sapiens; identical to SEQ ID NO: 411

SEQ ID NO: 5646 - DNA, 296 bp, Homo sapiens
ctgggccacagacttgtccaggtcaacccgaaagctctcagcacaagaggttggttcctcaggggaagggtcttcctcttggatcaagtccaaggtcagcatcccatccgaggtagaggtggaagccacagccattaggtgtccccttgttggggggcggcgggagtgctggatttttgccctgtctcgagtgggatgggcaagatagctgtcctcctcaacggtgacctgaagagatgtactgtgaatcatgaatgctcttcagcgactcgctgtcccaacccagcatcccgagg

SEQ ID NO: 5647 - DNA, 238 bp, Homo sapiens
ctggcccctgcttcccctagggcacatgctggaagccctgggccgccaccagaggtcctcagccctcctgcctgggctatggctccttcctggtttgggagccatagtggagctttcctctctaagctcacccagctcaaactgtgacaggagaatcttcttcgactgccaagagcggtccaaggcaatggtcagccactgcagcctcctgagatatttttagagactggacctgagg

SEQ ID NO: 5648 - DNA, 470 bp, Homo sapiens
ctgctcctgcatctgtccaggattggtggctgtcagtgggagagacatgggaagatgctccctccaccttcctgggaccaccttgttgactcagcagccttcctcgccgcccaccatgctatgccttcctggatggaggccctgagggtggcttttggttttcctacccctgtacccctccaagaaagctctggcacactgcagaggccagcaactacttgtcaaatgaatcaaaggaaagtcaagccggagccaagggtcagaagcaggggcttgcttccccgaagtccagcccttctttgggctcccctttcctttttgacacctcctgcttggttggcagtgaggtctcccaggtctgggggatccttgccactgcttctgcacccagccctggctaagcggccttgttctcatcaaagctgccgagacctgcagggtactcagcttctacttccactcctacacag

SEQ ID NO: 5649 - DNA, 448 bp, Homo sapiens
tgcagctcagacacagcaaaagagcctagaacctgggtcctagtttgcacctagaatatgaggtactttgagccttgctaagaccacccagcccatctccatggactcatatgaaggacaagaagtgaacataacctgtagccacaacaacattgctacaaatgattatatcacgtggtaccaacagtttcccagccaaggaccacgatttattattcaaggatacaagacaaaagttacaaacgaagtggcctccctgtttatccctgccgacagaaagtccagcactctgagcctgccccgggtttccctgagcgacactgctgtgtactactgcctcgtgggtgacatggagtcttctggttctgcaaggcaactgacctttggatctgggacacaattgactgttttacctgatatccagaaccctgaccctgccgtgtaccag

SEQ ID NO: 5650 - DNA, 323 bp, Homo sapiens
aaataaccctgaccaccacatgcttgctatatcatgtgcatgatgagggaagccataaactatttcaaaggcaactttctagctatcgggtacgatgtcctctgggagagaccatggtgggtgacagggacagaggacgatccctgaggcaatggtaagtcaggtgttaggtagcaagggaagcagcctgggcatcaggtagagttgtgcaataaagtctgtgttttaagttcccccttcttcatttgccaacacaccaaccaggtgagcccacctttatgagtgactttggagaaagatgcttttcccattgctactgcagg

SEQ ID NO: 5651 - DNA, 163 bp, Homo sapiens; identical to SEQ ID NO: 3801

SEQ ID NO: 5652 - DNA, 165 bp, Homo sapiens
cctcagacaccaggatgttggccgcccgcaggtcgcggtggatggaattcatgcgctcaatgtatgccatcccttcagcaatctgcgccgacatgtcaatcagccttgggagtgacaatctgctcccttcatctgtcttcaggaaatccagcaggcatcctctgg

SEQ ID NO: 5653 - DNA, 561 bp, Homo sapiens
aaaaatgcattattccctcatccaaaagaccaccactttatcttaaagctacttggctttacaaaaaataaaaataaaatagaggattaggggaggaacagacaggaagaaaagaaattaaataaaaaatgaaagaaaaaaaaaggaccaatggaggatgaaggatggagaggaaacgcaggggaaggagagagaacgagatatggaaaggcaccaaatgtccaaatccctggacaggcagatgggctccttggtactgcagattcaccacagctacagacactgcagtgatggcactcagggcacgagccagaggggcagcctcagcagggagcagctcactgagcactgaagctggaatggcactaataacgtggtcagcctccagactgccgtcccttagagataccttccagcgcccttctgcctggaggctgagcccacagaccggctggcctctgagaacactgacccccctactagtcaggtgggtttcaagggcctgaggcaacatctctagacctccacgaagtgaccactggctccagcgctcagccaagg

SEQ ID NO: 5654 - DNA, 404 bp, Homo sapiens
  unsure (12): n=A,T,C or G
  unsure (372): n=A,T,C or G
aaaaagcatatnccaccttttttattaattattatataaaatgaagcatttaattatagtaataatttgaagtagtttgaagtaccacactgaggtgaggacttaaaaatgataagacgagttccctattttataagaaaaataagccaaaattaaatattcttttggatataaatttcaacagtgagatagctgcctagtggaaatgaataatatcccagccactagtgtacagggtgttttgtggcacaggattatgtaatatggaactgctcaagcaaataactagtcatcacaacagcagttctttgtaataactgaaaaagaatattgtttctcggagaaggatgtcaaaagatcggcccagctcanggagcagtttgccctactagctcctcggacag

SEQ ID NO: 5655 - DNA, 357 bp, Homo sapiens
ccaccacggtctcgtcccaaaggagaacgactacgagagcataagtgacttgcagcaaggcagagatattaccaggctctagcaacccagaagacaaccctgggtagcctgtgatcagtgtctggagacgtttcttctgtggaagagaagaagtgacacaaacctatacttcatatgctgctttagtcacctgaagatggttggagaggccctgtcgactgttctcccagttgttcagtttctgagacagagaggtacggactaggctgcacctgagtgtgcccctgcctgccagatggacaggtacacccaagcacatctccctgctgcaccctcaccacccacaaaagatcccag

SEQ ID NO: 5656 - DNA, 201 bp, Homo sapiens; identical to SEQ ID NO: 5564

SEQ ID NO: 5657 - DNA, 207 bp, Homo sapiens
ccagagggaaggcccaagagacgtctctgaagccaccgttcctgattattcagaggcagggtccacagtgagtgactcggtggggctggaggaacccagggtgacccagagggggctctggagcgggtccctaacatctgaaaaagtcctcccagggaactcggagctggaacttccaggcagcttcgggggtgacatttgtatccg

SEQ ID NO: 5658 - DNA, 265 bp, Homo sapiens
ctgtgaaacagaaggcactttgtgctagaattcagagggtctctcaagagagaacgccacagcagagagacccaatccgcctaagttgcaggcgaccctttagggtggggaggagtatcccccaggaaggcatctgcaaaggaaaaaattgtaatcatgattccaaggcaaaatggctaaagttgggagagaagaaataccaagagagaagacaaaacatggctgtgccaaggactgaggagtgagctttacaaggacttgtcag

SEQ ID NO: 5659 - DNA, 277 bp, Homo sapiens
ccacttgctgcctaaaccaatcacagcttcagttttgttttttgtcaagtgttggagttacaagtagacacctctctgtgcctggtattgctcaggttcagacttggctgggggtgagggggccaggcagaaatcagttaagaaggccattccaggtgtaaatgcctcccggctctacagggggtaatatttactgtcgtcttttcccttcccaggttgattactgacctgtttgttgtgaagatgctgctgcaataagcacaaacagaactcatgg

SEQ ID NO: 5660 - DNA, 269 bp, Homo sapiens
actgtgcagatgctcttggcaggacagcatcgcagggaggtgctgggattctgggcctcactgtctgggtcttggttcctctgaaagagatggatcttgtgcagaccagggttgttgagtgaggggagcgtgggatggggaccgtgggaaagaggacagctcagggagaagtgacctggagaggtcctgtttgcatctgacccatctcaactggcccagcatcccaacttctctgcagcgaaagggtggcgccccgcagcctcgggagg

SEQ ID NO: 5661 - DNA, 247 bp, Homo sapiens; identical to SEQ ID NO: 2583

SEQ ID NO: 5662 - DNA, 244 bp, Homo sapiens
cgcccagccaggagttaagctgaggtcgtctgagccctgcgacagcctggacagcaactcaggatggcatcaggcagggcacgctgcacccgaaaactccggaactgggtggtggagcaagtggagagtgggcagtttcccggagtgtgctgggatgatacagctaagaccatgttccggattccctggaaacatgcaggcaagcaggacttccgggaggaccaggatgctgccttcttcaagg

SEQ ID NO: 5663 - DNA, 448 bp, Homo sapiens; identical to SEQ ID NO: 5649

SEQ ID NO: 5664 - DNA, 365 bp, Homo sapiens
ctacagataacatacatgataatatctgatttcaggacaaaagagtaattctcaatagcaagggaatggagtagggtagacagctagtaattaaactcacttgtatgttaaaaataaattaaggaaaaaaagaaaatgagagaacatattactaaataaagaaagcatacattaaatatttactatagtttcacactaagggaataaaggaaatgcaatagagtggcctgaaagataaaggatgagatgtgtaaagagacagggaaagatgtgtcatttttttactatgagcagcagtctgagaagataaaggaatcgagttatgggcaaacatgatgtttgatcagtgctatttgttttgaagg

SEQ ID NO: 5665 - DNA, 303 bp, Homo sapiens
ctggagatggcagccattgtttgcggagcccaggctgactccggattcaacgttgctggggagagaaaagcagtatagactccaccttccaggatgtccatttcggggagaggagcaggtgggaccctcaagaaaatgacggagaacatcccagacagatgggactcaagcaggatgggtgctatatccaagaagccaagaagggagagtttcgtgcactgtggttaacaggagggctgcctggaggcagtggctgagccagaaagtaacacagagctcatgcttggagagagagagtcttgg

SEQ ID NO: 5666 - DNA, 396 bp, Homo sapiens
aaagctggctcaagactggcccaggcataatactgtcaatctaaaggtaaccggcaacatcaaaaagtacatctcaaaagaatcaggcttaaagataaacaggagaactggaaatatctaagagtaagaagtgtaaacaatagaaaagaggtagggtttagggttctcatcttgggatttccccaggtcttcaagcttctatccttcctgggttctgggtcatgggcctccagattccggccgttagtcttgagatacctttttcgcttgggtcctctatccatctaggtaggctttgtgacaggggccttccatccttgggttgtaggtcttccagctacaaccctgggctaatcttaggtcgttggccttgcgtcacaagtctcagttcttagg

SEQ ID NO: 5667 - DNA, 158 bp, Homo sapiens
ccttctagcatggcatcaattccgatataggttcctgtacgcccaacaccagcactgcagtgcaccacaatgggaccactgaagaaattgctgaaggcattcactctccttctcagtttgaggagcaagtgaggatcctcaggcaccccgtggtctgg

SEQ ID NO: 5668 - DNA, 151 bp, Homo sapiens
acataaaattaaagtgtgtctcaaaaccagacagccatcttgtctgccatcactgagcaaattacagatggactcaatacaaatttgcccacggggcttgcttgcaatactatttcacaaagctgactgtattcttcatcttcataaatgg

SEQ ID NO: 5669 - DNA, 364 bp, Homo sapiens
gtgtatgctcacttccccatcaacgttgttatccaggagaatgggtctcttgttgaaatccgaaatttcttgggtgaaaaatacatccgcagggttcggatgagaccaggtgttgcttgttcagtatctcaagcccagaaagatgaattaatccttgaaggaaatgacattgagcttgtttcaaattcagcggctttgattcagcaagccacaacagttaaaaacaaggatatcaggaaatttttggatggtatctatgtctctgaaaaaggaactgttcagcaggctgatgaataagatctaagagttacctggctacagaaagaagatgccagatgacacttaagacctacttgtgatattt

SEQ ID NO: 5670 - DNA, 115 bp, Homo sapiens
  unsure (4): n=A,T,C or G
  unsure (9): n=A,T,C or G
  unsure (61): n=A,T,C or G
  unsure (63): n=A,T,C or G
aaanccatntataatccaccaccacctgttttttgggggacctgggacacatgaaacacananaggaaatttcatgggtactggatgaaacaaggaaggaaatgtttttgctcac

SEQ ID NO: 5671 - DNA, 587 bp, Homo sapiens
ccacatccctaaatgtcaacggcccctgaaacaaacaaacacaaacacacacacacacacacacatttacacgtgggcaaaatttatcatttgaattaaggtcaaatgagaaagtaaagaaaattcgttctgacttacaggaatgactgaaattatccaacaattttcaacacagaaatattctctaatgtattctctaactctgagagaagagaatggtataagatctacaacaccactgtatatatacttttattaatagtaaagtataaagctaaaggcataaacacaaacatgtacattttttagtgctatatttgccacacaaagaatgagttgtgtatatttttcagacaaaagatatgttgagttagaaggcacctctcaagttttaatgtgaacaataaactggagatcttgtgcagattcttttttcccagaagatctgaaataaactctgagtttctgaatttctaacaagttcactagtaatgccaatgtgtttggcccagaaagaatattttgtcaatatccagtaagtggaagaacctgtgttttactcaatttttctgccctgtaaacaaaga

SEQ ID NO: 5672 - DNA, 334 bp, Homo sapiens
aaagccatagtctctcaactctattgattggggttaataagactcacaaaattgtcaagcagaccaattaactagggacaaatttcaaacctaaaatttagtttgcgtgtaacgtgggactgacacaagtttggaaatcatggcaaaacatcaattacctaggactacaaaacattaatttcttcttttaagcagagagaatatggatttaattgtttaccataagaaaagtgacatatccaaccaaccatccatccccacctgtgccctattctttccttgtgtttctttagagccttttcagctatttcctgtgaagcaaactgcacgaagg

SEQ ID NO: 5673 - DNA, 225 bp, Homo sapiens; identical to SEQ ID NO: 3741

SEQ ID NO: 5674 - DNA, 317 bp, Homo sapiens
cctgtattgccatgaactgagcattaggggcagttctgctgagggatcagaagagaagaccaagggaattctgtcccagttgtggctcaaactgcctcaggtgcagcttaacctgcgtctctggaaggtaaaatgcatctgatccttgaggcaagagctgtgggggcatggctccctcacctggatttcaaagcgtgttaccagcagcctggggacccaggctctgcctctggatttacctgcatcgtatttgcgcttcgtggtcaaagttgttaagaaaggggtgagcttctggctacctaataagttggtcttgg

SEQ ID NO: 5675 - DNA, 548 bp, Homo sapiens
ccagaaaatcaagagctagatcaagattccaaactaatagaaaagtatgtttcatccttaaatagatccttcaggggacagtacaagcgcatgtgcaggtccaagcaggcaagcacacttttctatctgggcaaaaggaagggtctaaacagtattgttcacaaggccaaaatagagcagtactttgataaagcacaaaatacaaattccctctggcacagtggggatgtgtggaaaaaaaatgaagtcaaagacctcctgcgtcgtctaactggtcaggctgaaggcaagctaatctctgtagaatatggaacagaggaaaaaataaaaataccagtaatatctgtttattcaggtccactcagaagtggtaggaacatagaaagagtgtctttctacctaggattttccattgaaggccctctggcatatgatatagaagtaatttaagacaatacatcacctgtagttcaaatatgtttatttatatctttatgattttattctctctctctattctcatggcactttcataacattatggctaa

SEQ ID NO: 5676 - DNA, 357 bp, Homo sapiens; identical to SEQ ID NO: 3776

SEQ ID NO: 5677 - DNA, 175 bp, Homo sapiens
  unsure (156): n=A,T,C or G
  unsure (163): n=A,T,C or G
  unsure (169): n=A,T,C or G
ctgagttcccttccccaaggtcagctcggggctcccgacgatcatgcagaagtagatgccactgtcttccggcttcacgcttgtgagattgagaatgaaccggcttgccatcccgaaacacagctatcttctcctgttccacctcttcaccgtggntagtccnttttgnggaatc

SEQ ID NO: 5678 - DNA, 346 bp, Homo sapiens
aaattaaaaagatataaacatgtcaaaggaatgaaacctagatgttttattatgtgtgaattatgagcgcttacctggccttgtgtataacgtataaaccttcacctgttgcatgtcattcagtctctgcagcaacattccttgtgtccatgtgggtgtttctatgtgtgactgtgaatatctgtatgtaaatggcttgtctcttgggtgcatttgtgggggtgggtatccaccgctattatcattgctttctttttcagaaagtgtttccaatctttgcttcattttactcaacagaaatgaggaggttggtttatatttcatgtcttttctctttcagatacag

SEQ ID NO: 5679 - DNA, 416 bp, Homo sapiens
  unsure (15): n=A,T,C or G
  unsure (17): n=A,T,C or G
  unsure (18): n=A,T,C or G
  unsure (330): n=A,T,C or G
gcagaataaaaccancnnagactccttttctcctaaccgtcccggccaccgctgcctcagcctctgcctcccagcctctttctgagggaaaggacaagatgaagtggaaggcgcttttcaccgcggccatcctgcaggcacagttgccgattacagaggcacagagctttggcctgctggatcccaaactctgctacctgctggatggaatcctcttcatctatggtgtcattctcactgccttgttcctgagagtgaagttcagcaggagcgcagacgcccccgcgtaccagcagggccagaaccagctctataacgagctcaatctangacgaagagaggagtacaatgttttggacaagagacgtggccgggaccctgagatggggggaaagccgcgtttagcttttgttgcc

SEQ ID NO: 5680 - DNA, 270 bp, Homo sapiens
aaaaatagctttggcttggaacttcagaagataggaaattttcgttattttatttattcttttttttttttttttttttttgagacagcgtctcactcccttgcccaggttggaatgcagtggcatgatcttggctcactgcaacctccatctcccatgttcaagtaattctcctaccttagcctcccaagtagctgggattacaggcatgcaccaccacgcccagctaatttttgtactttcagcagaaacagggtttcaccatgttgg

SEQ ID NO: 5681 - DNA, 278 bp, Homo sapiens; identical to SEQ ID NO: 260

SEQ ID NO: 5682 - DNA, 312 bp, Homo sapiens
  unsure (11): n=A,T,C or G
  unsure (57): n=A,T,C or G
  unsure (64): n=A,T,C or G
  unsure (90): n=A,T,C or G
  unsure (91): n=A,T,C or G
  unsure (99): n=A,T,C or G
  unsure (100): n=A,T,C or G
  unsure (115): n=A,T,C or G
  unsure (117): n=A,T,C or G
  unsure (134): n=A,T,C or G
  unsure (135): n=A,T,C or G
  unsure (164): n=A,T,C or G
  unsure (165): n=A,T,C or G
  unsure (231): n=A,T,C or G
  unsure (293): n=A,T,C or G
aaaatctcttnttcctcaggagtcagcttggctcccttcttgcggcccgggggcagngcatagngggactcgtaccactgtcggtacggnntgctgtcnnatgagcacgatgcantncttcaccagggtcttgnnacgaaccagctcgttattagatgcattgnngacaacatcgatgatccttgttttacgagtacaacactctgagccccaggagaaattccccacgtncaacctcagggcacggtatttcttgttacctccccgcacacggactgtgtggatgcggcggnggccaatcttggtgttggc

SEQ ID NO: 5683 - DNA, 220 bp, Homo sapiens
  unsure (35): n=A,T,C or G
  unsure (36): n=A,T,C or G
  unsure (70): n=A,T,C or G
  unsure (104): n=A,T,C or G
  unsure (123): n=A,T,C or G
  unsure (141): n=A,T,C or G
  unsure (162): n=A,T,C or G
  unsure (189): n=A,T,C or G
aaaagatactttggattcaattaagaagagttttnnagaacaaaagaggaaggttctggcatggggagcntctgcaacccactgctgggtgccagaagcgagcntgtggagcggaagatgaanatggcaccatgtgtctcntaaaccacaaatggaaccacntgatttctatgtgtatttgcatttgcntgtaatgtgtgggaaatcatgaaggttacac

SEQ ID NO: 5684 - DNA, 209 bp, Homo sapiens
tgagtttcttactcgggagctggctgaagatggctactctggagttgaggtgcgagttacaccaaccaggacagaaatcattatcttagccaccagaacacagaatgttcttggtgagaagggccggcggattcgggaactgactgctgtagttcagaagaggtttggctttccagagggcagtgtagagctttatgctgaaaaggtgg

SEQ ID NO: 5685 - DNA, 201 bp, Homo sapiens
ctgtttgagcgagagttctacagtgagatcctggacaagaagttcacagtgactgtgaccatgcggaccctggacctcatcgatgaggcttatgggctcgacttttacatcctcaagaccccgaaggaggacctgtgctccaagtttgggatggacctgaagcgagggatgctgctgcggcttgcccggcaggacccccag

SEQ ID NO: 5686 - DNA, 379 bp, Homo sapiens
ctgcagggcaaggacggttcaaaagtttgtgcgatttaattgctgtcatagcctgctccgccctgggatcgctggacaaggagcggccaaaggtcctgtgtgactttgtgacacacacatcatcagtcttgactgtgctggaacaagtcctccgcagcagcttatgcgttttggagattccgtcctgctcagatttcagtttggatttgcttttgccacaaccagggggaggataacttggcgacctgcgcaaagtagaaaataaatgcaggggagacttcactttcttctctgacaactttttattgtgcaggcaattggatttttctttgctctgtttccactgctgtgtaacaaatgtctgcatgatttttttcag

SEQ ID NO: 5687 - DNA, 225 bp, Homo sapiens; identical to SEQ ID NO: 3741

SEQ ID NO: 5688 - DNA, 357 bp, Homo sapiens
ctgacagttctccatggcaactcagtcctccagcagacccctgcatacataaaggtgcaaaccaacaagatggtgatgctgtcctgcgaggctaaaatctccctcagtaacatgcgcatctactggctgagacagcgccaggcaccgagcagtgacagtcaccacgagttcctggccctctgggattccgcaaaagggactatccacggtgaagaggtggaacaggagaagatagctgtgtttcgggatgcaagccggttcattctcaatctcacaagcgtgaagccggaagacagtggcatctacttctgcatgatcgtcgggagccccgagctgaccttcgggaagggaactcag

SEQ ID NO: 5689 - DNA, 236 bp, Homo sapiens
aaacagctctaagtgtcagtactcatagtggcatattacaaagtaataaacagtgcacacttgagggcaaaccgcatattgagctatggaagagctcactgtgattaagatgagatcaaacatcatagcagaacattagcaaattttatctgaattctgtaatgaacatccatgctgcaataacattaaaaaagcacgggagcctattccaaaccagcgagaacagttttgtgcaa

SEQ ID NO: 5690 - DNA, 270 bp, Homo sapiens; identical to SEQ ID NO: 2914

SEQ ID NO: 5691 - DNA, 289 bp, Homo sapiens
aaaattacattttatttctctttatgaatatttgctttttgttttttgtaaaaaaaaaaaaggttcattttacatcttcttcaagagtcttgtgcctcctggtaagtgcattggtttgtttcacagtactctccacgaccaaggacggttcttattgctggaaggagtgagtggatgtccacgccagggcggggctggaggacataagaagaatcggggccctggcaggaagcctggggcctgtgctccaacaagagcaaggaggctgaaggagcagaccggggctcag

SEQ ID NO: 5692 - DNA, 226 bp, Homo sapiens
  unsure (146): n=A,T,C or G
  unsure (147): n=A,T,C or G
  unsure (200): n=A,T,C or G
  unsure (204): n=A,T,C or G
  unsure (215): n=A,T,C or G
ctgggctgctcccgccccagcccggcccagggtgaaggaagaggcacgtgctcctcagagcagccggagggaggggggaggtcggaggtcgtggaggtggtttgtgtatcttactggtctgaagggaccaagtgtgtttgttgttnngttttgtatcttgtttttctgatcggagcatcactactgacctgttgtaggcngctntcttacagacncatgaatgtaa

SEQ ID NO: 5693 - DNA, 219 bp, Homo sapiens
ctgacaagaggcacagtcacagagctatgaggacagtcttatttaggcaaaccattcttatactcatgcataccagaaaaatgtctttgtctcttctgtgacactgctagatgctggagatataacacacatcgctgtccctaccctcacattaggggtagctgtaattatattctggtcaagaactgtgatgctaaatttcaattcttactagctttt

SEQ ID NO: 5694 - DNA, 315 bp, Homo sapiens
ccagagacatcctgatcgaccctattcgagtggtgcagggagatattggagaggcaaatgaagatgtgacacagattgtggagattctccattctggacctagtaaatggaactggcttacccggcgtctggtagaatttacctcttcagggagtgtcctcctctttgttactaaaaaagccaatgctgaagagctagcgaataaccttaaacaggagggtcataatcttgggctgctccatggggatatggatcagagtgagagaaacaaggtcatttcagactttaagaaaaaggacatcccagtcctggtgg

SEQ ID NO: 5695 - DNA, 269 bp, Homo sapiens
ctgcctcctgagggtgtggggttattagggtctcaatactttctcaaggggctacactccccatcaggcagcatcccaccagcctgcaccacaggctcccctgggaggacgagggaaacgctgatgagacgctgggcatctctcctctgtggctctaggacgtctgtccaggaggctgggcggaggtgggcaggatgtgagaggtggggagtactggctgtgcgtggcaggacagaagcactgtaaagggctctccagccgcagctcag

SEQ ID NO: 5696 - DNA, 293 bp, Homo sapiens
  unsure (168): n=A,T,C or G
  unsure (197): n=A,T,C or G
  unsure (198): n=A,T,C or G
  unsure (208): n=A,T,C or G
  unsure (220): n=A,T,C or G
  unsure (221): n=A,T,C or G
ccatgttcccccgtttgccctcacaaaaaccttgtgaataatacaagccatatggactctgatttacagtttagaagatgagcagaggtgggtgtgagttgcccagtcatgttgctagttgttgaagaaactaggattgttctcaggtcttgggctcctggcccatanaccagtggctctgtgttctgatggggtannggggaggatntttacaaatgcnnattcctgagattgttcctggaacatctccgagtgggtgtgggttgtggccctgcgtgtgtgattttgcctat

SEQ ID NO: 5697 - DNA, 341 bp, Homo sapiens
aaattccagccctctattatcacataccccctttaagatttatggttctagtcacagcaagctctctgtaacactcattggattaggcaaagattgagtcaatcatcttgcaaatgtgttaatcttcaaaaataggctataaaagtgcaaaaccatgaaaacaaaatctagattatgtacatatggctcagcttgtgaacaggaaaaaaggtcaatagtgtacactttcctgaaacaaagcacttcattgcaatgccaacagactgatctcaaatgagttctcccttgtaacacaggagctaagacttctatcaaggaggacatcttacgttgcataattt

SEQ ID NO: 5698 - DNA, 352 bp, Homo sapiens
ccacacagactcaccaagccacagacttgtcttccacaggcacgttcttaccttagccacgaagtgaccaagccacacgtactaaaggttgaactcaaagatatgtacagggtattaaacaaataccaaggggaacagttaacttcaatacaaggtcaaaatcagcaacaagttctacaatccagtgctgatatcagatacaagcttcaaggacaatttcttttcgaaggcttattccagtttcgtgaggctagcatgaggtgtgtgcatttgccaggggcaaatttctattctcaattaacccatgcagcaaatgctacgcatctgctgagtccgtttagaagcatttgcg

SEQ ID NO: 5699 - DNA, 307 bp, Homo sapiens
aaagttaaaaaaactccactacatgccatattgaaagaaaaggttgtttttttttaactgcagcacctttagacaacaaaagattgcatcctgttcaaccacactatataaattataacgtttgtggaaaatatgtacacacaaacataaagcaagtgctctaacagttaataagtgttgtcttggcaagcagtttccagaaacaatactaacaactggtaataagaactgccaccattttgagttttccgttgctatcttcatcaaacaggaagcctgtaaacataagatgttaaaaaaaaaattt

SEQ ID NO: 5700 - DNA, 555 bp, Homo sapiens
ctgaaaaaggacggctcctctaaccatgtttacaactatcaaccctgtgatcatccacggcagccttgtgacagttcgtgcccttgtgtgatagcacaaaatttttgtgaaaagttttgtcaatgtagttcagagtgtcaaaaccgctttccgggatgccgctgcaaagcacagtgcaacaccaagcagtgcccgtgctacctggctgtccgagagtgtgaccctgacctctgtcttacttgtggagccgctgaccattgggacagtaaaaatgtgtcctgcaagaactgcagtattcagcggggctccaaaaagcatctattgctggcaccatctgacgtggcaggctgggggatttttatcaaagatcctgtgcagaaaaatgaattcatctcagaatactgtggagagattatttctcaagatgaagctgacagaagagggaaagtgtatgataaatacatgtgcagctttctgttcaacttgaacaatgattttgtggtggatgcaacccgcaagggtaacaaaattcgttttgcaaatcattcggtaaat

SEQ ID NO: 5701 - DNA, 373 bp, Homo sapiens
cctgtctcctgaatgatagctgtaattatcaaacttctgaatgaagctttattgcaccatttacaaggattctccattatggtggtcctgagactactggggcatgctgagctatggctgaagcactgatgttatcttaaacaaatgttttccctcttccaagaatgggtgaaatttatcaccagcatggattcagagataaaatactcaaagggaagtgcttactatgtgcctcatattttaatgtgtctctcctttgtgaaccttcagatgagactgcattcatgaagactgagtgaagactttattgcaccatcacatcactaaggtttttctccaacatgaacattctgatgaagtcgaaggcttgagg

SEQ ID NO: 5702 - DNA, 354 bp, Homo sapiens
ccacgttggtttcactctggggcctctggaaggacgctgagcttaggtcgggccggaaggcgtcaatggcgtgctcacggttgttctggtccagcagcatgaaggtgaccttgttccggaagggccacggcagcagcgcatcatactcccctctcatgatcacgatgaagagcgacagatgggttctctttccagtgccatctccattcaggtacagccgcaggcacaacttgtagccatacttggcagtgtagaaggctggggagaagaggctgacggtcctgccacaggccgactcatggcaccgcctggtgacattggtgatcttccacaggaaagtgccatcgaaggagg

SEQ ID NO: 5703 - DNA, 495 bp, Homo sapiens
aaacggaatgaatgtggcttttgggggcaaaagaaaccaagacactacattgtctttattttctcctatcccagtgcatttgagaaccatgcataagggaatgctgtgctacaaagctgtacccaaatatgaaaacaaaataggaaacttaaaaagcaataccccctttagaaagtttttattttcttaaatgtcattgagttgctttgattctattggatttttggcattttttatgggatcatcagttggttccaagtatgttagatcagctaacatctgctactccagtaacagcctcgtacaactgcaggtaggttttctccagaccaattagttttaatagagcaaactaacaacagactgtagtagcatggttatggcaaccagaatcttcagaaaggttaggacattactttttaagctgtcagtggtatcaaataacttacctagttggaggcagataaaggatcccttacgttttttcctataagg

SEQ ID NO: 5704 - DNA, 212 bp, Homo sapiens
  unsure (12): n=A,T,C or G
  unsure (13): n=A,T,C or G
  unsure (14): n=A,T,C or G
  unsure (40): n=A,T,C or G
  unsure (42): n=A,T,C or G
  unsure (63): n=A,T,C or G
  unsure (64): n=A,T,C or G
  unsure (111): n=A,T,C or G
  unsure (117): n=A,T,C or G
  unsure (150): n=A,T,C or G
  unsure (164): n=A,T,C or G
  unsure (169): n=A,T,C or G
  unsure (175): n=A,T,C or G
tttttttttttnnntttttttttttttttttgggtacagnanattatttatttctgttatttnngaataaaatttattttatggcttaggatctatgacccctgccttganaggganaatgggataggggagtgaagggaagctggcggnggatggggcaacanaaaanatgcancaggcagggccctctcatacactggagggccacatgg

SEQ ID NO: 5705 - DNA, 322 bp, Homo sapiens
aaaaagcataatatgcctatagctgaaaaggaaacagggctgtttaagtcactgacttatgagaaagcaaagcactggtacagttatttaacaggcatacacaagcagggaaaagataatccatttagatctttaatgctttggaaatgcgtgtaacagtactgcaataatcacagctctgggaaaaacaacgaaactttcccttgtggagaggagggattttcctgctctatataagcaacatatttttagacattaaaatatatataattttgcaggtaattgttgacttttttaactatattaagtgttaagctgacaa

SEQ ID NO: 5706 - DNA, 270 bp, Homo sapiens; identical to SEQ ID NO: 2914

SEQ ID NO: 5707 - DNA, 274 bp, Homo sapiens
ccagagggaaggcccaagagacgtctctgaagccaccgttcctgattattcagaggcagggtccacagtgagtgactcggtggggctggaggaacccagggtgacccagagggggctctggagcgggtccctaacatctgaaaaagtcctcccagggaactcggagctggaacttccaggcagcttcgggggtgacatttgtatccggccagccgagcggggaaaggagaccttgtgtcctggcaacagggagagccgggactgggatggacct

SEQ ID NO: 5708 - DNA, 291 bp, Homo sapiens
  unsure (12): n=A,T,C or G
  unsure (13): n=A,T,C or G
aaaattctttanngagagagggatggtttctgaggggttctgaaagtatgattcaatgtgcaacatacaggtaggtcttcagcataagctgaaatatatgcatgtaaaaactttgacatctttttttttaattttccactttcttcttaactttacttctctttttgtccccccccatcttacagaagttgaggccaagggagaatggtaggcacagaagaaacgtggcaaactgctctgtgctttcaaaccaaagtgttccccccaaccccaaatttgtctaagcactgg

SEQ ID NO: 5709 - DNA, 219 bp, Homo sapiens
  unsure (12): n=A,T,C or G
  unsure (45): n=A,T,C or G
  unsure (60): n=A,T,C or G
  unsure (173): n=A,T,C or G
  unsure (174): n=A,T,C or G
  unsure (203): n=A,T,C or G
ccatgccacccntgtgcaaacagaggtgtacacacaggagtgcantgatacaggacacanataaacagaatgtacacagccttcaggaaggatctcaagggttccgagtctgaggaagacataaccttgtgcctgcctgcccacctctctctctggtcctgttcatctctcannctctgagacactgaccttcactgctcagntaaaggttccagggat

SEQ ID NO: 5710 - DNA, 284 bp, Homo sapiens; identical to SEQ ID NO: 413

SEQ ID NO: 5711 - DNA, 447 bp, Homo sapiens
  unsure (304): n=A,T,C or G
  unsure (346): n=A,T,C or G
ccagttctggtagttattaaaccatgcattggaagaccctgctggaatataagatgcagagcacagaaagaaaactaagtgaagaaagaattgtttcggagccttgtaaggaatactcacgtcctccttctccaagctgggctccctgaagttggcaatttcatcaaaacagtatccacttaaaagtacccttaactttttcttccaaagttacacagtagccccaagttctacaatgcccacttcatgttttcctgaggcaccctggagacgccaaaagcatttgagaatgaacgggcctttntttttttttttttttttgagcccaggctggagtgcagtggtncgatctcggctcactgcaacctccaccccctgggttcaggtgatttttctgcctcagcctcccaggtggctgggattgcaggctcccaccaccgtgcgcgg

SEQ ID NO: 5712 - DNA, 325 bp, Homo sapiens
ccaccgctgggaggaggtggatgacttctttacaaaggaaaatggtagcagcttcagtgagaaactgcccttacaaacagtcccttctctgctgtcaatccaatactgctcccaaatcctgttttcagtgttcatttccctcaaggcaggcgctgggctcccacgacccctcaggacagatctggccgtcagccgcgggccgctgggaactccactcggggaactcctttccaagctgacctcagttttctcacaagaacccagttagctgatgttttattgtaattgtcttaatttgctaagaacaagtaataagtaaattttt

SEQ ID NO: 5713 - DNA, 257 bp, Homo sapiens
cctaaaaagcaggggcttcatgcagatgcagcagggacactcccaccaagccatcctgggctttggtcatgggtcccacgccaagcacttggacaagtctgttaggaaagggggtggcacatgctcttccgccatctggaaaaacatggagatccaagggagggcggaaagggtccttgcaactcagtcagcttagagcctcttattgcttatttagtcagaaaagcctggctgggcctagacggcaaaagatttgg

SEQ ID NO: 5714 - DNA, 227 bp, Homo sapiens
cctgccttgggcagctcagtggctctgaactgcacggcttgggtagtctctgggccccactgctccctgccttcagtccagtggctgaaagacgggcttccattgggaattgggggccactacagcctccacgagtactcctgggtcaaggccaacctgtcagaggtgcttgtgtacagtgtcctgggggtcaacgtgaccagcactgaagtctatggggccttcac

SEQ ID NO: 5715 - DNA, 424 bp, Homo sapiens
aaaatgtcatcaccatctctcagatagcaaatattcttttacatcatctgcacacaaacacctgagaacaaagagtacgatgcttttccccatctaacaagaagccaaggtgccacgaagtacagcagaattgcagtcctagtacctcgctgcgacactgctactgtacttgtttccagatggctaagctgaattcaaggccactaccatattgagctgaatgctcgctcagcaactcccaatgaaagcaagaagcatgtatcattgcccccgtctctaagagacacaaattaaggactgcgaccactttacacccactaaaacctacaagatacaacacaacccaattaccaccttcccttgagaaaaacatagaccgttttcattctgccgtttgttacttaccaatgccaaaattcttagg

SEQ ID NO: 5716 - DNA, 474 bp, Homo sapiens
cggaattgctctcccagcccttgcattgcagaggggcccatgaaagaggacaggctacccctttacaaatagaatttgagcatcagtgaggttaaactaaggccctcttgaatctctgaatttgagatacaaacatgttcctgggatcactgatgactttttatactttgtaaagacaattgttggagagcccctcacacagccctggcctctgctcaactagcagatacagggatgaggcagacctgactctcttaaggaggctgagagcccaaactgctgtcccaaacatgcacttccttgcttaaggtatggtacaagcaatgcctgcccattggagagaaaaaacttaagtagataaggaaataagaaccactcataattcttcaccttaggaataatctcctgttaatatggtgtacattcttcctgattattttctacacatacatgtaaaatatgtctttctttttt

SEQ ID NO: 5717 - DNA, 373 bp, Homo sapiens
tttggtcctcctgcagatgctccagtggctttgaccgctatcgccaggagtggatggactatggctgtgcacaggaggcagagggcaggatgtgcgaggacttccaggatgaggaccacgactcagcctcccctgacacttccttcagcccctatgatggagacctcaccactacctcctcctccctcttcatcgacagcctcaccacagaagatgacaccaagttgaatccctatgcaggaggagacggccttcagaacaacctgtcccccaagacaaagggcactcctgtgcacctgggcaccatcgtgggcatcgtgctggcagtcctcctcgtggcggccatcatcctggctggaatttacatcaatgg

SEQ ID NO: 5718 - DNA, 274 bp, Homo sapiens
ctggaagccttgttggcccctaagcctttgtttcatgctacagtactgaggggtatgtgtccccaatgcacagccacccgcacacaactcaatgagcttcctgggaaacactattcccccacctccaccttaggtggctgcctcagttttccaaccacaggaatcagtccctcagctcctgcctctagtctccaccccaaaagttcagtcgtctctgtcttggagggcactgtcggccccctcaggttgaagttcaacactcctcaatgagcag

SEQ ID NO: 5719 - DNA, 198 bp, Homo sapiens
ccagctcttacatagttaggtgaggaaagattagagtactatctttaagatgtaagtctggcattgtggaaagatggttccagtttctatgacctaccttggggaagaggaattcaagtttctgtggcttgccttcagggagaatgaggctgagacaggagggcaggattacatcagagaaaaactttgcttctgagg

SEQ ID NO: 5720 - DNA, 165 bp, Homo sapiens
ctgaagtggttaatcatggtgttacaactagacatttagtcctgcttcaattcttgcagagctgaatcaactcaaggaactaaataaaaagaggaaggcaccgaggtaagggattttttttacctgcccgggcggcgctcgagccctatagtgagtcgtattaga

SEQ ID NO: 5721 - DNA, 252 bp, Homo sapiens
ctgagttttatgaccttgagtaaaagtttaatctccctgggtgttcaagctcttttgccagtaaaatgagacaaatagtacctatctcatagggttgtaagaattacatgagatagttgatgaaaagcacttagaacagggcatagtacaccatatgcctactccattcgtttattgaatgtatctttagaaatgtatctttttcaagggcctgacatgtctcagacattgttttgaaatattgaggtacta

SEQ ID NO: 5722 - DNA, 356 bp, Homo sapiens
ctgagaaacagattaaacatttagagattgaaaagaatgctgaaagtagcaaggctagtagcattaccagagagctccaggggagagagctaaagcttactaaccttcaggaaaatttgagtgaagtcagtcaagtgaaagagactttggaaaaagaacttcagattttgaaagaaaagtttgctgaagcttcagaggaggcagtctctgttcagagaagtatgcaagaaactgtaaataagttacaccaaaaggaggaacagtttaacatgctgtcttctgacttggagaagctgagagaaaacttagcagatatggaggcaaaatttagagagaaagatgagagagaagagcag

SEQ ID NO: 5723 - DNA, 154 bp, Homo sapiens
accacggggtgcctgaggatcctcacttgctcctcaaactgagaaggagagtgaatgccttcagcaatttcttcagtggtcccattgtggtgcactgcagtgctggtgttgggcgcacaggaacctatatcggaattgatgccatgctagaagg

SEQ ID NO: 5724 - DNA, 288 bp, Homo sapiens
  unsure (58): n=A,T,C or G
  unsure (59): n=A,T,C or G
ccattctttataggaataatcagtttaatcaagatgagctagcattgatggagaaatnncaagaagaaagttcatcagcttgctatgaccgtggtcagtttccatcaggtggattatacctttgaccggaatgtgttatccaggctgttaaatgaatgcagagagatgctgcaccaaatcattcagcgccacctcactgccaagtcacatggacgggttaataatgtgtttgatcatttttcagattgtgaatttttggctgccttgtataatccttttgggaatttt

SEQ ID NO: 5725 - DNA, 357 bp, Homo sapiens; identical to SEQ ID NO: 5688

SEQ ID NO: 5726 - DNA, 409 bp, Homo sapiens
ctgtgcccagaggacagccaggcaggccctgggagggagtttagaaagacagtcctggtgaatgggcttcaagtggtcacaaagagggtggctgtgaggtgaccccagacactgcagaacgatgtgcaccctctgcgttttggatgtccttggaatgtgggagcctagaaataaccctgtggatggaattggggcagcggctgctggagatctgtgtgccttgccttccttcagcaggaccgtctaggtgcgcagccacctatggatgcgtcccagccagccccgtcgctctcgtccatcctcagagacaaagaagagggcagggagtttgggcttggttttgaactttcctttcaatgtagcaaagcattcctagttaaccagagccttggaatctactgcctgctgg

SEQ ID NO: 5727 - DNA, 380 bp, Homo sapiens
ccatgatgtaatctgcaatctgctgtaatgctagtaatccagttgggttgtggcctttcttcatctgttcttgaataaggcattccaagtcttcccgaaaggcaggactttgcaggatctgagtaactcgtttcctctgctccatcatgttgaagtcttgtcgtagatcaggagacatgttcctctccctaatgtattctgggtcattttcattgatgcggtcaaaatatctctctttgtgaggcatgctgggaggaggaggagtggtaatcacgccttggctggcatccgagctcatgttttaagtctgtggattactcttgttataaaaaaattgaagtgctgtacatttcttaagctggtttttgtgtggcaattct

SEQ ID NO: 5728 - DNA, 443 bp, Homo sapiens
ctggtacacggcagggtcagggttctggatatcaggtaaaacagtcaattgtgtcccagatccaaaggtcagttgccttgcagaaccagaagactccatgtcacccacgaggcagtagtacacagcagtgtcgctcagggaaacccggggcaggctcagagtgctggactttctgtcggcagggataaacagggaggccacttcgtttgtaacttttgtcttgtatccttgaataataaatcgtggtccttggctgggaaactgttggtaccacgtgatgtaatcatttgtagcaatgttgttgtggctacaggttatgttcacttcttgtccttcatatgagtccatggagatgggctgggtggtctcagcaaggctcaaagtactcagggtcaggaacacgatcactctcgccacttgcctcatattctaggtgcaaacta

SEQ ID NO: 5729 - DNA, 328 bp, Homo sapiens
ctgagttcccttcccgaaggtcagctcggggctcccgacgatcatgcagaagtagatgccactgtcttccggcttcacgcttgtgagattgagaatgaaccggcttgcatcccgaaacacagctatcttctcctgttccacctcttcaccgtggatagtcccttttgcggaatcccagagggccaggaactcgtggtgactgtcactgctcggtgcctggcgctgtctcagccagtagatgcgcatgttactgagggagattttagcctcgcaggacagcatcaccatcttgttggtttgcacctttatgtatgcaggggtctgctgg

SEQ ID NO: 5730 - DNA, 368 bp, Homo sapiens
ccattgagcgccggggcgtagagattgaggaagggggtgtgaaagtgaagctgacccttgtggacacacctggctttggggactcagtggactgctctgactgctggcttccggtggtgaaattcatcgaggagcaatttgagcagtaccttagggatgagagtggcctgaaccggaagaacatccaggactcccgagtccactgctgcctctacttcatctcacccttcggccgggggctccggcccctagatgtggccttcctccgggcagtacacgagaaagtcaacatcatcccagtcattggcaaagcggatgctctgatgccccaggaaacccaggccctcaagcagaagatccgggatcag

SEQ ID NO: 5731 - DNA, 282 bp, Homo sapiens
  unsure (15): n=A,T,C or G
  unsure (17): n=A,T,C or G
  unsure (18): n=A,T,C or G
ctgtcagaactcatncnnatcccaaggttggggaatactcaaacctagaagtaaatgcatcttggacaaaagagagatggaaccaagagtttactaagcaccaggttctcattatgacttgctatgtcgccttgaatgttttgaaaaatggttacttatcactgtcagacattaaccttttggtgtttgatgagtgtcatcttgcaatcctagaccacccctatcgagaaattatgaagctctgtgaaaattgtccatcatgtcctcgcattttgggactaa

SEQ ID NO: 5732 - DNA, 229 bp, Homo sapiens
ctggctaccgactccaccttctccctggaccagcccggtggcacccgggatctgaccctgatccgtgcccgcctccaggagaagttgtcacctccctacagctccccacaggagtttgcccaggatgtgggccgcatgttcaagcaattcaacaagttaactgaggacaaggcagacgtgcagtccatcatcggcctgcagcgcttcttcgagacgcgcatgaacgagg

SEQ ID NO: 5733 - DNA, 358 bp, Homo sapiens
  unsure (14): n=A,T,C or G
  unsure (15): n=A,T,C or G
ctggaggctcccanncatactctttggtgagaaatgattaattttatattttcattttgatgagaatcttttcttgtttttaccagttataaaaacaaagctttttctttgttgtgatactgtgcactaagacttagtttcttgagctgatgctaaataaaatgagatcaataggaatattccaggaggtcgtgagaagtttttagaaaggatggcatctacatatatatggagctctgaaaactgttggagagtatgacctgggactgaaactgtggagcacatagccagtgtcacaggctccgagagcagagagagtttgctctgggacctggaatgagtgatggagaaatgtttt

SEQ ID NO: 5734 - DNA, 152 bp, Homo sapiens
  unsure (129): n=A,T,C or G
  unsure (130): n=A,T,C or G
  unsure (148): n=A,T,C or G
ctgcagcgcgtgggcgctggagtacatttatctctggaacttgtcattggctttgtttggctctggaaacaaagacttgcctgggcctttccgatgtaaacttccagcccttggtgggtgggggagttnnatgaaggtgccgcgtccnggtg

SEQ ID NO: 5735 - DNA, 496 bp, Homo sapiens
cctgtgctgggtgctgaggctacaggggcacagcaaggctcttcccttgagaagccactgatgtcactgggtcactcgaggtaagcatgtttgaaagggctgaatcaaagaacaaggcaggaagtccacaaggccaacggaaggtcccagagaacaagcagagctcagaggctccgaaggcatcgaggaggagggtcagtattggcaagcaggagcagcccctcagctctggcctgccctcaggccacaccctggcccatgggcttcttgcacacccactgatagggggtgtcacaggtcatgtcattccacttctgctgaatttggacacagtcttcagtctgcccattcttgtgccgccagttgtcagactgattcttttcccaaaacccgaagacaacagggctttatactgttagatgaaggcagcatcccttcctggtgctgtggctcctagggagctgacatgggatgagtctagggagctgacttgaga

SEQ ID NO: 5736 - DNA, 117 bp, Homo sapiens
cctttattctattacacagagtagggctggggccagggcaggtcattctcaggctgcgtcagaaggtgcagagcgttcgggggacacaggccgaaccccaaagtgataataagttac

SEQ ID NO: 5737 - DNA, 328 bp, Homo sapiens
ccaggcacagcaacgtgaatctcaccatcttcaccgcccgcctctgctacttctgggatacagattaccaggaggggctctgcagcctgagtcaggaaggggcctccgtgaagatcatgggctacaaagattttgtatcttgttggaaaaactttgtgtacagtgatgatgagccattcaagccttggaagggactacaaaccaactttcgacttctgaaaagaaggctacgggagattctccagtgaggggtctccctgggcctcatggtctgtctcttctagcctcctgctcatgctgcacgggcctcccctccatcctgcaccag

SEQ ID NO: 5738 - DNA, 432 bp, Homo sapiens
ggctgtgccgttggtcctgtgcggtcacttagccaagatgcctgaggaaacccagacccaagaccaaccgatggaggaggaggaggttgagacgttcgcctttcaggcagaaattgcccagttgatgtcattgatcatcaatactttctactcgaacaaagagatctttctgagagagctcatttcaaattcatcagatgcattggacaaaatccggtatgaaagcttgacagatcccagtaaattagactctgggaaagagctgcatattaaccttataccgaacaaacaagatcgaactctcactattgtggatactggaattggaatgaccaaggctgacttgatcaataaccttggtactatcgccaagtctgggaccaaagcgttcatggaagctttgcaggccggtgcagatatctctatgattgg

SEQ ID NO: 5739 - DNA, 359 bp, Homo sapiens
ctgtgtcccctctgagggtggcatggtgaagcctgactcccagattggagagtttgccccatagatctcctcctccagcatggacaggaatctgccatccccagactagtactagcaagttgcttctgggccatgggcaagtctgccaggtagacgcccagatcccaaaaggcccatggagggagaggagggaccaatccaggaagccttcctggaaaaaaggggacaacagggaggatgtgaacttggggccaaatcctggtaggccagaaggagccttacttggggaagtgagtgaggatgagggtcctcttctcgggcaccaatttgtccttctccactcggaacttttccagcag

SEQ ID NO: 5740 - DNA, 263 bp, Homo sapiens
aaaatgcatgtattataatcatataatcataactgttgttaattcttgattatatacctagggacaatgtgtaatgtaagattactaattggttcttcccaatctcctttcagattttattaggaaaaaaaaataaacctcctgatcggagacaatgtattaatcagaagtgtaaactgccagttctatatagcatgaaatgaaaagacagctaatttggtccaacaaacatgactgggtctagggcacccaggctgattcag

SEQ ID NO: 5741 - DNA, 288 bp, Homo sapiens
  unsure (220): n=A,T,C or G
  unsure (265): n=A,T,C or G
  unsure (281): n=A,T,C or G
ctgccaaatggtgtcacttaccacactggaacatatcaagaccggttaacaaagctacaggataatcttcgccaactttcagttctcttcaggaagctgagattggtatatgacaaatgcaatgaaaactgtggtgggatggatcccattccagtcgagcaacttattccatatgtggaagaagatggctcaaagaatgatgatcgggctggcccacctngttttgctagtgaagagaggcgagaaattgctgaagtaaataaanaactcaaacagaagantcaacag

SEQ ID NO: 5742 - DNA, 194 bp, Homo sapiens
  unsure (157): n=A,T,C or G
cctctgtgccgcaccattgaactgcaccatgtgctacaggggccagaagatgaacagactgaccttgatgagctgtgcacaaagtggcataaaaaacatgtggttacacagtgtgaataaagtgctgcggagcaagaggaggccgttgattcacttnacgctttcagcgaatgacaaaatcatctttgtgaagg

SEQ ID NO: 5743 - DNA, 198 bp, Homo sapiens
ctgggctaggtccaggtgctgggagcccacggtatcgtgaactcgtgatgtcagggttctggatgtccactgtcgccagccccagggagagcggacccactggagggcctccttggtctccacctggatgcaggggcaggggtgggagccctcctcttctctcttcattggctggtgttggtggtgggggtagctggc

SEQ ID NO: 5744 - DNA, 353 bp, Homo sapiens
  unsure (307): n=A,T,C or G
  unsure (326): n=A,T,C or G
ccacatccacactgagggcctgtgtgtgaccatgctcaccttgcctcaggtctgggaagatccgaggtatctcctggagaagccatctatgatgtcattggggaaatgccgctagcaggactgtacgaggaaatcatggaggccgaggctgtgctccaagatgaggaggacggaagtgtggtgaaggtggacacagaagccgcagtttcaggggaggtgtctaacctcctggagggacagtctatacgtgcggagggaggacacagcagacctgtttctcagggatatgacgaggctgcgtttcctntggaggagatgacgttgtnaagcaacctgaggatgagatacaccag

SEQ ID NO: 5745 - DNA, 286 bp, Homo sapiens
ctgagggtcctacacctaccattcagccatctgggcccaggtggggccctgagcctggcccaggccctggatggatccccccatttggaagagatcagcttggcggaaaacaacctggctggaggggtcctgcgtttctgtatggagctcccgctgctcagacagatagacctggtttcctgtaagattgacaaccagactgccaagctcctcacctccagcttcacgagctgccctgccctggaagtaatcttgctgtcctggaatctcctcggggatgaggcag

SEQ ID NO: 5746 - DNA, 317 bp, Homo sapiens
ctggtccagaccacacagagctccaaagggcaggagccagaaacattgggtgaatggacagtcacagttgtttatggatgcattttctaaaacaacctctttaccttctttttcttggtccaagtacttctttatgttttccgctctgtccatgtatttggaaattttttctctgagattacatctcttagtattatctttggtacctttcagaacctgcaggagcagatcaatcccctcttggtaacacaccagagcctgcggataccgcgactccgaatctagttctactgcccgctttagcacagtggctgcag

SEQ ID NO: 5747 - DNA, 322 bp, Homo sapiens
ccaaacccctgcacgtggctgccgcctgggttttccaaggagagcacgccggtgtcgcttgctcctgggtttcttttattttttcctgttgttctatttctgggttaaagacagaacattttaagataattttccaggtcaaatacactcatttgatgtttttctttgtgaaggttttagctcagtactacacagtgacagatgagcatcacagatccgaagaggaactcctggtcatctttaacaagaaaatcagcaagaaccctacctttaagttattaaaggacaaagtcaagcttgtgaaatgaacatttgtgtattt

SEQ ID NO: 5748 - DNA, 240 bp, Homo sapiens
aaattaaaattccatttaactaaagatggttaaccccaagaaattgtacagtagttgatttctgctatataatgccagtcctatgccatacaataagaactgcaacattagctgtcacttcctccattgctcttctggaccctaagggatgagggaggggactcagacacaaaacacaacccaaataaactgtgcagtgattcctaatagttataaacccaatctaagttgtccaaacag

SEQ ID NO: 5749 - DNA, 292 bp, Homo sapiens
aaaagaaatgaagtctaaaacctcacttttccttctagccttacaaaaattgcctgacctctcaagacttttaatcacttcagggattcttgtgacattcaactgagatatatgtgaacacaccctatacacagcaaagcactaagtagtagtagcagaagacagtaccaccgacttttcttgttcccacataagcatttccctttagggctctaagatgaggtcatcatcgtttttaatcctgaagaagggctactgagtgagtgcagattattcggtaaacactcttagg

SEQ ID NO: 5750 - DNA, 401 bp, Homo sapiens
  unsure (73): n=A,T,C or G
  unsure (292): n=A,T,C or G
  unsure (313): n=A,T,C or G
  unsure (322): n=A,T,C or G
  unsure (327): n=A,T,C or G
  unsure (329): n=A,T,C or G
  unsure (342): n=A,T,C or G
  unsure (371): n=A,T,C or G
  unsure (379): n=A,T,C or G
  unsure (380): n=A,T,C or G
  unsure (394): n=A,T,C or G
cgtggggttttggctcaggaggacctcgtgggactgctggagcccatcaacacccgcatcactgatccccagnacttcctggacacgccccagcaggcggcagccatcttacagaaggtaggaagacccaacctccaattacaaatggacatattccactggcagatcatggatgggaacctgacaggaaacatccgggagttcctgcccattgttgggcatgtgcaggtggcacaggtcccaggccgaggggagcccagcagccccggagagctgaatttcccctatctgnttcaactgctggaagatgaangctacaaangcttngngggctgagacacngtagagggcttgagttggctacgttcatnctgggatnngcggggccacccanaggctgg

SEQ ID NO: 5751 - DNA, 408 bp, Homo sapiens
  unsure (76): n=A,T,C or G
  unsure (338): n=A,T,C or G
  unsure (397): n=A,T,C or G
ccacagtaaaagagttaaaatttcataagtagaagtttagttatttaggcttgtaatttatggctctgtcacctangaattttaagactttgagtttttaccaacccaacttcacagttccaaaatcccaggatttataggaaaggcttcaaaactaactgtcaattctgatttgctaagcatttaagaatgtaaatattaaatcagcattcattttcatttaacatttaacatggaagtaaaaattctcactttttgcctaacaacaaaactagaaaactaagacatctttcaataagttcttaacactcactggacaatttctactgcaagtcatntcaactaatgggacaaagagatgtgggaaccttcccgtagtccaggataggaaccgctngactccttcac

SEQ ID NO: 5752 - DNA, 380 bp, Homo sapiens
  unsure (287): n=A,T,C or G
  unsure (300): n=A,T,C or G
  unsure (316): n=A,T,C or G
  unsure (339): n=A,T,C or G
ctgatatcaaacaccttgcacaccagctcctctccgctgtgcagatgcacggcacgaaaaacgtggtctccctccagaggttccaacaataagtatttcccgatacaagaaacgcaatgcgacaagttcggagtctcgggcgggctcggggagccgaggttcgggctgaaactctggctgggctccgcggaccttatagacgacaactcttcgaaatcctgggttttgttccgcgatctcccatatctcgctattgtgatgggggtagacctgtgtatgttcatgantgtgaggatcgcncacgacaaacaaaaanaaacccgctggagagatgagtcnctggcgagtgcggctgcaggcgcctcggtgccactgatttt

SEQ ID NO: 5753 - DNA, 156 bp, Homo sapiens
  unsure (87): n=A,T,C or G
  unsure (106): n=A,T,C or G
  unsure (116): n=A,T,C or G
  unsure (140): n=A,T,C or G
  unsure (144): n=A,T,C or G
  unsure (148): n=A,T,C or G
tattttattcttaaaacttaagcatggtaaaatgttaagctgttttcatccactgatattattctactataaaaagcccttcttgancagatttgatgataaaaangagaacattnctaaggtataattagagaagctgntgcntganaaatcatg

SEQ ID NO: 5754 - DNA, 339 bp, Homo sapiens
  unsure (300): n=A,T,C or G
ctgcgatatctactccagattccttgtaagtcaaactcctgggctgctggaggaaagctatggcacgaaagccgatgtctttcctataaattgctccctcaaactttatagcagctagtcctttcttggcttcctcaagggctgatatgaaattttcccggatggctgtgactgcaagaactctacccccatgagttactactttgccatttttgagggcagtgcctgcatggaacacctccagtcctagagcttgagcctcaggaaaccctagaagagagcatatttgacacatgattncaaatagcaacagtatttcacaccgtgaagtgatttacg

SEQ ID NO: 5755 - DNA, 186 bp, Homo sapiens
ccttcagcccctctcccggagatggaatcgcggggcagggaggggcagggtgttctagaggtgagaagagggcctggtggagattccctgtcttctgagcccgagcccctcattaccagtgaaggacatgcttgaggggttcgggaagctcctcatctgaggcaactggtcctgggggtgctcagg

SEQ ID NO: 5756 - DNA, 554 bp, Homo sapiens
  unsure (505): n=A,T,C or G
  unsure (524): n=A,T,C or G
  unsure (532): n=A,T,C or G
ccggaatgaggggattgatttgacgcacaatcctgagttcaccacctgtgagttctacatggcctatgcagactatcacgatctcatggaaatcacggagaagatggtttcagggatggtgaagcatattacaggcagttacaaggtcacctaccacccagatggcccagagggccaagcctgcgatgttgacttcaccccacccttccggcgaatcaacatggtagaagagcttgagaaagccctggggatgaagctgccagaaacgaacctctttgaaactgaagaaactcgcaaaattcttgatgatatctgtgtggcaaaagctgttgaatgccctccacctcggaccacagccaggctccttgacaagcttgttggggagttcctggaagtgacttgcatcaatcctacattcatctgtgatcacccacagataatgagccctttggctaaatggcaccgctctaaagagggtctgactgagcgctttgagctgtttgtnatgaagaaagagatatgcnaatgcgtntactgagctgaatgatcccatg

SEQ ID NO: 5757 - DNA, 230 bp, Homo sapiens
aaaaagggagattagaaatgtcagtcaagaagatcaacttttagtctagcattctgacatcaagtgaattcagtgtctgtggtcagggtgtgcaaacttatatgtttaggtggaaaatgtttgaatatcaccctgtggaagggctatagtctggaggtatctgaaaaggtctgacaagaacagcaacaatgtctttgcactaaaatctgaaaattcccaatgtaactttt

SEQ ID NO: 5758 - DNA, 217 bp, Homo sapiens
  unsure (33): n=A,T,C or G
  unsure (44): n=A,T,C or G
  unsure (60): n=A,T,C or G
  unsure (65): n=A,T,C or G
  unsure (75): n=A,T,C or G
  unsure (77): n=A,T,C or G
  unsure (91): n=A,T,C or G
  unsure (178): n=A,T,C or G
  unsure (200): n=A,T,C or G
  unsure (202): n=A,T,C or G
cttttttttttttttttttttttttttttttanacaggaagtanaatttattggtgagtnttaanaggggggcancncattggaagccctnatgagtgcagggcccgccacttgtccagagggccacgactggggatgtacttgaccccacagccatctgggatgagccgcttttcanccaccatgtcttcaaattcatnancattgagcttggtga

SEQ ID NO: 5759 - DNA, 357 bp, Homo sapiens; identical to SEQ ID NO: 3776

SEQ ID NO: 5760 - DNA, 405 bp, Homo sapiens
  unsure (260): n=A,T,C or G
  unsure (381): n=A,T,C or G
ctgtagctcatatttcatgttggggtcatgccgaacacccatgaagttgtagttccacgaggactgggcagggaccatgaagaagccaaggaaacggtccgacagcagcatctgcaccctctcatagtgtgaaggcaggtagcccttggggttgttgcccttgtctgtgttctggcggccccattcgtagccactgggggtcagcttgtaggccgtcagtgtacaggagcctggcgtgaagctgcatgtgatgataatgntcttctcgccatcccaagatgggttgtcagccatgatcttggcatgggtggtgacatcctggggtgataactgcggggactcattgggctgagtgtggatccaacctaagggttccatctncttgaggtactcatgctggggcag

SEQ ID NO: 5761 - DNA, 363 bp, Homo sapiens
  unsure (14): n=A,T,C or G
  unsure (15): n=A,T,C or G
  unsure (27): n=A,T,C or G
  unsure (37): n=A,T,C or G
  unsure (88): n=A,T,C or G
  unsure (158): n=A,T,C or G
  unsure (159): n=A,T,C or G
  unsure (160): n=A,T,C or G
  unsure (177): n=A,T,C or G
  unsure (227): n=A,T,C or G
  unsure (230): n=A,T,C or G
  unsure (241): n=A,T,C or G
  unsure (245): n=A,T,C or G
  unsure (279): n=A,T,C or G
  unsure (288): n=A,T,C or G
  unsure (307): n=A,T,C or G
aaacaaatccaacnngaaattcttgangcaccttctnatataaaacacaagatgaatgcaattatcaatccatctgagaaaagttttnaatctaaatgaacatcattttttccatttaagtatattttacagaactttaataaggcaagacaaatttnnngaaaaaagatgtagatncaaaaatgatgtaaactaataatttatattaaaaaaccccaaagggatancangtggagatggnacanctcaaacaatgcctttttttaacctaaaacaganttgtgcacnagctgaagatgacaaacancttctagactctgcacagttttggttttttttttaacatctttatattacatgttt

SEQ ID NO: 5762 - DNA, 396 bp, Homo sapiens
  unsure (354): n=A,T,C or G
ctgagaaaattgatggagtatttgctgcctgtcagagtggctcttttgacaaactagaagctgtggtcaaggtaaagtcagcttactaactttggggaaaggaatattaagtcatcataccaaaagttttttttattataggatttaatagatgagggtcatgcagcaactcagctcgtcaatcaactccatgatgtggttgtagaaaataacttatctgataaacagaagtctattatcacagaaaaacttgccgtaagtaggtactttgcacatgtcaatggaacatttaactacctgaaggatgctaatttcttaaatttttctcgtaggaagttgacaaatgcctagcanatggtgctgatgaacatttgcaactcatcagcctttgtgcaa

SEQ ID NO: 5763 - DNA, 288 bp, Homo sapiens; identical to SEQ ID NO: 414

SEQ ID NO: 5764 - DNA, 442 bp, Homo sapiens
cctacagtgagattgggatgaaaggcgagcgccggaggggcaaggggcacgatggcctttaccagggtctcagtacagccaccaaggacacctacgacgcccttcacatgcaggccctgccccctcgctaacagccaggggatttcaccactcaaaggccagacctgcagacgcccagattatgagacacaggatgaagcatttacaacccggttcacccttctcagccactgaagtattcccctttatgtacaggatgctttggttatatttagctccaaaccttcacacacagactgttgtccctgcactctttaagggagtgtactcccagggcttacggccctggccttgggccctctggtttgccggtggtgcaggtagacctgtctcctggcggttcctcgttctccctgggaggcgggcgcactgcctctcacag

SEQ ID NO: 5765 - DNA, 382 bp, Homo sapiens
cctgcaaaggctgcgttgtagaggaacacaatgtagaaattgcccagccagttgaagcgtccaaagccacccagcaggtcaaagcgagtgagccccagggttcgagagaagacaggaagtgctgagcttaggaccaggagacagacacagttcccaattatctgcgtcatggcagtgtcgtgccatctgggccgcaggctccggaagagtggagagctatagaagcccacaactgaggacaccattaggtaaaagatgagtacaacctgaatgacggcaccaaaggagcccagcttggagaaggagacctggcctaaggaggtaccctgcatgcctcggggcatggcagcctcatcgatgagcagctccaggatgtggatgg

SEQ ID NO: 5766 - DNA, 259 bp, Homo sapiens
ctgtacaaacagcgagcttcccgccttgtccaaagacgacaagatgatattaaagatgaatcttcggagttttcaagccattcaagtcagtccatcttgaagacaaagctctgatggcaccaaatcttgactcctttggacgcgatcgggcactgtatcaagagcatgcaaaacgtcgcattgcagagcgggaggccaggaggactcgtcgtagacaagccagagaacaaaccggtaagatggcagatcaccttgaagg

SEQ ID NO: 5767 - DNA, 333 bp, Homo sapiens
ctgtggagctaggccctgagaacacgaccaccctccctcttccctcagcctcaagccgctgaagccactgctgcttcgccgcctcgtaagcccaatggtcagagctggaggctagacccttcagtgcttgggttgagggccagggtgttagattggttcttggagaaggaacgagggcccaggattcttcagcttcttagtttttgacaaattgagctgaggccccatagtcctcgggagggacagggttgagtgccataagtcggcaaaccagggtaaaggtgacaggcagctcagccaagctgcagggggtggcatatacagaggacctgg

SEQ ID NO: 5768 - DNA, 261 bp, Homo sapiens
ccagtggaaagtctcttggagagactttgaggtttgtgatgacaaatcatgctatcgttaaagttaaatacatatatatacacacctagaatataagcagaatggaaaagttggcagggatgaattcaagaacattagagtgaatttttttcattacagaattgttagttcctttaggaacttagtctcgtagatgtatatatttaattagcataacttggacagcacaagattaatgctttaacttgtttgcaggagttt

SEQ ID NO: 5769 - DNA, 151 bp, Homo sapiens
  unsure (43): n=A,T,C or G
accacggggtgcctgaggatcctcacttgctcctcaaactganaaggagagtgaatgccttcagcaatttcttcagtggtcccattgtggtgcactgcagtgctggtgttgggcgcacaggaacctatatcggaattgatgccatgctaga

SEQ ID NO: 5770 - DNA, 303 bp, Homo sapiens
  unsure (255): n=A,T,C or G
aaatgattatggaataacataatatttagagcagggcagataaatcagttgaacctgcttattttttatttattgtactctttttcctgttgctgttcctttctgcaggagggaaaacccctgatcctaaaatgaatgctaggacttacatggatgtaatgcgagaacaacacttgactaaagaagaacgagaaattaggcaacagctagcagaaaaagctaaagctggagaactaaaagtcgtcaatggagcancagcgtcccagcctccatcaaaacgaaaacggcgttgggatcaaacag

SEQ ID NO: 5771 - DNA, 357 bp, Homo sapiens
  unsure (348): n=A,T,C or G
ctgagttcccttcccgaaggtcagctcggggctcccgacgatcatgcagaagtagatgccactgtcttccggcttcacgcttgtgagattgagaatgaaccggcttgcatcccgaaacacagctatcttctcctgttccacctcttcaccgtggatagtcccttttgcggaatcccagagggccaggaactcgtggtgactgtcactgctcggtgcctggcgctgtctcagccagtagatgcgcatgttactgagggagattttagcctcgcaggacagcatcaccatcttgttggtttgcacctttatgtatgcaggggtctgctggaggactgagttgccatgganaacagtcag

SEQ ID NO: 5772 - DNA, 207 bp, Homo sapiens
ccaggctgtagtaacaggctcgcatgcgctgctccacggtcaggaagtcggggcgatcctcccacttgtagatccagcagtcactcatgagtgcgtacagttcgggtggacactctggtgggcactccatccgcttgccctgctcgatgaaggccatgacctccggccctttcatcttcttgtagggcttctggccgtaggacaagg

SEQ ID NO: 5773 - DNA, 275 bp, Homo sapiens
  unsure (223): n=A,T,C or G
  unsure (227): n=A,T,C or G
  unsure (239): n=A,T,C or G
ctggtggggtcagtggaagttctgtcactggatctggtttcagtgtctcagaccttgccccaccacggaaagcccttttcacctaccccaaaggagctggagagatgttagaagatggctctgagagattcctctgcgaatctgtttttagctatcaagtggcatccacgcttaaacaggtgaaacatgatcagcaagttgctcggatggaaaaactagctgntttngtagaagagctngagactgacgagtggcggtttaagcccatcgagcag

SEQ ID NO: 5774 - DNA, 280 bp, Homo sapiens
ccttcatgcacttttgacagctcagtacctgtgagaacagaagtgatgcagggactttttaacccacaatgcatgaggtatatggaaatgtctgtgaaagaaccaccagcagctagagggaccaggcaaagttttctcacagcaactgctgatgaaggatttcccacaccatcttcttccggaagagaggcatctggtgctgagtaaatgtgataggtttgtccctagaaatataatctgcatatttacaagtaaacattccacaatcactcccattcag

SEQ ID NO: 5775 - DNA, 302 bp, Homo sapiens
  unsure (240): n=A,T,C or G
ctgcccggccccagacccatctcttggattgagggtgtgtgggctggaaccagtgggtcactgtggcagcttcatctgagccgaaggtgtgggtcctctgtggctgtgcgattgacctcgatgggagggagcgttcggcccattttccttgttttcagtgctgcggtatcagtcagtgatctgaggaaatcctgtaggggaaggcaggctgcagtgaaaacaggagctggtgaaaccganccctctgcatctgcgaatgtgccctaggtgctgctgctggggacatggatgccgagcggagg

SEQ ID NO: 5776 - DNA, 129 bp, Homo sapiens
  unsure (60): n=A,T,C or G
  unsure (104): n=A,T,C or G
  unsure (114): n=A,T,C or G
  unsure (119): n=A,T,C or G
aaagtgctattcattgatcttaaatgttccatgaactgttaaatttcttaagttacatanttactacaccacatttatgtgtatgttatgtcttaatagtcaangataggtatntacanttgataatat

SEQ ID NO: 5777 - DNA, 466 bp, Homo sapiens
aaataacaggctagatctgttttcccttaccactcattttgcaaaactcaactggcctaaacatttcgctcaatcttgagttctgcaggttggtccctgagagctaggttggccttgggaatttctgctcaattttaagttctcaagaatctgagggcagccgatttagactgaattagagtcatcctataggtcagaaagaaagaatgctagacaggtcaagagggccagaggttggttctgataatgccatatgacctcaggcacatctttttgagttttagtttccccatctctaaaaacggatgattggacaacagcaagcttaacagactttccaccttgaaaatacggcacttctctgacgcttagaccttaagtcctgaagcgttgttttctcagcaaaaacagtgcaaagtccttacaggaatctaaggtacaagccctgggcaaccatgaaaacttt

SEQ ID NO: 5778 - DNA, 255 bp, Homo sapiens
  unsure (192): n=A,T,C or G
  unsure (195): n=A,T,C or G
  unsure (209): n=A,T,C or G
ccatggatctcaaggaccccaaccgcccccggttcaccctgcaggagctgcgggacgtgctgcacgagaggaacgagctcaagtccaaggtgttcttgctgcaggaggagctggcttactataagagtgaagaaatggaagaggaaaaccgaataccccaacccccacccatcgcccacccgaggacgtccnccnagccggagtcgggnatcaagcgactgtttagcttcttctcccgagataagaagcgcctgg

SEQ ID NO: 5779 - DNA, 445 bp, Homo sapiens
ccacagttgtggggcagccaaacactccttcagggaaatgggaagagaactggtggctgctagggggtggggcaagtttcctggcagggaggtgtgtcccagggtcctgcacccatggcagagcccctgctctaatatccccttatcattcttatccctgctggaccccaaactccagagatgcccattaccttgttcaccccatgcccttagcctcagaacaggcactgtgaaggtggagccacagagcagcactggtgcggcggggaccgaggcaggaggagggacagcaggcggccctgggggagcctgtgtgttgttgccagcctactctctatctggccccagccgggaagccactcagaaatccctaagaacaatccaaagggagcctagccagatcccgggtgtcacaggacacagtctgacccagggttacgccagg

SEQ ID NO: 5780 - DNA, 338 bp, Homo sapiens
cctccaagttccggaccacggtcacctttttattagacgctctttgtgctagggtgatgtcaattggacagattctccctttcttcacaatgggctcttgtccgggaagggtcacttgataggcaggctgtaatttttccaaacacctggtcagaagactgtcccatggaagcttcatgactgtatgctgttcatttttctctaagatgcagtcacataggatgggatccaatctcacaagatttttgttgtctgcatcaaccaggtcatttttcttggcgtagttaatgacgatcgttcggacctcactgccctccagaaagctccccttcttgtgg

SEQ ID NO: 5781 - DNA, 508 bp, Homo sapiens
ctgcttgtaaccactgtgtttatgtcaaagcattcattttttttaggatatctggaaaaatgccatataagagaaaactctataaaacatctataattttcgaacccaagtacactcttgcattctatgctttaagttaaatgcaaactcctttttccttcttcctgctgcaagtactatctcatcctgatgctcaagagtgtcagggcctgggtttccaaacagagactaccctaaaattatttggggagtagtactttacacaattgcctctcccccacaaatcataattgtttcagtaaaatggttacttggtttttccaagaaaaaactcgtttttactcacttttggcctgtttgtttatttagaaactaatctggattcactccctctggttgatacccactcaaaaaggacacttctgattaagacggttgaaactagagatggacaggttggtatcttttaaggaaaaaatagggtaatctcagacaggagttgatatat

SEQ ID NO: 5782 - DNA, 188 bp, Homo sapiens
  unsure (37): n=A,T,C or G
  unsure (69): n=A,T,C or G
  unsure (81): n=A,T,C or G
  unsure (126): n=A,T,C or G
  unsure (135): n=A,T,C or G
  unsure (165): n=A,T,C or G
  unsure (174): n=A,T,C or G
ccacagttgtttgatgcattaaaagaaaataaaaaanagaaaaaagagaaaagaaaaaaaaaaagaaanaagttgtaggcnaatcatttgttcaaagctgttggcctctgcaaaggaaataccagntctgggcantcagtgttaccgttcaccagttgccattgngggtttcanagagcctttttcta

SEQ ID NO: 5783 - DNA, 372 bp, Homo sapiens
ctgttccttctgtgttttctccagtgtcctcacatcaaatccaggagaattaggagagaggagagcactgacttcagaaagatagcagatgaaaatgtgattcatttttattatgtgaggatgtagagatgtattctgtaatttgacttgatatcaaatattgtcacagagggtgtgtttcgttatagggataattatgtgctgaaagggaaactcttcaaggctattgctgagttctatgttttctccttcccatagcccttattgccttctaacataccatgtaatctagttatttattgttttttgtttgttaactgtttccccctgctgggatataagtctccagagggcaggaatctttgtcatttt

SEQ ID NO: 5784 - DNA, 330 bp, Homo sapiens
ccagacacacgtttgttgagtacctactatgtgtcagtcacgttccgaggtcactgtgtgtatgagccaccgaaccctcctgacatgccttatgaagtggctatggtgattaacctcactttacagatgagagagggaggggtctgtctatggggatgtgaggcagtggtagaggcgggatgtgaacccacgatgggccccagagctcacattcctaaaatggtctgctgcgggtgctcctgtttctcatgggtgggcccagacctgaacatgtgtatgcacagagaagacacatagttacatgtgcacctagaggctcgcttttggagg

SEQ ID NO: 5785 - DNA, 339 bp, Homo sapiens
ctggaagaagaaaagaaagcaaacaatgagaaacagaaagctgaaagggagctagagggtcaaatccagagattgaacacagagaaaaagaaactaaatacggacctgtatcacatgaaacattctctcagatactttgaagaagagtccaaggatctggccggccgcctgcaacgttcatcgcagcgtataggagagttagagtggtctctctgtgctgtcgccgccacacagaagaagaagccggatgggttctcgagccgcagtaaagcacttctcaagcggcagttagagcagtccatacgggagcagatactgctgaaaggacacgtgacacag

SEQ ID NO: 5786 - DNA, 429 bp, Homo sapiens
  unsure (342): n=A,T,C or G
cctggttgctgttcatcctaaatctgttaatgtggagcaaacagactttcactacaactggcttatctatcacctaaagatgagaacaagcagtatatacttgtatgactgcacagaggtttccccatactgtctcttgttttttggaggtgacatttccatccagaaggataacgatcaggaaactattgctgtagatgagtggattgtatttcagtctccagcaagaattgcccatcttgttaaggaattaagaaaggaactagatattcttctgcaagagaagattgaaagtcctcatcctgtagactggaatgacactaaatccagagactgtgcagnactgtcagctattatagacttgatcaaaacacaggaaaaggcaactcccaggaactttccgccacgattccaggatggatattacag

SEQ ID NO: 5787 - DNA, 141 bp, Homo sapiens
  unsure (4): n=A,T,C or G
  unsure (13): n=A,T,C or G
  unsure (99): n=A,T,C or G
  unsure (105): n=A,T,C or G
ggtncacaattgngccctcagctccatggcccaggacatccttgggacagaaggaaattttcccaactatcaccacgctggtttcctcatctgggacanaatagngaaaaagagattgtttcaaacagatatcacctaaag

SEQ ID NO: 5788 - DNA, 486 bp, Homo sapiens
  unsure (315): n=A,T,C or G
  unsure (446): n=A,T,C or G
  unsure (463): n=A,T,C or G
ctgcatttttgaacaccatggaaccccaagcctttcattttgcctgggccacccgttacctccggtccagtgaactctccaggctggagaaggatctccctttggggggccgcagtccccagatcccctccgttcccgtgcctgggtcctctgcatctcctagttcccaggttgggcgctgccactgggtgctaccgctgggtacatgccagtagtaagtacctgcagcatcgtggatcttcctccagccaggaggcaggccagcctccacctccagactgtggtccccccacaagtcatctacaggaacaccgnattagagaggagggagcatatgatttgtgagttcagaataacatgctgtcataatcccctctccatccccaaaatgggtcagttcttaggctgaagatccaggctcctcaatcttgaagacatcacatgtnaagaccgggttcattcnccccctggtccctacacagagag

SEQ ID NO: 5789 - DNA, 323 bp, Homo sapiens
  unsure (53): n=A,T,C or G
  unsure (64): n=A,T,C or G
  unsure (117): n=A,T,C or G
  unsure (125): n=A,T,C or G
  unsure (139): n=A,T,C or G
  unsure (205): n=A,T,C or G
  unsure (270): n=A,T,C or G
  unsure (271): n=A,T,C or G
  unsure (274): n=A,T,C or G
  unsure (311): n=A,T,C or G
  unsure (314): n=A,T,C or G
ctggagcgagaggaggaagtcacaggccctgtcattgcgcctctcttcccgcngaaacgtgaanagggctggtgggtggtgattggagatgccaagtccaatagcctcatctccatnaagaggcntgaccttgcagcanaaggccaaggtgaagttggactttgtggccccagccgctggtgcccacaactacactctgtacttnatgagtgacgcttacatgggatgtgaccaggagtacaaattcagcgtggatgtgaaagaagctgnnacngacagtgattcagattgagtcctgaggcatttacttnttnggtaaagga

SEQ ID NO: 5790 - DNA, 146 bp, Homo sapiens
  unsure (18): n=A,T,C or G
  unsure (45): n=A,T,C or G
  unsure (76): n=A,T,C or G
  unsure (112): n=A,T,C or G
  unsure (124): n=A,T,C or G
  unsure (135): n=A,T,C or G
  unsure (145): n=A,T,C or G
tctaatcttggggcctcngacaccccaaatctatatattgaccantggaagttgatgaatttgttatcaaaattcnaagcccccatgggaaaccccctttctttcttgtggnagaatttccagntcctttacagntatttgaaant

SEQ ID NO: 5791 - DNA, 255 bp, Homo sapiens
  unsure (143): n=A,T,C or G
  unsure (156): n=A,T,C or G
  unsure (226): n=A,T,C or G
aaacattagtgttcatagcttccaagagacatgctgactttcatttcttgaggtactctgcacatacgcaccacatctctatctggcctttgcatggagtgaccatagctccttctctcttacattgaatgtagagaatgtanccattggtagcangcttgtgttgtcacgcttcttcttttgagcaactttcttacactgaagaaaggcagaatgagtgcttcanaatgtgatttcctactaacctgttccttg

SEQ ID NO: 5792 - DNA, 268 bp, Homo sapiens
ctgttcctgagagatgcaatatagtagtcatcgacatcatccttatcaacagcatcatcactcagacagtggtgaaagtctttcttcacaaggaaaaacaaagataaagaaatacatgagcattaatcagaaattttcaaagcttggattctaatgatatgcattatcattagacattcaaatgctatacatcttctgatgaagcctccttgacagcagtctacacttatttcacattagaatgcctagagaaatcctgactgcccag

SEQ ID NO: 5793 - DNA, 482 bp, Homo sapiens
  unsure (441): n=A,T,C or G
ctgcattgaggtgaccccaggggacaggagttggcaccaaatggtagtgagagccctatcctcccaggagtccaagccagagcaccagggcttggcagagcctgagaacgaccagctcccggaggagtaccaacaaccgccaccctttgcccctgggtactgctagagaacaggtccaccctggctctgggactcgctgccaggggctgccacactcctgaatgccttaacatttcttccatggccccacaccatggcatccgggggtcttcgggaacccgggaaatggaataaagatgtttttggggtctgttcctgcactcacccatggggtgagctggttattttagcaacaatcatcagagtgacgctgatggtttggggcaccagctatacatcagccccagtgccagaccttctattcattattttacgcctcanagcaaggccctcagggagggtcatcctccatgttttgaaga

SEQ ID NO: 5794 - DNA, 254 bp, Homo sapiens
cctgccagatatttgtgagaaatctgccattcgatttcacatggaagatgctaaaggacaaattcaacgagtgcggccacatgctgtacgccgacatcaagatggagaatgggaagtccaaggggtgtggtgtggttaagttcgagtcgccagaggtggccgagagagcctgccggatgatgaatggcatgaagctgagtggccgagagattgacgttcgaattgatagaaacgcttaagcagttgcctttttt

SEQ ID NO: 5795 - DNA, 135 bp, Homo sapiens
ctgaagtgtggcttgcgtaaataactgtttattccaaaatatttacatagttactatcagtagttattagactctaaaattggcatatttgaggaccatagtttcttgttaacatatggataactatcttctaat

SEQ ID NO: 5796 - DNA, 205 bp, Homo sapiens
ctgccatcacatcggacatattggaggcccttggaagagacggtcacttcacactctttgctcccaccaatgaggcttttgagaaacttccacgaggtgtcctagaaaggatcatgggagacaaagtggcttccgaagctcttatgaagtaccacatcttaaatactctccagtgttctgagtctattatgggaggagcagtctt

SEQ ID NO: 5797 - DNA, 141 bp, Homo sapiens
  unsure (110): n=A,T,C or G
  unsure (113): n=A,T,C or G
aaaagtttgaagactctcacaggtaagtgcagctcaggatcctgtgagtgcagcagaaagtcttaagaaatggcaggggctggttgaacccagattttccattggctgancanatatccccagtaggtgtaaaaaatttca

SEQ ID NO: 5798 - DNA, 312 bp, Homo sapiens
  unsure (221): n=A,T,C or G
  unsure (233): n=A,T,C or G
  unsure (238): n=A,T,C or G
  unsure (276): n=A,T,C or G
  unsure (296): n=A,T,C or G
  unsure (306): n=A,T,C or G
tttatttggttacagtgaataacctggacaaaatgttgagaagagttgttaaaacaagtttacattaaatatactaacaattacgtttggttacatatttgtaagtgatggttatttagaaaaactgcatagaaatccaaaccttaaatattctgcaaatcaaatcattagcttttctcttctctaataaagtagggtgactagttcttggattaatctanctataacattantgtancactctgattatcttatggaataattctctatctcatntaaccctcacaacaaccctngtaaagtatnatcccc

SEQ ID NO: 5799 - DNA, 131 bp, Homo sapiens
  unsure (92): n=A,T,C or G
ctgctagttgtgcttgctgggataaatcttcgatcttggcttccccaaaaactatgtaagtatctgaagcagggctcttgtagacatctggntttgtgatgacaaagaggatattcttagatttccggata

SEQ ID NO: 5800 - DNA, 504 bp, Homo sapiens
  unsure (435): n=A,T,C or G
  unsure (468): n=A,T,C or G
  unsure (470): n=A,T,C or G
  unsure (488): n=A,T,C or G
aaaagaaattcagaaactaagcggttggagaggagcattggaaatagagggggatgctatgagatgggggttgggagcagagaagaaactgcaggagggcaaagtgtaactagcaatataccttctgtgatgctccagaaacacatgtctgctaagattaacttgattggagtttcttatgaaacaggctgatcatcaagatttttaactcaggtttcagtgaaaaaattggaaacttttacaagaaagatttgagaagtagaaggcaggcagcaaattttccagatattatgcttgcatttcaaattcctgtttcaggcttttcaagtaggcatgcacattcccaaagccatgatatttggctaaatacacaaggaccccagtcgcacaccgccatctcgctgcccggcagaaactgcagttgcagattcctcnacaaggcgggcaatgcccagttcggatccacanancttcccttgacctcttcncccttaacggtttcaa

SEQ ID NO: 5801 - DNA, 252 bp, Homo sapiens
gaaagatggcggctaccttactagctgctcggggagccgggccagcaccggcttgggggccggaggcattcactccagactgggaaagccgagaagtttccactgggaccactatcatggccgtgcagtttgacgggggcgtggttctgggggcggactccagaacaaccactgggtcctacatcgccaatcgagtgactgacaagctgacacctattcacgaccgcattttctgctgtcgctcaggctcag

SEQ ID NO: 5802 - DNA, 420 bp, Homo sapiens
  unsure (315): n=A,T,C or G
  unsure (371): n=A,T,C or G
  unsure (373): n=A,T,C or G
  unsure (403): n=A,T,C or G
ccatgagtgacaggtggcctcttggtgggagaggtggggcagggggaaggcagctcccactagaccagggcagtatttaggggaaggaggcagattggagcagttggctgccaacacctggcctcactcagggagaggggccttgggcctggaagatatctgggtgaggtacccacaccatctgctgcaacctctgtgtatccattatgggctcgcgccattcacaggcatgaattgagcacctagtatgtgggaaaacaggggaaacagagatggcacagacatggtctccatccttcgggggctccagtctanttgggggagatcagagaagttccatttgccactctaggccaagctaggtaagcggnanagccatgaacattgtgggagcttggagganggagttgaccccttgca

SEQ ID NO: 5803 - DNA, 400 bp, Homo sapiens
  unsure (367): n=A,T,C or G
aaactagccacagaccaaactagatctgcattcatccagcgctggaattttatgctaaatactaaggtcctttatcttcttggtcagaagtaggcaacagtaaaagtggtgctttgttgcgccactgaaaccgctccctgggtgggtcttccccgtatcatgtgttggtagcacatgcaaacccctgcttttacggaaaggactgcttggaactttgggacctgtccagggctcatgtgctgtgcctccggataggatgaagctacagatgataaaacagctacgtataaaagcagatggattttgtatagggacatataaataggaaaggtcctggaggaagggacttatgcctgggccccaaagnccagtttacagtcacattcctgaccatacatcg

SEQ ID NO: 5804 - DNA, 265 bp, Homo sapiens
  unsure (255): n=A,T,C or G
aaagatttagtgcttaacattttcccaagtgtgggaacattatttttagattgagtaggtaccttgtagcagtgtgctttgcattttctgatgtattacatgactgtttcttttgtaaagagaatcaactaggtatttaagactgataattatacaatttatatgcttcacatagcatgtcaacttttgactaagaattttgttttacttttttaacatgtgttaaacagagaaagggtccatgaaggaaagtgnatgagttgca

SEQ ID NO: 5805 - DNA, 223 bp, Homo sapiens
  unsure (175): n=A,T,C or G
  unsure (190): n=A,T,C or G
cctcggtgggtcttgcggggcagcttcttggtgtgccaacgactggtgacccctttgtagcctttgcccttggtcaccccgatgacgtcgatcatctcatcctgcccaaacacttggttcacaggtacctgctgctcaagcctctcgcggcccatccagcttctcggccacagtncctccgttcacctgnatctccatcaggtgggccttcttctggcgcaga

SEQ ID NO: 5806 - DNA, 430 bp, Homo sapiens
  unsure (2): n=A,T,C or G
anaatatttacacttaaagacaaaacatttccacaattattacaattggtttcactaaatcagaagtgactacacattatctctacttttataccagaaaacaaaatgaagaaatcaacaaaatataattactaaaactccactgtggatcagggataaaatgtgtccaatattaactcacactttcccaataagtataaaaatgaatataacattgcttggacaacttgtttcaacagcgaatcctctattactatttgttcaataacatatataaattcaaaactggcaggtatgaaaaaaggttactttgttttttgcagatactgtacttgtaaaataaagccaaataaagcatatgtcacacataccaaagtcttacattttgcctttctaatacaagcaagtgaaatattaacacatagcattt

SEQ ID NO: 5807 - DNA, 518 bp, Homo sapiens
gataaatgctggtcagatgtaagtgtgttgtctgcaattcatcaggattaaattatgtagataacttaagggatatctctgcaaggagaaacacctttttagatcttttagatgctgcttcttcaatgcaaggaaaggaaataaccccagcgaggtactcttcagggacacaggtctagtacaagagaactcttgacggctactaagttcagccagtcttaaaaaactgtgctgtttctacaaaactttaactacagtagtttataaggatgccaacgaaagctgagggtgtagagcaaaatagttctaagcttcagttaaacttctttaggtaagatcttatttacttttcctttcttaattttcctccctaaaagataaactaatactcttaaatggtctttcagtaaagtggttcttacgtagtttaacatagctataaattgagtttaacaatttataaactcaagagaataatttttataaaccctgttttccaatctgtcatttacttaaat

SEQ ID NO: 5808 - DNA, 388 bp, Homo sapiens
ccaagcgctcagatcggcaaggggcaccagtcttgatctgcccagtgcacagccccacaaccaggtcagcgatgaaggtatcttcagtctcccccgaacgatgagacaccatgacgccccaaccattggcctgggccagcttgcacgcctgaagagactcggtcacggagccaatctggttgactttgagcaggaggcagttgcaggacttctcgttcacggccttggcgatcctctttgggttggtcactgtgagatcatcccccactacctggattcctgcactggctgtaaacttctgccaagctccccagtcatcctggtcaaagggatcttcgatagacaccactgggtagtccttgatgaaggacttgtacaggtcagccag

SEQ ID NO: 5809 - DNA, 501 bp, Homo sapiens
cctgtaagcaaaattccttccaaatttccagcctctttcatttcattggtcaacttttcgatgtatctatttaactgagtatcactaaggaatttacaagcaaatgccactctgtcacgtactgcaactttgttttcatacaaaactccatcgtaagatcctgtttcacttgtcagaaatgcaaacatgacacacaaatacgggttatttagctgtaatcgcagtgtgctacacatttctctccaaagggagttcttctcatccgtataacccgataaagccattgctaccacattgagattcagatctcctttttcagaagatgccccttcattcaggatttggattgctcggcgaatatccaagttgaacaatgccacagcagcagctctttcccattccccttcttgtacaagggagttcaaaaatggccccacgtctacatccgttcctttctttatccacccacaaagctgtaaagctaagattctctcttcattt

SEQ ID NO: 5810 - DNA, 404 bp, Homo sapiens
  unsure (197): n=A,T,C or G
  unsure (339): n=A,T,C or G
  unsure (340): n=A,T,C or G
  unsure (361): n=A,T,C or G
  unsure (396): n=A,T,C or G
aaaaaattaactaataaaagcttttatatttaagaactgcaagtgtttcaaaactatgctgttttgtgttgttatagttgtaacatatttctcaattttcctgtttttcttttagtttattgacaagactacctggtcggcctaaattccattttcattcagtttttgggcatttgagatcaaagagtaagtatggnttctacagttacttcatttttctacttatctttttaagttttttctccaaattttgacttcttttatatgtatcatctatactcagcatgaagtccagttttttctattatatacatgttttcaattcgctccctgaagcanncttttaatttcttcatcttcnaataaatgaccatcaccaccttcaatgaatctggngacccttg

SEQ ID NO: 5811 - DNA, 375 bp, Homo sapiens
  unsure (280): n=A,T,C or G
  unsure (298): n=A,T,C or G
  unsure (306): n=A,T,C or G
cctgaggtgggtgtggggagagacagcacgttcccgtactggttctggggcccgcttcctgggggaggcgtcactttgaagaatctggcgggagaagaggaagtgcacggtgagggccgacttggaatggaatggcggacccactcaagattctgtccaggccttcagaagttaaacgtgatcacttgtgctgggacagccaatagaggagtctgagatgatcatttccaaggagttcttcacagaggaggtagctttggagctgggctttgaggttggncagtatttgaaacagtanagacggancaaagaacccctgggcagaggaaacagtaagtgcaaggcataaagtgaacgtggagggtgttaccgccg

SEQ ID NO: 5812 - DNA, 90 bp, Homo sapiens
  unsure (13): n=A,T,C or G
ccaggcacaccantgtggccttttgggtgtgggagatctctgcttctgatggctcaaacacagcgacctcgggtgggaacaccttgttca

SEQ ID NO: 5813 - DNA, 222 bp, Homo sapiens
  unsure (112): n=A,T,C or G
  unsure (171): n=A,T,C or G
  unsure (209): n=A,T,C or G
ctgacgcagctctgcctctttccgttttgccttcatctgctctttcagctcctctgtcaagcgctccttcttctctttcaacttgtctactgctttctcatcccagcgccgngccttggccttcaggtcactggccccaccagagatcactcctgacttctggaatagggntccatccagtgccactgtcttgtggcgctggtggtctncaaaggcaatgcg

SEQ ID NO: 5814 - DNA, 419 bp, Homo sapiens
  unsure (371): n=A,T,C or G
  unsure (395): n=A,T,C or G
  unsure (397): n=A,T,C or G
cctgttcattttttttgtctttcccaaatcttggtagtctccttatagttgaagataaaatgttgagtgcacttattttagaatatcctagacataactgtctaagtaaaagcgctctattaatctaaaacactacaagagaatttaacaccatctctcaaatgcttttttggagagcttaatgggattctgaatatttgcaatgtggagtttccgccccgatctcacgtcagtgagggtctcctgtctctcaagtgtgtttcctttggctgttccctaatacaaaacacggacatatttttactcgtagcactcaatttagtaacttctagatgctaccgttgacctgagttaaattcatttagtcgtgnacgtaaaaactctccttttagtgngntattttcttggccttccctttt

SEQ ID NO: 5815 - DNA, 306 bp, Homo sapiens
aaaataatgcttatagtatcagtgaaggcttatggtaatgaataaaagaattctcatgagacagaaacaatgccccaatatctattatcatcaatctatctgtatttttttttataaaaatgcaatctacaactaaccaaaactcaacaggctctcaagtttcaatgagcccctttatattatcaattgtacatacctatcattgactattaaaacataacatacacataaatgtggtgtagtaaccatgtaacttaagaaatttaacagttcatggaacatttaagatcaagtgaatagcacttt

SEQ ID NO: 5816 - DNA, 444 bp, Homo sapiens
aaacaagaacttgctaaagaaacctcatcacaacaacgttttagggcctgatcactttaagtccatggggccattaatgaatatcaaccaaatgtctctttataatctgcaagccgtttttcctacaacaagaaggcgtaacatgtttccttgactcaggtgataacattagaaaagaaatcatgatttgtttcttttgctgtaacaggcagacactgcatttcttgctataatcaggaaagatggaacgactgctgcccttctcttgctgctatcaacagtttttcacgcattatctcaatgcttgaatagtccggcaacttaagatagttcacacaagtcattacagagggcaagaagtcatctgggttttctgttgattcaaacgtctttcggacaattgtcaaaggtggattcaaactccggaatcctccaacaggcaat

SEQ ID NO: 5817 - DNA, 314 bp, Homo sapiens
ctgctcggatcaggcagttctggagccataggagcgggatagaaaagccttcctgatgcaggctttgaccaaggttttcatttgaaaggactaagctaccctggacttgttctgcttctgagcccccttcttcttcctcttcgctgcttcctcaggcaggttttcctcttcttccagatcttcctggcaaaaatctttcagggactccgctccatttggcaagatggaggatgccaactttttctgccgtttccttgtacagctcccgccgctcagccaccagccccagagccaagagtttatccactattcgg

SEQ ID NO: 5818 - DNA, 246 bp, Homo sapiens
  unsure (151): n=A,T,C or G
  unsure (168): n=A,T,C or G
  unsure (193): n=A,T,C or G
  unsure (208): n=A,T,C or G
  unsure (214): n=A,T,C or G
  unsure (218): n=A,T,C or G
cctggaagtatttcactgttggaagaagtaaacaagaatgacattccagatggaaatagaattctctctcttgcctttgaccaacatggtactaaggggtttcttctttcccaatgtatgtacgtgccctgctgggggccttactttatanaatgagagcatccgagnttccctaatgaatctggctagttcntgtgtctgggctgangatacnggantgggacatccactctcggatccctcaga

SEQ ID NO: 5819 - DNA, 286 bp, Homo sapiens
  unsure (248): n=A,T,C or G
  unsure (264): n=A,T,C or G
ccacaagatatgttctagagacgtccatgagtcctcttgctgtgtgggagcggcatccacagacttctggaataattggcctgtgaggaagctcatcaaagctgcaaacagtacaatgaatgcaatagagagccagagggccttattagcctttctgatggaggacttgagatttgttgcccaggaagctattgtgtcataaactgaagagacatcccactttgatggattatttttcttttcagaangacttggcttccttgncctttctactgtttcttctcca

SEQ ID NO: 5820 - DNA, 438 bp, Homo sapiens
gttctgaaaccgttcttccaccactgattaagagtggggtggcaggtattagggataatattcatttagccttctgagctttctgggcagacttggtgaccttgccagctccagcagccttcttgtccactgctttgatgacacccaccgcaactgtctgtctcatatcacgaacagcaaagcgacccaaaggtggatagtctgagaagctctcaacacacatgggcttgccaggaaccatatcaacaatggcagcatcaccagacttcaagaatttagggccatcttccagctttttaccagaacggcgatcaatcttttccttcagctcagcaaacttgcatgcaatgtgagccgtgtggcaatccaatacaggggcatagccggcgcttatttggcctggatggttcaggataatcacctgagcagtgaagccag

SEQ ID NO: 5821 - DNA, 341 bp, Homo sapiens
ccttaggacaatgggggctgtggcatgcgtcaggttacctgccttgatatgggatcgtgacaggcccctccctatgtgcaggagacaagcagcccaagaaacaggagaaaaacccagtgttggtgtccccatagtttgtggatgaagctctgtgtgcgtgcgaggagtaccttagcaacttggcccacatggacatcgacaaggacctggaggccccgctgtacctcacccccgagggctggtccctcttcctccagcgctactaccaagtggtccacgaaggggcagaactcaggcacctcgacactcaggtccagcgctgtgaggacatcctgcagcag

SEQ ID NO: 5822 - DNA, 443 bp, Homo sapiens
ccaaaaacttcagcataaaaactatcctgtctgtgtattatatatatttattaccaaatttaataaacaaaaaccacttttgaaccaggtaattttatctagtgtgaaaagaaattaatcacatggtcatatactggctagtgctctctaaaagtagacattaaaatatttcataattggagggaatctttggagattagtggcatctaatcttggggcctcagacacccaaaatctatatattgaccagtggaagttgatgatttgttatcaaatttcaaagcacctaatggaaaccccacttcatctctgtgaagattttcagttcctttacagttatttgaaattatttcaattctgtggagccacttcagaaactccaatgggcctttgcaatattaaaatgtggagaatgcattaatcattatttaatcaatgagttt

SEQ ID NO: 5823 - DNA, 178 bp, Homo sapiens
  unsure (156): n=A,T,C or G
ctggcgctcctcccagcagccactcagggaaagaaagtggtgctgggcaaaaaaggggatacagtggaactgacctgtacagcttcccagaagaagagcatacaattccactggaaaaactccaaccagataaagattctggggaaatcatggctncttcttaactaaaaggtctcat

SEQ ID NO: 5824 - DNA, 502 bp, Homo sapiens
  unsure (473): n=A,T,C or G
  unsure (486): n=A,T,C or G
ctgttgactcagattcggcattttaattacattgtttccaagtatgatattctgagagtgtctatagcacttagtgtctgcttcatataaactaccagttattatatatttatgatgcaagtagttttccaaatgtggtgaaagtctgagtctttttatccccatgggtaaaatctgaatctggctctctgtgtctctcagtgcttgtttattgctggtcagagagtaaattcttgataaaagctgttgacttggctctcacagtttatgcagacattggagagacaatttggttatttcaaacatcacaggatttgagtaagaagacctggttatgaaacaaggctctcataattactagttatgactgttgacaagttaccttttcttgtttacaagttatttggcctctttgaattacttgtaaaatagagatagggattctttcttgatcatggaacatcaaatgaagntatttgatgaaanactttgtcatctggaa

SEQ ID NO: 5825 - DNA, 503 bp, Homo sapiens
  unsure (304): n=A,T,C or G
  unsure (466): n=A,T,C or G
ctgaagagtcctgtagagtagagtgatttttgtatctccaaccctcctcccaacttgaaacaaattctcaagcttctctggagcatcttttggtcacatgaccctcgatcatggtaacccttttgctaagacacatgtgacaccaaggtttcctctgacactgcttctctagggttcagatgacagcataaaacatcactggtcaaaaatattagatattaagaatgtgggcgtttatgttcgtaacagcaaatactttgtagggtgtgtcacccaaaggagcatttttgtcatttaatatggnccccggggagttagcccaaaatcatacaaataagcctttttctaaagacaggtcaaagttggttaatttaacagttgaggaaccgtctcatgccaattaaaaaattcttacttcccaactattcaatggtccaaaaagcaattaaatgtgaccattcagttntacacacatgcacacacacacacggagacgcgcacac

SEQ ID NO: 5826 - DNA, 333 bp, Homo sapiens
  unsure (308): n=A,T,C or G
cctggcctcttcagagtaccccccattccactttccctgcctccttccttaaatagctgacaatcaaattcatgctatggtgtgaaagactacctttgacttggtattataagctggagttatatatgtatttgaaaacagagtaaatacttaagaggccaaatagatgaatggaagaattttaggaactgtgagagggggacaaggtgaagctttcctggccctgggaggaagctggctgtggtagcgtagcgctctctctctctgtctgtggcaggaggcaaagagtagggtgtaattgagtgaangaatcctgcgtagagaccattctca

SEQ ID NO: 5827 - DNA, 502 bp, Homo sapiens
  unsure (491): n=A,T,C or G
  unsure (502): n=A,T,C or G
aaaatagcatcagtaacttttgagctcatgtcaatcaagcattggcagtcagagattttatagggaagactaagtaaatccagtttccaagaacctaaactgattgaggctccaagagtcagaccaacaaaagttttattctgtgttgtttactggtaagaatattattatcttgatactacctctcaagggtattgttacaaaatgccacttatggttaaagagatagatacaaagagttctatttgacagaagcttgaaactctggcatctatctgcccaacgatgggggctttcgttctgtaatttaatcctttgtagatacattatttgtgtgtaattttatacgtgttcatatttttctcattttgcattgtgtaaagtgtacaaaatctcaaagtataaaatactgcttatattgcttgtaatttacagtgtgtaaatattttctaattgtgtacattgatgggggggacaagtgggttattcangtttttttttn

SEQ ID NO: 5828 - DNA, 112 bp, Homo sapiens
  unsure (89): n=A,T,C or G
  unsure (104): n=A,T,C or G
ctgtgtagtaaagatgccttctggtgaatttgcacgtatatgccgagatctcagccatattggagatgctgttgtaatttcctgtgcanaagacggagtgaaantttctgca

SEQ ID NO: 5829 - DNA, 101 bp, Homo sapiens
  unsure (45): n=A,T,C or G
ttccatttatctttctacagggctgacattgtggcacattcttanagttaccacaccccatgagggaagctctaaatagccaacacccatctgttttttgt

SEQ ID NO: 5830 - DNA, 442 bp, Homo sapiens
  unsure (427): n=A,T,C or G
ccaaggcatcatggtgcgtggtccccttgagagacttgccgttgatggaaagaacctcattgcccttctgaatagtcccttcctgggaggccagcccatttggaaacactctgtgaaccgtaatcaccttgttttctagatctgctcctcctgccaagctgaacccaagaccagcaccttcctccttgtgtaagatggtgacatggatgccgcctaattgctttaatgttgtttcatccagaaccttcacctcctcgatgagtttttttaattcttctgagctcagcagggagataacggactgaccagactgaagggaactgtggtccccatcatcgtcttccttggcttccgtgagaccctctgtatattctctcagctctgaaaggttgagcgagaaccctgtgtccaaggcagatgtttcagnaagaaccatttgcag

SEQ ID NO: 5831 - DNA, 123 bp, Homo sapiens
tacagttgtcctgatttcttattgaatttgttagactagttctcttgtcctgtgatctgtgtacaattttagtcactaagactttcctccaagaactaagccaacttgatgtgaaaagcacag

SEQ ID NO: 5832 - DNA, 285 bp, Homo sapiens; identical to SEQ ID NO: 321

SEQ ID NO: 5833 - DNA, 160 bp, Homo sapiens
catttttaggctcgaacttaacactgttaagaaataactgaaatatgatggtatttacattaatttttgaaattcaatggtgggatagaattaggtcaggaaatggaagttgttccaatggtgtgagaactaggagacaagatgattcactttattattt

SEQ ID NO: 5834 - DNA, 523 bp, Homo sapiens
ctgtgcttttcacatcaagttggcttagttcttggaggaaagtcttagtgactaaaattgtacacagatcacaagacaagagaactagtctaacaaattcaataagaaatcaggacaactgtagactatataaaaactgtcttagaaaattatttacaactttatcatagtgtaaatactctaaatgtaaaataaatctatggattttatacaaaaatactctaaagtacaaatgtaagttaaatgctgaataaaacattttcaccttttccagtggatgctattactaagactataatctaggtgtcaaaacttaaagtgataaccacaaagcaatgttttcttaatcactcataattttacatttgttagtagtcatcacaaggtttagagttccactgaaaaagtctcatttttacaaatgcaactcataccactttccttcatggaccctttctctgtttaacacatgttaaaaaagtaaaacaaaaattcttagtcaaaagttgacatgctatgtgaa

SEQ ID NO: 5835 - DNA, 315 bp, Homo sapiens
aaattgaatttcatcactattctgtgtattctatttatcactattctaaatgactcatggttggctaattgattatcatgtaagcaagctatttgaagaaattgattacatatatttatatatagggggtaactaattaatgattacttgattaaattgctatgtgaactgacaactatttataaatcaatgcaatagactgttgtttgaccaaattattttactgaactgacaagtgggtttttgatttgtcagttgcttggctgaactgatcaagtcgatagttgcttgacaaactcaccaactttagaatgg

SEQ ID NO: 5836 - DNA, 527 bp, Homo sapiens
cctccatgtgggtggctatcctttatcaagatcccccccagggggaggaggattattagtcacattatcaaactcccctccaacccctttctctgcttagaggtatgtgtaatgtgtagtagaaagaccgaatccccacccaaaagtccttactgctactcatgtttttaaccttctgttctttaccctactccctaataatgaccgccatcatttatctactgcttaatggatactaggcactgtgctaagggttttatgttttacttcaatcttttcatcggctttattttgatagtttgttttatagaggaggaaacagacttaggtaagttacaagatgacaaggttactaccttgttcagttagtagtcagcagctagtatatccaaagatagtacgggtcagaactaggattataaactcagggctacctgaaactcacaacttcaggcatctttgatttcttcttttcacccacagccaaattctttcaacctaaaattgtatccattctgttttcaccg

SEQ ID NO: 5837 - DNA, 491 bp, Homo sapiens
cggatcagtacaactcccggtggctgaacgacccgtcgttcatccatgctgagctcattcctgacagtgcggagcgcaatgatgataagctttacttcttcttccgtgagcggtcggcagaggcgccgcagagccccgcggtgtacgcccgcatcgggcgcatttgcctgaacgatgacggtggtcactgttgcctggtcaacaagtggagcacattcctgaaggcgcggctcgtctgctctgtcccgggcgaggatggcattgagactcactttgatgagctccaggacgtgtttgtccagcagacccaggacgtgaggaaccctgtcatttacgctgtctttacctcctctggctccgtgttccgaggctctgccgtgtgtgtctactccatggctgatattcgcatggtcttcaacgggccctttgcccacaaagagggggccccaactaccagtggatgcccttctcagggaagatgccctacccac

SEQ ID NO: 5838 - DNA, 452 bp, Homo sapiens
  unsure (311): n=A,T,C or G
  unsure (313): n=A,T,C or G
  unsure (393): n=A,T,C or G
cctggccggcttgatgggactcctggagaaagggcttgggggtcccgagcttctcgatcctcttggaggaatgggggtagtctttcctttgatgctgctgtggccctagcccgggaccgccaaaggactgaggctcaaggagttcggcgaacccagacctgtactgagggtggggattactgcctcatccccagaacctccccttgtagcatgatctctgcccattctcctcggccccttagctgcctggagctcccatctgaaggtgcagaagggtctggatcccggagtcgtcttagtctgccccccananaaccccaggttcctgaccccctgttgtcctctcagcgcaggtcatatgcatttgaaacacaggctaaccctgggaaaggngaaggactgtgattaggaccacagccctgggcaaaagggggacccagcaaagttgtctt

SEQ ID NO: 5839 - DNA, 574 bp, Homo sapiens
ctgggaccataatttgtacagaaacactggatgtgattaatagggagtaggcgagattatagcaaaccagcagaaatggaactctgctaaatgtgcatccgtgaatgctcccttgaatgtggctgtgcaggattcagggtttgcagaaattctcaggacctcagacctctgtcctatgactaatgttactggcagagcaaataatctaaaggttttggttttgtggattaccatctccgtgctgtgcatctgaaggccagtgctgtgctggcaggaaaatagggactgagaaaaagcagatcctatactatagggactgtagtatctatgacgtagccagccattctttgctcccaaggcaagaagaaagagatgacggagtcaatatagggttgccaaatcggattttctaaaatgagtaggaagttggatttttatgtgcaacagtttcttttaatgctttgttgatatgtgattgtcatgcaataattattcatatttggtaagttttgtacatatattatgtacactcagggaaccaataccataatcatgataatgaacgtatccatcc

SEQ ID NO: 5840 - DNA, 577 bp, Homo sapiens
ttggtattgatcttggcaccacctactcttgtgtgggtgttttccagcacggaaaagtcgagataattgccaatgatcagggaaaccgaaccactccaagctatgtcgcctttacggacactgaacggttgatcggtgatgccgcaaagaatcaagttgcaatgaaccccaccaacgcagtttttgatgccaaacgtctgattggacgcagatttgatgatgctgttgtccagtctgatatgaaacattggccctttatggtggtgaatgatgctggcaggcccaaggtccaagtagaatacaagggagagaccaaaagcttctatccagaggaggtgtcttctatggttctgacaaagatgaaggaaattgcagaagcctaccttgggaagactgttaccaatgctgtggtcacagtgccagcttactttaatgactctcagcgtcaggctaccaaagatgctggaactattgctggtctcaatgtacttagaattattaatgagccaactgctgctgctattgcttacggcttagacaaaaaggttggagcagaaagaaacgtgctcatctttga

SEQ ID NO: 5841 - DNA, 560 bp, Homo sapiens
  unsure (556): n=A,T,C or G
taaactgtggcgggatagttttcgggtccttgtccagtgaaacaccctcggccgggaagtcagttcgttctctcctctcctctcttcttgtttgaacatggtgcggactaaagcagacagtgttccaggcacttacagaaaagtggtggctgctcgagcccccagaaaggtgcttggttcttccacctctgccactaattcgacatcagtttcatcgaggaaagctgaaaataaatatgcaggagggaaccccgtttgcgtgcgcccaactcccaagtggcaaaaaggaattggagaattctttaggttgtcccctaaagattctgaaaaagagaatcagattcctgaagaggcaggaagcagtggcttaggaaaagcaaagagaaaagcatgtcctttgcaacctgatcacacaaatgatgaaaaagaatagaactttctcattcatctttgaataacgtctccttgtttaccctggtattctagaatgtaaatttacataaatgtggttgttccaattagctttgttgaacaggcatttaattaaaaaatttangttt

SEQ ID NO: 5842 - DNA, 443 bp, Homo sapiens
ccatcaccatgtcacccacaccagcagcgggaagtctgttcagccgtcccttgatccccttcacggagatgatatacaggtttttggctcctgtgttgtcagcacaattgattacagctcctaccggaagacccaaggaaatccggaatttcgcaccagaggacccaccacgtcctgtggatataaagggaagggaaacaggataaagagatcacaatctagacatggttcggagttccccctcatactcaagctgtaattcaccgcacatgctttgatagactgtacgctatagattagctcgctcggattttacttatgccgtccccgtgtgccacccgattctcacggaaagtagcctatttcttactattaacactctgacatcgaaattaagaaacctagacgactcaacccttgctctaactttcgcaaaacgcaat

SEQ ID NO: 5843 - DNA, 197 bp, Homo sapiens
  unsure (15): n=A,T,C or G
ctgctggggattctngtccatctcctgcttccagagccagctcacattgccggaggcgctgttcatgtagcagtgcattttcaccgtgaagccccgtttcctggctatgaaacgtgggctctgccagatccgcgaacaagcactacctttgggattccggtaccggtcctccgatctggctgctggtactggctcag

SEQ ID NO: 5844 - DNA, 605 bp, Homo sapiens
  unsure (556): n=A,T,C or G
  unsure (571): n=A,T,C or G
ctgttgactcagattcggcattttaattacattgtttccaagtatgatattctgagagtgtctatagcacttagtgtctgcttcatataaactaccagttattatatatttatgatgcaagtagttttccaaatgtggtgaaagtctgagtctttttatccccatgggtaaaatctgaatctggctctctgtgtctctcagtgcttgtttattgctggtcagagagtaaattcttgataaaagctgttgacttggctctcacagtttatgcagacattggagagacaatttggttatttcaaacatcacaggatttgagtaagaagacctggttatgaaacaaggctctcataattactagttatgactgttgacaagttaccttttcttgtttacaagttatttggcctctttgaattacttgtaaaatagagatagggattctttcttgatcatggaacatcaaatgaagttatttgatgaaatactttgtcatctggaaattataaatataactaaatgttaattattatttgaaatttgggcacctcatggnggcattttctatggncatttttttcttttctcgcataatggctaaaagt

SEQ ID NO: 5845 - DNA, 99 bp, Homo sapiens
ttggagatctaggcagtgggttaagccagacccctaaagtgaccctttcctcttctgccctattcttctcagaccctcagaaagacatccaattttttt

SEQ ID NO: 5846 - DNA, 621 bp, Homo sapiens
  unsure (1): n=A,T,C or G
  unsure (5): n=A,T,C or G
  unsure (17): n=A,T,C or G
  unsure (36): n=A,T,C or G
  unsure (550): n=A,T,C or G
nctgntggttaacaagnggatcgtcatgttcagtantttatacattatgtgagaagtaacgttctgattctttttcttacacagaattggcagagggggtcgatttgggaggaaaggtgtggctataaactttgttactgaagaagacaagaggattcttcgtgacattgagactttctacaatactacagtggaggagatgcccatgaatgtggctgaccttatttaattcctgggatgagagttttggatgcagtgctcgctgttgctgaataggcgatcacaacgtgcattgtgcttctttctttgggaatatttgaatcttgtctcaatgctcataacggatcagaaatacagattttgatagcaaagcgacgttagtcgtgagctcttgtgaggaaagtcattggctttatcctctttagagttagactgttggggtgggtataaaagatggggtctgtaaaatctttctttcttagaaatttatttcctagttctgtagaaatggttggattagatgttctctatcatttaataatatacttgnggactaaaagatacaagtgctgtataaaatcagccaattatgttaaactagccatatctgcctttattggg

SEQ ID NO: 5847 - DNA, 591 bp, Homo sapiens
  unsure (576): n=A,T,C or G
ctgcatctgtctgaatggtgcgtgaaggctctcagaccttacacaccattttgtaagttatgttttacatgccccgtttttgagactgatctcgatgcaggtggatctccttgagatcctgatagcctgttacaggaatgaagtaaaggtcagtttttttttgtattgattttcacagctttgaggaacatgcataagaaatgtagctgaagtagaggggacgtgagagaagggccaggccggcaggccaaccctcctccaatggaaattcccgtgttgcttcaaactgagacagatgggacttaacaggcaatggggtccacttccccctcttcagcatcccccgtaccccactttctgctgaaagaactgccagcaggtaggaccccagaggcccccaaatgaaagcttgaatttcccctactggctctgcgttttgctgagatctgtaggaaaggatgctccacaaactgaggtagataatgctatgctgtcgttggtatacatcatgaatttttatgtaaattgctctgcaaagcaaaattgatatgtttggataaatttatgtttttaggnaaaataaaaactttt

SEQ ID NO: 5848 - DNA, 643 bp, Homo sapiens
  unsure (621): n=A,T,C or G
agtgagcgctggtggcggagttaaagtcaaagcaggagagtaattatgaatagcgcagcgggattctcacacctagaccgtcgcgagcgggttctcaagttaggggagagtttcgagaagcagccgcgctgcgccttccacactgtgcgctatgacttcaaacctgcttctattgacacttcttctgaaggataccttgaggttggtgaaggtgaacaggtgaccataactctgccaaatatagaaggttcaactccaccagtaactgttttcaaaggttcaaaaaaaccttacttaaaagaatgcattttgattattaaccatgatactggagaatgtcggctagaaaaactcagcagcaacatcactgtaaaaaaaacaagagttgaaggaagcagtaaaattcagtatcgtaaagaacaacagcaacaacaaatgtggaattcagccaggactcccaatcttgtaaaacattctccatctgaagataagatgtccccagcatctccaatagatgatatcgaaagagaactgaaggcagaagctagtctaatggaccagatgagtaagttgtgatagttcatcagattccaaaagttcatcatcttcaagtaggtgganggatagttcttagtggacttca

SEQ ID NO: 5849 - DNA, 313 bp, Homo sapiens
ctgccctacttttcaattcagatatactagtaccttacctagaaataatgttaacctagggtgaagtcactataatctgtagtctattatttgggcatttgctacatgatgagtgctgccagattgtggcaggtaaagagacaatgtaatttgcactccctatgatatttctacatttttagcgaccactagtggaagacattccccaaaattagaaaaaaaggagatagaagatttctgtctatgtaaagttctcaaaatttgttctaaattaataaaactatctttgtgttcttttctgcaacagacgaaa

SEQ ID NO: 5850 - DNA, 354 bp, Homo sapiens
acaatatttaaaatttattgcttgatacttttgacaacaaattaggttttgtacaattgaacttaaataaatgtcattaaaataaataaatgcaatatgtattaatattcattgtataaaaatagaagaatacaaacatatttgttaaatatttacatatgaaatttaatatagctatttttatggaatttttcattgatatgaaaaatatgatattgcatatgcatagttcccatgttaaatcccattcataactttcattaaagcatttactttgaatttctccaatgcttagaatgtttttaccaggaatggatgtcgctaatcataataaaattcaaccattatttataa

SEQ ID NO: 5851 - DNA, 414 bp, Homo sapiens
ccatccattttgagcacctctgccaggctgcagacctggaggcgaagggagtgtggaagaggagggtgtaagggtcgacgcgtgctgaatgggaggtgcaggtcctcggtgcgttggcagaagaggcttctggagtttcgaggccatacctcctttcaagagctttggatttggggcgacttccctgggtctaggggagtgttcctgtcccctgtcaggtcagccctgcggagccactccacccctcttccccttcccctggatttcctgacatagatggtgtgttcatgtgcaggtgtgagtgtgctgtccttctgatctctgttgatcccgctttcctactgagagggtggtggagagggtgtggtctcttctcacctcagtttttctgacacagcgaatcgagggctttgg

SEQ ID NO: 5852 - DNA, 513 bp, Homo sapiens
aaaccataagaaaaacacaacagttttgggctgctgataaattaattcctctctgttgtaaacctaaaactaaacaaaaacaaaaatacccagagcagatggggagagggtgggaggcggaacacacactcatacacacacacacactcacgcacacacacaagcagtacacgttaagctctgcattcccactataggggttggtcctccagccacggagccagatcctactgaaggcaggggggaggcgggaagggatgtgtgtctgtgtgtgggatcttcataaagtctttggtgctaataaaggctgactgaagcagcaagtcctgaagccccagatccagaaagcaactcagggcgaagagagtagtatttttgctcatcctcataggagggggcttgcctcaccccagagctagggtcaaactgacccaggacccagggagtatttaatttgatttcagtacttgcttcattcccataaatcatgagaacatgatgcttttcaaattt

SEQ ID NO: 5853 - DNA, 581 bp, Homo sapiens
  unsure (13): n=A,T,C or G
gtggcctcttggngggagaggtggggcagggggaaggcagctcccactagaccagggcagtatttaggggaaggaggcagattggagcagttggctgccaacacctggcctcactcagggagaggggccttgggcctggaagatatctgggtgaggtacccacaccatctgccgcaacctctgtgtatccattatgggctcacgccattcacaggcatgaattgagcacctagtatgtgggaaaacaggggaaacagagatggcacagacatggtctccatccttcgggggctccagtctagttggggagatcagagaagttccatttgccactctaggccaagctaggtaagcggcagagccatgaagcattgtgggagcttggaggggggagtgagcccttgcagtcagggagaaggagtcagcctggggagacttccagaaagtagccctttgaccctgaggaggtggggatcagtcgtgatgaaagtaatagccattcagtagccccttgtaattcaccctgagccaatgcctggaggcaggagaaagtactcaaggctctggtgcctggaccacaa

SEQ ID NO: 5854 - DNA, 267 bp, Homo sapiens
taatcgtcccattccccagtggattcggatgaaaactggaaataaaatcaggtacaactccaaaaggagacattggagaagaaccaagctgggtctataaggaattgcacatgagatggcacacatatttatgctgtctgaaggtcacgatcatgttaccatatcaagctgaaaatgtcaccactatctggagatttcgacgtgttttcctctctgaatctgttgtgaacacgttggttggctggattcagtaataaatatgtaagg

SEQ ID NO: 5855 - DNA, 615 bp, Homo sapiens
  unsure (26): n=A,T,C or G
  unsure (44): n=A,T,C or G
  unsure (53): n=A,T,C or G
  unsure (119): n=A,T,C or G
  unsure (165): n=A,T,C or G
  unsure (170): n=A,T,C or G
  unsure (215): n=A,T,C or G
  unsure (559): n=A,T,C or G
  unsure (566): n=A,T,C or G
  unsure (609): n=A,T,C or G
acatctctgcttctcatgctgctggncagcagcctctctccagnccaaggtgntctggaggtctattacacaagcttgaggtgtagatgtgtccaagagagctcagtctttatccctanacgcttcattgatcgaattcaaatcttgccccgtgggaatggttgnccaanaaaagaaatcatagtctggaagaagaacaagtcaattgtgtgtgnggaccctcaagctgaatggatacaaagaatgatggaagtattgagaaaaagaagttcttcaactctaccagttccagtgtttaagagaaagattccctgatgctgatatttccactaagaacacctgcattcttcccttatccctgctctggattttagttttgtgcttagttaaatcttttccaggaaaaagaacttccccatacaaataagcatgagactatgtaaaaataaccttgcagaagctgatggggcaaactcaagcttcttcactcacagcaccctatatacacttggaggttgcattcttattcatcagggaggaaagtttctttgaaaatagntattcanttataaggaatacaggattattttgattatatcttggtggttnaaggtt

SEQ ID NO: 5856 - DNA, 396 bp, Homo sapiens
ctgggattcctctgccagcagccctgccgatccctgggcccccggcagctccagcaagtggaactcgagcaataccagtatctttgggaggaggtccctctactgtcattgagaccagattctcccctcgcagcagcaccagaccgaggactcgcttctcttccctttctgcttgtttggagttctttggcttgatctttctgaactcatcacagtcacagaggatcaaattcatgtgcttgtcaaaagccttgaaggtgccaatgaagatccggccgtcctgcaggatgcacctcatcctgtaatcaatatgctgcagcatcttgctgctcttgcccaccgtcatggtggcggttctgatggctctgatacccgccggattcgcctcctcagagg

SEQ ID NO: 5857 - DNA, 361 bp, Homo sapiens
ctgtctgcattgaaaattcatgcatggagaaagggagtaagcaagggagaaacggtgcgattcacatattccgcgagatcatcaagccagcagagaaatccctccatgaaaagttaaaacaagataagcgctttagcaccttcctcagcctacttgaagctgcggacttgaaagagctcctgacacaacctggagactggacattatttgtgccaaccaatgatgcttttaagggaatgactagtgaagaaaaagaaattctgatacgggacaaaaatgctcttcaaaacatcattctttatcacctgacaccaggagttttcattggaaaaggatttgaacctggtgttactaacatttt

SEQ ID NO: 5858 - DNA, 321 bp, Homo sapiens
ctggcttccgagaggcaattctgtccttggaagccaggtttgaccatctgtaatcagccttgtgagaagtctcgtttgagggggccagggatggaacgggagggcgcatatcgtatgaggtatgggcattgtgttaagctgggggaagttgcagcttgtcctgaattacatggagaggaataaagtgggtgagtaggaggagccatttcatctgaaagcctgaggtccctctggtcccctcgataaaccccactggtgtcccaggccacaggtaacaggagaatagacatttaatgtcacagaatgtcagagcaggcaagg

SEQ ID NO: 5859 - DNA, 298 bp, Homo sapiens
  unsure (46): n=A,T,C or G
ctgtggtggcgccttctggagaagagcagagatacacgtgccatgngcagcacgaggggctgccagagcccctcaccctgagatgggagccatcttcccagcccaccatccccatcgtgggcatcgttgctggcctggctgtcctggctgtcctagctgtcctaggagctgtgatggctgttgtgatgtgtaggaggaagagctcaggtggaaaaggagggagctgctctcaggctgcgtccagcaacagtgcccagggctctgatgagtctctcatcgcttgtaaagcctgagacag

SEQ ID NO: 5860 - DNA, 317 bp, Homo sapiens
cctcaatgtcgtgctagaggggccgaagaaggccgtgaacgacgtgaatggcctgaagcaatgtttggcagaattcaagcgggatctggaatgggttgaaaggctcgatgtgacactgggtccggtaccggagatcggtggatctgaggcgccagcacctcagaacaaggaccagaaagctgttgatccagaagacgacttccagcgagagatgagtttctatcgccaagcccaggccgcagtgcttgcagtcttaccccgcctccatcagctcaaagtccctacgaagcgacccactgattattttgcggaaatgg

SEQ ID NO: 5861 - DNA, 551 bp, Homo sapiens
  unsure (353): n=A,T,C or G
  unsure (385): n=A,T,C or G
  unsure (460): n=A,T,C or G
  unsure (535): n=A,T,C or G
ctcagagctcaagtctgaactctacctccagacagaatgaagttcatctcgacatctctgcttctcatgctgctggtcagcagcctctctccagtccaaggtgttctggaggtctattacacaagcttgaggtgtagatgtgtccaagagagctcagtctttatccctagacgcttcattgatcgaattcaaatcttgccccgtgggaatggttgtccaagaaaagaaatcatagtctggaagaagaacaagtcaattgtgtgtgtggaccctcaagctgaatggatacaaagaatgatggaagtattgagaaaaagaagttcttcaactctaccagttccagtgtttaaganaaagattccccgatgctgatatttccactaanaacacctgcattcttcccttatccctgctctggattttagttttgggcttaattaaaatcttttccaggaaaaanaacttccccatacaaataagcatgagactatgtaaaaataccttgcagaagctgatgggggcaaactcaagcttnttcactccaggaccct

SEQ ID NO: 5862 - DNA, 349 bp, Homo sapiens
aaagaatttctttataaaatttactgtctaagattaatagcattcgaagatccccagacttcatagaatactcagggaaagcatttaatcttagacagtaaattttataaagaaattctttaaaagtaggacttaattctcctccgtagtgagtttttaagcagaggatatctactacatggattcctttgcctcttgacaggctcaagttccatctgcctcccaggcagctttttgagtctttcatagaagcctgcttttaatatatgccataattttcttcttaattcaagccacatgttcaaatttaaggcttaaattctcattccattgttttctaagaaatttt

SEQ ID NO: 5863 - DNA, 504 bp, Homo sapiens
cctgaaaataattttcagataaagagactccaaggttggctttagtttgtgagttactcatgtgactatttgaggattttgaaaacatcagatttgctgtggtatgggagaaaaggttatgtacttattattttagctctttctgtaatatttacattttttaccatatgtacatttgtacttttattttacacataagggaaaaaataagaccactttgagcagttgcctggaaggctgggcatttccatcatatagacctctgcccttcagagtagcctcaccattagtggcagcatcatgtaactgagtggactgtgcttgtcaacggatgtgtagcttttcagaaacttaattggggatgaatagaaaacctgtaagctttgatgttctggttacttctagtaaattcctgtcaaaatcaattcagaaattctaacttggagaatttaacattttactcttgtaaatcatagaagatgtatcataacagttcagaatttt

SEQ ID NO: 5864 - DNA, 462 bp, Homo sapiens
  unsure (369): n=A,T,C or G
aaacaaattgcagagaatagagaaaaaaataggttatttacagaaaacaatatctacatatgtacttagaggtacaaatttggtgacagaaaagacttcagtatatgctggcatcttagaagcagttctcaaagagcttagttttattttcttgaattttaagaatgcctaagatccttcttcatcctcgatcttgggagccaagtagtattttaagtgtcccatatccgcaattttatactctacaacaaggggtacatctgcagacatactgagtgtcaccgttgaagagagtggagtggcttttgtaaagaagttcaggtacctcagtgcaaaagttagttgaactggttcattcatctctatggnaacagcttcctcctctttatcgacattacttgtcttgtgacaatttaatgtttccatttccaagttctccacttgcagaaaatttcactccgt

SEQ ID NO: 5865 - DNA, 342 bp, Homo sapiens
cttaattgcctctcctcccagtttgccagtcccgccccccgccccccgggaaaacagccaggccactgttgctgtcacattctggagcctgggccagggccatttcccatcgatgtgagctcttctcatctcacagcattccctgcgctgcttccacccccttctccccttccagatacccagcatcgcagcagggatttcacaatcccatactgtgtcgcctcccatccaagcgccagggagggtggggggtaggagctaagacttcctctggacagatgggcagggcagagttcactgaggtgaaggaagaccacaggttaacaccaaagtattgtacag

SEQ ID NO: 5866 - DNA, 395 bp, Homo sapiens
  unsure (143): n=A,T,C or G
  unsure (338): n=A,T,C or G
  unsure (381): n=A,T,C or G
ccatgtgaccctctccccaggcaagctctgaagtccctgcaggtggaggccatgcctgtcttaaactcagttgcatccctggtgcccaaagcaacaccagaaccaagaaggagctccataaatccttcttgggtgaagcctanacaaagccgccaggtcttgtggctccaggcaccagagccttgagtactttctcctgcctccaggcattggctcagggtgaattacaaggggctactgaatggctattactttcatcacgactgatccccacctcctcagggtcaaagggctactttctggaagtctccccaggctgactccttctccctgactgnaagggctcactccctcctccaagctcccacaatgcttcatggntctgcgcttaccta

SEQ ID NO: 5867 - DNA, 494 bp, Homo sapiens
  unsure (390): n=A,T,C or G
  unsure (433): n=A,T,C or G
  unsure (443): n=A,T,C or G
  unsure (462): n=A,T,C or G
aaacgcttcatgacagggtaattcatgtccaacatatcaaaaacatatttatagataactttagaaagaaaatacatactttttttgataatcacaagtagcaatgagattttctatattattttcagtctcactttagaaatgttttaattgtctaaatttaatcaattcatcgattaaaggaaagacaataaaatagtaaaattacatgtgtttatatataagtgtgtgtgtttcaaataacaaaacacaggttgtaaactaaaatcactggaaggcaaattgaagacaaaagtgatgctggtttaagttgtttggttcttcacataaattccagtttccaagttgtggtttacaactctagtaatatccagatagataattcaaccngcacttttttcttctattcctggttttctcttggtcacactgnaattttttgnctttttaccggaactggantaaataaaataaggacttcccagtcttaatac

SEQ ID NO: 5868 - DNA, 366 bp, Homo sapiens
ctggaagagggaacttccgagcccccaggggcggggtaaggcaaaaagggaacagcagtgttgaaagtgggaggccaggactgatggggaggagggttcccaaactccagagcagcctgaccagggctgggggtcttgggcaaatatctgaggctgcccatcctcacccaggacacccccactgagccctgaggatgaggggtgcccgtgggcagaagaagctctggacagcagcttcttggggtctggagaagaactggatttgttgagcgagattctggacagtcttagcgtgggagccaagagcgcaggcagcctgagaccgagccagagtttagactgctggcacagaggagacctggacag

SEQ ID NO: 5869 - DNA, 462 bp, Homo sapiens
ggcctacacgccgccgcttgtgctgcagccatgtctctagtgatccctgaaaagttccagcatattttgcgagtactcaacaccaacatcgatgggcggcggaaaatagcctttgccatcactgccattaagggtgtgggccgaagatatgctcatgtggtgttgaggaaagcagacattgacctcaccaagagggcgggagaactcactgaggatgaggtggaacgtgtgatcaccattatgcagaatccacgccagtacaagatcccagactggttcttgaacagacagaaggatgtaaaggatggaaaatacagccaggtcctagccaatggtctggacaacaagctccgtgaagacctggagcgactgaagaagattcgggcccatagagggctgcgtcacttctggggccttcgtgtccgaggccagcacaccaagaccactggcccgccgtggccg

SEQ ID NO: 5870 - DNA, 518 bp, Homo sapiens
ctggacgctggcctcctccagtccatcccaaagtctccacccgccgggagctgtcacagcccctggctccgctgcctgcccacgccgggctcagagcctggagtttctcgtctctctgccaaggcaccagggctcagcagtattcagaataatcttcctccacgtagttggcagggaaccagccaacccggccatagatctcccctcgccaccagccttgctgtcccttcttgttaaggatcttgatgatgtcaccctccttgagcgacagctctgatcggtctcgggcgcagaagtcatagcgggctttggctgtaccaaaatactttatgcttcccactgctggcctgctgatggttctcttttcaggctccttgaaggggaactgcaaggtggtgtccagagacttgaagcaatcctttagagagttctgctggtaaaactccaccagctccgtaagcccccggaaagcctttttctctgtgatccggtgcagtccttctgctgtcatgatttta

SEQ ID NO: 5871 - DNA, 494 bp, Homo sapiens
ccttttgggttaagccttacattcatgaagaacctcaagggtagatttttgagagcattccaaatgaatggtctctggtcaaatgaatgaatggtcaaatgaataaatctgccctcacagagatacaaaaggaaaaggaatataattcataccatttggtttaagccttacattcatgaagtacctcaagggtagatttttgagatcattccaaatgaagtcgaatctgccctcacagagacacaagaaaggaatataattcatacactattgcatttttaataaatcttttgaaatttgcagaattagattgtattgtgtattttcggttaaatgataattgaatgtaaatatttagatgcagcaccatattttataacccagctttagcatttcttcatattttaaggaaaccccccacctccttcttttaagggcgcttcttgctctctgaaatgccctgctaaatgcttctcttaattatttgaataagg

SEQ ID NO: 5872 - DNA, 418 bp, Homo sapiens
  unsure (416): n=A,T,C or G
ctgccttgtgtgggactgagaggcaagagttgttcctgcccttccctttgtgacttgaagaaccctgactttgtttctgcaaaggcacctgcatgtgtctgtgttcatgtaggcataatgtgaggaggtggggagaccaccccacccccatgtccaccatgaccctcttcccacgctgacctgtgctccctccccaatcatctttcctgttgcagagaggtggggctgaggtgtctccatctctgtctcaacttcatggtgcactgagctgtaacttcttccttccctattaaaattagaacctgagtataaatttactttctcaaattcttgccatgagaggttgatgagttaattaaaggagaagattcctaaaatttgagagacaaaataaatggaacacatgagaaccttcnaa

SEQ ID NO: 5873 - DNA, 225 bp, Homo sapiens
ctgagccgctgagcgggcggctacttctggctctgttgagttttggaagacctttgagaaatcaacagcatcaccgggcaggtcctgagtccatggcctgatatgttaggatcacctgtgggctgctaaaagcccacagtcctagccccatctgcagagttagttggcttctgaaggctgggagaagccctagaacctgcatttctaaagctgctcaaatccagg

SEQ ID NO: 5874 - DNA, 340 bp, Homo sapiens
  unsure (292): n=A,T,C or G
  unsure (327): n=A,T,C or G
ctggggggtccgggaaaggggttgggccatgagccaggcagctccgaagcagtcactgaggccagggagcctgcacccaggtcatggggcgacctggctctcactcctggcctgggtgctcacctacagaccacttcacttcccctgtccgcagcgtcactatgtcctcataggtggctgtctggtcaatgtccaggccctcgtaggcgtgatcttcctccatgccagccttgctgtcatccttgtccagcagcaggaagataggcacgatgatgaagaggatgatcagcancgtctggatcatgatgataccatccttcagcgtgntcctctgcttcag

SEQ ID NO: 5875 - DNA, 592 bp, Homo sapiens
  unsure (523): n=A,T,C or G
  unsure (556): n=A,T,C or G
  unsure (571): n=A,T,C or G
ctgttgactcagattcggcattttaattacattgtttccaagtatgatattctgagagtgtctatagcacttagtgtctgcttcatataaactaccagttattatatatttatgatgcaagtagttttccaaatgtggtgaaagtctgagtctttttatccccatgggtaaaatctgaatctggctctctgtgtctctcagtgcttgtttattgctggtcagagagtaaattcttgataaaagctgttgacttggctctcacagtttatgcagacattggagagacaatttggttatttcaaacatcacaggatttgagtaagaagacctggttatgaaacaaggctctcataattactagttatgactgttgacaagttaccttttcttgtttacaagttatttggcctctttgaattacttgtaaaatagagatagggattctttcttgatcatggaacatcaaatgaagttatttgatgaaatactttgtcatctggaaattataaatataactaaatgntaattattatttgaaatttgggcacctcatggnggcattttctatggncatttttttcttttctccata

SEQ ID NO: 5876 - DNA, 392 bp, Homo sapiens; identical to SEQ ID NO: 67
  unsure (1): n=A,T,C or G
  unsure (287): n=A,T,C or G
  unsure (326): n=A,T,C or G
  unsure (327): n=A,T,C or G
  unsure (343): n=A,T,C or G
  unsure (353): n=A,T,C or G
  unsure (374): n=A,T,C or G

SEQ ID NO: 5877 - DNA, 118 bp, Homo sapiens; identical to SEQ ID NO: 311
  unsure (1): n=A,T,C or G
  unsure (112): n=A,T,C or G

SEQ ID NO: 5878 - DNA, 496 bp, Homo sapiens
  unsure (14): n=A,T,C or G
  unsure (29): n=A,T,C or G
  unsure (122): n=A,T,C or G
  unsure (308): n=A,T,C or G
  unsure (410): n=A,T,C or G
  unsure (434): n=A,T,C or G
  unsure (488): n=A,T,C or G
atgggaagcccganaattggttcctatanacccggttcctgatgaattcccaggccaaaagaaccaccctgacaaattttgggttctgaaagtcttattattggacaagtatttgcatagcntagaagaaggaaaagggatttactcatcctgtagggcagcttagttgtcttgggcaaaagctgtataatggtaccacaaaaacagttacatggtggagttccaattacacagaaaaaaatccattcagtaaatttccaaagttgcagactgtttgggcccacccagaattgcactgggactggacngcccccactgggttatactggatatgtggacacagagcttatgctaagctgcctgatcagtggacaggtagctgtgtaattggcaccattaagccatctttnttcttagtgcccataaaaacaggnaaacttctgggcttcccagtctgtgcttcctgtgaaaaatgaagcatagccatnggtgattg

SEQ ID NO: 5879 - DNA, 310 bp, Homo sapiens; identical to SEQ ID NO: 462
  unsure (67): n=A,T,C or G
  unsure (94): n=A,T,C or G
  unsure (255): n=A,T,C or G
  unsure (309): n=A,T,C or G
  unsure (310): n=A,T,C or G

SEQ ID NO: 5880 - DNA, 356 bp, Homo sapiens
  unsure (115): n=A,T,C or G
  unsure (120): n=A,T,C or G
  unsure (122): n=A,T,C or G
  unsure (216): n=A,T,C or G
  unsure (243): n=A,T,C or G
  unsure (326): n=A,T,C or G
  unsure (332): n=A,T,C or G
gtagcaggtggtcagtatgcgtccacagaggtctcggggatcctggggggtgtagctgatctggttcacgatggtgcggacatcagccagcacttcctcatttccactcctcacngcttngnagacctggcagcacatggagtagatgaggcaggcggtggctgcgctgtccaccccgccactcaagggcagcaaaaaccctgcctgttgacttcntcttaaaaaatcccagagccagcaggnaggtccaaggcttatctcctcctcagggctgtggtatttccactcgatgggctcagagatgggtgccagcaagtcctcgtggnaccganagggcaaagtccaccttcactctg

SEQ ID NO: 5881 - DNA, 368 bp, Homo sapiens
  unsure (111): n=A,T,C or G
  unsure (116): n=A,T,C or G
  unsure (122): n=A,T,C or G
  unsure (218): n=A,T,C or G
  unsure (232): n=A,T,C or G
  unsure (254): n=A,T,C or G
  unsure (312): n=A,T,C or G
  unsure (324): n=A,T,C or G
  unsure (329): n=A,T,C or G
  unsure (345): n=A,T,C or G
ttcagtagatgggactttcccggcagagccaatgaaaggccctattgctatgcaatctggtccaaaaccactcttcaggaggatgtcttcactggtgggccccacgcaaangtttnttcatngaggggaatctaagactttgggggctgtccagattatgaatgggctcttccacattgccctggggggtcttctgatgatcccagcagggatctatncacccatctgtgtnactgtgtggtaccctctctggngaggcattatgtatattatttccggatcactcctggcagcaacggagaaaaactccangaagtgtttggncaaangaaaaatgataatganttcattgagcctctttgctggca

SEQ ID NO: 5882 - DNA, 454 bp, Homo sapiens
  unsure (429): n=A,T,C or G
ccttgcctcagatccaaggtcactcggaagaggccatgtctaccctcaatgacactcatggagggaatgctgagagaagcattcagatgcatgacacaaggtaagactgccaaaaatctttgtcttgctctcctcattttgttatttgttttatttttaggagttttgagagcaaaatgacaacacccagaaattcagtaaatgggactttcccggcagagccaatgaaaggccctattgctatgcaatctggtccaaaaccactcttcaggaggatgtcttcactggtgggccccacgcaaagcttcttcatgagggaatctaagactttgggggctgtccagattatgaatgggctcttccacattgccctggggggtcttctgatgatcccagcagggatctatgcacccatctgtgtgactgtgnggtaccctctctggggaggcattat

SEQ ID NO: 5883 - DNA, 221 bp, Homo sapiens; identical to SEQ ID NO: 310
  unsure (1): n=A,T,C or G
  unsure (125): n=A,T,C or G

SEQ ID NO: 5884 - DNA, 294 bp, Homo sapiens; identical to SEQ ID NO: 3020

SEQ ID NO: 5885 - DNA, 412 bp, Homo sapiens
ctggggcttccattcacgactttctggtccctggcaggacagagcgggatgccaccagcttgtccaaagggaagttccaggagctcctggtgggcatcgttgtggagaatgacgcttgccccgggcgagatcaacgagttgaagcaggtggaaggggaggcttcgtgcagcagccgcaaaggaaagctgattttcttctatgagtggaacatcaaactgggctggaaaggcatcgttaaagaatctggagtgaagcacaagggattgattgaaatacccaatctttctgaggaaaatgaagtagatgacactgagaatttacaacgggaatgattttaccaacgaaagctatggcaacccaggaattgactgccaaaagaaaactgagtggggaataccctgcaggttcagg

SEQ ID NO: 5886 - DNA, 127 bp, Homo sapiens
  unsure (106): n=A,T,C or G
  unsure (125): n=A,T,C or G
ccttgcctgtgaagctcattgggatgaattgcactctaatgaagcaatacattgagtttgtggcagacagacttatgctggaactgggttttaccaaggttttcanagtacagaacccattttgnct

SEQ ID NO: 5887 - DNA, 464 bp, Homo sapiens
ctgcatacaaaaggaaatggcaacaattgaactggtagcccaggacaaccatgagcgggccaggcgcctgatgaaggagctcaaccagatgcagtatgagtacacggagctcaagaaacagatggcaaaccaaaaagatttggagagaagacaaatggaaatcagtgatgcaatgaggacacttaaatctgaggtgaaggatgaaatcagaaccagcttgaagaatcttaatcagtttcttccagaactaccagcagatctagaagctattttggaaagaaacgaaaacctagaaggagaattggaaagcttgaaagagaaccttccatttaccatgaatgagggaccttttgaagaaaaactgaacttttcccaagttcacataatggatgaacactggcgtggagaaagcactccgggagaaactgcgcaccgggaagaccgactcaagggccaacttccga

SEQ ID NO: 5888 - DNA, 410 bp, Homo sapiens
  unsure (125): n=A,T,C or G
  unsure (331): n=A,T,C or G
  unsure (333): n=A,T,C or G
  unsure (336): n=A,T,C or G
ctgccaccaactcaggactcaggggctcaattctcttctttggagcatattctgtagctcttcgaagcctgccaagtgtagcttccaaacttttaagtggtcttcttttggggggctttggttgntcgtacatttactgtgcttaattcaactttcatgcccttaataatgcctaacaagtctttttcgtattttccttttcactgtcttggctctctgaagtctccttggaagtctcctcagttcgaacagactgcttatctttcttgctacagatcacactgttagtgccaaaatatctttggatgttattttttgtccgggccaacancnctnaactgcggtacctgactgttccgtgccgaacagtgagtagcataatcgcagccgctgatgtctccgggcttcca

SEQ ID NO: 5889 - DNA, 262 bp, Homo sapiens
  unsure (121): n=A,T,C or G
  unsure (137): n=A,T,C or G
  unsure (145): n=A,T,C or G
  unsure (251): n=A,T,C or G
  unsure (262): n=A,T,C or G
aactggatgatggtcttcagcctctttctgtcccttctgtccctcacagcactagtatttcatgttgcacacccactcagctccgtgaacttgtgagaacacagccgattcacctgagcangacctcttgaaccctnggaccagnggtctcacatggtgctacgcctgcatgtaaacacgcctgcaaacgctgcctgccggtaaacacgcctgcaaacgctgcctgcccgtaaacacgcctgcaaacgctnctgcccacacn

SEQ ID NO: 5890 - DNA, 446 bp, Homo sapiens; identical to SEQ ID NO: 68
  unsure (1): n=A,T,C or G
  unsure (110): n=A,T,C or G
  unsure (186): n=A,T,C or G
  unsure (275): n=A,T,C or G
  unsure (342): n=A,T,C or G
  unsure (362): n=A,T,C or G
  unsure (387): n=A,T,C or G
  unsure (410): n=A,T,C or G

SEQ ID NO: 5891 - DNA, 544 bp, Homo sapiens; identical to SEQ ID NO: 633
  unsure (507): n=A,T,C or G
  unsure (534): n=A,T,C or G

SEQ ID NO: 5892 - DNA, 106 bp, Homo sapiens
  unsure (41): n=A,T,C or G
  unsure (91): n=A,T,C or G
  unsure (106): n=A,T,C or G
aaagtaagaaaatagttgctaccgatagggactttgccaantccaattatcttctaggattgaaaggtgcattttccccataaaaaaggcnaggaaaacccactgn

SEQ ID NO: 5893 - DNA, 270 bp, Homo sapiens
  unsure (188): n=A,T,C or G
  unsure (206): n=A,T,C or G
  unsure (224): n=A,T,C or G
atgcccgaatttcagtttggcacttacagcgaatctgagaggaaaaccgaggagtacgatactcaggccatgaagtacttgtcatacctgctgtaccctctctgtgtcgggggtctgtctattcactcctgaatatcaaatataagagctggtactcctggttaatcaacagcttcgtcaacggggtntatgcctttggtttcctnttcatgctgccccagctntttgtgaactacaagttgaagtcagtggcacatctgccctggaagg

SEQ ID NO: 5894 - DNA, 130 bp, Homo sapiens
  unsure (108): n=A,T,C or G
  unsure (111): n=A,T,C or G
  unsure (127): n=A,T,C or G
ctggagagagatcaatatgctgaacaaataaaaggagagagggcccagtggcagcagaggatgaggaaaatgtcgcaggagggccctttccccctgtgctttgggcangtnctgccattgaaaggangga

SEQ ID NO: 5895 - DNA, 329 bp, Homo sapiens
  unsure (59): n=A,T,C or G
  unsure (247): n=A,T,C or G
  unsure (263): n=A,T,C or G
  unsure (281): n=A,T,C or G
cctacgtaggccaggaggcaccaagtgagtatgtgtatgtcggctgattaaaaatgaanacagcggctgagcacagtggctcacagcagcactttgggaggccgagctgggtgggtcacctgaaggtcaggagtttgagaccagcctgggcagcactggtggtgcctcagccatggcctggaccgttctcctcctcggcctcctctctcactgcacagattctgtgacttcctatgtgttgactcanacaccctcagtgtcantggcccccaggaaagacngccaagattacctgtgggggaaacaatattgggagtaacaatgtacac

SEQ ID NO: 5896 - DNA, 240 bp, Homo sapiens
  unsure (240): n=A,T,C or G
ccagcctacaatggggatgttgtgtttctgttcaccttcgtttactatgcctgtgtcttctccaccacgctggggtctgggaggaatggacagacagaggatgagctctacccagggcctgcaggacctgcctgtaacccactctgctcgccttagcactaccactcctgccaaggaggattccatttggcagagcttcttccaggtgcccagctatacctgtgcctcggcttttctcan

SEQ ID NO: 5897 - DNA, 278 bp, Homo sapiens
  unsure (121): n=A,T,C or G
  unsure (188): n=A,T,C or G
aaatatgctgcatagactactggaccatattttgtagccattaaattttcaaaagactgggcccactgtaatacttcctccaaagtaaggtttgaagggggcctcttagattcatctctgnacattttacaactccaacaattccgcctgctcatttttctctaaaatgagaagagaaaaggcagcgntagaatatcatcaagcttcaaataaacaatgatcatttttttctcatgttggtggtataatatgtggaaacattccattgacaaatatat

SEQ ID NO: 5898 - DNA, 307 bp, Homo sapiens
  unsure (117): n=A,T,C or G
  unsure (118): n=A,T,C or G
  unsure (181): n=A,T,C or G
  unsure (194): n=A,T,C or G
  unsure (232): n=A,T,C or G
  unsure (240): n=A,T,C or G
tgggaaattttaatattaagtatgtccatgattgaaagaatcattccaggaagtgtttggtcaaaggaaaaatgataatgaattcattgaccaaacacttcctggagtttttctccnntgctgccaggagtgatccggaaataatatacataatgcctccccagagagggtaccacacagncacacagatgggngcatagatccctgctgggatcatcagaagaccccccanggcaatgnggaagagcccattcataatctggacagcccccaaaggcttagattccctcatgaagaactttgcgtg

SEQ ID NO: 5899 - DNA, 400 bp, Homo sapiens
  unsure (122): n=A,T,C or G
  unsure (385): n=A,T,C or G
ccactcggatcagctcctcgctcacctgaagccaagagaagaaggagagaagcaccaagaatcagctaacctcagaaaggtctgttttggagacacaggaggtactatttccagcagtcagnaggaagtgcacagcaccaatgcgaggaagaaaaacaatcccacttgcgcccaccagctaagggaccagggtctatgaagccccacagtggctccgacccaccatcatggcctgctggaccagggtgttgctgtgctcacacatgttcttcagaatcttgttggctgcattgtgccgggctgtcgtggtagacttagaagccactgtcagtgggtagatgagggcctgggggtggtacccgaccaatgtctgtgagaagctggngaatgaaacgtccca

SEQ ID NO: 5900 - DNA, 297 bp, Homo sapiens
  unsure (261): n=A,T,C or G
ccataggaaaaggatacagagtagagtttcatgaacctgaaacttggtggaaatttgatcctgaagaattagaaaagaggaataaacatggtgtgtctcgaaagaagattgctcagatgtttggatcgttatgaatatcaaatgtccatttctattgtaatgaattcagtggaaccatcacacaaaagcacacaaagacctcctcctccacaggggagacagaggtggggaggctctcttggctcacataatcgtgtctgngtcacaaataatcattaaattagctattttcagcta

SEQ ID NO: 5901 - DNA, 180 bp, Homo sapiens; identical to SEQ ID NO: 69
  unsure (117): n=A,T,C or G
  unsure (125): n=A,T,C or G
  unsure (160): n=A,T,C or G
  unsure (168): n=A,T,C or G

SEQ ID NO: 5902 - DNA, 113 bp, Homo sapiens
  unsure (48): n=A,T,C or G
  unsure (102): n=A,T,C or G
  unsure (108): n=A,T,C or G
ccaccctaagcccgacagtggagctccttttccagattcagagctggnatcggagcggggagacctgggatagcaagttcagcaccatcgcctccagctacnaagagngcggc

SEQ ID NO: 5903 - DNA, 113 bp, Homo sapiens
  unsure (113): n=A,T,C or G
cctgaggctggctcatcggaggcgtgagtgttcggccctgccatgcctcacatccccaggatgccgcggcgggaactgggctgtggctttcctgccctggcactgcttgttan

SEQ ID NO: 5904 - DNA, 117 bp, Homo sapiens; identical to SEQ ID NO: 71
  unsure (1): n=A,T,C or G

SEQ ID NO: 5905 - DNA, 278 bp, Homo sapiens
  unsure (104): n=A,T,C or G
  unsure (111): n=A,T,C or G
  unsure (117): n=A,T,C or G
  unsure (122): n=A,T,C or G
  unsure (126): n=A,T,C or G
  unsure (153): n=A,T,C or G
  unsure (197): n=A,T,C or G
  unsure (200): n=A,T,C or G
  unsure (242): n=A,T,C or G
  unsure (249): n=A,T,C or G
  unsure (259): n=A,T,C or G
tctgagagtagacacttgtggtatgtggagtacagataagccaggggcaggccacggcacgctccatgaaagctaggagggagtgaaatatcagtgatcatcgnaaggaangaggcncacangagnaaggcccaccctgactcttaggactancagtcagaaccaggaggaaaggttttattgctatgcgggtaggnaanaacagattttacttacatccatatagttacttaaagcccagntttctgntaaacatttntcttaatatattgagccaa

SEQ ID NO: 5906 - DNA, 113 bp, Homo sapiens; identical to SEQ ID NO: 70
  unsure (1): n=A,T,C or G
  unsure (37): n=A,T,C or G

SEQ ID NO: 5907 - DNA, 372 bp, Homo sapiens
  unsure (324): n=A,T,C or G
  unsure (347): n=A,T,C or G
  unsure (359): n=A,T,C or G
  unsure (371): n=A,T,C or G
ccaggccgcaccccttgctgtctcagcagatgggatataggaagctcctgggcttagctgtgggaagccaagtaccctcaccggcatgggacatgaggggcagctagacttcacccccttcccgcagacctgcctccagagcaaggagaattctgccttaatctgttgggctccagtctccgggttgaattccagtgtatcccactgggagtgaatggatcatgaggtgggatggccccatctggatgttctgcagatccccacatgggaggagattcccaagtagaggcagccagaattctgactccctggcagcagcagggntttcaggcaccagtgtctgtgtngttagaactcanaggaagaggcang

SEQ ID NO: 5908 - DNA, 247 bp, Homo sapiens; identical to SEQ ID NO: 72

SEQ ID NO: 5909 - DNA, 222 bp, Homo sapiens
  unsure (203): n=A,T,C or G
  unsure (213): n=A,T,C or G
aaagaccaatttgttctacctagcattttaactagtttttctgccggctatgttgaatgcacaaattctgtcacgcatgttcattcattgctacataatttggttcttctggaatatttttatgaagctctttggagtacagctatgaaaattaacaactgttaaaggaaataccttttttttttgtaattttttccttgaanaaccaaagtnttttttcaa

SEQ ID NO: 5910 - DNA, 442 bp, Homo sapiens
cctcagcatcgcctggacctgttcttgcttggggcatcccgtcggtcaccaaccatgacagcgaggcgggcctggcctgtgctccaccggagggggcttcttgcacagatgacctgctcatttcaaccccctccagaatcttctggcaggcgcagagcaacaggacgtccattttacagacgaggaaaccgagacacagggaaggttgccatctgcaacccagcccggtttttatcttgtttttctgtgttttaactttttatttagacttacagtttgaaacagtgctagaatcggaagcatgtaaagaaacctgtggaccttttatgcagatacacttaagtttttaacccatgtgccttatcactggggacctcttgcactctctctcatgatttttttcccgaactagatgaggatattgacaaagattcttgcttgg

SEQ ID NO: 5911 - DNA, 133 bp, Homo sapiens; identical to SEQ ID NO: 312
  unsure (6): n=A,T,C or G
  unsure (128): n=A,T,C or G

SEQ ID NO: 5912 - DNA, 303 bp, Homo sapiens; identical to SEQ ID NO: 631
  unsure (9): n=A,T,C or G
  unsure (13): n=A,T,C or G
  unsure (15): n=A,T,C or G
  unsure (17): n=A,T,C or G
  unsure (112): n=A,T,C or G
  unsure (117): n=A,T,C or G
  unsure (119): n=A,T,C or G
  unsure (120): n=A,T,C or G
  unsure (123): n=A,T,C or G
  unsure (145): n=A,T,C or G
  unsure (268): n=A,T,C or G

SEQ ID NO: 5913 - DNA, 165 bp, Homo sapiens
  unsure (17): n=A,T,C or G
  unsure (116): n=A,T,C or G
  unsure (147): n=A,T,C or G
aggaaaaatcagcagancacaagatccatgggtcttacagaagtctccctggagaagggaaatttgagctggcatgaagaatgggcagaatttggtgatttggaggtcaaggaagntctaaaaaaaccaaaaggaagaaagaggagngggtcactgggaagctca

SEQ ID NO: 5914 - DNA, 150 bp, Homo sapiens
ctgtgttttgggaaaggtgcaacgagctccaggacatagagaagattatggctcagattgaaaggggagaggcgagaattcaaagaagaataagcatcaagaaagcacttgacacaaagaatggaccggtacaaagcaccttttcatcag

SEQ ID NO: 5915 - DNA, 290 bp, Homo sapiens
  unsure (146): n=A,T,C or G
ccacttacctgcacacctgtcctcttgagactgactcagatcctccagaaccttcaaaatggcctgctgctccagcccctatcagctctccttcccctgtgacccttttgtggaaaggagtgcttccttcctgatttcatatttgngaatctttactcttccctgctgaggtgacagaaagaatcagaatgtctcgagtgcctgtgctgtgtcatcacccacagtggggagagacaggcaggaaaacaagctccgacatccccggtagccatgggatggcgatgcacagg

SEQ ID NO: 5916 - DNA, 438 bp, Homo sapiens
aaaactctcacatggcaacaatcatggattattacgttttatatctcctcaggaaaacatagcaccaaacattaggagtgctatggcttcctatagagaacttccatctttggtcacagcgttaagagctctgggtttcacagcctcataagccctctttgaaatgacccatacaaatgtcttttctaatgcatacatacctttttaatgaaactgatccagttgtcctgtcagccctacataacaatagtataaaagtaaattttacatttccagagatgagtgtacagtgagtgaacatgaatgagtccctagaacgagcctgagttaactctactacaaactgcttggttattagcaacccacaagggttacaatataaaggcaaagcaaatttgcatgattcaagaagatctaggagaattttcaaatcttcac

SEQ ID NO: 5917 - DNA, 373 bp, Homo sapiens; identical to SEQ ID NO: 6

SEQ ID NO: 5918 - DNA, 361 bp, Homo sapiens
atcatggccgcagccgctctggggcagatctgggcacgaaagcttctctctgtcccttggcttctgtgtggtcccagaagatatgcctcctccagtttcaaggctgcagacctgcagccttcacttgggttcatgtaggaacaccaagtccctttcaaagcaccacatcttcctctaatcaatatttcttggagtccctagggaatgtcttacatgcattcaaacaatcaccatttctggagatacactacagggtcaccataaactctgctacccttaggttccatcactatggaagctgagtttcaccagaaggcacttttgtcctccattacgaccagcaaagccagctaagccacag

SEQ ID NO: 5919 - DNA, 203 bp, Homo sapiens
ctgctccaggaactgctcctgaggaggcccctgggcctctgcctccgccgccaaccccatcttctgaggatccaggcttttcttctcctctggggatgccagatcctcatctgtatcaccagatgggcctttcttctcaaacacatgcaggatgtgagagtcctcctcggtcacctgctcatggagttgagggaattatctgg

SEQ ID NO: 5920 - DNA, 425 bp, Homo sapiens
aaaataggtgatcttgggcatgtaacaaggatctccagtccacaagttgaagagggcgatagtcgttttcttgcaaatgaagttttacaggagaattatacccatctaccaaaagcagatatttttgcgcttgccctcacagtggtatgtgctgctggtgctgaacctcttccgagaaatggagatcaatggcatgaaatcagacagggtagattacctcggataccacaagtgctttcccaagaatttacagagttgctaaaagttatgattcatccagatccagagagaagaccttcagcaatggcactggtaaagcattcagtattgctgtcccgcttctagaaagagtgcagaacaattacgaatagaattgaatgcccgaaaagttcaaaaattcctttacaaaaagaactcaagaaaca

SEQ ID NO: 5921 - DNA, 399 bp, Homo sapiens
  unsure (392): n=A,T,C or G
aaaagcatcagcagtttatctcatgcccactaaactatcctgcctcggtaccctttgttcatactttctgctctgtgtggaatgcccttctttcttcccctgttctttctcttagacccaaggggttctcagccttatttctgcctctcccatctctgatttactttcattttctgtatcgatttctcaaaaaatactttcttgattctttcatcatcccttttcccaccctacccccggttcctctttccacattataatctatgactgcctctctcacctaactgccagtattagcttttcaggacaggaactggttttacacattttggtattccagcatctagcataatgcctgacacttagctgaataaagggagtaaataaaacanatttggt

SEQ ID NO: 5922 - DNA, 334 bp, Homo sapiens
  unsure (134): n=A,T,C or G
  unsure (203): n=A,T,C or G
  unsure (204): n=A,T,C or G
ctgctgccagtggaatgctgggataaccccagtgtcgggggtcctggggcagcctgtgtactgctggatgcttgctttcaagtactctgctggggtaagactctggggcagtttccatccctttcttgggcttnagcttgctggactggccctgagaactgggaggggatggcttcatgaagtcattttgatgggggatgagnnatagttgctgtagaggaagaggatgagagagctgcttggcctctggaaggtgggaggagctgtcgcaggctgcacaggggctctgaggtcgagttcgtttagttcattgattaagcagtctaccaggtgg

SEQ ID NO: 5923 - DNA, 177 bp, Homo sapiens
cctccccaaccacgtggaactgttcagccggaacttgaggcactggacaactgtctcgatgtcagtgacgagccgggccagatggatatacagccggtcacccatgggaaagatcttctggaaagtccgtggtcaccatctgggcctggatcccgaagcgcctgtctgcagcgatgg

SEQ ID NO: 5924 - DNA, 372 bp, Homo sapiens
  unsure (364): n=A,T,C or G
cgcgggttcctcttgtgcaaaacggggtggcactccaatcgcctgcttggtgattgtggcccccacacacctgtttctacagcgcttaggttcgaacagtaaccctgtaaactaggcactgcttgtcccccgctttactggtgggaaacgggctcggagagaataaatgagctgccctaagcgactgggacagaaccacagttctcagccgggctttctgagcccacgctgccgccccagcagggatcaaatcacacagtgtgagataagcctcaagagcgggtggccttatgctgccactgagaactgattgggttcagttgcctcatcaaaatccctaagcatggttttgttttgtttttgnttttgttt

SEQ ID NO: 5925 - DNA, 424 bp, Homo sapiens
ccttttcaggagagtttagaatctcatagtaaaagactgagaaatttagtgccagaccaagacgaattgggtgtgtaggctgcatttctttcttactaatttcaaatgcttcctggtaagcctgctgggagttcgacacagtggtttgtttgttgtctccagatgccacttcagaaagatacctaaaataatctcctttcattttcaagtagaacaccttactttctggttgtgtagcattgggaataagatatttgtccaacagctccagaacatcattgcagatgtcctgcagttctgcctctatcttctcacggtactctttgcccatctgctgcttcttctcattcctctctgttttctgctcaatgctggagatgacacgccaggaagagcggcgggcgcctaccacattcttgtaggc

SEQ ID NO: 5926 - DNA, 371 bp, Homo sapiens; identical to SEQ ID NO: 74

SEQ ID NO: 5927 - DNA, 314 bp, Homo sapiens
  unsure (131): n=A,T,C or G
  unsure (139): n=A,T,C or G
  unsure (241): n=A,T,C or G
  unsure (249): n=A,T,C or G
  unsure (266): n=A,T,C or G
  unsure (306): n=A,T,C or G
  unsure (310): n=A,T,C or G
aaaaaaggaaacagaaaacagaagaaatcacttaaggagagctgtcattttctattggtgaggattcctgatcttggggaggttctggaaagttcgtctctgtttcttcttcttcctcttcttggattggnaataattncaatgcttcttcattctttggttgggaagatgtttcagttagcccaaccacttcttcttttatttcaatagtctgttcttttttttcttctgctgacagganaactatgntagatttgggtctggancacgttcttttccattcattctcaacgatgccagctattncaanttcc

SEQ ID NO: 5928 - DNA, 310 bp, Homo sapiens
  unsure (122): n=A,T,C or G
  unsure (137): n=A,T,C or G
  unsure (266): n=A,T,C or G
  unsure (310): n=A,T,C or G
gaaaaagccagagaggagagctggggtccacctcgagaatcaaggccatcagaagaacgtgaatgggacagagaaaaagaaagggacagagataatcaagatcgggaggagaatgacaaggnaccctgagagagaangggacagagagagagatgtggatcgagaggatcgcttcagaagacctaggtgtgatgctctaattaaattatttgtagaggccgggcgcagtggctcatgcctgtaatcccagcactttgggagggcanatcacctgagctcaggagttcgagaccagcctggacctccgccn

SEQ ID NO: 5929 - DNA, 352 bp, Homo sapiens
ccatggtcacctgggtggcagcactgttacctggaaactgccactgcctgctcttctgtccctttgcccctttcgtggagcttttctgccagacgccactgagacagatcacaaggtattagaaaggtcatacccaaaggtaggccatatgcatctagaacttcagcccagattttgtggatgggtggaagtgtttcttcctgtgctgaggctagctattgcagagattcttttccacttgccccacgtctctgcctctggacttactgttcagggccagggtgggaggcaggggcacgtgggaaagcactgttccggttttgttctcatgccgagtctgagcacgtgccag

SEQ ID NO: 5930 - DNA, 315 bp, Homo sapiens
aaaaaaccatcatcagagatcagtgtattctagattaagtaaatctggaaagagatgagccctttctaagagagaagaatctcatagctgctttgattgctaggggcatggtggaaaaaggagtgaacctaccatgaaagaggtaatgagaagccagtctatttattaatgaacttttcaaggctacatgtggactgtcatgacaggccagaatttggaagccctaattagtcataggagagtctgtacgcacccactaactcttcccatggacctgcaccgagtgtacctgggcactgtcctaaaaaggtgtgg

SEQ ID NO: 5931 - DNA, 293 bp, Homo sapiens; identical to SEQ ID NO: 75

SEQ ID NO: 5932 - DNA, 162 bp, Homo sapiens
  unsure (105): n=A,T,C or G
  unsure (117): n=A,T,C or G
  unsure (140): n=A,T,C or G
ctgacataatggtaaccagtcagaggagggcataactatgaaactggacaccttggttgtcaggttagaaggatggggtgtagggttggtaagaaaagaattcanggaagagcatcnatcaggattatgaagaatttcgncttgagaaattacagaggattt

SEQ ID NO: 5933 - DNA, 157 bp, Homo sapiens
aaattagtattggttaacagatttaacgtagaaaatggacatataaagaatacaaggataaatgtctacatgtaataatggatggtagtgatataatgcatttttgtcatcccatgctgaattcagtaaaaaataaagctaatgacttggagctttt

SEQ ID NO: 5934 - DNA, 228 bp, Homo sapiens
cttgaagcaagtggagactataaatattcaggaagagatagtttgatttttttggttgatgcctccaaggctatgtttgaatctcagagtgaagatgagttgacaccttttgacatgagcatccagtgtatccaaagtgtgtacatcagtaagatcataagcagtgatcgagatctcttggctgtggtgttctatggtaccgagaaagacaaaaattcagtgaatttt

SEQ ID NO: 5935 - DNA, 354 bp, Homo sapiens
ctggcactgactgctcgacttttccggccacggctcatcatagctggcaccagcgcctatgctcgcctcattgactacgcccgcatgagagaggtgtgtgatgaagtcaaagcacacctgctggcagacatggcccacatcagtggcctggtggctgccaaggtgattccctcgcctttcaagcacgcggacatcgtcaccaccactactcacaagactcttcgaggggccaggtcagggctcatcttctaccggaaaggggtgaaggctgtggaccccaagactggccgggagatcccttacacatttgaggaccgaatcaactttgccgtgttcccatccctgcaggggggc

SEQ ID NO: 5936 - DNA, 265 bp, Homo sapiens
  unsure (1): n=A,T,C or G
  unsure (204): n=A,T,C or G
ngtccacgctggtctcaagcaatcccgcccaccttggcctcccagagtgcttggattacaggcgagagccaccacgcctggcccccacctttcttttaggtcttaaagccatttgtataggcagtgagcctgttcccatcatcacacagtattttgcatggatggtggcacagagcctttataggaatatggatttttttttgnttttttgttccctcagcataggagtcatttgggaacctggcattatacgtaatgatttttt

SEQ ID NO: 5937 - DNA, 132 bp, Homo sapiens
ccatatgtgtaacctgtaccaaactaagctgttttaaatttacagactacaagcaactgaacccaaatgtctaaatgtacattcttttctgtactacatttcagctaatattgcagaactaatgacaatttt

SEQ ID NO: 5938 - DNA, 244 bp, Homo sapiens
cctgcagagccatggtgaccaaagtcttcccgcttctgccacgtcccttctgcctaccccacctccccatcaagtccctcaaaaagaagtgctcactggggtagcatgctccttgctgtccaggacagtcaccgtggcttcacagcactcttcctgggaggccctggctgaaccatcccgaataaccccagcaggggccacctgccgatggggctgggctgccaggagcagtgagacaggtcag

SEQ ID NO: 5939 - DNA, 339 bp, Homo sapiens
  unsure (1): n=A,T,C or G
  unsure (93): n=A,T,C or G
ntttttctttaagagacagggtctcactctgttgctcaggctggagtgtagtggcgcgatcatagctcgctgcagcctcaaactcctgggctncagtgatcctccctcaccctcccgagtagctgggactacagtcacctgctaccacacccagctaatttttgtattttttgtagagacggggttcaccacattgcccggctggttgcaaactcctgggctcaaaccatctgcctggcttggcctccaaaggctaggattacaggcatgagccactgtgcctggccataaagcattatactttgtacctatactaaaaggcatctgagatactttcac

SEQ ID NO: 5940 - DNA, 111 bp, Homo sapiens; identical to SEQ ID NO: 630
  unsure (74): n=A,T,C or G

SEQ ID NO: 5941 - DNA, 195 bp, Homo sapiens
  unsure (45): n=A,T,C or G
  unsure (117): n=A,T,C or G
  unsure (162): n=A,T,C or G
  unsure (190): n=A,T,C or G
aaacttttgagttgtagtcagaactgttgttggactgcatagttntcaaaagttttggtacatttctgactttagaaatctggggtaggaatccctttcatatgcatatagactatnttctgagcttttcaacatgttaagtggttctaatgtctgtatagntctttgccactgcatgtattgaaaggantacat

SEQ ID NO: 5942 - DNA, 374 bp, Homo sapiens
  unsure (1): n=A,T,C or G
  unsure (229): n=A,T,C or G
  unsure (277): n=A,T,C or G
  unsure (295): n=A,T,C or G
nggccgatgtctgcaccaacaaaaacctgtccaaggtgcctgggaaccttttcagactgattaagagactggacctgagttataacagaattgggcttctggattctgagtggattccagtatcggttgcaaagctgaacaccctaattcttcgtcataacaacatcaccagcatttccacgggcagtttttccacaactccaaatttgaagtgtcttgacttatcgtncaataagctgaagacggtgaaaaatgctgtattccaagagttgaaggnctggaagtgcttctgctntacaacaatcacatatcctatctcgatccttcagcgtttggagggtcttccagttgcagaactctacttaagtggaaat

SEQ ID NO: 5943 - DNA, 274 bp, Homo sapiens; identical to SEQ ID NO: 313
  unsure (1): n=A,T,C or G
  unsure (243): n=A,T,C or G

SEQ ID NO: 5944 - DNA, 425 bp, Homo sapiens
  unsure (17): n=A,T,C or G
  unsure (283): n=A,T,C or G
  unsure (374): n=A,T,C or G
  unsure (399): n=A,T,C or G
aaagcagtaagtcttangtatacttacagtatgtctgtaagtcttatatactcagagaactccagccctgcctccttctagctgtgtgaccttgggcaagtgtctcaaattctctgtgcctcgaattatctgtgtctcaaattatctactctgtgagataaggagaataccacctaactcccagcatgttgggaggattaaagctttcttacatgctctactgcatgaacagggcccagaagggcatctgtgttaggccccatccaagtgtttctgatctggntgacccccagaccccactgagaagcaccacagtgtgctatcaggtacctgtctaaaccagggcagaggaacgagcacacccctaccacagncatcaaagggagcggcgactgaagnaagaagcatcttctagagactgatat

SEQ ID NO: 5945 - DNA, 359 bp, Homo sapiens
  unsure (161): n=A,T,C or G
  unsure (296): n=A,T,C or G
ctggaagaggtgggagcccgcacggtcacaatacatgcagacacagagcagcaatacgaaacagaacagctcagagcggtcagctcctcagcagaagctgcgtgggccgccacttcccctttctgcaatcaccccatgatgtctccaccccacctcacatncagatggggctggatggcagagcagatgaagcctgctctgtggcggggcagcctaactgaaatgcacacctttatgggggaagtggacggacacctcacctcctcatgtttcacaccgtggactgcacttgagtnccagctcttcaccacatccctaggagtcttaagaggaaatcagtctgatttcttcagacagga

SEQ ID NO: 5946 - DNA, 179 bp, Homo sapiens
cctccagggtatctgcggtttccaattcacagcactacccacaccgtgggagtgggggtgtgcaccagtaccgactccagccactgcaagggtcaggagtcaagactcagacgggactttcctagggcttctggatttgggcaaacagaactgaatgagcccatagctgcttcttccag

SEQ ID NO: 5947 - DNA, 175 bp, Homo sapiens
  unsure (91): n=A,T,C or G
ccagtgagctggacctcatgccctacacacccccacagtctaccctaaagtctgccaaaggcagtgcaaagaaggaaggctccaaacgganaatcaacatgagtggctacatcctgttcagcagtgagatgagggtgtgattaagcccaacacccacactctcttcggggagcta

SEQ ID NO: 5948 - DNA, 300 bp, Homo sapiens
  unsure (139): n=A,T,C or G
  unsure (144): n=A,T,C or G
  unsure (218): n=A,T,C or G
  unsure (287): n=A,T,C or G
aaaacaacacaagaagaagaagtcacaaagcaattgaaatgggagcatccgcttggagaattaagacagggtgctcctgagacagacttccaagacagcttctttgaagtgctgtgtgggggtaaatattcttcagcanaaganggcacaggtaagggccccgtgaaacacagttcttaatatcatctttatcttcccttaggataatataccccaanatactttgcatctataagatgtatacatcactgcagttcacgaaacacagtctgctgccaatacatatncatgttgcatggc

SEQ ID NO: 5949 - DNA, 256 bp, Homo sapiens
  unsure (182): n=A,T,C or G
  unsure (250): n=A,T,C or G
  unsure (255): n=A,T,C or G
tcgatgtaaaatgctcaagtttctgatgtttgacatggggctgcggaaacagtatcggccagacatgattattttacagatccagatgtaccagctctcgaggttgcttcatgattaccacagagacctctacaatcacctggaggagcacgagatcggcccacctctacgctgcccctggncctcacctggtgctacagtccctggatcgaccaagcttattattttttagacaagattactgcgcgcntactng

SEQ ID NO: 5950 - DNA, 179 bp, Homo sapiens
cctcctttgggagcacacgaggctaccatggctgcagcaagaagccctggtcttcctgtttacgttcttgtcagaactcgtgccttttgagtctccccggtacctgcaggtgcacattcttcacccacccctggttcccggcaagtaccgctccctcctcacagactacatctcattgg

SEQ ID NO: 5951 - DNA, 246 bp, Homo sapiens; identical to SEQ ID NO: 632
  unsure (1): n=A,T,C or G
  unsure (5): n=A,T,C or G
  unsure (198): n=A,T,C or G

SEQ ID NO: 5952 - DNA, 308 bp, Homo sapiens
  unsure (255): n=A,T,C or G
aaacagctctaaatgtcagtactcacagtggcatattacaaagtaataaacagtgcacacttgagggcaaaccgcatattgagctatagaagagctcactgtgattaagatgagatcaaacatcatagcagaacattagcaaattttatctgaattctgtaatggacatccatgctgcaataacattagaaaagcacgggagcctattccaaaccagcgagaacagttttgtgcaaagagtgggtctttgtgtgnttgaactcccaccacgtaagggcaaactcgatatgcatgctaatgacctacaa

SEQ ID NO: 5953 - DNA, 263 bp, Homo sapiens
  unsure (165): n=A,T,C or G
  unsure (179): n=A,T,C or G
  unsure (198): n=A,T,C or G
  unsure (233): n=A,T,C or G
  unsure (243): n=A,T,C or G
  unsure (258): n=A,T,C or G
  unsure (261): n=A,T,C or G
ccacaaagtcttctcaagtgaaagtaggggagaagcggaaagctgctgatgagacgctgtgccaaacaaaggtattgctggacatcttcactggggtgcggctttacttgccaccctccacaccagacttcactcgtctcaaacgctactttgtggcattcgacngggacctggtacangaatttgatatgacttcgnccccacgtgctgggtagcagggacaagaaccctgnggccagaggntccagatgatttggnatnat

SEQ ID NO: 5954 - DNA, 194 bp, Homo sapiens
  unsure (146): n=A,T,C or G
aaaggagcatctcagttacgtgtggcggacaaaaaaaaggagcagattgtgacagaccattcccatcggccaagtggtcgaacccgacatccaagacccagcgagcagccaagctcagcgcaacctccggcttctcgctctgactncaaaagggtgagcacgtcgccctcgcgcacgggccttttacattgcgg

SEQ ID NO: 5955 - DNA, 274 bp, Homo sapiens
  unsure (1): n=A,T,C or G
  unsure (2): n=A,T,C or G
  unsure (145): n=A,T,C or G
nncgaggtctggcttgcctgctggcctgcttcctggagataggatgctcagacccaccgctgctcttcaggggtcgtggaaggaattaatgcacttccttctgtcccccaatctctgtcctttacgtgtctctggagctgagcangtattctttttctttcttcatctcagtagagcttttacttttatccagcatttcttagctcggttggcaaactggatatttatgcacctgcatttcacaatccatctccaccgattattcctggacctg

SEQ ID NO: 5956 - DNA, 184 bp, Homo sapiens
gtccaggaaagaaagcaatggagtgctcactcttatgatgcaggcaaaactgaaaatgtgtttttcttctcagggaagtgataagcctctcctgaacttctgcaattctgtgtttgcatgggcttggtatgcctgagctatttctacagcggttaaagtcctgatatgtcaagttgcctctttc

SEQ ID NO: 5957 - DNA, 201 bp, Homo sapiens
  unsure (95): n=A,T,C or G
  unsure (113): n=A,T,C or G
  unsure (142): n=A,T,C or G
  unsure (161): n=A,T,C or G
  unsure (166): n=A,T,C or G
ccaatttggggtatggtcctgtatgtttttgtaatgtcataatgggagctgcagtgttgtgcaggtatcaaagagcttcccagttttcatgttantaaacttggaaataattntctcatgcacctgatttttagcttctatnttaacaccgattattcttnaactntatgggagtaaatacccatctgtcattaactaaaa

SEQ ID NO: 5958 - DNA, 192 bp, Homo sapiens
gtctggggcccgtggggtcagagccaagcttccatgatcatttgatgacttccaggcaggtgggggtcggagatctccagtaatgagtgacacgtctggggtttccacagctctgactcaggtggtgggagagccacgtggaagggagagccaggcaataagtccgcataatgtgtgaggtggggagccagg

SEQ ID NO: 5959 - DNA, 272 bp, Homo sapiens
  unsure (1): n=A,T,C or G
  unsure (8): n=A,T,C or G
  unsure (152): n=A,T,C or G
  unsure (172): n=A,T,C or G
  unsure (191): n=A,T,C or G
  unsure (217): n=A,T,C or G
  unsure (233): n=A,T,C or G
nggccgangtctgactctagcccaaaagggaacaggagattctggagctgaggggagacccagcaaaggaacaacctggaagccttaccccacagccacaaaacctccccaatggaggaacaatctctaaaacttgattctttagagcccangctgcagcgggagctggacnggctacaggcagccctganacagacagaagccagggagattgagnggagggagaaggccangacttggactctcctagcgcagaccaagccagtgcagag

SEQ ID NO: 5960 - DNA, 235 bp, Homo sapiens
  unsure (94): n=A,T,C or G
  unsure (148): n=A,T,C or G
  unsure (169): n=A,T,C or G
  unsure (218): n=A,T,C or G
  unsure (230): n=A,T,C or G
gtctggagcagcagatagaagggacagggttgcacttataacaccactatcctcccagccctggttttatcatcatcatcgagaaaaatacaantaatcagcagtgatcaaaggtaagctaaacattccatttaactaacttaaatgngacctggcgtgccgtgccatnctataaatgacataacagaataagactcacttttaattccacctctggncaattcaagaanaaaac

SEQ ID NO: 5961 - DNA, 278 bp, Homo sapiens
  unsure (143): n=A,T,C or G
  unsure (248): n=A,T,C or G
ctggcggtagaagcgcccggttctcctcggtgttctcggtgccaatggactgcagcccgcttggcaatgctcccagtggactcatctgcagccaggatgcccttgccaggtgccacgatgcggtgagcgatgtcagacagctncttcttctgctccggggtcagtgctggatattggtagggcatggtgctggtagtagcaagttccggtgcttcagaggaaattcttcttggaaatccagacggagnccttggttgtcaagagaaataaatctttgg

SEQ ID NO: 5962 - DNA, 268 bp, Homo sapiens; identical to SEQ ID NO: 314
  unsure (154): n=A,T,C or G
  unsure (193): n=A,T,C or G
  unsure (249): n=A,T,C or G
  unsure (256): n=A,T,C or G

SEQ ID NO: 5963 - DNA, 212 bp, Homo sapiens
cctcctcatcaggacacattccccatcccagaggggggtcggcactcacgattgtgatgttggctacatccttgacaaagccgatggcctttccaggttggaacttgcaataaccatccttgccctggtaggggtaggtgtcttcacccatgatccccttgttgtacaggatatactcgaaagcctggctggggagacccccttggcagccg

SEQ ID NO: 5964 - DNA, 207 bp, Homo sapiens
  unsure (190): n=A,T,C or G
  unsure (197): n=A,T,C or G
ctgagggtctaggctgaggactggatgccaatccagcctgggagggccacacggcctggtgacacagaggtcaccccaaggggagaccaatggagggcacagagagggctctgggtctaggctgcagctctgtggcctgtgctgggtcatgaggacatggggacacagagggacgggtgaactgggtgangtgccanaatccaccct

SEQ ID NO: 5965 - DNA, 221 bp, Homo sapiens
aaacttttgagttgtagtcagaaactgttgttggactgcatagttttcaaaagtttttggtacatttctgactttagaaatctggggtaggaatccctttccatatgcatatagactattttctgagcttcttcaaaacatgtttcagtgggttcctgaatgttcctgatgatagtctctcttgtcgaactgtcaatgttaatctctctaggggactggtg

SEQ ID NO: 5966 - DNA, 211 bp, Homo sapiens
ccaccagaagcctgggaccacaaaggctactgctgaatagaagtaaacagttcatccatgatctcacttaaccaccccaataaatccgattctttattttctcttcctgtcctgcacatatgcataagtacttttacaagttgtcccagtgttttgttagaataatgtagttaggtgagtgtaaataaatttatataaagtgagaattaaa

SEQ ID NO: 5967 - DNA, 206 bp, Homo sapiens
  unsure (169): n=A,T,C or G
ctaggctgccatcgggccggtgcagatacggggttgctcttttgctcataagaggggcttcgctggcagtctgaacggcaagcttgagtcaggacccttaattaagatcctcaattggctggagggcagatctcgcgagtagggtacaaggcactatgaaatgatctantttcgtgggtgaggggctgaagggcctatgatgcacg

SEQ ID NO: 5968 - DNA, 212 bp, Homo sapiens
cctgggatgcagggagaaaggctgaccacaagttgagacaagatacagaaacaaacaaaaacagcagaaagtccgatcgatggtgtaagtgttgtgttcactgcttagggtgcaggtgagcttgatcgaggctcccagtaaggcagatgtagacgggggctgagtcagcacaggcagagcacagagacctgtggagaaaatgaagggcaata

SEQ ID NO: 5969 - DNA, 224 bp, Homo sapiens; identical to SEQ ID NO: 635
  unsure (201): n=A,T,C or G
  unsure (216): n=A,T,C or G

SEQ ID NO: 5970 - DNA, 209 bp, Homo sapiens; identical to SEQ ID NO: 76

SEQ ID NO: 5971 - DNA, 220 bp, Homo sapiens; identical to SEQ ID NO: 634

SEQ ID NO: 5972 - DNA, 202 bp, Homo sapiens
  unsure (113): n=A,T,C or G
gaaggaggggaggaaagggagagaggaagagggagagtgaaggaggggaggaaagggagagaggcagagagggggaaggagagagggaaggaaggagagattgagagacaganaaattcctaaggggagctgtcaggtgggctggacatgggccccaggctgcactgctttatccctttgctgtaggaaagtcaagccagtt

SEQ ID NO: 5973 - DNA, 200 bp, Homo sapiens
  unsure (118): n=A,T,C or G
  unsure (190): n=A,T,C or G
  unsure (199): n=A,T,C or G
ccacccagttgctggtggacctggcagagggctgccacacacaccacttcaacagcctgctggacatcatcgagaaggtgagagccgttgtacccggggccgggtgctagcgtgccanagctccgtgggcagcaatggcctctgggccctctgtcctcctcttcgagtgaccggatggctgtgttcgtangtgaggctnc

SEQ ID NO: 5974 - DNA, 200 bp, Homo sapiens
ccatgtcattgtcccacttataccgggatggggaaggccgcattgatgatgatgatgacgagcgggagaactttgagatcactgactgggatctccagaatgagttcaaccccaaccgacagcgccactggcagaccaaggaagaagccacctacggggtgtgggcagagcgagactcggatgatgagaggcccagcttt

SEQ ID NO: 5975 - DNA, 181 bp, Homo sapiens
  unsure (181): n=A,T,C or G
aaacagtgtttctgaaattggatggctggctaatagacactgaatcacccggagtgcttatcttaaaattgcagatttagggagcctgccaatttaacagtctcatcaggtgattcttttcaacagtaatgtttgagaattactgggttaaattgtgggaaagggtccagattttacctcn

SEQ ID NO: 5976 - DNA, 213 bp, Homo sapiens
  unsure (209): n=A,T,C or G
ccaggctggtcttgaacttctgacctcaggtgatcccaccttggcctcccaaagtgctgggattacaggcatgagccactgtgcccagcttaagatctctgttttaatgttaatgctggtcagttgtgtctggattccagagggaggaaggtagaatgaggcatgttgacacctccccttcccatcatggcctaagctggtctttttangtta

SEQ ID NO: 5977 - DNA, 105 bp, Homo sapiens
  unsure (18): n=A,T,C or G
aagagaaccaaacatcangggaaccaaagggtcacaatccccgtggcactggagaatacaaatatctttattagaccaccgataggaccctgagaaaacccttcc

SEQ ID NO: 5978 - DNA, 217 bp, Homo sapiens
  unsure (103): n=A,T,C or G
ttccgcgccgccacaatggtgcgcatgaatgtcctggcagatgctctcaagagtatcaacaatgccgaaaagagaggcaaacgccaggtgcttattaggccgngctccaaagtcatcgtccggtttctcactgtgatgatgaagcatggttacattggcgaatttgaaatcattgatgaccacagagctgggaaaattgttgtgaacctccaagcag

SEQ ID NO: 5979 - DNA, 226 bp, Homo sapiens
aaagaacttgcccaacatctcagaacaaatggaggaatcactattgaaacctaggcaatctgactcaggaggccacagtcttatatactgcattagaaagctttagagagccttttctttttctttgagaccgagtctcactctgttacccaggctggaatgcagtggcatgatctcagctcactgcaacctctgcctcctgggttcaagcaaattttctgcctta

SEQ ID NO: 5980 - DNA, 201 bp, Homo sapiens; identical to SEQ ID NO: 315

SEQ ID NO: 5981 - DNA, 396 bp, Homo sapiens; identical to SEQ ID NO: 77
  unsure (211): n=A,T,C or G
  unsure (213): n=A,T,C or G
  unsure (231): n=A,T,C or G
  unsure (244): n=A,T,C or G
  unsure (325): n=A,T,C or G
  unsure (334): n=A,T,C or G
  unsure (393): n=A,T,C or G

SEQ ID NO: 5982 - DNA, 202 bp, Homo sapiens; identical to SEQ ID NO: 78
  unsure (168): n=A,T,C or G
  unsure (178): n=A,T,C or G
  unsure (199): n=A,T,C or G

SEQ ID NO: 5983 - DNA, 183 bp, Homo sapiens
  unsure (160): n=A,T,C or G
  unsure (166): n=A,T,C or G
  unsure (180): n=A,T,C or G
ctgatttctgttgaaaaagtaaaaggtgatccctctaagaaagaaatgaagaaagaaaatgatgaaaagagtagttcaagaagttctggagataaaaaaaatacgagtgatagaagtagcaagacacaagcctctgtcaaaaaagaagagaaaagatcgncctganaaatctgaaaaaanaag

SEQ ID NO: 5984 - DNA, 219 bp, Homo sapiens
  unsure (205): n=A,T,C or G
ctgccagacccgccaacgatcacagcgtccccctgctgcaacactgtggtgctgcccagtggcactccttctccaggacccacaacgtctgtgaactctgtgtcaaccagacctccgggggcatgaagccgagctcggtcagcgtgccacagtgcagcttttttgaaatggcagcagctctggattctttctacctcaaggagcnaaacttttattaat

SEQ ID NO: 5985 - DNA, 202 bp, Homo sapiens
  unsure (182): n=A,T,C or G
cctaacacccaagctcttccttgcagaagagctgagatgctaaggagaccatctggagtgtcataataagcccttgggatttgctgagctcccacatggctttcttcaaccacctggcccactttcttcaaccacattccactttggaatgcggtgtctttaaggcaccaagtgatcttaanaatgggctctgtttttgaat

SEQ ID NO: 5986 - DNA, 220 bp, Homo sapiens
  unsure (218): n=A,T,C or G
aaatttcccctttcctactacttccacagtgactctgaccttcccgtcgtaagttctctcagccgggctaaatttggcagtttctggttccatttcaagcaattctcgcacaggggaacggggtacatttgcagaaaacttttctattagtggccgcatcatgggatagtacacctgccagactgtctccagtgacatcccactatccatgtaatggnac

SEQ ID NO: 5987 - DNA, 209 bp, Homo sapiens
  unsure (199): n=A,T,C or G
ctggaaaagaaacctatctcagggatatatgacattatgccgagaccgggttcatgcactgattgatttgacaggtgaactgctccatgttgtgggaccagggatgtgaagcaagtacatcaaccttgaaacgcgcgcagttggtttgggagagccggcctgaggaagcccctgccccaaggctgcccacagagggaangattgtgtgt

SEQ ID NO: 5988 - DNA, 118 bp, Homo sapiens
aaaaaaataattcgtaaatgttacagtgttggtgttaaaacacaatatattatgatactcaagtaagaactcagtacctgaaaacaatgacaaaacatgccatgggatgtttatgctt

SEQ ID NO: 5989 - DNA, 182 bp, Homo sapiens; identical to SEQ ID NO: 317
  unsure (152): n=A,T,C or G
  unsure (174): n=A,T,C or G
  unsure (180): n=A,T,C or G

SEQ ID NO: 5990 - DNA, 127 bp, Homo sapiens
ctgtcaccttattgggggaaaaatgcctgaaaattagggggcacttcaagtagatagcttctatttcctatatttgtcttatatacaagtatttgcttttatcaaaataattccaataaagcatttt

SEQ ID NO: 5991 - DNA, 241 bp, Homo sapiens
  unsure (226): n=A,T,C or G
aaaaaattaattacttatttttggtggagaccagggtcttgctttgttgcccaggctggttttaactcatggcttcaagtgatccgatcctcctgcctgggcctccaaagcgttgggattacaggcaaaggcccagcccctaaggtcatgtacttaccaggtctggctcctggtctcaggagcccgagctgttctcttcctccccttccccgtcttcactctcagnctgaggccacgcccc

SEQ ID NO: 5992 - DNA, 356 bp, Homo sapiens; identical to SEQ ID NO: 79
  unsure (337): n=A,T,C or G

SEQ ID NO: 5993 - DNA, 149 bp, Homo sapiens; identical to SEQ ID NO: 80
  unsure (5): n=A,T,C or G
  unsure (8): n=A,T,C or G
  unsure (17): n=A,T,C or G
  unsure (26): n=A,T,C or G
  unsure (37): n=A,T,C or G
  unsure (114): n=A,T,C or G

SEQ ID NO: 5994 - DNA, 140 bp, Homo sapiens
  unsure (111): n=A,T,C or G
aaatacacattacagtgttttatattatgtaatgctaagttgtaattcagcttttaacaaatctttttttaggtagtaaaaaaaaaaatactcaacaactaataggcccanagtttatttccaaatgagacactaaattt

SEQ ID NO: 5995 - DNA, 292 bp, Homo sapiens; identical to SEQ ID NO: 81
  unsure (244): n=A,T,C or G
  unsure (250): n=A,T,C or G

SEQ ID NO: 5996 - DNA, 218 bp, Homo sapiens
  unsure (161): n=A,T,C or G
  unsure (169): n=A,T,C or G
  unsure (170): n=A,T,C or G
  unsure (196): n=A,T,C or G
  unsure (216): n=A,T,C or G
ccacagcccatgcgaaggcccgcatgagcaagactgtggacctgcaggatgcagaggaagctgtggagttggtccagtatgcttactttaagaaggttctggagaaggagaagaaacgtaagaagcgaagtgaggatgaatcagagacagaaaatgaagangagaaaanncaagaggaccaggagcataagaggangagaaggaagactcgccagnca

SEQ ID NO: 5997 - DNA, 110 bp, Homo sapiens
  unsure (86): n=A,T,C or G
  unsure (93): n=A,T,C or G
  unsure (108): n=A,T,C or G
ccaagaggtaccatggttgccattagtcagatatggaactgtggaggatttgcttgcttttgcaaaccatatatccaacactgcanagcattnttatggacaaagacnac

SEQ ID NO: 5998 - DNA, 240 bp, Homo sapiens; identical to SEQ ID NO: 319
  unsure (239): n=A,T,C or G

SEQ ID NO: 5999 - DNA, 215 bp, Homo sapiens
  unsure (201): n=A,T,C or G
cctcgagctcccttcagcgaggcaccttacgcatggaataggaggtttcacccacctgaaaccttctaaatacaatatcaatggtgaaaaaccaaaaacaagagagaaaataaaaacaagatcattagtaaaagttcaacaaagcaattgaaattctttggatgtctattacatatgggaatgaggacagtctcaagtctntaatatgggaaaca

SEQ ID NO: 6000 - DNA, 630 bp, Homo sapiens
  unsure (462): n=A,T,C or G
  unsure (515): n=A,T,C or G
  unsure (529): n=A,T,C or G
  unsure (583): n=A,T,C or G
  unsure (590): n=A,T,C or G
  unsure (607): n=A,T,C or G
  unsure (626): n=A,T,C or G
ctggccgatttacaccttgataacaagaagcttggagagatgcgcctgaaggaggcaggcacagtggggagaggaggtgggcaggaggaacggccctttgtggcccggtttggatttgacgtggtgacgtgctgtggatacctcccccaggtgaatgactggcaggaggactgggtcgtgttctatgcccggcagcgcattcagccccagatggacatggtggagaaggagtctggggacagggaggccctccactttggtctgctctgcagttaaagatcctgacctgttccgtgacctggagatcatcccagccttactccacggggacctctggggtggaaacgtagcagaggattcctctgggccggtgatttttgacccacttctttctacggccactcggaatatgagctggcaatagctggcatgtttgggggctttacagcttcttttactccnctaccacggcaaaatcccaagccccaggattcgaaacgcttcagtgatagctnttactcttgaaccntgaatatttgatcgggtcaaagactcctgactatgagaattggcaatacggctnttgaagngactcgcgaccctaggnatcaccattggctctatgntcac

SEQ ID NO: 6001 - DNA, 341 bp, Homo sapiens
aaaaaaatctcaaaacatgttcaaacacattcagtagcaaagatccaccattggcacacacattaagaaagcacacacactaggcttctagttgggctaattaaaatctctatggctggaaaggtggttggttgtacttaattaagcttttttgaagtgcaaagctatgcataacagatgagcttgaaagctgcagagtttaagatagacttaatttttcatgattttcccaaagccaggtgatgatatttatttaatttgtggcttcagggtgcacctggaagaaacataagatacagaggcagagaccttaatgtaacttagtcagaaatacatttttt

SEQ ID NO: 6002 - DNA, 212 bp, Homo sapiens
aaaacacatcaattctatgaggtaggtattaaccctttcttacagaagaaggaactgaaccccatgaaggctacacataataagtggcagaggtgaaatttgaacccagatctaccaactccaagtttcttttcaatttgactataactgcatttgtgattgcttgtgacataagacatacgagagagtagatttgaattatgtataagcag

SEQ ID NO: 6003 - DNA, 335 bp, Homo sapiens
ccaggtacatgggccggatggcaaagagtgggaaggtgtgcaccttgatcatgatggtcatgaaggccatgtacagcagaaccttgatgaagcctgaggggaggggatgcagaaagcagcaggtcacagggccaggaggcagagtggaggatgctggtccagatcaggagaggcccaggcccctctcacctgtaaacagctctgtgtagagcatgtacacagccttgttgtcccaggggttctcactcttggaggtccacggagtgcagcacatacttgatgaagatggtgagcaccatcgtcatcaggatggcatactcaaagccaaacaccag

SEQ ID NO: 6004 - DNA, 247 bp, Homo sapiens
  unsure (186): n=A,T,C or G
  unsure (227): n=A,T,C or G
ccaggatggtcttgatctcctggcctcgtgatccgcccgcctcagcctcccaaagtactgggattacaggcgtgagccaccgtgcccaaccatttgtcattttttattgtgggtacactagtgggtgttaagtcatatctgcttgtggttttgattttgcattttcttgatggcttgtgatgttangcttttcttcaaacacttattggatgctcttatatctttcnttacaaaaaggttattttcc

SEQ ID NO: 6005 - DNA, 187 bp, Homo sapiens; identical to SEQ ID NO: 545
  unsure (116): n=A,T,C or G
  unsure (168): n=A,T,C or G
  unsure (184): n=A,T,C or G

SEQ ID NO: 6006 - DNA, 367 bp, Homo sapiens
  unsure (240): n=A,T,C or G
  unsure (244): n=A,T,C or G
  unsure (281): n=A,T,C or G
  unsure (301): n=A,T,C or G
  unsure (302): n=A,T,C or G
  unsure (331): n=A,T,C or G
  unsure (353): n=A,T,C or G
  unsure (363): n=A,T,C or G
ccaacaggacccgcaaaaaaccctgaaaattgagtgcctctgtatgacaggatgggaggtgagacaggtctccttataccctctcccacacattcatgtaaaaatagatagaatggaaaaacagactgcttgtgacaagaagatactaacttacaaacaaaacctaaggccacgcaaggcaaaagtaaagtcacgcctcaaaattcataatatctagagaaacaggtctgttttcttggntggnatggaatcaaagtgcagatagcagacccccttccttnctacctcctccaaactttanncaaactttcacactctcaaccagacctgnccgggcggccgcttcgaagggngaaattccanccac

SEQ ID NO: 6007 - DNA, 496 bp, Homo sapiens
ccagtgcagaatgctccagagccttaatgacagaggcataggagtctgagaacttcgtgtatttgcccacaagggcaatagagcaggtctccagcaagcgatcatatctgtcagccatctctttccatttcatcagcatttttcttggctgcctctcaataggaaggtcaagtcttcgaagaaaataatctacaaccccttgctcctctaacaacaaggggactcggtagatggatgaaacatcgtggacacagatcactttgttcaggctcaacatggcagaacattgatattttctccttcactgatgtgtcaagtggatttgagcacctgcatacaaccagatctggggaaagcccaagtcctctaagttcccgaacactattctgggtaggtttagtcttctgttcccctgttgaacttggctggggaactagactgacgtggatgttacaaaagttctctcttttgaccttgaattggaactgacggaagg

SEQ ID NO: 6008 - DNA, 264 bp, Homo sapiens
ctgtgacactactgagtataatttgcctaattcagcatactggtatttgattggaggacctggaccttcatctaaagacacaagcataaaagtagcaggtacactcaatttcagaagctgtgtcttctctgccacacctaaattggcatacattacaaacaggttgaaatactgctgtaaatgacgcccatgctctgaaacttcccttctcaagagatttagtactgctcttaataaagtggatcactcaagctttaagttgtc

SEQ ID NO: 6009 - DNA, 101 bp, Homo sapiens
tgaaaaaggaactgttcagcaggctgatgaataagatctaagagttacctggctacagaaagaagatgccagatgacacttaagacctacttgtgatattt

SEQ ID NO: 6010 - DNA, 227 bp, Homo sapiens
  unsure (18): n=A,T,C or G
  unsure (143): n=A,T,C or G
  unsure (182): n=A,T,C or G
  unsure (216): n=A,T,C or G
ccagaggaagcacctggngctgaactaggcttgccctgctgtgaacttgcacttggagccctgacgctgctgttctccccgaagaacccgaccgacctccgcgatctccgtcccgcccccagggagacacagcagtgactcanagctggtcgcacactgtgcctccctcctcaccgcccatngtaatgaattattttgaaaattaattcccccatnctttcaaaatc

SEQ ID NO: 6011 - DNA, 132 bp, Homo sapiens
cctgaacaaggacctctgccctccctattcagacccttcgttgcctcacctggtcaatacaaccacttcacctctgaccgcaggggcaggggactagatagaatgacctactgagcctcgtctgtctgtctg

SEQ ID NO: 6012 - DNA, 181 bp, Homo sapiens; identical to SEQ ID NO: 3071

SEQ ID NO: 6013 - DNA, 166 bp, Homo sapiens
  unsure (32): n=A,T,C or G
  unsure (52): n=A,T,C or G
  unsure (56): n=A,T,C or G
  unsure (74): n=A,T,C or G
  unsure (78): n=A,T,C or G
aaaaggcccacttgccgtaacctcttttggtntattttgcttcccattcagnccanagtttatatgataaaggngttnacttttacttcccagtctccaagtgctaacacataaacacatacatgtctgactgttgcagaactgttcgagctcctaattcagtgtt

SEQ ID NO: 6014 - DNA, 219 bp, Homo sapiens
aaaggaggttatgggctgagagtagattgctgaaagtcatgatttaggaagtgtaaggttactggtaatgacacaccgcaagtgcagctaagggagttgacagttgggatgagtgaaagaaaagattattagtatgaggatttcaaggaatcgagaaagtagggctttggatgagttgtttttgtagaagtcaccaatgatgacaatgggatgctgata

SEQ ID NO: 6015 - DNA, 244 bp, Homo sapiens
  unsure (202): n=A,T,C or G
ccttcagaagttaaacgtgatcacttgtgctgggacagccaatagaggagtctgagatgatcatttccaaggagttcttcacagaggaggtagctttggagctgggctttgaggttgggcagtatttgaaacagtagagacggagcaaagaacccctcctggtggggtcagtcattcgctttcttttcctcctcaggaccanggctctttgaagaagaaaaaaggcccacaaggggaccccagg

SEQ ID NO: 6016 - DNA, 102 bp, Homo sapiens
ctatagggctcgagcggccgcccgggcaggtctgtggcagcgcattagttttggcgcaagcgagcctatgctgcagggtcacttttggctggtcagagaagg

SEQ ID NO: 6017 - DNA, 475 bp, Homo sapiens
  unsure (219): n=A,T,C or G
  unsure (459): n=A,T,C or G
aaaaaaggtgacttggattaaagtatgcaaactcaaggagtagtacgagcccacttgagtcaagttagcttagttgctaaagagcttgataccaaaattacttttgtttacttgatgaatgggatagttgttgcacagggccactgatctagattactgtcttatttgtcaagtacttatagttgtagaagtagcagtgtgaaaattatcggaatgganaaagggccaatgataaaccaatttattttcaggtaccagcaacttcaaggtttctgccacccactgttgtatacacttattgagaaaacaatgcaaaatgtgaagcatccggttactggacaatttctatatcaggacagcaactgggccagcaaagttgagaaactcactttagacaatgctgctttccctttccttgcatattctggaatcccagcagtttctttctgtttttgcgangtaagtctgttcattt

SEQ ID NO: 6018 - DNA, 270 bp, Homo sapiens
ccttgcctcagatccaaggtcactcggaagaggccatgtctaccctcaatgacactcatggaggaaatgctgagagaagcattcagatgcatgacacaaggtaagactgccaaaaatcttgttcttgctctcctcattttgttatttgttttatttttaggagttttgagagcaaaatgacaacacccagaaattcagtaaatgggacttttcccgcaaaagccaatgaaaggccctattgctatgcaatctggtccaaaaccactcttc

SEQ ID NO: 6019 - DNA, 224 bp, Homo sapiens
  unsure (210): n=A,T,C or G
aaaacagatttcatctagagcttcatttccctgttgagctttcttaaagagttctcttaggactgactgtcggaactggacaggtaaactcaaggttaagttgtcttcaatgaaaatctgtattacctcctgatagttgccagatctcaaacaaatatggacttgactatatggagtcaactgttgagatgtactatcagaagaaggtcnaaaacattccctgc

SEQ ID NO: 6020 - DNA, 214 bp, Homo sapiens
ctgcactgggagagctgagagcctccatgacagaccccagccagcgtgatgttatatcggcacaggtggcagtgatttctgaaagactgagggctgtcctgggccacaatgaggatgacagcagcgttgagatatcaaagattcagctcagcatcaacacgccgagactggagccacgggaacacatggctgtggacctcctgcttacgtcttt

SEQ ID NO: 6021 - DNA, 173 bp, Homo sapiens; identical to SEQ ID NO: 3082

SEQ ID NO: 6022 - DNA, 391 bp, Homo sapiens
cctcctccctcacacacacgtcgccctgtcagaaggccaggcacactactgcagccaggatgctgggatagcaaggggataggtgctccaaccttcaccttccagaaaggcagggtgatctgaagtgacgtgtagctgagagctggatggggagaatttcactttcccagttgatccagaaaggaaagaaaccccagagcattctcttggaagaacttaaactggctttgggctccagtgcgagcgaatgacttgtggaaaggggcaccatgatgagaggccggggccggtgggtgttgctgtctgggtgaacatctcgtcatctgtctgttctttctccccggcatcatatcccttatagtctggctccaggtaaacagtgtctctgcca

SEQ ID NO: 6023 - DNA, 582 bp, Homo sapiens
  unsure (205): n=A,T,C or G
  unsure (259): n=A,T,C or G
aaaacagcaaatagcagatttacgggaagatttgaaaagaaaggaaaccaaatggtcaagtacacacagccgtctcagaagccagatacaaatgttagtcagagagaacacagacctccgggaagaaataaaagtgatggaaagattccgactggatgcctggaagagagcagaagccatagagagcagcctcgaggtggagaanaaagacaagcttgcgaacacatctgttcgatttcaaaacagtcagatttcttcnggaacccaggtagaaaaatacaagaaaaattatcttccaatgcaaggcaatccacctcgaagatccaagtctgcacctcctcgtgatttaggcaatttggataagggacaagctgctctcccagggagccacttgaaccactgaacttcccagatcctgaatataaagaggaggaggaagaccaagacatacagggagaaatcagtcatcctgatggaaaggtggaaaaggttataagaatgggtgccgtgttatctgtttcccaatggactcgaaaggaatgattgcagatgggaagacatcctgtccttttttatggtgac

SEQ ID NO: 6024 - DNA, 284 bp, Homo sapiens; identical to SEQ ID NO: 82
  unsure (261): n=A,T,C or G

SEQ ID NO: 6025 - DNA, 190 bp, Homo sapiens; identical to SEQ ID NO: 3088

SEQ ID NO: 6026 - DNA, 184 bp, Homo sapiens; identical to SEQ ID NO: 3690

SEQ ID NO: 6027 - DNA, 138 bp, Homo sapiens
cctcaggcacttggcctttgttttcacaccaacttgatgggttctactataagatgctaaaaaggtgggttgtgtgtggttcagattggttgatttgtaaccctagttgtgcataagaattgcccagatatttttttt

SEQ ID NO: 6028 - DNA, 434 bp, Homo sapiens
aaacatctggctcgcaagctgactcacggtgttatgaataaggagctgaagtactgtaagaatcctgaggacctggagtgcaatgagaatgtgaaacacaaaaccaaggagtacattaagaagtacatgcagaagtttggggctgtttacaaacccaaagaggacactgaattagagtgactgttgggccagggtgggaggatgggtggtcaaggtaaagacagactctagggagaggaaatcctgtgggcctttctgtcccacccctgtcagcactgtgctactgatgatacatcaccctggggaattcaaccctgcagatgtcaactgaaggccacaaaaatgagctccatctacaagtgattacctagttgtgagctgttggcatgtggttagaagccatcagaggtgcaagggcttagaaaagaccctgg

SEQ ID NO: 6029 - DNA, 130 bp, Homo sapiens
aaaagtcgacctgttttgcagaaagtctgctgtttttgtactaaaggctttggaatttggcatttagctaggaatgcacattctttcacctcattcatactttaagaaccacagaagtgactctgcttgg

SEQ ID NO: 6030 - DNA, 232 bp, Homo sapiens
ctggcaagatctggaccctgcaaaccagtagcccctctggaccccccagtgaatgctgagatggagctgacagcaccgtccctcatccagcccctgggaatggttcccctgatccccagccccttgtcatcagcagtgcccctgatcctacctcaggccccttcaggcccatcctatgccatctacctgcagcccactcaagcccaccaaaagtgggaacgccaccccaagg

SEQ ID NO: 6031 - DNA, 214 bp, Homo sapiens
  unsure (214): n=A,T,C or G
ccttgcgggaagacctcatgggacgcaaggactccctgggcagagggtgggcccctggtcctggaggcacagaatcctcgacccacacgactatgtgacctctttataactggggaagacttcgatgatgatgtgtgatctgggactggcaggttattaatcgagatacacttgttaggagggacagggttcccctaaggcacttttacctcgn

SEQ ID NO: 6032 - DNA, 212 bp, Homo sapiens
  unsure (163): n=A,T,C or G
  unsure (205): n=A,T,C or G
  unsure (206): n=A,T,C or G
ccatgggaagcccgagaattggttcctatagacccggttcctgatgaattcccaggccaaaagaaccaccctgacaaattttgggttctgaaagtcttattattggacagtattgcatagctagagaaggaaaaggatttactcatcctgtagggcagcttanttgtcttgggcaaaagctgtataatggtaccacaaaaacagnnacatgg

SEQ ID NO: 6033 - DNA, 181 bp, Homo sapiens
  unsure (11): n=A,T,C or G
  unsure (31): n=A,T,C or G
  unsure (41): n=A,T,C or G
  unsure (157): n=A,T,C or G
  unsure (168): n=A,T,C or G
aaaaaaaaaanccttcaaaaataaaaataanagttatttanccttgtgaatattttgaagtaaagtttcttgaatttccgtgatgaactcttcaagcaattcaacttctcagagtcatcactcaaaagttcctttgacatgggacctatcccacggngacaaagcggnttccccctttgtt

SEQ ID NO: 6034 - DNA, 252 bp, Homo sapiens
aaagctcaaacttacagagtctgttgtaaggttaatacatagaatgctagctttttagtcacctgagaatcaggaaattcacatgaacataattccctatactgacaaagaactatagctacctatgggcttgtcaagttcctacgcttcattcagcatgaaattgcacttttcttgatatgtataaattaaaatctatgcaactgtctgtgcttggggttgcctcatatcacatctataaaaacagcattt

SEQ ID NO: 6035 - DNA, 398 bp, Homo sapiens
gaagagaaagacagctctcagtctgagtaaaaccgtattgagagaagaaaagaggttgaaagaatcttaaagacaaattcagattacatgtaacattggtcaaattgaccagaaaatattcttccaaagaagttcttctctaaacaccaaaagtgcacagctactctcagcatgagaaatacaagtattatgagaaagagggcttattctgacaagaaattcctctctgctgctctcccatctgccggccgttggattgggaatctatactggaacacacctgacaacctccaccagcactttttgatgaagaattggaattcactctattcacatagtagaattatatcagagattgcaagatagctaactgaagagctactatgattcttgggtgg

SEQ ID NO: 6036 - DNA, 226 bp, Homo sapiens
gtggaattggtgattctgaattgtcctttactaatggtgttgagttgctctgtccctattatttgccctaggctttctcctaatgaaggttttcatttgccattcatgtcctgtaatacttcacctccaggaactgtcatggatgtccaaatggctttgcagaaaggaaatgagatgacagtatttaatcgcagcagtagcaaacttttcacatgctaatgtgcag

SEQ ID NO: 6037 - DNA, 157 bp, Homo sapiens
ggtatgttgtctggttctgattggtatcacatgagctgctgagctgaaatcacagtggtttatttggtgtcttgcaggacccagcctttatatgttaatgtttttccctcattggtatgggatacctacaggatgaagttcagacttcatagcaagg

SEQ ID NO: 6038 - DNA, 375 bp, Homo sapiens
  unsure (213): n=A,T,C or G
  unsure (227): n=A,T,C or G
cctgaaggacccagggccctctggctggatgcgtttgcctatcaggacccagaattacttacagacctgtttagggctaggcttggcctctttcttgagctcatctggaggggtgtggcaacactcattcttcatccttattctccctggctgtgggcaacactggtcctcagtgtcaccagatggtcctcctctgtgcccatgacccctcancaaccaaggctggncctgcagaataaatgtgtgtgcccatgatcacacccaggggcacaggccacatacgtttccctgaaaccttgggctccacctccatcccgtccatgtgggagggaacttgggtcccagcagtgtgtctttcagcaccaagtcatgttt

SEQ ID NO: 6039 - DNA, 298 bp, Homo sapiens
caggtcctccatcctgtggaacgtgggaaaactatcttgagtgttggcgtgttctaagtatgacataatagtttaatgtatgataaatcatgggtgtttagacgaaagatttacacatataaattggaggctttagcggtcttagtgtaactaacttttcgtccccttaacccttgatgcctgttctatgggtctctagagcggaaggagcattatactccggaaacattgctggaaaggggttatgagaaattcctctctgtatgctaactccgtaatacaagcgtttgtgtatttt

SEQ ID NO: 6040 - DNA, 216 bp, Homo sapiens
agtgacccgagacccacgtgcccaagactcccggggtctgaacctaaactttgtacacgttactaacataccagttcgcttacctaaaagggctaggtcatatcttaccacgtagacaaacatttcctctagaaaaaaggagcagcagtgatcctcttggcttccttcagccagtgctttaggacatgcaagtccctgtagtaagggaagtctatg

SEQ ID NO: 6041 - DNA, 224 bp, Homo sapiens
  unsure (122): n=A,T,C or G
  unsure (193): n=A,T,C or G
  unsure (223): n=A,T,C or G
gttgttgcctgggctggacgtggttttgtctgctgcgcccgctcttcgcgctctcgtttcattttctgcagcgcgccagcaggatggcccacaagcagatctactactcggacaagtacttngacgaacactacgagtaccggcatgttatgttacccagagaactttccaaacaagtacctaaaactcatcngatgtctgaagaagagtggaggagacttgnc

SEQ ID NO: 6042 - DNA, 558 bp, Homo sapiens; identical to SEQ ID NO: 546
  unsure (488): n=A,T,C or G
  unsure (518): n=A,T,C or G

SEQ ID NO: 6043 - DNA, 374 bp, Homo sapiens; identical to SEQ ID NO: 83

SEQ ID NO: 6044 - DNA, 307 bp, Homo sapiens
  unsure (107): n=A,T,C or G
  unsure (223): n=A,T,C or G
  unsure (285): n=A,T,C or G
ccatttaccagactccgacacaatgggccaccaccagtgtgacagcaggacatcctaatatatggatcttgatttttaagtttcagtatctgaacttcctaaattantaacttttagctgggaaagtatagcatgaaaccagaggttctcagaatgactgtaagatagcttacatttcctctttttgcctttatctccccaactaaaatcaatggggaagaantctgcctatgatctttgaatgagctttttaaggaagaaatattatatattgtttgttaaagnttattgaaataaagaatcattt

SEQ ID NO: 6045 - DNA, 223 bp, Homo sapiens
  unsure (219): n=A,T,C or G
ctgaacgtctgtgggtgagccggggtcccctgggagggtcttcttgcactctgactgcagtcggtaggcactggacgtcagtaaacgaagggaagtcctcaccatatcagacttgggttttttggggaataatgctgccatttctgtaacagctacgtgtatcctctctgagcagggaatataactgtcatgtttattttcttgggctgctcttaaaanctcc

SEQ ID NO: 6046 - DNA, 329 bp, Homo sapiens
  unsure (40): n=A,T,C or G
  unsure (115): n=A,T,C or G
  unsure (123): n=A,T,C or G
  unsure (148): n=A,T,C or G
  unsure (200): n=A,T,C or G
  unsure (255): n=A,T,C or G
  unsure (276): n=A,T,C or G
  unsure (292): n=A,T,C or G
  unsure (313): n=A,T,C or G
  unsure (321): n=A,T,C or G
ccttgcctcagatccaaggtcactcggaagaggccatgtntaccctcaatgacactcatggaggaaatgctgagagaagcattcagatgcatgacacaaggtaagactgccaaanaatcttgntcttgctctcctcattttgttattnggttttatttttaggagttttgagagcaaaatgacaacacccagaaattcantaaatgggactttcccggcagagccaatgaaaggccctattgctatgcaatctgntccaaaaccactcttcaggangatgtcttcactggtnggccccacgcaaagcttcttntgacggantctaagac

SEQ ID NO: 6047 - DNA, 357 bp, Homo sapiens; identical to SEQ ID NO: 84

SEQ ID NO: 6048 - DNA, 202 bp, Homo sapiens
  unsure (132): n=A,T,C or G
  unsure (155): n=A,T,C or G
  unsure (156): n=A,T,C or G
  unsure (166): n=A,T,C or G
  unsure (185): n=A,T,C or G
  unsure (195): n=A,T,C or G
aaaatcagattttctaaactacaattgttttagaacactgtatgaagaacttatctagtcatagttatttgtagtcaggattttaacagcttgcaacaggtaatgttttgaatataaatatctttccaaagngttactaatggcaaagagataannttctaggctnctattcttgctgcttgaantcagaactgntgatgga

SEQ ID NO: 6049 - DNA, 437 bp, Homo sapiens
  unsure (273): n=A,T,C or G
  unsure (353): n=A,T,C or G
  unsure (374): n=A,T,C or G
  unsure (381): n=A,T,C or G
  unsure (408): n=A,T,C or G
ccatgagtgacaggtggcctcttggtgggagaggtggggcagggggaaggcagctcccactagaccagggcagtatttaggggaaggaggcagattggagcagttggctgccaacacctggcctcactcagggagaggggccttgggcctggaagatatctgggtgaggtacccacaccatctgctgcaacctctgttgtatccattatgggctcacgccattcacaggcatgaattgagcacctagtatgtgggaaaacaggggaaacaganatggtacagacatggtctccatccttcgggggctccagtctagttgggggagatcagagaagttccatttgccactctangccaagctaggtaagcggcanagccatnaagcattgtgggagctttcaaggaggnagtgagcccttgcattcacggaagaagga

SEQ ID NO: 6050 - DNA, 130 bp, Homo sapiens
  unsure (101): n=A,T,C or G
aaaatcttgagggattgatctcgcctcatgacagcaagttcaatgtttttgccacctgactgaaccacttccaggagtgccttgatcaccagcttaatggncagatcatctgtttcaatggcttcgtcag

SEQ ID NO: 6051 - DNA, 355 bp, Homo sapiens
  unsure (226): n=A,T,C or G
  unsure (259): n=A,T,C or G
  unsure (312): n=A,T,C or G
  unsure (341): n=A,T,C or G
aaagtcaataaattgttattcgaggaattccatgttgtgatttcttccactgtccatcaaggtcactttagatcctctaaagagctggagtcaaaagatttatcttcaagtttgccctttttaatgaaactgatccagttgtcctgtcagcccataattactttggcttctgcatctcgttttaatatggatatactgatgaagacttcaaaattcaccaagaatntttgggatctaatttcttcaaccaatttacttnaggggcctttttactgtaggtggtggggatctacctggttctcaattttgacncccctctcaacatgaatgagtgtcaaatnacattcattcctaa

SEQ ID NO: 6052 - DNA, 129 bp, Homo sapiens
  unsure (99): n=A,T,C or G
  unsure (125): n=A,T,C or G
  unsure (128): n=A,T,C or G
ccttgccgtccttctcgtggaacccttcgggaccaaagaaggctccacactgtgcacataagaagtgttcagggtgccacgtccggtcaagggctgtcnccactttattccaaagatggggccgntgna

SEQ ID NO: 6053 - DNA, 102 bp, Homo sapiens
  unsure (88): n=A,T,C or G
ccagcccgaagtcgatgatgtggatggcatgctgccgcttggtccccgggcggcccaccaggaagttctcgggcttcacgtcccggtngattaggctcttgg

SEQ ID NO: 6054 - DNA, 118 bp, Homo sapiens
  unsure (104): n=A,T,C or G
  unsure (107): n=A,T,C or G
ctgttgatctacctcctgaatttattcacctttatatatcaaattgcatctctacttgtgaacagattaaggataaatatatgcagaatcggttggtgcgtctngtntgtgagtctct

SEQ ID NO: 6055 - DNA, 372 bp, Homo sapiens; identical to SEQ ID NO: 85

SEQ ID NO: 6056 - DNA, 268 bp, Homo sapiens
aataagtagaaaccaaagcacagctaaaaattccactgctcagtttatacactaacagttctagcgtttgcagtgttaaatactttaggctccagatattatcacctttgatataatcgccttggatgattagttttctgttggagaaacttagtatcttttactcttcattactctgtattgctgaattgaatcctatcctttgtgctcaacttttgtgtgatcttaaagtgagctttatcattctaaacgaatctgtgtctacttt

SEQ ID NO: 6057 - DNA, 202 bp, Homo sapiens
ccttctttagctctggaaagaataaggctgccttggaggccatcgagcgtgccgctttcttcgtggccctggatgaggaatcctactcctatgaccccgaagatgaggccagcctcagcctctatggcaaggccctgctacatggcaactgctacaacaggtggtttgacaaatccttcactctcatttccttcaagaatgg

SEQ ID NO: 6058 - DNA, 125 bp, Homo sapiens
cctcaatgcctacctggaaggttcatggcatgaagctttgctgtattatgttttagcagcagaaactggaattgaagtgtcacagacaaatttagcacacatctgtgaggagaggccagacctgg

SEQ ID NO: 6059 - DNA, 250 bp, Homo sapiens
  unsure (177): n=A,T,C or G
  unsure (223): n=A,T,C or G
ccttccttgccaggacctcgagtttgttcagttccaccccacaggcacatatggtgctggttgtctcattacggaaggatgtcgtggagagggaggcattctcattaacagtcaaggcgaaaggtttatggagcgatacgcccccaccgcgaaggacctggcgtctagagatgtggngtctcggtggatgactctggagatccgcgaaggaagaggctgtggncctgagaaagatcacgtctacctgcag

SEQ ID NO: 6060 - DNA, 116 bp, Homo sapiens
  unsure (1): n=A,T,C or G
  unsure (7): n=A,T,C or G
  unsure (112): n=A,T,C or G
ncgcggncgaggtccagccgcacatactgtcatgaactaggtagatctgccccaagggagatggctgcatttgaaattttctgtaacaccctaatgcttagcccattaaaanctca

SEQ ID NO: 6061 - DNA, 129 bp, Homo sapiens
  unsure (6): n=A,T,C or G
  unsure (10): n=A,T,C or G
  unsure (14): n=A,T,C or G
  unsure (47): n=A,T,C or G
  unsure (95): n=A,T,C or G
  unsure (98): n=A,T,C or G
  unsure (118): n=A,T,C or G
gcgccngggnaggncctgcatggctgccagccgggctccgtgtctgnggataagaagggctacatctttctgacccttcgagaagtcaacaaggnggngatcctggacccgaaggggnccctccttgga

SEQ ID NO: 6062 - DNA, 111 bp, Homo sapiens; identical to SEQ ID NO: 86
  unsure (26): n=A,T,C or G
  unsure (38): n=A,T,C or G
  unsure (42): n=A,T,C or G
  unsure (60): n=A,T,C or G
  unsure (62): n=A,T,C or G
  unsure (67): n=A,T,C or G
  unsure (82): n=A,T,C or G
  unsure (90): n=A,T,C or G
  unsure (92): n=A,T,C or G
  unsure (106): n=A,T,C or G
  unsure (111): n=A,T,C or G

SEQ ID NO: 6063 - DNA, 419 bp, Homo sapiens
aaattattatcttcttaacagtttagtcccacctcttacttcctgcctcagtctgctttctctactgtctggattaattaggcagcctgctataaagttaaagtcacacatttctattttgcaaacactgtgattactctttgctttgtagtttgctttgctttgtagggttctgcttttaagtttttctctttttcagacaaattactgataaaaatgatattgctctatatgtaatatatcctgaaagcattattttttgttgaataggaaataaaattaatgaagacagaggctagaaagcatccattaattaatgagacacacttaactacttatctctaaaccatctatgtgaatatttgtaaaaataatgaatggactcatcttagttctgtatataaatatattttctttct

SEQ ID NO: 6064 - DNA, 228 bp, Homo sapiens
  unsure (219): n=A,T,C or G
aaaatttcttagaaaacaatggaatgagaatttaagcctcaaatttgaacatgtggcttgaattaagaagaaaattatggcatatattaaaagcaggcttctatgaaagactcaaaaagctgcctgggaggcagatggaacttgagcctgtcaagaggcaaaggaatccatgtagtagatatcctctgcttaaaaactcactacggaggagaattaagncctactttt

SEQ ID NO: 6065 - DNA, 193 bp, Homo sapiens
ccaactggagacttactttaccttaaccatgtaaagtatccttaccgtattttttatgtgtacagtgttgtagaatatcagccacctcttaaaagtatcaatcttaaaaagagccatggaaggtaaaagtatgaaaatcttgataacaaaagctttcaatacaaaaacacttattgtacacttatttttattt

SEQ ID NO: 6066 - DNA, 298 bp, Homo sapiens
ctgagacttgaaccttcctttcaccgcgggactgggccaactctgtctgtccgagggtgagtagcacaggacagcactcttccatctgtgcacggccgggaactgatgggggtcgacgtctgcacattcaagagcggccaaaacatcctgatcgagttttgatggctcctctccaaaaaggaagagccgcctggccggttccctggtgacctcgagctgatcctcgtgcctggggctgctgggactcaaggacattttagcgatcctggctgacatttcactttctgtcctcctgtgg

SEQ ID NO: 6067 - DNA, 167 bp, Homo sapiens
aaagatgctcccttgctttttataattcctaactgtaaaatataattttagtacagaacaaacaaattctccttggttggtcacatcattcattattgaaagggaaacttagtatcaaaagaaacaaaacactgaaataaataactaagtaatttactgaaaggcag

SEQ ID NO: 6068 - DNA, 241 bp, Homo sapiens
  unsure (155): n=A,T,C or G
  unsure (156): n=A,T,C or G
  unsure (189): n=A,T,C or G
  unsure (215): n=A,T,C or G
  unsure (220): n=A,T,C or G
ccttaaaaattatgcacgaccaaaaagaatgatttggtgagagatgtgtagctgattgacaattttagtgtgaattcatattcatttaacccagcagcaatctacataagctatgctttttcccgcctgtatttatgtttcttagcttataaagnnccaatatattatatcttttgttgctttggcagntttaatttagagctctgcgttcacanagatnccacctatagcaaaaactatc

SEQ ID NO: 6069 - DNA, 364 bp, Homo sapiens
ttgatgtatctgagcaggttgctccacaggtagctctaggagggctggcgacttagaggtggggagcagagaattctcttatccaacatcaacatcttggtcagatttgaactcttcaatctcttgcactcaaagcttgttaagatagttaagcgtgcataagttaacttccaatttacatactctgcttagaatttgggggaaaatttagaaatataattgacaggattattggaaatttgttataatgaatgaaacattttgtcatataagattcatatttacttcttatacatttgataaagtaaggcatggttgtggttaatctggtttatttttgttccacaagttaaataaatcataa

SEQ ID NO: 6070 - DNA, 178 bp, Homo sapiens
  unsure (117): n=A,T,C or G
  unsure (129): n=A,T,C or G
  unsure (131): n=A,T,C or G
  unsure (174): n=A,T,C or G
aaaatgtttaattattttgaaatgtatagggtattaaatacaagcttctaaaattttcagtatctatattggctttctctaacagctctacagcaaagtttgacatgttttttgtgngtgtcatgtatngnaagctgtaatatctgtaggagtgagtcggacattctaaattancagt

SEQ ID NO: 6071 - DNA, 320 bp, Homo sapiens
  unsure (206): n=A,T,C or G
  unsure (208): n=A,T,C or G
  unsure (210): n=A,T,C or G
  unsure (240): n=A,T,C or G
ccttattgccaggagggagggttttggttgctggcgcttgtgtataaaggggcaagagcagctcctttggactattcctgggaggactctgatgcagggcgtctgttgctcccctgggtcacctcctccctgctcgctgacatctggggctttgaccctttcttttttaatctacttttgctaagatgcatttaataaaaaaaaanananagagagagaggtgtgagggacaaaatgcanacccatttcccttgcctcataggcttctgggatgtcatcacctccagtttgttggttttgtttccaactgttaataaagc

SEQ ID NO: 6072 - DNA, 362 bp, Homo sapiens
aaaaatgttttcccgtgggtaattttctattatatattttcatatgggcaaagggaaaaaatgataaatcctctgtaatcacaaaccccaatttcgttttgtttattcagcttctaaaatattgaacacccagacttttaattcaacctttaagaaccttatcatttatgtttcagtagatatcaaagtaatccatgtttgtgtcaaatgatcatagaaaataaatagaagagacagtgaagcaagtaaaaagaaaagcattgttttaatttgtttgcattaatttttttcatttgtcaaaatgcttcttttgttgccacagtaaagaacagtttttattgttttgtaagtaaaattacgta

SEQ ID NO: 6073 - DNA, 385 bp, Homo sapiens
  unsure (354): n=A,T,C or G
ccattacatcctctttttaatttacataatacagatacttgagaaagttgttgtggtgttgtatgccaagaaaattctttttattggtgcctatattgtaacaattatttttaatgcattgtattttgaagtaacggttcagttaaatttttcacctgctgtgtaactgaaacacaattacagtttataatcatctgtagaagtctggagataattttgcaactcatgttatgggttaaatgaatatttttgtaaaagtaaaagcaacaaatttataaattgattatttgaaactttacaacacaattgcatcccaaatacaaattgtattgcttattcattatagctattcgncctgtaatctgtttctaggtgaagcatactc

SEQ ID NO: 6074 - DNA, 357 bp, Homo sapiens
aaattagcacagaatttataattacccaatcagcattgacatagatgccatcaggtatgcaaagattaacaaaattctattaccaaccttagaggaaaaaaacttaatgacatacagaaatactggcaaatttaagctagaattagctccaggacattttatcttattttcacattaaaagaatagattactagatatcagcagaaatgctgttaaagctattttttactaatagttgttcatattaatgaaacaaaagatcaatagtctctgagctaaatttcacaaaatgaaatcagtgtcttctgatttaactttcaggagtaagaaagggcaaaacccaagcaccatactttc

SEQ ID NO: 6075 - DNA, 226 bp, Homo sapiens
aaataacaaactatacaaataaaaaggagcagaaataatatggaatgtttttgacgaaaacaaacttatggattcaataaataatataaaatgcctttgtgctaaaatagaactcttgtttcttatatatatatagttcagtgatctttatgctatccagaaaaagccagatctattataattaaacatagaaaaataccatttaacaataaaactaaaaaaatgg

SEQ ID NO: 6076 - DNA, 254 bp, Homo sapiens; identical to SEQ ID NO: 4835

SEQ ID NO: 6077 - DNA, 410 bp, Homo sapiens
aaagtatttacccaaagaactcataaaaaggtcaatttggtaaaaggacgttttgacccaagagcatctaatatttaagcttattttattggataagcatatctcttgtccatcacaagttatagaaaagttatatacgactaaaagaaaaagttatctactgtaattataggaagttgtcacaacaggaattcagctcaagaacttcttgcaattactgctacaacgtctataaatgggaaaagcaagcattaaaatagattaataaaatataaaattaagactggaaaatccagagacaagctgtatccttagaagaataaatagttaaaattattcagtaagctgacgtatttaaccattactgggcctgtaaaaaatgcattaaaattacattacaaatagttttt

SEQ ID NO: 6078 - DNA, 143 bp, Homo sapiens
  unsure (127): n=A,T,C or G
aaaatgtgtctttctttgggagagaatcattttgttctttactaacaataatttgaaaattggtaatttaatatcttgtgaatatgaaaatattatggtatagatcagcttctaggagaagttaagngtagcatgatttcttg

SEQ ID NO: 6079 - DNA, 101 bp, Homo sapiens
  unsure (93): n=A,T,C or G
  unsure (96): n=A,T,C or G
aaatctataatctggttcaagtgcaaatcaggtgctttctgttagtccttccaaaaaaggcatttttaatatttttggcacaaatgaaatgtnatnatgcc

SEQ ID NO: 6080 - DNA, 399 bp, Homo sapiens
  unsure (219): n=A,T,C or G
  unsure (354): n=A,T,C or G
  unsure (376): n=A,T,C or G
ccaaaatgatggatcctagggttcttcatcacatgggtggtatggcaggacttcagtcaatgatgaggcagtttcaacagggtgctgctggcaacatgaaaggcatgatgggattcaataatatgtaaagaaaatgccttaatataaactgactcagttgaatacctaatttgctgagacctcagcgtttcccttctttttgcgaattggggggaaagngtatttttcttgcttatcatgcactctttccttttcttctcgcccgcttttcccctccttttctttttccttccttctttcctccctttaatataagggagaaatacatggttttttgtggaaatcattatatgnttgctttagattttcttctgtntttaccatcataacacttaagtt

SEQ ID NO: 6081 - DNA, 260 bp, Homo sapiens
  unsure (172): n=A,T,C or G
  unsure (255): n=A,T,C or G
ccttttatctacttctttgcatgtaaagggtataagagaaaggttatgaggatgctgaaacggcaagtcagtgtatcgatttctagtgctgtgaagtcagcccctgaagaaaattcacgtgaaatgacagaaacgcagatgatgatacattccaagtcttcaaatggaaagngaaatggattgtattttggtttatagtgacgtaaactgtatgacaaactttgcaggacttcccttataaagcaaaataattgntcagc

SEQ ID NO: 6082 - DNA, 352 bp, Homo sapiens
  unsure (1): n=A,T,C or G
  unsure (7): n=A,T,C or G
  unsure (10): n=A,T,C or G
nctgaantgnggcttgcataaataactgtttattccaaaatatttacatagttactatcagtagttattagactctaaaattggcatatttgaggaccatagtttcttgttaacatatggataactatttctaatatgaaatatgcttatattggctataagcacttggaattgtactgggttttctgtaaagttttagaaactagctacataagtactttgatactgctcatgctgacttaaaacactagcagtaaaacgctgtaaactgtaacattaaattgaatgaccattacttttattaatgatctttcttaaatattctatattttaatggatctactgacattag

SEQ ID NO: 6083 - DNA, 213 bp, Homo sapiens
  unsure (128): n=A,T,C or G
  unsure (176): n=A,T,C or G
cctagataggggattgtgcggtgtgtgatgctagggtagaatccgagtatgttggagaaataaaatgtgcatagtggggattttattttaagtttgttggttaggtagttgaggtctagggctgttanaagtcctatgaaagtgacagcgagggctgtgagttttaggtagagggngattgttgtttggaagggggatgctgggggaaatgtt

SEQ ID NO: 6084 - DNA, 359 bp, Homo sapiens
  unsure (327): n=A,T,C or G
aaataactttcttaaccccgcccattaagatcacagtaaacatacaataatttttattatggaaattaatctttacatacaaaatcagctacgtaattttacttacaaaacaataaaaactgttctttactgtggcaacaaaagaagcattttgacaaatgaaaaaaattaatgcaaacaaattaaaacaatgcttttctttttacttgcttcactgtctcttctatttattttccatgatcatttgacacaaacatggattactttgatatctactgaaacataaatgataaggttcttaaaggttgaattaaaagtctgggtgcncaatattttacaagctgaataaacaaaacgaa

SEQ ID NO: 6085 - DNA, 275 bp, Homo sapiens
aaatagaaaacagtatattgaaagtggtgggtttgatctttttatttagaaacccacaaaatcagaaacacagtacaaataaaacagaaatcaaactataagttgacctttagttcctaaaaagaaacatatttcaaaagcaatggaatctagaattcttataacatgaataacaaaatgtacagcaagcctatgtagttcaattaatatataaggaaaagggaagggtctttctttatgaaaccaagcattataaagtttttactgtaggtagt

SEQ ID NO: 6086 - DNA, 310 bp, Homo sapiens
  unsure (184): n=A,T,C or G
  unsure (201): n=A,T,C or G
  unsure (213): n=A,T,C or G
  unsure (217): n=A,T,C or G
  unsure (260): n=A,T,C or G
  unsure (281): n=A,T,C or G
  unsure (308): n=A,T,C or G
ctgtgcaagaaaaattaaatgaaatagtagatcagataaaaactagaagagaagaagaaaagaaacaaaaagaaaaagaagcagaagaagctgaaaagcaattattccatggtactccagttacaattgagaatttcttaaattggaaagccaagtttgatgcagaactcttggaaattaaaangaaaaggatgaaagaanaagaacatgcangaanaaataggattagtgtgggaaactctatttgaaacagatcatantcttgacacatctgatatccngttcttggaggatgctggaaacaacgngg

SEQ ID NO: 6087 - DNA, 332 bp, Homo sapiens
  unsure (328): n=A,T,C or G
aaaaaaagaaaaataaaataaagtgttttgattatttagggctgacttacatttcagtatgtgacaaaaattcaaacccaaatgcatctagctcactcagtttcagacaggtcctatgttcagcccctaaacgaatggcacaatgccaccaattttgggattcctgagtttggttcccttaagttctcagagttttcccaactctcaaaaccaaagcatcatgggagtgacagggccactggcaagactttttgccagtcagcctagttcttcttttaagatgcagtagtctcaaagcttaaagtcagaaaatcttgcaataccagantaac

SEQ ID NO: 6088 - DNA, 459 bp, Homo sapiens
aaatgcattcttcacaagtaattcagcatatatttttatatcatgtttacttatgcttaagaattaaagcaagtatatttattactctgatggaaatatgggaaatctctcattcatgcaatatacagggataatattcaagcgaagggaaaattcccgctttttatttttgtaaatgtatccatatataatcatcgacatgacagatgaggaaacccatgaagtttcccactagtcagatatacattttcacttcatcagaagcacctgatatctacagctaatttataattagatactgtttcaatgaaaccaaaatgagccctacaagttcctataaacaaaagcttccaatgtactaggacagtcagtaattaatgcatcattcagaggattatggctgttccttaagaagtgcaagttcaaactgtcaacaccagaggtaatcattttatatta

SEQ ID NO: 6089 - DNA, 242 bp, Homo sapiens
  unsure (206): n=A,T,C or G
  unsure (229): n=A,T,C or G
cccaacttgcccttcaagttctacttcagtttgataaggctataaatgcagcactggctcagagggtcaggaacagagtcaatttcaggggctctctaaatacgtacagattctgcgataatgtgtggacttttgtactgaatgatgttgaattcagagaggtgacagaacttattaaagtggataaagtgaaaattgtagcctgngatggtaaaaatactgggctccnatactacagaatg

SEQ ID NO: 6090 - DNA, 204 bp, Homo sapiens
  unsure (192): n=A,T,C or G
  unsure (198): n=A,T,C or G
  unsure (201): n=A,T,C or G
aaataaataaatagctagactggcgactgattcttcagcaaaaatattttatgatccagcagattattcactgatttgacatagtctggctgtacccaggaatggagcctgcacggtgaatggctttgtatagaacctctttgtctacaccattatgtgcgctgataagcgttcatggaacgcgttgaaatngtaatnatncct

SEQ ID NO: 6091 - DNA, 342 bp, Homo sapiens
gtatcactctaatataatatggatcagagcatttattttggggaggaaaacagtggtgattaccggcattttattaaacttaaaactttgtagaaagcaaacaaaattgttcttgggagaaaatcaacttttagattaaaaaaattttaagtatctaggagtatttaaatccttttcccataaataaaagtacagttttcttggtggcagaatgaaaatcagcaacttctagcatatagactatataatcagattgacagcatatagaatatattatcagacaagatgaggaggtcaaaagttactattgctcataatgacttacaggctaaaattagtttt

SEQ ID NO: 6092 - DNA, 294 bp, Homo sapiens
  unsure (230): n=A,T,C or G
gtacaaaactttttatatcaaaaggctttgcacatttctatatgagtgggtttactggtaaattatgttattttttacaactaattttgtactctcagaatgtttgtcatatgcttcttgcaatgcatattttttaatctcaaacgtttcaataaaaccatttttcagatataaagagaattacttcaaattgagtaattcagaaaaactcaagatttaagttaaaaagnggtttggacttgggaacaggactttatacctcttttactgtaacaagtactcattaaaggaaat

SEQ ID NO: 6093 - DNA, 232 bp, Homo sapiens
  unsure (170): n=A,T,C or G
  unsure (229): n=A,T,C or G
caggtaaagtaattcgtttaataatagatgtgtttttagaggaaatgctgttacttggaattaattttccagttatacagtcttctataacttactaataatattctatatgtactttatgtaatttccctaaaaagaatgaactaccactacactatggtgttaaaccnaaatatacggaaaataaacactaactgctgcttatggataaatgctgcaactacttgtnatg

SEQ ID NO: 6094 - DNA, 295 bp, Homo sapiens
  unsure (217): n=A,T,C or G
  unsure (234): n=A,T,C or G
  unsure (235): n=A,T,C or G
ctgtaaggaggcggcagacggctaccagtgctgtatgatggcgcagtacaaccggcacgacagccccgaagatgtgaagcgacgagccatggccgaccctgaggtgcagcagatcatgagtgacccagtcatgcgccttatcctggaacagatgcagaaggacccccaggcactcagcgaacacttaaagaatcctgtaatagcacagaagatccanaagctgatggatgtggnnctgattgcaattcggtgatgacttgttcatccccccttcccttcgccctcatgtggaaag

SEQ ID NO: 6095 - DNA, 234 bp, Homo sapiens
  unsure (208): n=A,T,C or G
aaaaaattaactaataaaagcttttatatttaagaactgcaagtgtttcaaaactatgctgttttgtgttgttatagttgtaacatatttctcaattttcctgtttttcttttagtttattgacaagactacctggtcggcctaaattcacattttcattcagtttttgggcatttgagatcaaagagtaagtatggtttctacaagntacttcatttttctacttatcttttt

SEQ ID NO: 6096 - DNA, 396 bp, Homo sapiens
ctgcgctgcacagcctgggcagcaggctgagtatgggctcctcactcccacctcctggccttcaaggccctacttgttgccccagacagccatctttgagaacacaggtcttgggaggaagcggctggacttcatgtaggcagagatcttctccaagccctcaaagcgggagatgaagtccttcagatttgggaaggcgtccaagcagttgggctcaaatatacggtggaggtcaaggacatcatagacgagaaaatctacaaaagtgatcttgtttcctgcaaaccatggccgcttccccagaaactctgagtagagctttagcttttcagggagttcctccaagtactttggcttcagtttctcaaattctggattgtagcagatcatgcccag

SEQ ID NO: 6097 - DNA, 147 bp, Homo sapiens
  unsure (78): n=A,T,C or G
  unsure (82): n=A,T,C or G
  unsure (89): n=A,T,C or G
  unsure (122): n=A,T,C or G
  unsure (137): n=A,T,C or G
  unsure (139): n=A,T,C or G
aaaaaaattaaatagtattaatttactaaatatttaggagataacagtgcattaagggttttttttttttatataatncatncatatcncccctttgcagggatagcataaaaaagtaagtntggccttaggtccancncgtttttt

SEQ ID NO: 6098 - DNA, 198 bp, Homo sapiens
  unsure (193): n=A,T,C or G
ccatttaccagactccgacacaatgggccaccaccagtgtgacagcaggacatcctaatatatggatcttgatttttaagtttcagtatctgaacttcgtaaattagtaacttttagctgggaaagtatagcatgaaaccagaggttctcagaatgactgtaagatagcttacatttcctctttttgcctttntctcc

SEQ ID NO: 6099 - DNA, 162 bp, Homo sapiens
  unsure (128): n=A,T,C or G
  unsure (132): n=A,T,C or G
  unsure (136): n=A,T,C or G
  unsure (154): n=A,T,C or G
  unsure (157): n=A,T,C or G
aaagaaaccaccaccaacaacaaaacaaccaaaaaccatgttttatgtcaaagctctgtagcacagagaatgtggtgtcacagatacatcgccgagagaggtttctttctttcttttttttttttganacanagtntggttttgtttcccaggntgnagtgc

SEQ ID NO: 6100 - DNA, 271 bp, Homo sapiens
  unsure (232): n=A,T,C or G
  unsure (245): n=A,T,C or G
  unsure (260): n=A,T,C or G
aaacttgtgataggcatatctatgaaacctttgtaaatttagtttattgctttaccattattttactaggtaaaattagagaacagattttgttctctaatttttaagccttatttacatatgcagaaacagcttaaatattttgactagattagacaaacagttaatagatccaccattaggaatcaatatattatgcataataaacatcctttttctttcctgaaatttnttttagaaataancttatttttgcttgntatgttctgaa

SEQ ID NO: 6101 - DNA, 169 bp, Homo sapiens
gaggttgaggttgcagtgaaccatgatcacaccactgcattctagcctgggtgacagagtgagaccctctccctcctaaaaaaatccttaagaaatatattgatgcttggttcctttggtcagaattttgatttaaggtgttgggagtgtagcacagatgttggaataa

SEQ ID NO: 6102 - DNA, 265 bp, Homo sapiens
aaaggttattcactatatgaaaacagaaagggaacaattacaacaatgaaattgttttaacttttttaaatctgattctaatgtgtattgacatatatttaattatataaaagactgtgggaaaggggcattaacagtactctagaagagtaaaggataaaaatccctctttttcccctagcttccagtttgacaagagggaatacttaatcgaatcctgtccacaaaaacagctaacagtactgtgctttgaaaaaaaaaaaaa

SEQ ID NO: 6103 - DNA, 317 bp, Homo sapiens
ccaaggaatagaagctctagacctcccttatttctatcgtgaaaacagaggtatatccaagtgagggactacaacagtaataaagggaaaaaagtatttaattccaaaataaaattgaaaataacctcctgtctcagcctctttttgggaatatctagaaggagtggaaaaccatctctggctatgagacttgtatcactacccctttctccctggggcgacaggtagaggctgttgtaaccattttgaaccttgtcctggagtagcttgttgcttttcagttaaagagcttgagtgagcctgtctgggcctctggc

SEQ ID NO: 6104 - DNA, 381 bp, Homo sapiens
  unsure (275): n=A,T,C or G
  unsure (309): n=A,T,C or G
  unsure (330): n=A,T,C or G
  unsure (359): n=A,T,C or G
ccacttgtgtgggtcctcacaagcaaagagagcactaaacttgacattgggggtccaccactccaactttgctttctgaaggttttggtgtacattgagccccagaaggaaaggagagtatctgtgagtgggggcctcccttgaccccagtacgaagtctatgccctgaatccccagagtagcccttcctggtgcccaactggcctggggacaaacagcgtccactacatctaggactgccggctaagtggacacacttcttgacctcctaccangaactttggtaaaagctagctttggggaaggggntgggtgtaaatatgagagggnggagggagaccatacctgcccgggcgggncaagggcgaattccacacactg

SEQ ID NO: 6105 - DNA, 212 bp, Homo sapiens; identical to SEQ ID NO: 4977

SEQ ID NO: 6106 - DNA, 183 bp, Homo sapiens
  unsure (179): n=A,T,C or G
  unsure (180): n=A,T,C or G
  unsure (183): n=A,T,C or G
ccattattccatgtgcttaaatgataatttccttattcagtttcagaagaaaaagaatgaaattgggtaactgtcattgcgttagctttatgttgaattgggaaattgtggcataaagcttaaattcgtgtttatcaaatgtgaaccatagtagtataatgctgctttgtatataatgnnagn

SEQ ID NO: 6107 - DNA, 262 bp, Homo sapiens
ccactgtctgcagcatgggcagaaagtgctcaaagtccagcaccttcacattcatctcatcactcttggggttccccaggaccttgagcacctcggcgttggtagggttctggcccagggccctcatcacatccccacactggctgtacaggatcttgccatcacctgttcggtcaaacagctggaagcctccttgaactctgcggtctggtcttcggtgaagtcacacatcttgactgctcagctctccgggaccttttcc

SEQ ID NO: 6108 - DNA, 243 bp, Homo sapiens
ccatcttgttgctgcttggttagatcatatagctaatgaattaggcaggggagctattttttgaagatgatgaactaaatgttgaagacaagtttgagatctgtaaaatgtgattttttacttccacttataatacttgtgattggggaggtttgtggaaattcaattatgatgaaaaacctatcttttttgtaatgttggcatacttggggaatttagtgggcaaatacattccccagcagg

SEQ ID NO: 6109 - DNA, 362 bp, Homo sapiens
  unsure (362): n=A,T,C or G
aaatatatgcttttctagaatttgatgtttgaccatttatgacttaattaccagagagccagtaaattaggacagtgtttcaacaagcctaggctatctcgtaagttgaaaaatatcccactatagttgcttcatgagtatgaagtaagatggcctctgatttacactggttcaatttacaaattttcaactttatgataggtttatcagggtactaaatgcatttcaacttgatagtttcaacttatgataggtttaccaggatgtagtcccactgttgaggagcatctatttaggggttaattactttagtaataagtggaaagtaagataccttgagtaatgtttgcctataaaattgn

SEQ ID NO: 6110 - DNA, 134 bp, Homo sapiens
  unsure (26): n=A,T,C or G
  unsure (119): n=A,T,C or G
  unsure (123): n=A,T,C or G
  unsure (128): n=A,T,C or G
aaaaattactaaaaggtttactttgntcattaataaaacatttaacaattcaaattatatgcaccttttacctagttgaaaaaaatacacattcctggtttcacattataccaactgantaanctgantcctgt

SEQ ID NO: 6111 - DNA, 362 bp, Homo sapiens
ctgttctcatacagaaagtaaatcaagacgaaatatggaaaacatttatttcctttccttcaaaatttaacttacattccactttaatagctgttgaaggttaattaaaatgcagcaaagtataactacgttacgcaagtgacttcagttattttaatgtgagaaaaatcagactatggtatcttacgagtcattatagaaatgttcatcattaaaaagcatttattaggcactgaactgcatgatgttaccttaagtcatttacaaaagaattcctggtccatgtgatgtgaatgggcttggcactttctccataaattttgtagatgactatttgtaagattatacacttaataggtttt

SEQ ID NO: 6112 - DNA, 443 bp, Homo sapiens
  unsure (308): n=A,T,C or G
  unsure (342): n=A,T,C or G
  unsure (362): n=A,T,C or G
  unsure (381): n=A,T,C or G
  unsure (429): n=A,T,C or G
  unsure (442): n=A,T,C or G
cctccgtggcagcagaagatcttttcgtccactatggccgcgatgggcaggcagttgaagcagtcagtgaaggttttccacagtttgatgttgtagcgtctcttgcactcatcgtagaaaccatagatgcggttgatgctggcacactcgtggttcccacggagcaggaagaagttctcggggtacttgatcttataggccagcagcaggcagatggtctccaaggactgcttgcccctgtccacatagtcccccagaaagaggtagttgctctcgggagggaaaccgccatactcaaatagtcgcanaaggtcgtagtactggccgtgtatgtcaccgcanatcttgaggggtgcctccanctccagaagaatgggctgnctcacaaaaatctcccgggatttcaggcacagaccgcggatctcgttntctgtagacctcng

SEQ ID NO: 6113 - DNA, 466 bp, Homo sapiens
  unsure (364): n=A,T,C or G
  unsure (461): n=A,T,C or G
ctgctgacagttctttggtggaaaagtaagttgcgtacttacccaagctgcccaaatgattatcaagccaagtttgtttttcaaaaataggttttaagatacaccaaagaaactatacaatacaaaaatttaacaatgaagttaaagtatatagcaaaagccaaatatgacaacacacatgtataatgtagaaaagaatcctttcagtcctagaaaactaaaatggggagaacttactgaagggtaacatacataaaatgagtactaatagcaaggaataatcctaaacattttcccaataaactgactaagcctcaaaaggacagcttaggaaaatgattaacatgcagtttttctttttttnctagccaattcagttctacttagataaatctgggttgccaatcaatacatatataaattaatttttttctgctcaattctaccattttttctttttnacctt

SEQ ID NO: 6114 - DNA, 231 bp, Homo sapiens
ctgcttgcctgcaaagatgagcctctgctggtcgggggggatgccttctttatcttggatcttggccttcacattttcgatggtgtcactgggctccacctccagagtgatggtcttgccggtcagggtcttcacgaagatctgcataccacctctcagacgcaggaccaggtgcaggggtcgactccttcttggatgttgtaagtcagaaagagtgcggccatcttccag

SEQ ID NO: 6115 - DNA, 296 bp, Homo sapiens
  unsure (292): n=A,T,C or G
aaattttctcacttaggacttttcaaagccatctcaaaggagcttcctcaaaacatttaatgttggcatcaccccacaagtactcagaaataagtgttaaaatagaaatccaatccagtaatgggaaactgacttagattatcttatttgtttgtatatttatttggcatctatctctcttattcactgccctattttcaacatctacaatagtgcttagtaatgaatacacatgcagtacacaaaggtgctaacacaatacatgactaatgatgagggctatgcacatttntaca

SEQ ID NO: 6116 - DNA, 357 bp, Homo sapiens; identical to SEQ ID NO: 5688

SEQ ID NO: 6117 - DNA, 413 bp, Homo sapiens
  unsure (248): n=A,T,C or G
gatcaaaacccaccatgccccaggctcagcagggagctgctggatgagaaagggcctgaagtcttgcaggactcactggatagatgttattcaactccttcaggttgtcttgaactgactgactcatgccagccctacagaagtgccttttacatattggagcaacagtgtgttggcttggctgttgacatggatgaaattgaaaagtaccaagaagtggaagaagaccaggacccatcatgccccangctcagcagggagctgctggctgagaaagagcctgaagtcttgcaggacccactggatagatgttattcgactccttcaggttatcttgaactgcccgacttaggccagccctacagcagtgcttgtttactcattggaggaacagtaccttggcttggctcttg

SEQ ID NO: 6118 - DNA, 403 bp, Homo sapiens
  unsure (9): n=A,T,C or G
  unsure (11): n=A,T,C or G
  unsure (29): n=A,T,C or G
  unsure (59): n=A,T,C or G
  unsure (103): n=A,T,C or G
  unsure (117): n=A,T,C or G
  unsure (136): n=A,T,C or G
  unsure (141): n=A,T,C or G
  unsure (146): n=A,T,C or G
  unsure (174): n=A,T,C or G
  unsure (226): n=A,T,C or G
  unsure (258): n=A,T,C or G
  unsure (271): n=A,T,C or G
  unsure (273): n=A,T,C or G
gatatctgngntaccagccttgtctcggncacctcaaggataatcactaaattctgccnaaaggactgaggaacggtgcctggaaaagggcaagaatatcacngcatgggcatgagnagcttgaaactgctgaagnatgtnctgtntttcttcaacttgctcttttggatctgnggctgctgcattttgggctttgggatctacctgctgatccacaacaacttcngagtgctcttccataacctcccctccctcacnctgggcaatgtgntngtcatcgtgggctctattatcatggtagatgccttcccgggctgcatgggctctatcaaggaaaacaagagtctgcttatgtcgctcttcatcctgctgctgattatcctccctgctgaggtgaccttgg

SEQ ID NO: 6119 - DNA, 294 bp, Homo sapiens
aagctgctccacatctaccaacaatcccggaaggacaactccaattccctgcaggtgaaaacgtaccacctggtcaggtactggatctccgccttcccagcggagtttgacttgaacccggagttggctgagcagatcaaggagctgaaggctctgctagaccaagaagggaaccgacggcacagcagcctaatcgacatagacagcgtccctacctacaagtggaagcggcaggtgactcagcggaaccctgtgggacagaaaaagcgcaagatgtccctgttgtttgaccac

SEQ ID NO: 6120 - DNA, 297 bp, Homo sapiens
ctgcgaatggctgggctccaggcgcttgaagacattatcaagaagtttgcgtctgtgcctgagccagaatttccaggtcatgtgatactggagcagtatcaggctaatgtgggagctgctctaagaccagccttttcacaagatacaccatcagatataatagcgaaagcttgccaggtatgtagtacatggataggaagtggagttgtcagtgatctcaatgatctccgtcgagtacacaatcttcttgtttcttctctggacaaagttcaggctggaaaaggatcttccagccag

SEQ ID NO: 6121 - DNA, 173 bp, Homo sapiens
ctggcttgcctgctggcctgcttcctggagataggatgctcagacccaccgctgctcttcaggggtcgtgggaggaattaatgcacttccttctgtcccccaatctctgtccctttacgtgtctctggagctgagcaggtattctttttctttcttcatctcagtagagctgg

SEQ ID NO: 6122 - DNA, 309 bp, Homo sapiens
tttttttgttctaattttaatagggaaggaagaagttacagctcagtgcaccatgaagttgagacagagatggagacacctcagccccacctctctgcaacaggaaagatgattggggagggagcacaggtcagcgtgggaagagggtcatggtggacatgggggtggggtggtctccccacctcctcacattatgcctacatgaacacagacacatgcaggtgcctttgcagaaacaaagtcagggttcttcaagtcacaaagggaagggcaggaacaactcttgcctctcagtcccacacaaggcag

SEQ ID NO: 6123 - DNA, 235 bp, Homo sapiens
cctcagggggcaggtacacaccatcaccaactcggtacaggatgccgttcttagtggctgagtagtagaggacccggctatccaggtcctcgagctgctccaggaccctggggatttctttttgcctcatctcagccagacgggcacagctcacacagaatttgaacttgttgtcctctgttggctgggtttttggaggggactcgaatctcgcgtagtcttgatcataccacag

SEQ ID NO: 6124 - DNA, 348 bp, Homo sapiens
gaggtctggagaggatgcctgatgacttcctgccaggagaagccaaagccaggacatagtcaaccaaaataactccaggttggtgagggaagggacaaggaaaagaaacactgggaaattcaaagaaaggcaatctcagacactaaaagagcagagagagaaagcgacatgggggacttaaagaggctccttccagggcgctgggcttctcttccagcacagaaggctgcaaaagtggaactggcccccagttcccagaggatcacaaggccaaggatccaatgggcacaccatgaggacccaaggaaaggacagagaaaggaacggctctgggaaagccaaacctgg

SEQ ID NO: 6125 - DNA, 440 bp, Homo sapiens
aaaataaaattccagttagccctaattaactacaaccattcctgaactctccctaatgcttctttacctgttagaaaaaagcagtaggacaaaaacatgtaataaacatgcaacctaatcaaatagcctgtgctttctaaactaaatgctcaaatttgaagattaataggaacaacagtttccctttctaatattctatttactagtgtcctctaaggtttactgattctataaattactgtaacaatactaactactttaccatgcaatctctaaatagttaaatgtcttctgcctagtgatacaaaatatatgaaatattaaaaaattgaaaaagaggaaaaaataggaattaaaaaggcatacatggcctgttaacagatttctttatttttcttgggcaattctctaccatcattttggagtttgggcagacctcg

SEQ ID NO: 6126 - DNA, 280 bp, Homo sapiens
ccagatttcataaaactatgttaagggatcaggactttatctcacaggtatagagaattaaggagatattgaaataaagggagatacatgatacaaggagtactttagaattattagattcattttgacatagtgaaaacattcatattacttattttactacaaaatgtcacttgagttgagggggagttaagggaaagaaggcgaggcaaaaaggaagggctatttgaacaaaaatactcactgttaagctgtattggtgacagccttctcttactgg

SEQ ID NO: 6127 - DNA, 212 bp, Homo sapiens
ccaacacgcttatcaatgttatcgtgcctctagcaaaaagggtggacaagttccggcagttcatgcagaatttcagggagatgtgcattgagcaggatgggagagtccatctcactgttgtttactttgggaaagaagaaataaatgaagtcaaaggaatacttgaaaacacttccaaagctgccaacttcaggaactttaccttcatccag

SEQ ID NO: 6128 - DNA, 285 bp, Homo sapiens
aaaaccatttgacctctataatggctttctgtgggctttatatatcgctgtactagtaattaataggcatactttgtttaatattacttaattgatcttttttacaaagcttgtattgatgaattttatccatcattcctttctcccctgttactctttctttttttcttaaagaacatcgatatattgaactcttcttgaattctactcctggaggcggctctggcatgggaggttctggaatgggaggctacggaagagatggaatgggtatgtaaagttttt

SEQ ID NO: 6129 - DNA, 415 bp, Homo sapiens
cctaccctgtcaagagcaaacaataacatgtaacttgcttattcatttgtacaattaaatactagcttttgctcagagacaatgctataaagtattttaatgtcagtaacaatatacactacgaagtgcacttccattacaaattaacatggtgatatacagatgaacaccaccacccaaaacaaaccataaatgagcaacagttaaaacattaaatttataaatagcaaaaccacaaaataaagtatatacattttatagatttacccttgaacaaatatatagtgtatctgggaaagccaaaaaaaatgtgttttatcacataacatctgaataccagaaatgaagatctgataatattctaaaagccttgtaggctttctcccacttaatattcctttaactgtcgtccttt

SEQ ID NO: 6130 - DNA, 300 bp, Homo sapiens
ctgaagatgacatggttgttgccccagtcacccatgtgtccgtcacattagatgggattcctgaagtgatggaaacacagcaggtgcaagaaaaatatgcagactcaccgggagcctcatcaccagaacagcctaagaggaaaaaaggtaggtgggttactttgtttagggcgcatagtcaagtcttggtgtgaaatctagatatcacttttattctacatagttctttcctgctgcagttaaaacttatgtaagaaaaacattgaaggcacaaaatggaaattatgagttatttcttgg

SEQ ID NO: 6131 - DNA, 282 bp, Homo sapiens
aaatttcttctttatttcttgttctttcttttctttctctttctgttcctttttctccagctctaacctcttcttttcttccttttcccttttcttctctctttctttggatgcttctctgtgagtaaaaattgttaggttgttttcacatctgcaggtgttgatgcgtcggaactccctacctagaagtttctactcacaacagaaaaggtggtatctgaagtacagttgaaggtaaaaagcgaaaggttgtcaaaatccggaatgtgtgagattattttt

SEQ ID NO: 6132 - DNA, 286 bp, Homo sapiens
ccacttcaagtcacacaggtagataaaaacaggtccttttaggggccaaaggagaggttatcacagcagcagtttggttctcagcagaaatgcccagggcccctgttccacatcaaagctacaagcactgttgtcagggcatggagagcgacgggaccagagccctcctcgtctcagggcagcctgcctggcttcaaggtggagatcacagcgtcctctggggtcataggttcccccactgttccacaggagggaactggtccacctcgcccacctctgtgctcag

SEQ ID NO: 6133 - DNA, 196 bp, Homo sapiens
ccttagccctgctcctctctattccatcctgtagaggtcaggagtcaggagtcgctggcaggagacagcatgtcacccaggactctgccggtgcagaatatgaacaatgccatgttcttgcagaaaacgcttggcctgagtttcataggaggtaatcaccagacaactgcagaatgtggaacactgagcaggacag

SEQ ID NO: 6134 - DNA, 150 bp, Homo sapiens
ccatgctggatgttctgctgcttagacctgatctgctgccaattaccaggggcgggtcaaggatgaccttcttggatccaggaacgctaacatagatctagaaaggaagatggcagtttattacaccagaggtctggagaaacaagacag

SEQ ID NO: 6135 - DNA, 286 bp, Homo sapiens
ccagcagggattcagccggatcaacatctaccacaacactgccagcaacaccttcagagtcgttggagtcaagttgcaggatcagcgggttgtgatcaattattcaatcgtgaaagggctgaagtacaatcaggccacgccaaccttccaccagtggcgagatgcccgccaggtctacggcttaaactttgcaagtaaagaagaggcaaccacgttctccaatgcaatgctgtttgccctgaacaccatgaattcccaagaaggaggcccctccagccagcgtcag

SEQ ID NO: 6136 - DNA, 305 bp, Homo sapiens
ccacctacagcaaaatatcaaaatgggtaagtccttccttcctcttcctcctgattatatacaacatatctcctttcaagactattatttccatcatgcttattccttcacaaatctaaaccttgaggtgatatgaaggaaaccaacatcaagaaaagaaaactcaattcagaaatgaagaaaactggcaggtatacaatacacccccagagcatctcaatatccctggcacagtacaattcagtgtactgctacagcccatagataaatattggcagcttgaataagctcattttttccctcag

SEQ ID NO: 6137 - DNA, 255 bp, Homo sapiens
ccattgcagaagttttcggaaggatcggagctggttttgtcctcaacagggagcccattcgtaagatttacattgagctcatctgcgtcatcttattgactgtgtctctgtttgcctttacttttgctactgaattctggggtctaatgtcatgcagcatattttttgggtttatggttggaacaataggagggactcacattccactgcttgctgaggatgatgtcgtgggcattgagaagatgtcttctgcag

SEQ ID NO: 6138 - DNA, 309 bp, Homo sapiens
ccagtaggtgtgggtgcttttgatgtttgcttctgttggttgaaagaagcgcagggaagagactgggtgtagagtgatgtaccccaaggctgcagctaagatcaaattcttctggagagctgtgtgagctggatgctgatgcagaggagggtgggggagctggtgagaccaaggctgggctctgtgcccatcccactgggtgtgaaggaaggaaatgaccacagacagccatgttctgggtcggccgtctgcaagccaggctgactcctcctctcccccagagttcaggatggtcaacggcagcagcag

SEQ ID NO: 6139 - DNA, 306 bp, Homo sapiens; identical to SEQ ID NO: 2659

SEQ ID NO: 6140 - DNA, 331 bp, Homo sapiens
ctgccgtagcccatccagggttagttctggctgacgtaaatcaagctgctcagaaggtcgatcctggaacactggtggagcgcctgggccagcttccccaccgtggctccctttatgccttccctcatcacccacttttggagcatctggtaaaccttttctttcagtccatctcgctcatagtcatggtcaatttcatcaatctgagactgtgtgaagcccagtttacgggcacagtttttccagtgctttcccagattttccctgattgggtccaggtgtttatccgtcagactagtggtattatcaaagatagcttggtacttagcag

SEQ ID NO: 6141 - DNA, 255 bp, Homo sapiens
ctggcctgtgggtgatcccagctcttactaggagagggagctgaggtcctggtgccaggggcccaggccctccaaccataaacagtccaggatggaacctggttcacccttcataccagctccaagccccagaccatgggagctgtctgggatgttgatccttgagaacttggccctgtgctttagacccaaggacccgattcctgggctaggaaagagagaacaagcaagccggggctacctgcccccaggtgg

SEQ ID NO: 6142 - DNA, 263 bp, Homo sapiens
ctgaatcagcctgggtgccctagacccagtcatgtttgttggaccaaattagctgtcttttcatttcatgctatatagaactggcagtttacacttctgattaatacattgtctccgatcaggaggtttatttttttttcctaataaaatctgaaaggagattgggcagaaccaattagtaatcttacattacacattgtccctaggtatataatcaagaattaacagcagttatgattatatgattataatacatgcatttt

SEQ ID NO: 6143 - DNA, 206 bp, Homo sapiens
caggattcctttctccacattcctaaaactgggtaccacggtccgcaataatagtcaccagacccatcatcacaggctatgtcactaaaactgaccgaagcgttttccagttcacattttcctaaagattttataatgtgacaacccttctctccttagaaagttatacttctggcacttgaaatgctggatttgttgtccagttt

SEQ ID NO: 6144 - DNA, 284 bp, Homo sapiens
ctgctttggcaagagaatgagaggctccagaccatggtacagaacaccaaagccgaactcacgcactcccgggagaaggtccgtcaattggaatccaatcttcttcccaagcaccaaaaacatctaaacccatcaggtaccatgaatcccacagagcaagaaaagttgagcttaaagagagagtgtgatcagtttcagaaagaacaatctcctgctaacaggaaggtcagtcagatgaattcccttgaacaagaattagaaacaattcatttggaaaatgaagg

SEQ ID NO: 6145 - DNA, 366 bp, Homo sapiens
cgcagtgtgcactaaggggcccggccagccatgtctgcatttcggtggctggtcaagctcctcctccctgcatctgaccagcagcgcctttcccaactctagctgggggtgggccaggctgatgggacagaattggatacatacgccagcattccttttgaacgcccccccccacccctgggggctctcatgttttcaactgccaaaatgctctagtgccttctaaaggtgttgtcccttctagggttattgcatttggattggggtccctctaaaatttaatgcatgatagacacatatgagggggaatagtctagatggctcctctcagtactttggaggctcctatgtagtccgtgctgacag

SEQ ID NO: 6146 - DNA, 311 bp, Homo sapiens
ctccaaccagcctcacaagaacatcaacatcacatttgaggaagacaaagtcaactcaactctggttgtagacagagaatcctctcatgatgaatgtcaggatgctgtaaacattctcccagtccctggccccacctcttctgccacaaacgtcagcatggtggtatcagccggccctttgtccagcgagaaggcagagatgaacattctagaaatcaacgagaaattgcatccccagctggcagagaagaaacagcagttcagaagcctcaaagagaaatgttttgtaactcaactggccggcttcctgg

SEQ ID NO: 6147 - DNA, 348 bp, Homo sapiens
  unsure (165): n=A,T,C or G
aaaggtaaaaggatgggagaaaagtacacagaaagatattctggagaaaaggcacagagtgagccaaggcacaaggtaaaatgtttgactggttagagacgctagattattttgtgtggctaagacaaaacaaagctggtggggagtggcaggaggtaagtctanaatggcacaatggggccagactgcgaatggcaaactgaagtatgtgatcttttattctaaagaaaatgtagtatgattagcacaaaaaaagaaaaattattggccgggcgcagtggcccatgcctgtaatcccagcactttgggaggccgaggagggtggatcatgaggtcaggagatcaaga

SEQ ID NO: 6148 - DNA, 419 bp, Homo sapiens
ccagtggaagaatgaaacttataacagtcacccacttttagtaaaagttaaagctcaaacaatagacagagccaaatatatcatgaagcgcctaaccaaggaaaatgtgaagccttctggaagacaaattgggaagttgagccacagcaatccaaccattttgtttgattatatcttgtcacaactacagaagtatgataacttaataacacctgtagtagattcattgaaatacctcacttcactgaattatgatgtcttggcctattgtatcattgaagctttagctaatccagaaaaggaaagaatgaaacatgatgacacgaccatctcaagctggcttcagacagccagttccttttctttcaacttattgtatctgatagccggaatcttgcagtggctccccattgtccttt

SEQ ID NO: 6149 - DNA, 270 bp, Homo sapiens; identical to SEQ ID NO: 2914

SEQ ID NO: 6150 - DNA, 224 bp, Homo sapiens
cctctggacctttgatggaaggggctgccatgaagacctgtgacatgccctggagacattttccccattgtcttggggattcacatttgactcctcgttacttaaacaaacttctgcagccagatcgaatttttcttgagaaaatgggattttcttttctattgcattgtcaggctgcagattttccaaactttcatgctctgcttccctcataaaactgaagg

SEQ ID NO: 6151 - DNA, 389 bp, Homo sapiens
ctgtcaggggcggcgtgcctggtgatgcggcatcttaccttcatccccatctcagaatgggcagccagtctcagattcaaggaggaggaatcctgaggtgtggcgttcagtcctgaggtagacctgaggtcccctggaaattgtgttgatgctgagatggatgaggggtgctcattctctcaggtagacagtgaggagtcctggttcagccgagcctccatgtctgcatggatggttatgaccctgattgtttttggaaacagccaagctctctaggtgtactcagcaaatgcaaggtatagtgggtcctgcatacccagggtattatttgagccatggaagcaaaacagagactgcttagcctccctaagagtagttggtgggagtgg

SEQ ID NO: 6152 - DNA, 212 bp, Homo sapiens
ctgacactagaaaaccttcagatgctgccagagagtgaggatggggagagctatgacacagagtcagagttcacggagttcacagaggacgagctgccctatgatgactgtgtgtttggaggccagcgtctgacgttatgagcgcaaaggggctgaaagaacatggacttgtatatttgtacaaaaaaaaagttttatttttctaaaaaaaa

SEQ ID NO: 6153 - DNA, 351 bp, Homo sapiens
  unsure (301): n=A,T,C or G
  unsure (324): n=A,T,C or G
cctctggaggctcgggactggaggcaaagcccaggagaggtgggagacaggagctcccgactgtcagaggcatggaaatggaggctgagtcctggagaaactccagagcggagtctgagactagcagagtctcgagagcaaagccccaggagaaaagaggtggaaagtagactgagcccaggggaatctgcctaccagaagttgggcctgacagaggcccataaatggagacctgactccagagagtctcaggaacagagtttggtacaactggaggcaacagagtggaggctgaggtcangagaagaaagacaagactactcngaagaatgtgggagaaaagaagagtgg

SEQ ID NO: 6154 - DNA, 410 bp, Homo sapiens
  unsure (9): n=A,T,C or G
gtgaatcanaaaactgatttattctggggcgtgatcctaatcttgacttgcacaagtgtaacttgacctagctcaccaatttcagtaacattgttctgttctcagttcctggcatgggatattccaaattcctgtgtctggagggaaatgatagcttttgtcttgccatcctgagtgaccagtcacaaagcagttgaagggggctggaagccaccctatgaggacacgccattagtatgtaagcagaatgtgtgtctacctgtcaaagtaatttccagtaacctgagttcacaattctggtcctaggtgagtttttctaggagtgaaaatgcagaaaaggatgttgaaagctattggctaatgtatcatttgaactgctgataacctgagaaggggctcaggcatggttt

SEQ ID NO: 6155 - DNA, 571 bp, Homo sapiens
  unsure (422): n=A,T,C or G
  unsure (471): n=A,T,C or G
  unsure (520): n=A,T,C or G
cctacagcccagagaagacattttttcttcatttacattagcttatgaaaaataaagggaaaacaaccctcttcaatacaaaaacaaaaaaacaaaacaaagcaattccattacaataaaaatgaaagcaataacaatttggagatcaaagctgcctagctcttggcaataatgagctatctggatttcacatcttccgctagcatggttctgcccggctttggtaacaccacatgtgggtaaaacggtataaagaattgaagaactgtgggcacagaatcacccttactgcagattctcattcttaatatttccctttaacagcattttgctgttctcaagtctcagaaactttatgtggtgggatgggagggaaccaccataaccgcctgcctgcctttttttttcttaactgttattgntcataatagagatggggctcactatgttacccaggttggtctcaaactnctgagctcaacaatcctcccccttggctccaaagtgctaggatacaggngtgagccaccgcgcccggcatctgcttttgccacctaagagagtgctcaac

SEQ ID NO: 6156 - DNA, 577 bp, Homo sapiens
  unsure (514): n=A,T,C or G
  unsure (533): n=A,T,C or G
  unsure (571): n=A,T,C or G
ccatggagagcaggcgggtttgtgtatggctgatgttgaagccctggatgtgcagctccaaggggacgggacgcacattgggatggaagttgaaggtggaggtggcactgcagcccagccagtgggccacatccttggcattggagagcgaagagctgagtgccacaatgcgaatgggccgctcaatctgggaggagatgtagcgcattcgggagcagatcacttctaagacaggcccattctcgcccccgataaggtggacctcatccaccacgaagaggttgatgttctgcacgttcttgcgctgcttccatcgccgggaaagtatgtcccacttctcaggggtgctgatgataatgttccctttgcccagcagcttcaggtctgtgctggtctcgcctgtcaggagtaccaccttcttgttgagcctgtcctggaacttctcgtaccagtccatgtatacctgctctgccagggccttcatgggggtgatgtacacacagcgcccttccanctctgcagcagcattccangaagggaaactctgcacaatagtcttccccttgcccgnggggcc

SEQ ID NO: 6157 - DNA, 233 bp, Homo sapiens
aaatgccgattcacattactctgttcaagctgcgttgagatgttaaactggcttactatagacttcgtaaaaatggctccagaagagtaacaaactgaaatctttgagatcacacaggttggaaatatgtacataactgcacaaggtgtcaattctgctctacagtgcagttttagtcagttttagttgcataggtttccattgtatttatagtctgtttatgctaaatctgg

SEQ ID NO: 6158 - DNA, 376 bp, Homo sapiens
aaacatgacttggtgctgaaagacacactgctgggacccaagttccctcccacatggacgggatggaggctggagcccaaggtttcagggaaacgtatgtggcctgtgcccctgggtgtgatcatgggcacacacatttatctggcagggccagccttggctgctgaggggtcatgggcacagaggaggaccatctggtgacactgaggaccagtgttgcccacagccagggagaataaggatgaagaatgagtgttgccacacccctccagatgagctcaagaaagaggccaagcctagccctaaacaggtctgtaagtaattctgggtcctgataggcaaacgcatccagccagagggccctgggtccttcagg

SEQ ID NO: 6159 - DNA, 499 bp, Homo sapiens
ccaaggggatgatgccctgtagcactttgctttgcaggaagggaacaactgtgctgtgaataccaggatccaggagggagggagggtatatctgtgtcccccagctagggacaaggcttccttaaccttaggtcctcatgcttatattagttcttctccaacaaagtttgactttgagaagaagctggcacatggctgaaatgcgctcacgcggttgggggaagagtgttcttccagtcctcctccccacagggcctcctgcttctcctaagtacctgtcatcaaaggagatgaagatgaatcccccttcagcccccacacctcaatgagttgtcaagtactctccctcccacttgaataggaagcaggagcagcaggccaggttgcaggttgaggaagtcagaagttaacttgagctgagtttgcagctctggagagattgaggagcagacttttctcttgtcactttggaaggaaaggattgtgaggctgccccttt

SEQ ID NO: 6160 - DNA, 359 bp, Homo sapiens
ctgtcgccgccgctctcagggtgaagagggaacagaaatctttgccccctgactttggaaatctcgtttaaccttcaaactggccatgtcaagggttccaagtcctccacctccggcagaaatgtcgagtggcccgtagctgagagttggtgctacacacagatcaaggtagtgaaattctcctacatgtggaccatcaataactttagcttttgccgggaggaaatgggtgaagtcattaaaagttctacattttcatcaggagcaaatgataaactgaaatggtgtttgcgagtaaaccccaaagggttagatgaagaaagcaaagattacctgtcactttacctgttactggtcag

SEQ ID NO: 6161 - DNA, 201 bp, Homo sapiens
acgcacacgagaacatgcctgtgagtgctttggcccaggtttcggcggagatctcgctgttctgtccgaactctcccctcacgctgatttcggatcgtagagggtcctcatttaccctctgcacttcttaggacattaactccagggaccgcagcggcccacgggccacccgcatagacgggagcggagaggagataagat

SEQ ID NO: 6162 - DNA, 231 bp, Homo sapiens
ccaaaagaagtaagacagcttgctgaagatttcctgaaagactatattcatataaacattggtgcacttgaactgagtgcaaaccacaacattcttcagattgtggatgtgtgtcatgacgtagaaaaggatgaaaagtaagttttattaactctgttatatttgcttcctaacaactttgctgtaaaattgagggatcattgtttggtgagttgttttaggttatttcag

SEQ ID NO: 6163 - DNA, 343 bp, Homo sapiens
aaatcaactaacagggaattcatatccaacaattcactgatattttcttggtatgttcttaagaacaaaacaaaacaaaaatctcaatttgaactaacagtgggtggcatacagagagcttgcatacaatactcttacaagaattacgtactatactgaacttctatgaaattatttacctggtccgtaatgttattcagggcaacccatcccaaaaagagcaaattctgcaaccctcaatggcaaaaacgctgcccagcattgcttcccaaaaatgtccttgcaaagtttcccattgtaagtatacaatgtggcaaaagttcaaagatcagaaaaagtcttt

SEQ ID NO: 6164 - DNA, 334 bp, Homo sapiens; identical to SEQ ID NO: 5578

SEQ ID NO: 6165 - DNA, 308 bp, Homo sapiens
cctggataacagtatcaccatccttatttacagaagggtaaaactgactcttaatgagaaaagctttataagttcaagggctgtaaaatatgaactacttagggtcgtttgccttccatgggaacttggctagacttagaaaaagctgtttgttgtgctaatgtaaaagtgtcatacaatttagaagatttttgaagatggtaaacttagaagaattctatgttctgaaatgcacacttttagaatgtttttctttgaaaacaggctaatagttttttctttttttgacaaagtttcagctcctcttt

SEQ ID NO: 6166 - DNA, 383 bp, Homo sapiens
  unsure (376): n=A,T,C or G
  unsure (377): n=A,T,C or G
  unsure (383): n=A,T,C or G
aaaaatagccatctttgtacttttttgcaagtttctctataagcttgaaatagtcatgtgatacttcgacaaacatcatatgccttgcagtttttctcggtcgtgttctcagggttgagtagtccccttagctacctaactttactttcaatacaaagcacaaaaaagaatatcttcaaataaaagtttgcctgcagaacctggcaaaatgacccattaggagagtttagatgttttaattttatgtgctcccagctactctggagtctgaggtgggaggatcacttgaggcagaggttgcagtaagctgagattacactactgcactccagcccatgcgacagaggaatgagagccagtctcaaaaaaaaaaaannaaaaan

SEQ ID NO: 6167 - DNA, 217 bp, Homo sapiens
gggtgtttctggttttgccttagcaatgcatcggtctctgaggtgacactctggagcggttgaagggccacaaggtgcagggttaatactcttgccagttttgaaatatagatgctatggttcagattgtttttaatagaaaactaaaggggcaggggaagtgaaaggaaagatggaggttttgtgcggctcgatggggcatttggaacttcttttt

SEQ ID NO: 6168 - DNA, 263 bp, Homo sapiens
ccactcacccactgtgaggtcctctaggaaaatacacaaagagaggaccagaccaggcagaggaacattttgtttcatatgaactgtggctttgacccccaaactgcaaggaggaacttgctgggccaagctgcagcggcgctgtcttgctggagtggggacctagagtcagagaaaacccacaggctcctctgcccattctcctccatctgcacacgtctcagcctcggaccctcaccactccatggtgaggaaggccatgg

SEQ ID NO: 6169 - DNA, 330 bp, Homo sapiens
ccttgcccacgttctccttgtaggagacgaagttgtggaaggtgaggtccaccatgtccgggccggacaccaccgtgagtgtcttcagcaggaaactgttatcaggaaagtccatgttgaagacgtcccggagcttctggctcttgggcatcttggcaaacttcccaaagcgagtatcccggatgctggtgatatccagaaactccatctccttactttgatacgtccagtataagtagtagcccttaggatccacacggaggataactggagaggcaactgtagtttcatcatcccatttgatgaagcgctccccttggctcagatagg

SEQ ID NO: 6170 - DNA, 488 bp, Homo sapiens
  unsure (4): n=A,T,C or G
  unsure (204): n=A,T,C or G
  unsure (209): n=A,T,C or G
  unsure (243): n=A,T,C or G
  unsure (245): n=A,T,C or G
ccanaggcagagattactatcctggcactccagtgacccactgggtgactcactgatgccacagcacccgctaggaagctctgctgaaccttagtatttggtcctaaattttatgactccatggagttcccgtagtccatggctagttaggaagaaaggaggtgggataagggtcaggcccaggtgacccctaagaaccagganatggntaaaagtttttttttatattctgcttttatgatntntgagtacctgtttgtctccaggccaaacctttgggcttaaatatctttttcctagacaggtttttgctagtgttgaattttcttcttcctctggcctccttctgtgcccctttccccaagcccaagactgcttaacttccaaagcaaattctagatagacactgtatttattggtatgggagtgggctctatggggtggtctgcacccatctgggactctttttcctaaatcctgcaccaaat

SEQ ID NO: 6171 - DNA, 278 bp, Homo sapiens
  unsure (5): n=A,T,C or G
gaggnccaacaccttaagcctgtgtccacgggttaaaaaggtggatctcaggtccctgcaccatgcaactttgcacttcagatccaacgaggaggaggaaggcgtgtgctgtggtctctcagcaaacctgctgggcgacagcggactcagatgccttctggaatgtctgccgcaggtgcccatctccggtttgcttgatctgagtcacaacagcatttctcaggaaagtgccctgtacctgctggagacactgccctcctgcccacgtgtccgggagg

SEQ ID NO: 6172 - DNA, 177 bp, Homo sapiens
ccaggctggtcttgaactcctgacctcaagtgatccgcctgggtcagcctcccaaagtgctgagattacaggcatgagccaccgtgtcggtcctgttttgtgtaactttagtttggctacatcttttcttgcacctctccttagacaaactgtacactaattggaaatgtaaacttt

SEQ ID NO: 6173 - DNA, 459 bp, Homo sapiens
aaaaacaactaagaaagcagcactgaaaattgggaggctaacaaaaatcaaaagaccctttctttctctaccaccgagctcatgctctaattttaacgtgaagaaatttttacagttcattatggacaaatgttaaaatagtatacacattctatctatccacagaaatttccaccaaggccagaactaggcttttactagaacaattttatctgaatcctagagtttgggaaattacttggtcctggatattacaagaaaaaatggctttgggacttaggtagaggcagaaggggaagatgacactgggcagaatgacaaagggcagtaattttcaaaaggggtgtgtgtgtgagtggttgtgttcatcagaatcacgtgttacttttaataagtgtggtaactgaggctaataagcaccactgagacctgttgagtacaacaagggcatcttcgttt

SEQ ID NO: 6174 - DNA, 286 bp, Homo sapiens
aaactgtcttgcaaagagaagatatcttctgatatcatcgagggaatagacacgatcaattgattcctcaattcttgaatgcaaatctactatgcgcctggcaatggcataatctgtaacctaattcaaaacaaaaaaatcactttgatagtcacagcaatatcttctccagactatcccaggcaataagaaatgatttatcgccaaaaacaagctctaatataccacttaaagaagtattaatgggtaccaagtttctgatgaaagtttgggaacaggtggattt

SEQ ID NO: 6175 - DNA, 336 bp, Homo sapiens
cctctggtgcggaaactgagtcacagccagacctcagggcacggcctagacgcttacgagccaaagttaggggtagagagcagagacctccggggggtctcagggagtagggggcttcagggcctcccagtctagagcccggattggcgagttagacgcttgtagatccaaggttggattggggtggggtctctgggacgttggatcgctacgcaaggattggggggattcaagtgcttagagatcgaagtctgccctgggtagggggagtcagacaattggaaagcctaggtagttatttggggaggggtctctacgccttggcgaagcgcacag

SEQ ID NO: 6176 - DNA, 199 bp, Homo sapiens
aaaccagctttaagacaaaaaatcgtcaccaagttccatatgacaaaaaagggtctttcagtttgaattactttccatttctatttgatcaaataaaccaaaatattactaaggaagagcatccaatgatttgtaaagctgataaaactgccctgtttcaaggaaagctctttaatagatacaagtcaagctctcgttt

SEQ ID NO: 6177 - DNA, 384 bp, Homo sapiens
aaatttactggaggacttttttgttctcttcttttttctttttttaatagcatcccgctcttatttcagaataaaaaaatttttaaggtatgttgagtaagaatctatagagcaatgaaaatgcaagagcaatagctatgggcaccaaatggtcaatcttcttatcataatgttgagtggaagaagccaggtccaccagacacatgctgctcatttatgcaaagtttggacacaggcaaaacaaaactagtttgatcgtgatgggaaacattagagaaatgcaaagacatgaccatcataattgttaggagaaggcattggttaggattgggaagcggcaagcagaagcatttagggattggctggcaatgttttacttctcag

SEQ ID NO: 6178 - DNA, 606 bp, Homo sapiens
  unsure (508): n=A,T,C or G
  unsure (603): n=A,T,C or G
ctggcctctcctgacgtgttcctctttaggagcaacaggtgaaaaaatgatacggttctggggcaggcccatgttttgtgcatactgttgaatattaggttctcctactgctggaaaacgcaacagtcagagtacactattggggaacacgcttcagaatgtttgcccacatctgcaaagtagaagggtcaattttatacaactgattaaagttacagtatacgatggcatcttctggtaacccgtactgagaacgggtggttacaataatggtacggggaacctcctctccagttgcagccttattgttgatctgagtagttgccagtccattgctaatactgaatccattaattgttatttgaatctgtcctcggttaatcatttcaataactgcttctgcaatagtattcataggaataacaggcatattaagagctgtgttactgctatctgcattgtctcctccatcaggacacttcatcttgacaattttcacatctggtangactatcaagaaatgctttgaggtcgatgcccttcagaactatccgattgtcataaatgtgcccattggactcaaaatcgatgactgcttttttnttt

SEQ ID NO: 6179 - DNA, 253 bp, Homo sapiens
cctggacatacctgcggatatggacgggaaatccatcctcaagctgctggacacggagcggccggtgaatcggtttcacttgaaaaagaagatgagggtctggcgggactccttcttggtggagaagaggcaaagctgctacacaagagagacaatgacaagggtggacgcccaggaggagaactttctgcccaagtaccagcgtgtgaaggacctgtgtcagcgtgctgagtaccagacggcgtgtgagcag

SEQ ID NO: 6180 - DNA, 600 bp, Homo sapiens
  unsure (455): n=A,T,C or G
  unsure (537): n=A,T,C or G
  unsure (564): n=A,T,C or G
  unsure (598): n=A,T,C or G
  unsure (599): n=A,T,C or G
aaacttacttttcttgcccttgccaccaacactaatttcaggagtctcaaggttcagctctgcctcaggaacagtgacatccagtgaaggtgacttgatgtcagctttggggctttttgccccaaatccaaacttgggtttcttaaattgggggattttaacatctggcccttcgatgttaatatctgggctgtccatgtgtacatctaagcttggagcttcaactttgggtcccttgaggtccacttcaccaccttctaacttcggacctgaaaatccaatttttggtgccttgagatgcaaatcaacatcaggagcagctactttaggagcagatatctccagcgatggcatcttcaaagatgggccactgagtttggcatcagggccttcgaaatccagacgtggacctttaagatctacttctgggcctttcaaagtcccttcaaccttanggacagacacatcaaaatctcctttactttgggtcctttcaaatccacgggaacatcaggtattggagatcttggggagctntgattttatttcaggcatcttggaacntgggggcccttcaattttgcggcctggaccttcnna

SEQ ID NO: 6181 - DNA, 326 bp, Homo sapiens
ctgaatacacgtcttttgtggaaaatttcttcctgctgagaaaattttgggattaagaactgtattaaagactgttacggcaaagacaagaacatcaattttatttatacgatactgttaaagaagaacagttaaagagtttggtttttgtttttttcaaatcccagtctgccctcaaaagctgggaaaattctttgtggctctatatataaactatcctgaggtcctctcagaacgcaaagactcctgtttttccaatccactgggtactgtcaagataatatcagaaagagtgagtataaaaaaatgaatgggagtaaattttt

SEQ ID NO: 6182 - DNA, 507 bp, Homo sapiens
  unsure (480): n=A,T,C or G
  unsure (481): n=A,T,C or G
ctgtcatatgaataattgaatgagtatcagtaaagtgcttcagtgcgtgcttgtagctttatggttgtgattggttgctgtggagggggaggccctcagctctgagctgggcagggagaagcagagaaaagttacttcagcctgaggctccccactttcgttagctaagcccggggttactggtgtctctagggaatgatcagcactcggtcagaattggaggaactctcttcttcttttcacgctggacaaatagtcagggccgtgggctccaaggtcaaaattctgaaaacaggatatagagcctcagagaaggagacgtccaggaaagtatgaatatgcgatccatccacagcattgtagaatgagatatctccagtctcatagtccaggaagacccccactttcttagggggcttaggaagtttcaggttggttctgggctcagttagagtcccgatacttattcccatcagtcanncccatagtccagaatccattcttcag

SEQ ID NO: 6183 - DNA, 271 bp, Homo sapiens
  unsure (137): n=A,T,C or G
  unsure (228): n=A,T,C or G
ccagcctacaatggggatgttgtgtttctgttcaccttcgtttactatgcctgtgtcttctccaccacgctggggtctgggaggaatggacagacagaggatgagctctacccagggcctgcaggacctgcctgtancccactctgctcgccttagcactaccactcctgccaaggaggattccatttggcagagcttcttccaggtgcccagctatactagtgccgngagggacagaagggacagaaagaggctgaagaccatcatccag

SEQ ID NO: 6184 - DNA, 389 bp, Homo sapiens
ctgagagactctaaatccagtgacaagtctgtctgcctattcaccgattttgattctcaaacaaatgtgtcacaaagtaaggattctgatgtgtatatcacagacaaaactgtgctagacatgaggtctatggacttcaagagcaacagtgctgtggcctggagcaacaaatctgactttgcatgtgcaaacgccttcaacaacagcattattccagaagacaccttcttccccagcccagaaagttcctgtgatgtcaagctggtcgagaaaagctttgaaacagatacgaacctaaactttcaaaacctgtcagtgattgggttccgaatcctcctcctgaaagtggccgggtttaatctgctcatgacgctgcggctgtggtccag

SEQ ID NO: 6185 - DNA, 262 bp, Homo sapiens
ctgaaggagtatcacatcaagcacaacattctctacttcctcacctacgccgacgaggtttctccaaggacatcaaggtgcccaagagccgctacctgggctacatcaaggactacgagggagcgacgctgatggagtgtgagctgaatccccgcatcccctacacggagctgtcccacatcatcaagaagcagaaagagatcatcaagaagctgattgagcgcaaacaggcccagatccgcaaggtctacccggggctcag

SEQ ID NO: 6186 - DNA, 261 bp, Homo sapiens
ctggacataccaattggtatcaaatagaataaaatcaaatataaatgtttgagtcttaggttaaaaaggaaggttatttgtatagtttatagataatgaaggaaaaatttctttttcattgcaggaaatcttgtttactggaagatagagtcactcttttcatataagacaaatagtgctttaatgccaacttctttttatctcaacatttcaggatcatgctaggcacactgcccccttgaatagacattatatgcacag

SEQ ID NO: 6187 - DNA, 247 bp, Homo sapiens; identical to SEQ ID NO: 2583

SEQ ID NO: 6188 - DNA, 337 bp, Homo sapiens
ttggtgaaaattactgatggctctccttccaaagaggatttgttggtattgaggaaaacggtgaaatcctttttggctgtttgccagcagtgcctgtctaatgttaatactccagtgaaagaacaggctttcatgttactctgtgatcttctgatgattttcagccaccaattaatgacaggtggcagagagggccttcagcctttggtgttcaatccagatactggactccaatctgaactcctcagttttgtgatggatcacgtttttattgaccaagacgaggagaaccagagcatggagggtgatgaagaagatgaagctaataaaattgagg

SEQ ID NO: 6189 - DNA, 181 bp, Homo sapiens
gaggtctgggtttttctgagaaataacaccagacatctttctcaccccctgcagaatgagtccctggaacgccagatgcgtgaaatggaagagaactttgccgttgaagctgctaactaccaagacactattggccgcctgcaggatgagattcagaatatgaaggaggaaatggctcgtc

SEQ ID NO: 6190 - DNA, 327 bp, Homo sapiens
cctgcggctgctgctgccgccttctggaatatctaaagtgctttcacttggctcatcagggtctggaggattactgagtagattgtgaacatctcctcgacgacgttgtctgtgcctcctccgatactgaaattcagcatattcctctggtgatgcaaatcctaaatattcccaatcccatgttccaccagcaaagctgcgccttggagcttctggtgagtctgcaggagctactccccgagccacagatgccaggaattcttgcctcttctgctgtacaaggcatgctgctttgatgatcttgtggcggggtgtgcgaaggtaagg

SEQ ID NO: 6191 - DNA, 337 bp, Homo sapiens
ctggctgatgtctgcttggacactccactctgtaatgggcacaccacagggatggatgtcctctgggcagggacccccatggtgactatgccaggagagactcttgcttctcgagttgcagcatcccagctcacttgcttaggttgtcttgagcttattgctaaaaacagacaagaatatgaagacatagctgtgaagctgggaactgatctagaatacctgaagaaagttcgtggcaaagtctggaagcaaagaatatctagccctctgttcaacaccaaacaatacacaatggaactagagcggctctatctacagatgtgggagcattatgcag

SEQ ID NO: 6192 - DNA, 349 bp, Homo sapiens
ctgaatccctgggccagttactactcttccatttgaactccaagtctgctttacagaggattagtgtagctttggtaatctgtgaatgggctgctttacaaaaggagtgtaaagctgttaccttagctgtgcagccgcgtttacttgatatcctttcagaacatttatattatgacgaaattgccgttccattcacacgaatgcagaatgaatgtaaacaacttatatcatcattagctgatgtacatattgaagttggtaatcgagtaaacaacaatgttttaacaatagatcaagctagtgacttggtcactactgtttttaatgaagccacatcatctttcgattt

SEQ ID NO: 6193 - DNA, 441 bp, Homo sapiens
aaatgtaaataaattggcaccacctttaatcagactgatgtcctgacttgcacaggaaacacgcacctaacctcaccaacctcaagccctccctcctcaagtctccatgcaaagactgtgccagtcagagtggagctgtccccccgacgagcccccagaagcgcccggccggccacggctgtcattttgagggcggaaaataactggatttctggttaattggtgacatcctcaagagctgtggcaagccatgtctcggccgcgtgatggggcagacatggtgggtcctggcggccttgtcttcaccaagtgctcctaactctcagcaaacttggggttcatgaccgtcgtggtggcgctcttgaaaaggggattatcattgttccactgggacttgagcttctccttctcaaagcgcctgtactcccggaggtcgctcag

SEQ ID NO: 6194 - DNA, 207 bp, Homo sapiens; identical to SEQ ID NO: 5458

SEQ ID NO: 6195 - DNA, 311 bp, Homo sapiens
cctccacgaagaatatttttggccgatactcttcacagcggatgaaggattggcaggagattatagctctgtatgagaaggacaacacctacttaggtaaagtggcccggcctgggagccctggtatccatggggaagcccactctcagagttctgagataccaggcttataggaggcacagtctgtgagtgggaagagactggagtgtagatgttgcccatttgtaggtggtaaaatcaattgtttttgatggaattgattttccctgagtggagtgctgggggaaggaggaggtccaggccggtagtgg

SEQ ID NO: 6196 - DNA, 373 bp, Homo sapiens
  unsure (316): n=A,T,C or G
cctactgtatttattttagtaatgtgctacattagagtagaaaaaataagaacgtgaagaagaaatagcaaaaggagaaaattaccacagatttacagaacaatatgttttaagagagacgttgagaaagattcacgtggccgtcctcagcgtctcaaactcctttgaagggagatttgagcttaggctgttgatgacataagatgcaaagcaaaataatatactctctttattacccagaaaatcaagttgccagtcaaaactgagaaatgagaaagaaaatcagatttctttattcatctctgttgaagcctanaaaaccaaaacaagctggttgtggttcagcatcatggtttaggaatcaagctgtcag

SEQ ID NO: 6197 - DNA, 290 bp, Homo sapiens
  unsure (45): n=A,T,C or G
gaggtcctttccttgagctgcacgtgaacctgtgtgggcaggcancgtttgcaggcgtgtttacgggcaggcagcgtttgcaggcgtgtttaccggcaggcagcgtttgcaggcgtgtttacatgcaggcgtagcaccatgtgagaccactggtccagggtttcagaggtcctgctcaggtgaatcggctgtgttctcacaagttcacggagctgagtgggtgtgcaacatgaaatactagtgctgtgagggacagaagggacagaaagaggctgaagaccatcatccag

SEQ ID NO: 6198 - DNA, 303 bp, Homo sapiens
  unsure (1): n=A,T,C or G
  unsure (3): n=A,T,C or G
  unsure (10): n=A,T,C or G
  unsure (22): n=A,T,C or G
  unsure (41): n=A,T,C or G
  unsure (45): n=A,T,C or G
  unsure (49): n=A,T,C or G
  unsure (249): n=A,T,C or G
nangtaaaancatggaagaganggaaaaaaaaccagcttangaanaatnaactgataaactgcaagaaaaaatgcaacttacatcacaaaagctaattgctttattatttagagagtacttaaaaattaaagaccaaacttctctccacccaacaaaaatgggcaaaggacatacagctaggtcaccaagaaagaagggcaaataggtggtgagtatatgtaaagatacttgataggacttttgcttanttgaatctttagcaaatctcttttatttcttgggattttgaagaagtaattttt

SEQ ID NO: 6199 - DNA, 446 bp, Homo sapiens
cctgtccatcatgtattgtctgaggctgcttcctgctgtcatgggagaaacttttgggcggatgctgctgggagccggtcagactgggcagactggatgagaacaggaggatgagaatgagcaaaggcacccacgaggagaacaggaggaaaacccacgcgtttgggggcgactagaaatgcgcagtgagccttggggtcccctgtgctgccctcaggctgcgtttgccttgagtgaaatattttctccaaaaggcagaggagaggacaaagcccctgtgcatctccattctccacagcatccccaggatggcaggaggaggtccccgagaactgcacaagctgtgtttgacccaaggggactttttcctcttgaggaggtttgctgggtcatgtcagtgatgaggtttaaggacagagcccaggaccctcacagcctggatatgg

SEQ ID NO: 6200 - DNA, 376 bp, Homo sapiens
cctcaacctaatatgccccaaagttgatacaaattttattagaaaaacaaactttttgtaagtctaacaggtaaaggaacaaagaatcagatctatttttcttatagcttccttactcttcccttccctcttttattctttatcacctaaaagcttggtcaccagtaagttgaaaaggttaaaatatggctatgaaagtagaaaatatagaaaaatatttaagatgttcaacagtaatttttagagtaaagttagttaagcactagagtttatgcaacactgtaaaatacaagtattttactaactacactggaaaaaacacctacttgcaattttaattaatcattataattcaaaaacaggtttatataactgg

SEQ ID NO: 6201 - DNA, 435 bp, Homo sapiens
ccaggtggccctccgtgtgaggtcatggtcacagcatagtttggagctagggagggactgtcagcctggaggtttggagactcattctggaatctagtgtgggtcaagccaacttcagggagaggctgagccagggtaggagtcacaggagcagacgaggatgtggggtgccgtgcacagagctccatgaccagcttgggaagttagaaggaaggggaggcaggaggctgcttagtctgctgccatgatgggccccatgaatggtggctctcaagcttctgtgctacacaggggtgtgtggttgggcgagtgtccttgttaattgatacctaattggccttggttgggaacatagccatgagtgcccctcgtgggtggggcgccagtctgtcattgacctcattgtgtcagcaccttccccccaaggaggctgac

SEQ ID NO: 6202 - DNA, 158 bp, Homo sapiens
  misc_feature (1)...(158): n = A,T,C or G
gtccctgaacgctcncttgtctnctggacaacccatactaggactncacnttgacactaaggtgagctcgcagntgtgtacgctgggacctgtaggtgaaccantnccatgcttgcacttgccctttcttncgactgcctgctttaacagactctgcg

SEQ ID NO: 6203 - DNA, 135 bp, Homo sapiens
  misc_feature (1)...(135): n = A,T,C or G
tctnaaatagtctcacctctggctctgatactcacgcttacacggttgatatctcacaggacaacaactcggacgagctcggacttacgtaagtggggactcacccangcctctggatagcgcagaacctngggg

SEQ ID NO: 6204 - DNA, 221 bp, Homo sapiens
agagtggggagccacagcagcacaagcggccacctgccaccacggccacacaggtctcccagcagctctgcctcatccaggtggtgggtggagaggatcagccgtgcgaccttctcggtatttgagcagcagctcccaaataccgcggcgggaagcaggatccacgccagccgtaggctcgtccaggataacaacttgggagccgcccacaaaggcaatgg

SEQ ID NO: 6205 - DNA, 190 bp, Homo sapiens
  misc_feature (1)...(190): n = A,T,C or G
agctgggnactgcagggcagatgccatgcattcgcttgttgaangccaccangatttgtgtgacgggcaaaancaacttccanntctanacacctccgccaccaccacnctnagggngaattccaccacactggcggccnntactagnggatacctagctcggnaccaatcttggcgtaatcatngtcat

SEQ ID NO: 6206 - DNA, 35 bp, Homo sapiens
  misc_feature (1)...(35): n = A,T,C or G
cctggacacctgtnaagacnactnttatgacncat

SEQ ID NO: 6207 - DNA, 393 bp, Homo sapiens
  misc_feature (1)...(393): n = A,T,C or G
aaaccctgccttgctcaactccggagttggtgggtttttttctctttagaaatagcgtctctgtctgtaaggctgtgagggtgtagtgcagtggcacaatcacagttcactgcagcctagaattccttcgcttaggcgatgctcccaccccagcctcctgagtagctgggagtacaggtgcatgccacacctggctaattaaaaaaaagnttnttagagatacggtctctgtatgttgcccaangctgatctcaaactcctgtcctcaagnaatcctcctgcctttgcctcccaaagtgcttgggatcacaagtatgagccaccacatccaacccagagttcgtgctcttaaccaggggatgacatgttgcaacttcactcntcacanntgtg

SEQ ID NO: 6208 - DNA, 395 bp, Homo sapiens
  misc_feature (1)...(395): n = A,T,C or G
aaacctggtcaagtggtaatgttctgatgaatttgtttctctgcaagaacaaggaagaaaacattactttgaccaggtattcaacatgatttgatccaaagctacttttagatgctacatttacctgataaaaagagggataacattatgcccaaatggatgcattgtaaagaaaatccagaacagttaacaactacagaaacaaaagagatatcttccgcttactttatttacttgttttacaaaggcagtgaacaccaaaggatatcaccaacaactaaaaggagttcaaaatgcaggggaaggaaaactagctgaaacttgagtaaaggctcctgtgcggngtgagcccttgggcccttttcctccacccatcattgagtatataaaggcgc

SEQ ID NO: 6209 - DNA, 461 bp, Homo sapiens
  misc_feature (1)...(461): n = A,T,C or G
ccaggaggctgaaggctgagtctgcttcttctgggttcacgccacagtcacgtgtggtggctgctgtagcctgcagccaggtgccattcttcctcatgccctctgtgagtggcttcattccactctggggtctggcatggccctccccatcgttatcctctctgcattcatgacagggtgttggcaactcgcttgcacccttcaggtctgccgtcttggttcctaggttgctaggaaaggaccacgagggggcccgctgcagagaacggaagagcagccaggaccagtcggctccatacaccagcgagtcgggcaatgtgtgagatgtcaggaccgtcgcctcctgcctctcctccattgccttttggcagttgaggatcttaaagccacttgtgcatgcaggcggccangagcangtggtggtggaaanggtgccacttgattctccataccccacccct

SEQ ID NO: 6210 - DNA, 205 bp, Homo sapiens
  misc_feature (1)...(205): n = A,T,C or G
ctgttaccgacccacgtcctgctgtctctgtgtggtcctacaaaaactgtccattcccacccctttgctttgccatttgcaagagtctggaattgtcaggtctcagcttcnaaaagtcctggttccactgacaggacacattctttagtggggaattaagacctacaaagtctagtttgtatgtagggtatgaagggaatttttt

SEQ ID NO: 6211 - DNA, 178 bp, Homo sapiens
  misc_feature (1)...(178): n = A,T,C or G
ctgagagtagacacttgtggtatgtggagtacagataagccaggggcatagccacggctcgctccatgaaagctaggagggagtgaaatatcagtgatcatcgcaaggaaggaggcagacaagagtaaggcacacctgactcttaggactagcagtcagaaccaggaggaacccccnc

SEQ ID NO: 6212 - DNA, 328 bp, Homo sapiens
cctatgcctttgctgtcatgtgattctgcagtaccacaggaataaccaccttcctcttcttctgtcgcctggtctcctgaattgttgccactgtctctgatgtaatagccttttaatcccaaattgtacaattttcgatcctccacaaatgccctggagcaaaggcacagtatcttacaatcctcccgctcctcagtgaagagaaacatttccgccacgcggctccacttctcgcagcacattttaccacttcggaggcagctctgacgtacgcagcccgggtcgcgcctgccgggcctccgctcggttactggagacttaaaacagg

SEQ ID NO: 6213 - DNA, 361 bp, Homo sapiens
  misc_feature (1)...(361): n = A,T,C or G
ccacagatttccagaatgaaagtgcagcagccctggctgctgcagccactcgacatttacaagaagctgagcaaaccaaaaacagtggcactgagcactggtggaagatccatgaggcatgcatgcttgccctaggctcagtgaaggccatcatcactgacangtgtgaaaaaatggcaggattnattttggcatgcatgggtncctgaccaatgtnatccttgcngacctcaacctctnagtgtctcctttcctcttgggccngggcactttgggctgccagtngagttcactngttgctattgtcccctgaactgatccangcagttccttacaggcnanagttagtggtctttcactc

SEQ ID NO: 6214 - DNA, 323 bp, Homo sapiens
  misc_feature (1)...(323): n = A,T,C or G
ccatgtgttacgggatcacgcagcaccgtggttccagggctcatccacactggagtctttccttcatatggctgagtgacatcccacggtacagacagtgcattgcatctgcccgtttgtccactgatggacgtttggggtgtttccgcctttggccgtcttgagtcacgctgctgtgtaaggatgagtttgcaggggatggatgctttcattcctctggggcagatgcctaggagtgtcatggctgggttttgggctcaccatgtctagtcggttgaagaactactttccagacttttctacggtggctgcacgcgttnnnn

SEQ ID NO: 6215 - DNA, 155 bp, Homo sapiens
ccattaaatgctggagttgctgaaagcttggccctgtccttgtctcgcctagcacgttccttctctgggtgatcttacccacatctggagctttatgactcagacatttatgtttccaacctagattgcttctgagtcatggtgcagagggtcag

SEQ ID NO: 6216 - DNA, 252 bp, Homo sapiens
attttcctcacagcaaatataacaggatggaacagttagtgttttgttttcacaagtgtccaccactccatctgccctgcatggagagggctctctcactgctagatctaggctgagccatctggaaggatcaaagggtgtgggagtatcaccccctctcaggctgcagaaggtctcgagggtggcgtcacagcaggatttccgccttctgcattgcactgcacagccccatggaacatgaggcacttgagg

SEQ ID NO: 6217 - DNA, 390 bp, Homo sapiens
  misc_feature (1)...(390): n = A,T,C or G
aaaattctgataaaaatttactcaattacattttatacattaatatttagtgaatttgtccaaaaaggctatgtttaatttatgtgtaaaaataacaaaagatgtatcagtcagtctctgggcaataagaaaggaagaaagccttgctanaaataataaataatctcacgcaaaaggccaggtgacataagaatactacaataatcaatatgttttctttgnatttacaataaaatccatctgttaacactgngatagaaaaaanaatcagtccacatcatgtaataaaaacaggctttgaggatgattatacctcttataatanaaacatacaanggatttctccagctaaaggctnttcaacttgngacaacttgatgaccagncntg

SEQ ID NO: 6218 - DNA, 316 bp, Homo sapiens
aaaacaacagaatgttgctatcagtttgtcttacgttaaaacagttcttaaaccacctactatattaaatacattctaatttggtcactgatgataaagatttttacctagacgttttgcacttaaaaaatgctattaaaagtctttggcaaagccacggtcggggagaaacacgtcgggtgccgcttcccactcgtgtgccctcaccacccacgtggcccgcggagagccaggtcgctgtaaaccacagatgcctgttcctgctcaactcctagggacagtcccagccctgagcagaagggtcaggtcatcgcgg

SEQ ID NO: 6219 - DNA, 97 bp, Homo sapiens
  misc_feature (1)...(97): n = A,T,C or G
tggaccttactcatgcaggngaagatggaatttttgatnctgganattttggtacctttcctagtgaatatctanggttctcttccctagtnntgna

SEQ ID NO: 6220 - DNA, 318 bp, Homo sapiens
  misc_feature (1)...(318): n = A,T,C or G
tngaggtaaagtcatttatataaccaattgnaaagctttgnttaaaaagaaagataacagggtttactggcaagaacaatgaatctttncatgaacttctacccctcccttttctttactgttgtttctagaagcagggagatcacttgtttagtaaggacacctnttactgaaaatnatncnaaaagagagccagttaagaagatgactgtgaataactagagataattagctcttcccgaacgtggggatgctggttntgaaaacagtnttangatgttnagtgggaggnctcccccccccccccccccccgactt

SEQ ID NO: 6221 - DNA, 95 bp, Homo sapiens
aaaaaaatatgtcaaatgacacagataagacaagcagaaaggaaaaaactacatttgttctttcagcattacatatatgagtacttgctccttgg

SEQ ID NO: 6222 - DNA, 397 bp, Homo sapiens
  misc_feature (1)...(397): n = A,T,C or G
ctngtgctgntnagcctggncgcactgagcangancgccnaacccnganagncgancgtncaatgngnctttgaaactgggccatctccacannggatgctacnacntgatctaatncctggnagacttgagggacctccnacncaacctgttacaactagtgtngaaacaggggactattnnatnatgatgaatgtaagctgggnactgcagggcagatgccatgcattcgcttgttgaangccaccangatttgtgtgacgggcaaaancaacttccanntctanacacctccgccaccaccacnctnagggngaattccaccacactggcggccnntactagnggatacctagctcggnaccaatcttggcgtaatcatngtcatagcttgctc

SEQ ID NO: 6223 - DNA, 418 bp, Homo sapiens
  unsure (1): n=A,T,C or G
ncgaggtctggagaagggtgaccgactcagcgctgagatcaatcggcccgactatctcgactttgccgagtctgggcaggtctactttgggatcattgccctgtgaggaggacgaacatccaaccttcccaaacgcctcccctgccccaatccctttattaccccctccttcagacaccctcaacctcttctggctcaaaaagagaattgggggcttagggtcggaacccaagctttagaactttaagcaacaagaccaccacttcgaaacctggggattcaggaatgtgtggccttgcacagtgaagtgcttggcaaccactaagaattcaaactgggggcttccagactcactggggcctacagctttgatcctgcatctgaatctggagccaggagctttggttttgactgccgg

SEQ ID NO: 6224 - DNA, 162 bp, Homo sapiens
  unsure (1): n=A,T,C or G
  unsure (144): n=A,T,C or G
ncgaggtccacaccctcacccctgagcagcccggggggccacagcaagaggtacacatgctgtggacaccagcacccccagacctgacccttggggaaggtgaggaggctaggacgtgggacttcctgacagccgtgggcggcngccacgctgaggctcagg

SEQ ID NO: 6225 - DNA, 326 bp, Homo sapiens
  unsure (1): n=A,T,C or G
  unsure (97): n=A,T,C or G
  unsure (111): n=A,T,C or G
  unsure (165): n=A,T,C or G
  unsure (246): n=A,T,C or G
  unsure (253): n=A,T,C or G
  unsure (281): n=A,T,C or G
  unsure (325): n=A,T,C or G
naggtctgcagttgctccctcatcatgtcactctgtgggctagtagttacagatgttttcatcacaggttcaatagtgtgagaaagagacactagantctgaggaagatanaggggaagggaagttaaatccctaaatgctcctgagtcttcagacaaccattgntgaagctgatcttcaaacctcttggtctcttctttctccagcagcagactgctcgacaaacactgcgccaagagctcctcngcagaanctcctcgcatcagatctctctgtgctgngaatactcccctcttgagcacactctgtgctcctcttcccgttnc

SEQ ID NO: 6226 - DNA, 351 bp, Homo sapiens
  unsure (97): n=A,T,C or G
  unsure (259): n=A,T,C or G
  unsure (338): n=A,T,C or G
aaaacttgcctattactgccctcttttccagaaagaaaaggcaagttcaggcttgcagcttaatatatttcatgttctactatttgtcttaagtggnggaagattcactggctcgggatggactggaatggcttaaattgttaagttgcatggcttatggattgtcattctgttccaatggtgcactgccacgttaaatccataagttgaacgaacaaaacttatttgaaggaataagtgcagtataaggatttttagnttggaggtcttcaagtttactatattcaagaagcatctttttcaacttcatggctggacctggggcatgcctgcctcangttttggcttttt

SEQ ID NO: 6227 - DNA, 493 bp, Homo sapiens
  unsure (118): n=A,T,C or G
  unsure (270): n=A,T,C or G
  unsure (308): n=A,T,C or G
  unsure (347): n=A,T,C or G
  unsure (446): n=A,T,C or G
  unsure (463): n=A,T,C or G
  unsure (479): n=A,T,C or G
aaatttgtgttaagaaagggaaaaaaatcacaggtttgtctaactcagtagaaaaatcgacaaagcatttgcagacaacttggcaagggtacagagaaacggatgtactgtttttcantatttggggagggtggtttgagcagcatttattgacaatttcattagtggggatgtttctattgaaaacagagttaggaagtcataaaatgttcctgcaatataaggtaataataccaccagcgtttatcttactgttttcatgttctaagngcatgcatctgagtaaaaggatctgggctgcagtccantctgagagatgccagcaaaggcttcctaggccagttcangtccagtaaatccctcttcgatcttctcttccacacagacagcaagtgatgagcatgcccatgaactcacatgattattttggggaaaaatgaaagagntgtattctttttgaggnaggaatttccctttcnggggccaatacatt

SEQ ID NO: 6228 - DNA, 187 bp, Homo sapiens
gcgaggtcctttgagaagctaagcttggttaaaaggagttttaggatggaattgaaaactgagtctagttctgtttgaagggggcagctttttactcagctttgtgcactttggggtgctcgctcggggtgtccgcatttctcagaccttggtttggttccctgcacagtaagtactaatggttagg

SEQ ID NO: 6229 - DNA, 474 bp, Homo sapiens
  unsure (2): n=A,T,C or G
  unsure (353): n=A,T,C or G
  unsure (386): n=A,T,C or G
  unsure (413): n=A,T,C or G
gngaggtaaaaaacaagttttcctaaaaagtcattgtatttggggcatgtttctcttaaaataacacatgtagtttcaaactaaattttaagaaaggaatatatctgactgaaataaatgctctcgaaataatgcctacgcattttactaaatgcagttttcatctaatactttgaggcatttctgtactagtatattgttttggttcacatgaaaataacttgggaaaaactacaagtaattccctatattaacaataaaagaagaactattaagaataaaagaagaaacactaaagagatacatttactgcttaataaacatttattgagaaactattttgtggtactcancaagaagtgagagttggatgggctcaaatatcngcctataacttacttttctatcctccnattactataaaagcccaagaaactcttctatggctttctttcttttcttttcttttttttt

SEQ ID NO: 6230 - DNA, 277 bp, Homo sapiens
gcgaggtccagagggaaggcccaagagacgtctctgaagccaccgttcctgattattcagaggcagggtccacagtgagtgactcggtggggctggaggaacccagggtgacccagagggggctctggagcgggtccctaacatctgaaaaagtcctcccagggaactcggagctggaacttccaggcagcttcgggggtgacatttgtatccggccagccgagcggggaaaggagaccttgtgtcctggcaacagggagggccgggactgggatgg

SEQ ID NO: 6231 - DNA, 290 bp, Homo sapiens
  unsure (22): n=A,T,C or G
gaggtaaacttggctgtattgngtacaactattataccatcttttataaacacagttttttaagaaatttctttttgtaagttacaacattccactggatccttatattgcctgtagtggaagagggtcttgtgtgtctgccccttctagttttcactcatgcagaagcaacataaccttctgatatgcacaataaattacatatatttagcaggatttttatttgccgtgatatataggataatttagtctttggcatgtggcattatatttattttggtttttttttt

SEQ ID NO: 6232 - DNA, 271 bp, Homo sapiens
gcgaggtcctgcaagaccccccaaagccagcagtcagcctacttcctgttaacactgtttagagaggtggctattttgtacagatcccacaatgcaagcctccaccccacgccagagcaatgtgaagctgtgagcaaattcattggcgaatgcaagatcctttcacctcctgatatcagccgttttgcaacatcgctcgtggacaattctgtgccattgttgagggcggggcctagtgacagcaaccttgatggaacggtgacagaaatgg

SEQ ID NO: 6233 - DNA, 302 bp, Homo sapiens
ccatgggggtcttagtgggcccccccttcgggagtgtgctctatgagtttgtggggaagacggccccgttcctggtgctggccgccctggtactcttggatggagctattcagctctttgtgctccagccgtcccgggtgcagccagagagtcagaaggggacacccctaaccacgctgctgaaggacccgtacatcctcattgctgcaggctccatctgctttgcaaacatgggcatcgccatgctggagccagccctgcccatctggatgatggagaccatgtgttcccgaaagtggcag

SEQ ID NO: 6234 - DNA, 187 bp, Homo sapiens
gcgaggtccagtactcgggacagactaagggcgcttgtcccatcctggacttttcctctcatgtctttgctgcagaactgaagagactaggcgctggggctcagcttccctcttaagctaagactgatgtcagaggccccatggcgaggccccttggggccactgcctgaggctcacggtacagagg

SEQ ID NO: 6235 - DNA, 378 bp, Homo sapiens
  unsure (334): n=A,T,C or G
gcgaggtaaaagatactttggattcaattaagaagagtttttaagaaaaaagaggaaggttctggcatggggagctctgcaacccactgctgggtgccagaagcgagctgtggaacggaagatgaagatggcaccatgtgtctctaaaccacaaatggaaccactgatttctatgtgtatttgcatttgctgtaatgtgtgggaaatctgaaggttacacagcacaactgtccacagcagatggccctcgaaggggatgaggtttagagccaggcagggcctggaaggactggattttacatggacatggaggacattgcaagagaaaggcatncaaggtgttctcacgaaatccactacaattgtacaagaaaatga

SEQ ID NO: 6236 - DNA, 366 bp, Homo sapiens
ctggtttccatgtattctaggccaggtaggcaacacagagccaaggcgggtgctggaagccagacggaacagtgttggggcaggaaggtggatgctgttgtcatggagctgtgggagttggcactctgtctgctggtggccctctcggctcacatgttcacagtgcagctcctggcagacttgggttttctctttggtggtttctaaagtgccttatctgcaaacaacttcttttctccttcaggaactgtgaatggctagaagaaggagctcagtaaactagaagtccagggttgcttggtttactggtttataagaaatctgaaagcacctctgacattccttttattaactcacctctcagac

SEQ ID NO: 6237 - DNA, 219 bp, Homo sapiens
ctgggaatcgtggcttcatcgacatcatggacatgcctaacaccaacaagtactcctttgatggagccaaccctgtgtggctggatcccttctgtcggaacctggagccggccgcccaggcggagcatgaggatgacctaccggagaacctgagtgagatcgccgacctgtggaacagccccacgcgcacccatggaacttttgggcgtgagccagcag

SEQ ID NO: 6238 - DNA, 201 bp, Homo sapiens; identical to SEQ ID NO: 5066

SEQ ID NO: 6239 - DNA, 333 bp, Homo sapiens
aaaaaagaacagtgaccaccttacaaaccagaaattccaggcaacaccttattcctttaagtaatccaaactattttctatctcctaaatgcagtcttttcccctgactagatactgtgtgcgtttagcacgaggcagaagggtgggggtttcacagtgacgcacacaaagaggcaggagctttgctaggtaccagggaaggggcagcatcttcaagtgcacatgtctgcgtctctgtgaagtcacttcaaagactttatgaagctcagatctgattctgttgaaatcaattggctcctttcccaccaaaattgtattcgagatgttcttcag

SEQ ID NO: 6240 - DNA, 166 bp, Homo sapiens
ctgaggcactttccagagcgtggggaggggcctccaccaaggcgagaagggctgcaggtccagatcaccagcgtttgtagacagtagtgtggcgcttggagtttacctgagggccagtggagctccagggacctatcaggacggggacctgtggggactgggaagg

SEQ ID NO: 6241 - DNA, 170 bp, Homo sapiens
aaaaagatttaacaagttaacataaaattaaagtgtgtctcaaaaccagacagccatcttgtctgccatcactgagcaaattacagatggactcaatacaaatttgcccacggggcttgcttgcaatactatttcacaaagctgactgtattcttcatcttcataaatgg

SEQ ID NO: 6242 - DNA, 236 bp, Homo sapiens
gcgaggtcctctgccttccttcactgtgcaccctgggctcatgcaccaaggcagagaacaggaagaagtgaggggacaagaagaaggcagaatgtccagatggaggataagaccaaagagccagcacctacaggacttgggctgcttcaggctgaacgctgggagaccacttcctgtgctgacacacagagctcccatctccatgaagaccgcacagcgcgtgtaagccagcccag

SEQ ID NO: 6243 - DNA, 158 bp, Homo sapiens
  unsure (1): n=A,T,C or G
ncgaggtgattttgaaggcagtgttcccttctctccattgactatgagagagttgggggacacacatgcagaagaagcccgtggggagaaggtggattcctggtgtgctggctggtttttcagggctgttagaggttttttttttctttttttttttt

SEQ ID NO: 6244 - DNA, 212 bp, Homo sapiens
cctccacggcacccacggcggtggcttctgtggggtcgctggtaatgggcgccaggcggcggagttcctcaaataattgcaagtggtagatggcagcctctgcctcacgggcaatctaggggagcaacatccgtccagagggacgagagggggacagagctttgtcagagctttgtcacaaaaggagagggaggggaagagtcaccggacag

SEQ ID NO: 6245 - DNA, 262 bp, Homo sapiens
  unsure (260): n=A,T,C or G
  unsure (262): n=A,T,C or G
gcgaggtaaaatcaaccagtaaataaagcatgaaaaagtcaattacggttatagaaaaggatgctaatgtactagattatgcaaagaaaaagttggtaatggaaattaggaagtagaagcagcagagggaacagtggtagaatgaagggttaaattgcttatgtccttatttctagcagatcaagaaatagtatttggaatggcacaaagaaagacttgttattttttaattataaaaggcgagtgaaataatttttttncn

SEQ ID NO: 6246 - DNA, 370 bp, Homo sapiens
  unsure (270): n=A,T,C or G
ctgagaagaaccataccataccaggcttccagcaggcttcataatcctcggttccccagactcaccggacaccatctcctatgccttggagaccttctgtcacttggctcccttcttaccaccaccaagactgtcccactgggcctgacccacctatgagggaagaagtcccacctgggccagagggagttcatgtgttactcataacatgcatttcaataaaaacatctctgcggtgggccttgggtaggagagatgaacccttccggngccaagctagtcccctctggtgtcctcgactgccctgctccctgtgtatctggcaaacctctgttctcccttctccattcatcaggaagggatctgctgt

SEQ ID NO: 6247 - DNA, 377 bp, Homo sapiens
ggcgaggtaaaggcttctggagtgaatggagtccaagttattacttcagaactccagagatcaataatagctcaggtaaggaatggtggtagagtttttgttccctcagagtgctttgcatgtcaaagtgtgggagcaagtgagaggaagattgttgaaactaacctgcaaaacaggacacccttggagggcactcttacactttctttggagaatgacttgcctgctgtctttgcgccttttgtgaagaacaaggaagcagagggagtggggtccttattagctgagaattagtacaagccatctgtattcctggaagctgccatacattttgaacaaaatccccacccactacgtccagttaaccaatttagccc

SEQ ID NO: 6248 - DNA, 264 bp, Homo sapiens
gcgaggtcaatatcaaaaagccttgttagtctatctggatcatatcaaggaaactaagataaatatatttgcttatatttgctatagttttgtgtgtgtgtgtttgcttacttgtggaaaccataatgaccaatattataccatggctgagagtgtagatttggaggttttaatttctgatccctcagttcattgactttgtgacactgattatctaatagttctctgtctcaatttcattagataagttgggaaggctttcag

SEQ ID NO: 6249 - DNA, 371 bp, Homo sapiens
aaagcaaatcctggctggcaggaaattctgaggaatatagctcttaggcttccagcctctaccatgcaggagagaacacagaaggactgatgtatgttggtggatccatgtatgtgtccagcacagcggcctgctggactctgagaactgggaaagatcagagcaagccttgcctcttatcttcgggaaaccagaatatgtttggggtggtaggagccacacagactcttctgagccccctcactcacttccttccccctgtgcctttcctttgagagtgaaggtgggtggagttgaccagagaaaggggagagaattcgggaaagacccaaagtgtttgtaattcttctttgtccttttacctacagaaa

SEQ ID NO: 6250 - DNA, 259 bp, Homo sapiens
ccaaacccagcccttacgcccctgctgacaagggagacaagctgccccgctgaactccaacaacctctgggtgggctcagcagcccctaggaagttaagcgagagctacagggcaggggggctccctgagggagtttgcacagaccaggaggggccaaggggtagccccaagggagcagaggaaggagaagggcaggaaaaggtccagggcacagggcaagcaacagtgccagagggtgcctggtcacaggaagcccag

SEQ ID NO: 6251 - DNA, 375 bp, Homo sapiens
cctgaaggccctgggcttttacgtagtaaaatcattcttaacagactattccagtgctttggttttgaataggatgtagcagaagactcagggctagagatcttcatacatatcaaactgtatgattgccagaagcgtaaagtcacagacgaaatacacacccacgttgggattagcagtgacctgtggggaagctggaggccaggagaggacctcccctcatcactcagccagacagaaaaggatgcagctctttcccagccgctctgttcctctctgtccacaatgctggagcatgggcagatcaaacaaaactcctccctgtgcctaagcatcgaggcgtacgtggaagacgggagtgagtgggtgtgtgcc

SEQ ID NO: 6252 - DNA, 275 bp, Homo sapiens
  unsure (1): n=A,T,C or G
ncgaggtaaacattgacccaacatattaccaaactaattcctgtgaaatacaaaaagaataatatatcatgataaaggtaagtttgtttaacccatggttaatttaacatatgaaaatcaatcatctatcatcttaatagatacaaaaaagaatttgataaaagtcaacacttatgataaaaagcaaaacccttaacaaattaggtatagactgggctttccttgatctgataaatagcatctacaaaactgaacatcaaatattatatttcata

SEQ ID NO: 6253 - DNA, 364 bp, Homo sapiens
gcgaggtctgagttcccttcccgaaggtcagctcggggctcccgacgatcatgcagaagtagatgccactgtcttccggcttcacgcttgtgagattgagaatgaaccggcttgcatcccgaaacacagctatcttctcctgttccacctcttcaccgtggatagtcccttttgcggaatcccagagggccaggaactcgtggtgactgtcactgctcggtgcctggcgctgtctcagccagtagatgcgcatgttactgagggagattttagcctcgcaggacagcatcaccatcttgttggtttgcacctttatgtatgcaggggtctgctggaggactgagttgccatggagaactgtcag

SEQ ID NO: 6254 - DNA, 345 bp, Homo sapiens
gcgaggtctgcttcacaacaggatcacagtctttctgtccacatggaacaaactgaggagatcgcttgagacgaacggtgagatcaacctacccaaagactactgcagcactgacttggatctggacactgagtttgagatcctcttgccacgccgacggggcctgggcctctgtgctaccgctctcgtcagctacttgattcgcctacacaatgaaattgtctacgccgtggaaaaactctccaaggaaaacaacagctattccgtggatgccgccgaggtcactgaactgcatgtcatcagttatgaagtggagcgggacctgactccactgattctctccaa

SEQ ID NO: 6255 - DNA, 345 bp, Homo sapiens
aaaaaagaaagacatattttacatgtatgtgtagaaaataatcaggaagaatgtacaccatattaacaggagattattcctaaggtgaagaattatgagtggttcttatttccttatctacttaagttttttctctccaatgggcaggcattgcttgtaccataccttaagcaaggaagtgcatgtttgggacagcagtttgggctctcagcctccttaagagagtcaggtctgcctcatccctgtatctgctagttgagcagaggccagggctgtgtgaggggctctccaacaattgtctttacaaagtataaaaagtcatcagtgatcccaggaacatgtttg

SEQ ID NO: 6256 - DNA, 252 bp, Homo sapiens
  unsure (110): n=A,T,C or G
  unsure (155): n=A,T,C or G
  unsure (183): n=A,T,C or G
  unsure (218): n=A,T,C or G
  unsure (231): n=A,T,C or G
ctgttaaacaggttcgttcttggcgccacataaaaacaagccaatcacatcgaataaatcatggctttttttttctttatcacaattcactaagtgatgttaattatggnccttgtcaaacacgtttggtaaaggctatttacagtgtacatggntgagcatgcactatttatagttacaaanatacctgccagtttattacaatagaattacacagngcctgaaaatggngaaacatctcacacatcattt

SEQ ID NO: 6257 - DNA, 356 bp, Homo sapiens
gcgaggtctggtatatttttatgcgactgcaccagattctctgcctgaggctgctacggatttgttcccaagccgaacggcaaattgaagaagaaaaccgagagagagaatgggaacgggaagtgctgggcataaagcgagacaagagtgacagccctgccattcagctacgtctcaaagaacctatggatgttgatgtagaagattattacccagctttcctggacatggtgcggagcctgctggatggcaacatagactcatcacagtatgaagattcactgagagagatgttcaccattcatgcctacattgcctttaccatggacaaactgatccagagcattgtcagacag

SEQ ID NO: 6258 - DNA, 197 bp, Homo sapiens
gcgaggtctgagagccagcgaagaactgaattccgccaacaacctgaatgaacttagaagcagattcttccccagagcctccatgaaggaatgttgtcctgccaacccttatttcagcctttaagaccctgagcagagaatccagccacactgtgccagactcatgagctacagaactgctatgggtattgtttttt

SEQ ID NO: 6259 - DNA, 164 bp, Homo sapiens
aaagaattttaatacaaacttaatataaactatttcagtccctcttaacatgtaagacactgactcaaaatacttttataccgtttttttcaagtattgcacaatataggtacaaaattaatatttacgattacatttttcttccataatatatagcaaaaatc

SEQ ID NO: 6260 - DNA, 364 bp, Homo sapiens
aaaaggagtttttagaagaaaatagaaacaatgggggaagatggttaaaaattaataataactttccagacttgaagaaaaaaaactgaatcttcacattacagaagcacactatgtctagggcaggataaataacaaatctacactaggacacatcctgatctgcaacacactgaagataaagagagaacagtaaaaatatagattactacctgtaagattactacctacaaactaagagggctcagactaacagcagattttttcattagttaacactgaggcaaggagacaatagaacagtatcttcaaggcacagcagacagtactaaacaactcaactcggtcaaacctaactttctgg

SEQ ID NO: 6261 - DNA, 334 bp, Homo sapiens
cgaggtccttggcatagccaggctgctccagcactgtgagctgggagtctcctcttgcagaagatgggtgtgaacctgacacgcagcaacaaggagacggtgaagcacagcgacgtcctgtttctggctgtgaagccacatatcatccccttcatcctggatgagattggggccgacgtgcaagccagacacatcgtggtctcctgtgcggctggtatcaccatcagctctgtggagaaggtgcccatctcagccctgatgccccttgtgtgaggggagggttgacccacgaatggcagctaatgggtgggtgctggtgggagccgtgccctgg

SEQ ID NO: 6262 - DNA, 297 bp, Homo sapiens
  unsure (173): n=A,T,C or G
  unsure (220): n=A,T,C or G
  unsure (262): n=A,T,C or G
cctgcaggggatggaaccttccagaagtgggcggctgtggtggtgccttctggacaggagcagagatacacctgccatgtgcagcatgagggtttgcccaagcccctcaccctgagatgggagccgtcttcccagcccaccatccccatcgtgggcatcattgctggcctggntctctttggagctgtgatcactggagctgtggtcgctgctgtgatgnggaggaggaagagctcagatagaaaaggagggagctactctnaggctgcaaagcaggtgacagtgcccacggctctg

SEQ ID NO: 6263 - DNA, 206 bp, Homo sapiens
  unsure (1): n=A,T,C or G
ncgaggtaaataattaggccacttaatttttattacaccaagagtcagaaaatgattgcagactacatccttttacacaaaacacatttgtagggtttctaaaaagctacatacataaaggaaaaattttagaataatatcctactttcagtgtgtcagggaaatttgctaatatgttttaaggttatgttagtttttattttttt

SEQ ID NO: 6264 - DNA, 177 bp, Homo sapiens
gctgacagttctccatggcaactcagtcctccagcagacccctgcatacataaaggtgcaaaccaacaagatggtgatgctgtcctgcgaggctaaaatctccctcagtaacatgcgcatctactggctgagacagcgccaggcaccgagcagtgacagtcaccacgagttcctggc

SEQ ID NO: 6265 - DNA, 442 bp, Homo sapiens
gggtaaactgtttactggagaaaatcctcgctcatgtccatttattgttttttctgtactgtgatttgtttcaagcttaggaaaactagtatattagagtatgttctaggaaattaaaggatctggttagagtaaaaagttctttttaaggttcttaactaattttttcacaactaagaaaataaatgaagtattcttaggctgaaattcatcttattttatcataaattagattgtaggggcagcctacatttttgtgtatgtgtttttatttcttaaatgattgtgtgagcctggtgacattttatggttcttgtgatctaaactgtttttccaattcacatcttttgtcgtgaagtgatattatactagagtactgtttgcattgtaaaaatgctttgctggtgctctggcattttgtctttatctcatcacctaattt

SEQ ID NO: 6266 - DNA, 306 bp, Homo sapiens
  unsure (83): n=A,T,C or G
  unsure (254): n=A,T,C or G
gccactggaccgtcttcccagtcccatcaagagaaaaccacagactctgggctcactgaagtcttcccaagggattgttgaanaaacttctgaagagggaaactctgtacctgcttcacaaagtgttgctgctttgacagtaagagaagcttagtccttatgccagagaagttctgcagaagaaatcactgtttgtcctgagacccagctaagttcctctgaaacttttgaccttgaaagagaagtctctccangtagcaggagatatcttggatggggtcagaataataatggcagataaggagg

SEQ ID NO: 6267 - DNA, 229 bp, Homo sapiens
ccaatgcccttctagtatgtttggtgaaggtcttgaaggcaccatttcccccatccaccctggggagaaattgagtccctaaagtcaacgacaaggcttattgaggctgagtttgcaacagatccgatctgggaggtagaaacaaaaatgactgaacatctttttatcccccaatcgttacaaagcctaaataactctaaacgggatgggagggcaaattttaggtcag

SEQ ID NO: 6268 - DNA, 292 bp, Homo sapiens
  unsure (1): n=A,T,C or G
nggtaaatcaacttgtctgatgccagggttcagagagacacctacagtcagttgaaaggcaagaagagacaaggtacaggaaagttgctctttagataacatggtagactaggaggaacattaatatggtttgcttatataatctgactgtgtaaatctgaatctatgtaacattaaggttgcaaatttgagcgtttatattaggaagttaaaattttaagtgtctccaaaataatttttactcattgcacgtgttctgttttagaaaagcctaatgattgtgttttgattt

SEQ ID NO: 6269 - DNA, 418 bp, Homo sapiens
  unsure (1): n=A,T,C or G
  unsure (399): n=A,T,C or G
nctgttgaattgacagaaaaaattgctcagcttttcagcatttccccttgccagatcagccagatttacaagcaggggccaacaggaattcatgtgctcatcagtgatgagatgatacagaactttcaggaagaagcatgttttattctggacacaatgaaagcagaaaccaatgatagctatcatatcatactgaagtaggagtgcggcgtttcgtgcccagtggctgctccttccttcacctctgaaaacggccctcttgaagggggatatgaatggagatttgaaggtctgcaagaacctgactcgtctgactgtgtgtggaggagtccaggccatggaggcagaatcctggccctctgtgttggcccaactcttgtggtacacacagattactgnccaatatgcagttctgcag

SEQ ID NO: 6270 - DNA, 320 bp, Homo sapiens
  unsure (1): n=A,T,C or G
  unsure (43): n=A,T,C or G
nctgctccctgagaaagggctgggccttgattccctggcactntgaccttttgagcacagcagagtggggacagtttcgagcagagctgcaggtgggagctgggccagtaggcaccagtcaaggagtgggcagggtaccagcagcccccgcattagcttcctagggctactgtaacatgtgaccacagactgaatggcttaaaccacagaaacctactgtcttacagtgctgcaggccagaggccctcaaccaaggggtcggcaggcttggctccttctggaggctctcaggggacccctgtcttctccctttcccccag

SEQ ID NO: 6271 - DNA, 282 bp, Homo sapiens
ctgggctattggattaagtgtggctgatcttattgaatccatgttgaaaaatctatccaggattcatcccgtgtcaacaatggtaaaggggatgtatggcattgagaatgaagtcttcctgagccttccatgtatcctcaatgcccggggattaaccagcgttatcaaccaaagctaaaggatgatgaggttgctcagctcaagaaaagtgcagataccctgtgggacatccagaaggacctaaaagacctgtgactagtgagctctaggctgtagaaattt

SEQ ID NO: 6272 - DNA, 297 bp, Homo sapiens
ctgcagataccttagtgacaaagtttaatcagcttcctgttgagctaaaaaaggaagtagagatgaaaggtgtgtggagcatgccatcaaaatactctgaagaaggagtttataacgttcagtacagtttcattaaagaagctgaacatcactgcttgttacatagcccaattcctgtgaactgccccataagattgctccatggcatgaagggcgaattccagcacactggcggcccgttactagtggatccgagctcggtaccaagcttggcgtaatcatggtcatagctgtttt

SEQ ID NO: 6273 - DNA, 178 bp, Homo sapiens
  unsure (1): n=A,T,C or G
nctgaaggccatagagccccagaaggaggaagctgatgagaactataactccgtcaacacaagaatgagaaaaacccagcatggggtcctgtcccagcaattcgtggagctcatcaacaagtgcaattcaatgcagtccgaataccgggagaagaacgtggagcggattcggaggcag

SEQ ID NO: 6274 - DNA, 418 bp, Homo sapiens
ccattgcccacccaggtaccagcagcagaagactatctgacttggaaagaatgggggtttacaggagtccaggaggtcctttccgctctcctaagagccagtatgttcgcatctttccttttcccttcatttccacatccccccgaagctctagctggaagcatcctagctcatctagggcatccttggtggtagaggagacatggatcttcagcgcttgaccattagactccattcgagaagcagtgttcactgtgtctccaaaaagacaataacggggcatcttcaggccaacaaccccagcacagactggcctttgagaagaaacaggttgggagagtctgggaaaggtggagactagggctggagtgagagtcagccttaccagtatggaccctatgcgtagcctcagacctcg

SEQ ID NO: 6275 - DNA, 216 bp, Homo sapiens
  unsure (4): n=A,T,C or G
gggnccacagatttgggaatcaggattcttcagcctaaagaggttgacagctttcacactttttctgtttgctggaatgacttgtataagacaagaagtaactgtttctttttttctttttgagacagggtctcactctgacacccaggctgaagtgcaagtggtgcagtcacagctcactgtagtctcaatttctcaggcttaggccatcctccc

SEQ ID NO: 6276 - DNA, 155 bp, Homo sapiens
  unsure (88): n=A,T,C or G
aaccataccataccaggcttccggcaggcttcataatcctcggttccccagactcaccggacaccatctcctatgccttggagacctnctgtcacttggctcccttcttaccaccaccaaaactgtcccactgggcctgacccacctatgaggga

SEQ ID NO: 6277 - DNA, 451 bp, Homo sapiens
  unsure (1): n=A,T,C or G
ngtggtgtcgggcactgtcatagtccacgagtttccgaccccgcttggcaattctctccttaatttcactgaactgggcaacatagatttccatggtccttacagcctggtcagccagtttctcctcgtagtcttcccaaaggagatcattattctgtaggatagagtcagaggctggtgaaggctccacttcccaacaacaactgcctaccagggaaatacccaaattctccctgcaaaaaccttttttgtagcaccgtatttagaataccatgttggattctggggactagtcagaggaagaaaagagacagcccctaccccaaggaactgctctatgggagtctgaacatacattcagagattaagaacagggcacaaggtcaaagccttggattccagagcttagatgggaaagtttaagagtgtataactgcatgaagtttgtttt

SEQ ID NO: 6278 - DNA, 257 bp, Homo sapiens
aaattaatttttagttgttcaaagttgaaaactttaactgaaaatacttctgatcatagtgtgacatgaagttaatatttttacctatgaaagtggttacgtatatatatatacacatatatgtatagactgttacagataattgtataaatttgctcgtggagctagtctatatttgaagttatttgtctctgatttctgattttcaaagcttaatgagagttcttctagaaataacccagcccccattttttttt

SEQ ID NO: 6279 - DNA, 377 bp, Homo sapiens
  unsure (1): n=A,T,C or G
  unsure (200): n=A,T,C or G
  unsure (238): n=A,T,C or G
  unsure (373): n=A,T,C or G
nggtctgtacatggtgcaccatctttggggtatctgtttttcccttttcgagttactgggatttaagagttcattactaagttgtactgggaagtagagcacatcttgagtcagtaaccttaaccactacagcaaatccgacgtcacagagggacagtctgtacggggctgtctggactagcgaggtcaacagtgaaagnccatagattgatggcattagtgagctgaaagtgagtanggatgatggggaaaggaataagggggtaaagcaagcagccatggaagaaggaggccagggaagtcaagagtgccttccacagaagtgggtcccagcctttctttgtagactgactgcttactttcctcgacagangcag

SEQ ID NO: 6280 - DNA, 159 bp, Homo sapiens
  unsure (1): n=A,T,C or G
nccttctagcatggcatcaattccgatataggttcctgtgcgcccaacaccagcactgcagtgcaccacaatgggaccactgaagaaattgctgaaggcattcactctccttctcagtttgaggagcaagtgaggatcctcaggcaccccgtggtctgg

SEQ ID NO: 6281 - DNA, 139 bp, Homo sapiens
  unsure (42): n=A,T,C or G
  unsure (103): n=A,T,C or G
  unsure (119): n=A,T,C or G
  unsure (126): n=A,T,C or G
  unsure (134): n=A,T,C or G
agggttctgtggaacaccatttctcaaaggggcatcctgcanacgttccagccccaggggaggccccgagatgctggctggcctgcctggagggtgcttccanaaacaacggagatggnggtgaanaaggctcngggct

SEQ ID NO: 6282 - DNA, 152 bp, Homo sapiens
  unsure (77): n=A,T,C or G
  unsure (145): n=A,T,C or G
caattaagaagagtttttaagaaaaaagaggaaggttctggcatggggagctctgcaacccactgctgggtgccacnaagcgagctgtggagcggaagatgaagatggcaccatgtgtctctaaaccacaaatggaaccactgantcctatg

SEQ ID NO: 6283 - DNA, 269 bp, Homo sapiens
gcctagagaacgagctgctcatcatgtttctaatataatttctggggtgaaatgaatgatttccttactggcttagagaaaaccaaggtcaataaaatgcagattgacttaactattagaaaagatgggatgacttctgggaaccacttaactcttcaaatgactgttgaaagagaaaaagcaaaactgaaatcccaccagaccattttgtgtgcctgtttctaatcgatacaaagttaagcatgagctaaaatcagacaaagcacttt

SEQ ID NO: 6284 - DNA, 317 bp, Homo sapiens
  unsure (1): n=A,T,C or G
  unsure (2): n=A,T,C or G
  unsure (289): n=A,T,C or G
  unsure (315): n=A,T,C or G
nnggtctgagccgacttaggaatctcccatccccgccccaggaaaaagaaccaagagaaaagaaccgtttgtgctaacagtcatcgccaactgccgtgagtacaaactccggttaagtactgctgctgcgccagcgccctggcaggcatgatcacctcccattggtagggccacagctccattctgggaatggaaggggactagacccactgggcctccactcatcccactcctggacctcggcgcaccacctaaggggaattcacacactgcggcgtctatgatcgantcggaccaacttgcgatatggcatantg

SEQ ID NO: 6285 - DNA, 307 bp, Homo sapiens
  unsure (1): n=A,T,C or G
nggtcctgggtgagggcgtccatggtgccagccgtgccattcgtcaagcctgtggcgccaagtcctccattcagagccgccatacctgagagcatttgagcaactgctagtgcattaatattattcagtccaacagtggctccagccagtccttgcagagtcccaagagaggtcaaggagttcatggctgcaccagcagtggagttgggggttgaagcagccacgggactcgtgagggctcccagggcgctgctcgtggtagagagagggtttgcattggtgctggtggctgaggtctgggccgcag

SEQ ID NO: 6286 - DNA, 297 bp, Homo sapiens
  unsure (1): n=A,T,C or G
nggtctggctcgcaggcgtcgggggtaacctggtactgactctacccgcaggccctggggtgggtcagggcgcactaagggcatcaagacacaaagtcagggtaggctatgggtctccatcacttccccaccacttcccaaagtgtgtgtttaaaggagccttagccagacactcctgagaggggaggggaaatcttaaacttgatcatccattagactcagaccggtcatctgtattatgaaatgggctgaggccgcgtgtggtggctcatgcctgtaatctcagcactctggaag

SEQ ID NO: 6287 - DNA, 399 bp, Homo sapiens
gccaggatggtctcggctgcctgacctcgcgatccatccgcctcagcctcccaaagtgctgggattacaggcgtgagccaccatgcccggcctgtgtatcttctttatgtttaccctaccaagagcagacctgagcattttgctggccgtagaggtatataaaagaactctaagcttaggcatgcagaataggcactggatgaatgtagtgaggctattaggagtcttgttggctccctgatgtccttatcatgtcttcttcgcagactgtggatgcacacaagacagctaaaaccttgggcatcatttgaaaatgtttggctgcctgctacaatctcaggagagagaatccttcatacttatattggactggatatattgtcaatcaaattctttttt

SEQ ID NO: 6288 - DNA, 287 bp, Homo sapiens
gaaatgactaggacattaaagggattgtttcagaagaactatcagcaccttttttatgtgtcatgttcatccagactatccatccagataattgctttatttctgatatgtcttccaaggttgttaccccgtgtgggataggcaatgaatttaactgtcttttgtccctaaaagttttataagtttttatctaacatattcatgtagtggaaaaaaactcacaaaagtgctttcaagcattcacagtggtgtctaagccactattaattgaaaaagctgctgtattt

SEQ ID NO: 6289 - DNA, 212 bp, Homo sapiens
  unsure (4): n=A,T,C or G
gggnaaagcgaattctctactgaaaggtctgctctgcttaaggagctacaaactgctctcaaaagaatgaaatactgagttccaattcagtgaggcacagtgttggactatggcacatttagttggagtcggggggaggtcaggaatatgatcagataatggattttataccttagagcaaaatctattagtctctctcagtttatcaattt

SEQ ID NO: 6290 - DNA, 519 bp, Homo sapiens
  unsure (1): n=A,T,C or G
  unsure (505): n=A,T,C or G
naaaaaattagtcatgagacttattcatctttccagggaacatactgattggtcttaaaagactagacagttaagtaaaaggtggctggaacatctatttttctacaaaactggaaaaatgaacctggttctagaagaatgtacaccaaaataaaacatgtgaagcagtattgattctttattgggagtacatttttttaggtctcttaaactttaatttcacacagtaaattttgaatctcataaggaagcatatttgaacctagtcaatttaatcttagtgttcccttgaaaacttttttccctacaaaattttaaggtgaaaaatacaatagtaaattaagattacactggggaaaaaaatgcaggtatcactttactccattggtatctgacctagagcttaattaaggttttagaaatatgtaataccttccatcattccatcatccttaaattctggtaccaaataatggctaatggtacaaaaaggtatcctccaganacccaagcttgaca

SEQ ID NO: 6291 - DNA, 429 bp, Homo sapiens
gactttgtaagtttcttgatctctttagtatgatgttaaaaacagaagggactgaagatttctggcattgaagaaagctattttatgaacattctgcactgagcaggtaaaaacccaataatgcacaccaaaagtaccccagaaaatggggtagtcccatgtagtggagccccaaaggtaggtgctttctgcctaagtggagctcaaggtagcaaaaaataatggggatgagccatggcaccttgtcaggctgtgctataaagccatatgtactgttatttacaccccatagacttaatagtctgtccaagatcgctgaacactagaacatagcatggctctgtgggtttgtctcttgctacattgtaccgtgctcctggggttaagtggaagcaagcattggggagaaatgtgtgagatttagcccca

SEQ ID NO: 6292 - DNA, 457 bp, Homo sapiens
  unsure (1): n=A,T,C or G
  unsure (380): n=A,T,C or G
nggtctgtatggactagaaaagttttgggcttatttgaaatattctcaatctaagacacagtctattgacccaaaacttcaggaatacctctgtagttttaagaggttagaagacttccgtgttgatccccctattagtgatgaatttggaagaaaaagacattcctctacttctggtgaggagagtaatcgtcatagacttccacctaattcctctacaaagccaccaaatgctgctaaacctacatctaccagtgagcttcaggtaccaataaactctcccagaaggaatatttcaccggagtccagtgacaattcacattaaacagtgctgcctgtgtcctgtggtctcaagaaatggtgaaatgcctgagaaatanactcttatgaaagttctttgtccttgaagtcacatttacatcagtatttatttggggaaaatcttctggggttaatt

SEQ ID NO: 6293 - DNA, 302 bp, Homo sapiens
gcctatttatttgttttggccctggatcttttctaatcacaattatatttctttatttttgcctttgagcagtttcatttatctttgtgggcagggaagattaaatatgaaattcagtccagtcattttgctactggttagctttagtttgaggcaagtaaaaatttttgattaaaattagtttcttaaaattatgcccttgctttaccaaataatcaaattgactaaaaaataagggtatgtaactttgcattttgaagaacaaaccaataatttttcatgagccctactcgatcttcttt

SEQ ID NO: 6294 - DNA, 336 bp, Homo sapiens
gggtctgcaggcattcgccctttgtgtgttaacactgtagctctaatcgtgcctggtgttctgaagcaggctcctcttccctgctgctgtgctgccatcccctgctcactccgcactcgcatgcattgcggattcagcacttaagccctagtgtgtaaatgacttggatctccctcctggcaggctgtgaccctcagcacaggggctctgtcttagtcagctctgtggcctggtacacaattggtgctcattaaacacgtgttggattactggctgaggtggtgcagtggctgcctaccagcaagtctttgtttcccattctgtcaggagcagagg

SEQ ID NO: 6295 - DNA, 278 bp, Homo sapiens
  unsure (1): n=A,T,C or G
naggtccttccaattcaggccacatgtacctccagatactatgtggctggctgcctctgcctttttgggcaatctcagttccaaatattctatcatgttgtcatgccagcttttggcttgggaaatatggtcagtatgtctgtggggaaactgattctgtgtgccggccgcagaggaaggactctgggctggaggaaaggggtagggctcagcgccagtgctaggactggttgaactgtagggtgcagccctggctagtgaccacaccccatgtccag

SEQ ID NO: 6296 - DNA, 378 bp, Homo sapiens
  unsure (1): n=A,T,C or G
  unsure (184): n=A,T,C or G
  unsure (316): n=A,T,C or G
  unsure (365): n=A,T,C or G
  unsure (377): n=A,T,C or G
  unsure (378): n=A,T,C or G
nctgctctttcagctttgaacgtcctttcccattctccatcatccacattcacctatcctgcctgccccagttaaaatcctgtttcttctaggaagtccctcatcccacccgcttaccccagggagactgagcttgttccttctcctagtaagaccctcagcccatggagtcctgtgtgatgtngtgaagcgtgggaggacagactgaactgctcggaccgtggagtcctgtgtgatgttgcgagcggggaggacagactgaactgcgtggtgcttcgcacatagacctcaacagggattgggattttgaagctgntggcgggggctgaggactgcttttcttcctttctagctcaaccggcagntaaagccactgnn

SEQ ID NO: 6297 - DNA, 413 bp, Homo sapiens
  unsure (189): n=A,T,C or G
  unsure (249): n=A,T,C or G
  unsure (286): n=A,T,C or G
  unsure (336): n=A,T,C or G
  unsure (338): n=A,T,C or G
  unsure (383): n=A,T,C or G
  unsure (387): n=A,T,C or G
gaggtccaatgatttaatgaattatgcctacataatgaagcctccggaaatctacaaaagaactgggttcaaagagcttctggatagctgaacacatgggggctcctagaaagtggcatgcccacagagagcagggaagctccatgccccttcccatgtaccttgccctctgcacctcttccatctggntcgcatctgtcccctttgtaatatcctttataataaactggtaaaagtattttcctgggntctgtgagctgctctagcaaattaatcaaaccccaantgagggggtcatgggaacacttatttataactggttggcgagaagcacangnaaaacatctgggacttgtgattgtcactggaagttggggagaggnttangactcaactctcaaccttgtggaatc

SEQ ID NO: 6298 - DNA, 245 bp, Homo sapiens
aaactgctggagggtacttgctataatggaaagctcatttggaaggtgacagattacaagatgaagaagagagaggcggtggatgggcacacagtgtccatcttcagccagtccttctacaccagccgctgtggctaccggctctgtgctagagcatacctgaatggggatgggtcagggagggggtcacacctgtccctatactttgtggcatgcgaggagagtttgactcactgttgcagtgg

SEQ ID NO: 6299 - DNA, 247 bp, Homo sapiens
  unsure (138): n=A,T,C or G
  unsure (220): n=A,T,C or G
cctggaaggtgtgcaggagtttggtagaggagtgatctaggtgaggggaatggaaggtgcagagaccagagctgagagggcctgaggcactttccagagcgtggggaggggcctccaccaaggcgagaagggctgcangtccagatcaccagcgtttgtagacagtagtgtggcgcttggagtttacctgagggccagtggagctccagggacctatcangacggggacctgtggggactgggaagg

SEQ ID NO: 6300 - DNA, 341 bp, Homo sapiens
attttttctttatttttctttataaagtgaagagtaggtagcatgaattcctcttgccctttgctatttcagtctggcatcagtagcaattgttgctatgtccagttttcattcatggatttttctgggattgaagatgagttcaatgttgattatttaattgggcagtataagtaaattcattggctctccttccagtttagtgaatactaaatatcatccatgatattttatacttcttacacttctggaatctaacctgaaaatagaagttgtaagtcagggacggtggtatgtgcctctagtctcagctagttgggaggctgaggcttgagcccagg

SEQ ID NO: 6301 - DNA, 438 bp, Homo sapiens
  unsure (438): n=A,T,C or G
gcgaggtgagaggaccagcggccagagcctcagtgactgccaccctggaggacagggcacaacaaccgtttctggagagaatgggaggattccagaggggcaaatatggaactatggctgaaggtagatcagaagataacttgtctgcaacaccaccggcattgaggattatcctagtgggcaaaacaggctgcgggaaaagtgccacagggaacagcatccttggccagcccgtgtttgagtccaagctgagggcccagtcagtgaccaggacgtgccaggtgaaaacaggaacatggaacgggaggaaagtcctggtggttgacacgccctccatctttgagtcacaggctgatacccaagagcttgtacaagaacatcggggactgctacctgctctctgccccggggccccacgtcctgcttctggtgatccan

SEQ ID NO: 6302 - DNA, 248 bp, Homo sapiens
  unsure (2): n=A,T,C or G
gngaggtcctcatttagaaagaaaatcccctcagaaggctgtctggcacccagtgtcctagccaggccaagtatatgagaaaggtaagtccattttccccttcaggtcctcagtggattacttaaccactgctgtccctcggtccctttttcctaaacgggtttagttctgtcttttttctccttttttctaaatgctggtaaatatttacattcagccagggaagaggaggccagaggtcgggccag

SEQ ID NO: 6303 - DNA, 345 bp, Homo sapiens
  unsure (300): n=A,T,C or G
gaggtccaagccgtagtggggtctgatatcaccagcataaccgagcggtataggatatattctgttaaagatggaaaaaatggaaaatctctgccatttatgttgtgtgacactatggggctagatggggcagaaggagcaggactgtgcatggatgacattccccacatcttaaaaggttgtatgccagacagatatcagtttaattcccgtaaaccaattacacctgagcattctacttttatcacctctccatctctgaaggacaggattcctgtggtggcttatgtcttaaacatnaactctattgacaatctctactctaaaatgttggcaaaaagtgaa

SEQ ID NO: 6304 - DNA, 205 bp, Homo sapiens
aaatggtagagggttagtggaagtgcacacgttgtttttagcccaggggtagtaacaaactcttactagccaactagaaaattattttgttgacgagatgtcccttttaggagggcttgtttcctgaaagaatgccaactttttttgttgttctttcagtattggcttgagtgacctgttctcctgagtgctctagtgtctccag

SEQ ID NO: 6305 - DNA, 347 bp, Homo sapiens
  unsure (338): n=A,T,C or G
gcgaggtctgtgttggcatgcacctgcagtctcagctacttgggaggctgagacaggaggatcactcaagctcagaaggtcgaggttacagtgagctatgatcatgacactgcactccaacctgggcagcagagcaagaccccgactcaaaaaaaacatatgaaaagaaaaaagtatggagcatagttggggaaaagcaaatagccctatctgagcacagtcgactcatgatgctctcttctactataactgcctttacttttctcataaaagttgaaaaataccattctgccatttgtgcattaatttgctagagttgtagcaataaagtagcaganactggaagg

SEQ ID NO: 6306 - DNA, 348 bp, Homo sapiens
aggtaatttatgtacagactgtgacagattccttcaccttcatcgaagaaccaaaactcatcaaagacaggtcttcaaagaagaagaagaagctataaaggttgaccttcatgaaggttgtggtagaaccaaattgttctggttgatggcactggcagattctaaaacaatgaaggcaatggtggaattccgagaacacacaggcaaacccaccacgagtagctcagaagcatgtcgcttctgtggttccaggagtggaacagagttatctgctgttggcagtgtttgttctgatgcagattgccaggaatacgctaagatagcctgtagtaagacgcaaccttgtgg

SEQ ID NO: 6307 - DNA, 177 bp, Homo sapiens
catggtccttgcggagaaccgaccggctgtgaaggccgcgcagaacgagatctggcagactttcttcaggggccgctacctgctcctgcttatgggcctgttctccatctacaccggcttcatctacaacgagtgcttcagtcgcgccaccagcatcttcccctcgggctggagtgt

SEQ ID NO: 6308 - DNA, 201 bp, Homo sapiens
cctacggccagaagccctacaagaagatgaaagggccggaggtcatggccttcatcgagcagggcaagcggatggagtgcccaccagagtgtccacccgaactgtacgcactcatgagtgactgctggatctacaagtgggaggatcgccccgacttcctgaccgtggagcagcgcatgcgagcctgttactacagcctgg

SEQ ID NO: 6309 - DNA, 340 bp, Homo sapiens
  unsure (89): n=A,T,C or G
  unsure (98): n=A,T,C or G
  unsure (103): n=A,T,C or G
  unsure (117): n=A,T,C or G
  unsure (126): n=A,T,C or G
  unsure (196): n=A,T,C or G
  unsure (206): n=A,T,C or G
  unsure (269): n=A,T,C or G
  unsure (281): n=A,T,C or G
  unsure (290): n=A,T,C or G
cataggaacgcactcaggcaggtggtttgttctggatgcagaaaccagagatctagtttctatccacacagacgggaatgaacagcttntctgtgatncgctnctcaatagatgganccttcctgnctgtaggatctcatgacacctttatttacctctatgtagcctctgaaaagggaagaaaatatagcagatntggaaggtgnactggacattccagcttacatcacacaccttgactgggcccccagacaacaagtatataatgnctacctcggganactatgaanattgacctgggacattccaaatggctgcaaactaatcaggaatcgatccg

SEQ ID NO: 6310 - DNA, 195 bp, Homo sapiens
  unsure (1): n=A,T,C or G
natcatttaatggaaatctgcacttcaaaacagcacttgaaggaccagccattggccctccaatgtaaatacttctcatttcacattatcagagaacagtgcagtttactaaccactccttccttataagaaattcagtactgtaaaattttttttcagtttcaaaacatttcaatcttattaattccaaagatc

SEQ ID NO: 6311 - DNA, 309 bp, Homo sapiens
  unsure (302): n=A,T,C or G
aggtccagggtgcttttggaaacatgtgtcgtggaggccgaatgtttgcaccaaccaaaacctggcgccgttggcatcgtagagtgaacacaacccaaaaacgatacgccatctgttctgccctggctgcctcagccctaccagcactggcatgtctaaaggcatcgtattgaggaagttcctgaacttcctttggtagtttgaagataaagttgaaggctacaagaagaccaaggaagctgttttgctccttaagaaacttaaagcctgggaatgatatcaaaaaggtctatgcctctcancgaaatg

SEQ ID NO: 6312 - DNA, 186 bp, Homo sapiens
aggtctggagatgttgggctgggaggccctgtggtcactcatactgcaggagagagaagaagggtacaggtgccagcttctccctgcccttaagcgaggtcagctccaccaggctcacgcactccaggacctcagcctgcaggcggcccagcagctcacaggcagcgttcatggttccaccagtgg

SEQ ID NO: 6313 - DNA, 172 bp, Homo sapiens
gaggtaaaaaacaaattgttgctatttcctagaagtttctggtttttaagatgaacataaaagtgtcagtatgcttcttttatgaggtgtactttatactttgatgaaggctaaggtgtacctaacagctttttatagtatattcatttatggagttagctgtatttttttt

SEQ ID NO: 6314 - DNA, 194 bp, Homo sapiens
  unsure (69): n=A,T,C or G
  unsure (92): n=A,T,C or G
  unsure (113): n=A,T,C or G
  unsure (175): n=A,T,C or G
  unsure (176): n=A,T,C or G
  unsure (185): n=A,T,C or G
aaaagctatttacacgctacattctatgaaaaatatgcttcaggaaatacatctaaaattaaaatacangattgcctgagaaacaaatccancccctccgtgtcgatggtggncacaccatccaggtacgacccatgcaggcgacaccacacgctgacacgggagaacagagaanngccgaccgnaagtcctcg

SEQ ID NO: 6315 - DNA, 289 bp, Homo sapiens
  unsure (22): n=A,T,C or G
  unsure (31): n=A,T,C or G
  unsure (35): n=A,T,C or G
  unsure (48): n=A,T,C or G
  unsure (69): n=A,T,C or G
  unsure (73): n=A,T,C or G
  unsure (97): n=A,T,C or G
  unsure (201): n=A,T,C or G
atggtacctatggaattgcttntattttagngaanatggaataaattncacccatccccattgtcaagnaatnaaaatatgcctctttttctactgntgaatgattcaaaatcaggtatttctggaaatactcagaaagggtaggaagggaaggagaaggtcaataggtgcatcagaaaaaggtataaaaatcatctaccnttaatcataagggtggatggattgcacttttccacttatttcaacacataatttttctaactagtatgaatgattgcaaccattttgg

SEQ ID NO: 6316 - DNA, 297 bp, Homo sapiens
  unsure (133): n=A,T,C or G
  unsure (140): n=A,T,C or G
  unsure (168): n=A,T,C or G
  unsure (181): n=A,T,C or G
  unsure (197): n=A,T,C or G
ctgacatggcgggagtttcagataccatacaagtcactggtctctctggaacaacttcatgttcttctgctactactgcagactctacaggtgttaacgtaattgaagattctggctcttgggggggggtctngaacagncacagcagcctctgatactaaaactganggatctgatgctnacactgaataatcagnaggcactgctgaaggctccgaaatctcactttgactcacaggaggctcaggctgcgatacagactcttcagatggtaatgatggcacctctgtaggccaa

SEQ ID NO: 6317 - DNA, 129 bp, Homo sapiens
  unsure (25): n=A,T,C or G
  unsure (88): n=A,T,C or G
  unsure (121): n=A,T,C or G
  unsure (125): n=A,T,C or G
ctgaaggaccaacaagggaaacggngatgagagagactgcccattataactttcaaaaccccgtctttggggaagaatcatctagggngacattcctttgaagtaaaatccccaggagaancttnggcc

SEQ ID NO: 6318 - DNA, 370 bp, Homo sapiens
  unsure (260): n=A,T,C or G
  unsure (320): n=A,T,C or G
  unsure (337): n=A,T,C or G
  unsure (355): n=A,T,C or G
ctggaggagtggcaggccaagtggagcgtggagaagcaccaaaagtggtctgaagtcagagaagttggtggaacagctcactgaatacagcacagacaaggacgagcctccaaaggacgtcttttgatgaattatttaagctggctccggagaaagtgaacgcagtgaaagaggccatcgtgaactttgtcaaccagaagctggaccgcctgggcctgtctgtgcagaatctggacacccagtttgcagatggggtcatnttactcttgctgattggacaacttgaaggcttcttcctgcacttaaaggaattttacctnactccgaactctcctgnagaaattgctgcacaacntcaccctggcgcttg

SEQ ID NO: 6319 - DNA, 120 bp, Homo sapiens
  unsure (101): n=A,T,C or G
  unsure (118): n=A,T,C or G
ccaaaggtgtgggtacttgtattcatcaatgaatccagaggaaaatgggctgctctgaaataaaggatctggaaatgaaggaaaatgtgcatgagtatgcnagtgtgtgtgtgtgtgngt

SEQ ID NO: 6320 - DNA, 113 bp, Homo sapiens
aaatgttctcacaacaacaaaaaatgataagtatgtaagattcttaaccacagttgatgtacctcacaggaagagcttctctttcaagatgtgtagctgcccgatgggttctt

SEQ ID NO: 6321 - DNA, 280 bp, Homo sapiens
ctgttctgtcctaggggagggggacatagccctagcaggagctcccagcccctcttggcactctgacacacaagtacacccatctggggcccgctttgccacgaagagctgggcaggcctgcagggtgtggggaaggaggacacaacctcaagaaaggaagcgtgaaccccagggaacagcgggtcccttccctcctcagacacaagccacctcagcttgtggctcttggcccccagccccaccaacccacctgttcatttattcaacagacaatgacag

SEQ ID NO: 6322 - DNA, 277 bp, Homo sapiens
  unsure (164): n=A,T,C or G
  unsure (203): n=A,T,C or G
  unsure (277): n=A,T,C or G
ccagagggaaggcccaagagacgtctctgaagccaccgttcctgattattcagaggcagggtccacagtgagtgactcggtggggctggaggaacccagggtgacccagagggggctccggagccgggtccctaacatctgaaaaagtcctcccagggaactcngagcttggaacttccaggcagcttcgggggtgacatttntatccggccagccgagcggggaaaggagaccttgtgttctggcaacagggagagccgggactgggatggacctn

SEQ ID NO: 6323 - DNA, 120 bp, Homo sapiens
ttgcgcatgacaggcaaatgcagccaagttaccgtccttgccgaaaggttacaggtttggatgcaagatgctctgggaagtgcacgcagatatggggggagaaaagctgctcagaccttt

SEQ ID NO: 6324 - DNA, 101 bp, Homo sapiens
  unsure (4): n=A,T,C or G
acantattctgtggtcctgtgaactcagacttaaagcctgggggaggaggtcctgctgagttggtgaatctctggtaacggtgggaaaatggaggatactc

SEQ ID NO: 6325 - DNA, 227 bp, Homo sapiens
  unsure (116): n=A,T,C or G
  unsure (137): n=A,T,C or G
  unsure (150): n=A,T,C or G
  unsure (162): n=A,T,C or G
  unsure (198): n=A,T,C or G
  unsure (205): n=A,T,C or G
aaaaagacaacaaaaacagaaacagacttgcattagaagacacacactcacctgcctgggtggtcagacacttgcccatagttcagcccctacacatgcagtgtgggcaagagccnggggaaatgataaagcctggncagttttttaccnggaggcacaacnatggggaatgatgggagatgaactcaaaccatgctntgaagtnagtgccagggacaaattttagg

SEQ ID NO: 6326 - DNA, 115 bp, Homo sapiens
  unsure (1): n=A,T,C or G
  unsure (11): n=A,T,C or G
  unsure (101): n=A,T,C or G
ngtttcagaanactcttggtggcaagcagcctgtgtatgataccacaattagaactggcagagcactgaaagaaaagactttgcttcccgaagatagtcanaaacttgacaattt

SEQ ID NO: 6327 - DNA, 183 bp, Homo sapiens
aaatgtaggacctatttcatgggtacctactacagacaaagaagaacaagacttttttgtgtgtattctaaggcacaacaagtgcaggaaggaaatgacctctttcccgtaaaagtccctggcagtagttggttgctgcataagagtgtcatgggcccggagggagctgggcccagatgcagg

SEQ ID NO: 6328 - DNA, 118 bp, Homo sapiens
  unsure (16): n=A,T,C or G
  unsure (74): n=A,T,C or G
ctgctttccggcaaanatcaacctctgctggtcaggaggaatgccttccttgtcttggatctttgctttgacgntctcgatagtgacactgggctcgacctcaagggtgatggtcttg

SEQ ID NO: 6329 - DNA, 213 bp, Homo sapiens
aaatgtgtctttgatgcatactttagaagcacactggctcgcggtttccatccctcttgccttgggacactcctgaggctggcagccctcctgcaatgagttgctctcagttccttctgtttggatcttgctcaacatctccagtttctctgctctgaaaaatgggaaaaactgctaaacatcccagagatttgcaatcttctagctctccag

SEQ ID NO: 6330 - DNA, 224 bp, Homo sapiens
aaaaatgtattatgctatgtttatttcctataggaattaaggataacctagacgacataaagaggataattaaagccagagagcacagaaataggcttctagcagacatcagagactataggccctatgcagacttggtttccagaaattcgtattcttttggtgggtccagttgggtctggaaagtccagttttttcaattcagtcaagtctatttttcatgg

SEQ ID NO: 6331 - DNA, 353 bp, Homo sapiens
  unsure (1): n=A,T,C or G
  unsure (113): n=A,T,C or G
  unsure (114): n=A,T,C or G
  unsure (138): n=A,T,C or G
  unsure (323): n=A,T,C or G
  unsure (345): n=A,T,C or G
ntgcagccactgtgctaaagcgggcagtagaactagattcggagtcgcggtatccgcaggctctggtgtgttaccaagaggggattgatctgctcctgcaggttctgaaaggnnccaaagataatacctaagagatgnaatctcagagaaaaaatttccaaatacatggacagagcggaaaacataaagaagtacttggaccaagaaaaagaagaagctaaagaaactcctgggatttctctcagattttgttgggaatcaaaacacctcaggagttaagcattcctaatgattagagggcagatggaaaatatcacacgccnattaaaatagaaagagaatgcnacccgggt

SEQ ID NO: 6332 - DNA, 250 bp, Homo sapiens
ctgctgctccaggcggagggagggagagagaaatggagagtgtgcgctgctgatcagcgcgaggcccaggggggtgaggtccgctccagggctctgctctgctctgatcagggagctcactttccagaaacgaagtcccagagcaccagaaaaggaaccaaacccagaacctcactttctaagtagtgctggtgagagaataaaactgtccatcagtcaacgatgaattcacatagagcaaggctgacaa

SEQ ID NO: 6333 - DNA, 171 bp, Homo sapiens
  unsure (100): n=A,T,C or G
ctggtgcttgtctggctgggtgaagtgctaggtgtcattggggactgtccagagctagttcagcgctccttcctggtggctagtgttctgcctggccccnatggcaacattaactcacctacaagaaatgctgacatgcaggaggagctaattgcctccctagaggagcaa

SEQ ID NO: 6334 - DNA, 341 bp, Homo sapiens
  unsure (1): n=A,T,C or G
  unsure (6): n=A,T,C or G
  unsure (8): n=A,T,C or G
  unsure (174): n=A,T,C or G
  unsure (209): n=A,T,C or G
  unsure (255): n=A,T,C or G
  unsure (329): n=A,T,C or G
nggccnangtctgttacagccctcaacagtgaaagtaactttgcccgagcatatgcacagggtatcagccgaaccaagtactgggagttgatttatgaagactctatggatctaatcgcaaagctaccttgtgttgcagcaaagatctacccgaaatctctacagagaaggcancggtattggggccattgactctaacctggactggnctcacaatttcaccaacatgttagggctatactcgatcatcagttnactgagctcacgcgcctgtacctcaccatccacagtgaccatgagggtggcaatgtaagtgcccataccagccntttggtgggcag

SEQ ID NO: 6335 - DNA, 129 bp, Homo sapiens
  unsure (20): n=A,T,C or G
  unsure (58): n=A,T,C or G
  unsure (78): n=A,T,C or G
  unsure (80): n=A,T,C or G
  unsure (103): n=A,T,C or G
  unsure (116): n=A,T,C or G
  unsure (127): n=A,T,C or G
ctgagagactctaaatccantgacaagtctgtctgcctattcaccgattttgattctnaaacaaatgtgtcacaaagnanggattctgatgtgtatatcacanacaaaactgtgcnatacatgaagnct

SEQ ID NO: 6336 - DNA, 187 bp, Homo sapiens
  unsure (8): n=A,T,C or G
  unsure (65): n=A,T,C or G
  unsure (104): n=A,T,C or G
  unsure (141): n=A,T,C or G
  unsure (145): n=A,T,C or G
  unsure (166): n=A,T,C or G
  unsure (176): n=A,T,C or G
ccaccggncagcagccctctgtgatgtgtgtgcagagtgaacagaggactcaggtttcatagcanctagtgcggggcatcctcatcctgtacctatagagttcntgcactcccccatccatgctacctacctccccgtttnctgnttcagttttaaacaatgaaancagcatttcnctgctttcatt

SEQ ID NO: 6337 - DNA, 154 bp, Homo sapiens
  unsure (16): n=A,T,C or G
  unsure (49): n=A,T,C or G
  unsure (83): n=A,T,C or G
  unsure (96): n=A,T,C or G
  unsure (134): n=A,T,C or G
  unsure (147): n=A,T,C or G
  unsure (153): n=A,T,C or G
ctgagctctgaatcanagagcagtgagacctaagggtccctgatctcanagggtccctcctgtctcagggtgaggacctgaanggtgtgggtcccngggagggtgaggaggccattgttggaaatttactgagntgggatcgggatnccccana

SEQ ID NO: 6338 - DNA, 314 bp, Homo sapiens
  unsure (121): n=A,T,C or G
  unsure (135): n=A,T,C or G
  unsure (200): n=A,T,C or G
  unsure (220): n=A,T,C or G
  unsure (258): n=A,T,C or G
  unsure (259): n=A,T,C or G
  unsure (306): n=A,T,C or G
  unsure (313): n=A,T,C or G
  unsure (314): n=A,T,C or G
ccttttgccatacagtcctgggtttgaatgcagccccctcctcacaaactggctatgtgatcatgaacaaattaaccggccagctccaatttgcttcttaatgttgtgaagtgtaaatgangccatgactggcangcggtacctggaaaaaggggctttgtttttactaaaaagctgtctgaactttcaaattaaggcanagttcaaaataagtgatagntacttagttggaaaatgaaacctatccaacatacaggnngaggggtccttctagagatgtggcattgagacaatgttggaacattntatacann

SEQ ID NO: 6339 - DNA, 294 bp, Homo sapiens
cctgacaggatgatgattttagaaactagaaagagttcaacgggtctggcacaaaagtggcatctgtgggtgtgctggagaatttcgctggagagatgacagggtccaagtcagaaaggaccttgactatctcaaccaagaatctggcatttttctgcaggcaatgaaaacaacattgagagattattagcagtggaagagaaagttcttaatgtgatttagaaagatggcaccaagagccgcgtgaagaatgagaagcagtggctgagagagaaagcagagactggttagagg

SEQ ID NO: 6340 - DNA, 337 bp, Homo sapiens
  unsure (194): n=A,T,C or G
  unsure (270): n=A,T,C or G
  unsure (276): n=A,T,C or G
  unsure (294): n=A,T,C or G
  unsure (335): n=A,T,C or G
ctgtcaccaccaagcatgaactttcactgattacccataacctactggaaatcttcagccttgctgtcagcatagaccactgtgagaaacagtacattccattccagtttgccctgctttttgaagatctaaatgccattccatgttttctgttacatattgaagtttcttggctgccaaagaaaaacggactntgctgaacttgtggacagaacaaccccaaggttggaagaacaatgaaaaataatctatacttgaacatttcaaaanttaaanattttcaacagtagtttnaacacactggaagcttaaaatacatcgacactgaaatggtnaa

SEQ ID NO: 6341 - DNA, 100 bp, Homo sapiens
  unsure (10): n=A,T,C or G
  unsure (23): n=A,T,C or G
  unsure (93): n=A,T,C or G
gggggccgangtaaacatgactnggtgctgaaagacacactgctgggacccaagttccctcccacatggacgggatggatgctggaacccaangtttcaa

SEQ ID NO: 6342 - DNA, 113 bp, Homo sapiens
  unsure (58): n=A,T,C or G
  unsure (66): n=A,T,C or G
  unsure (86): n=A,T,C or G
  unsure (90): n=A,T,C or G
ctggcctgtgggtgatcccagctcttactaggagagggagctgaggtcctggcgccangggcccangcccttcaaccataaacagntcangatggaaccttggttcacccttt

SEQ ID NO: 6343 - DNA, 201 bp, Homo sapiens
  unsure (151): n=A,T,C or G
  unsure (167): n=A,T,C or G
  unsure (180): n=A,T,C or G
  unsure (197): n=A,T,C or G
ctgaatcagcctgggtgccctagacccagtcatgtttgttggaccaaattagctgtcttttcatttcatgctatatagaactggcagtttacacttctgattaatacattgtctccgatcaggaggtttattttttttttcctaataaaanctgaaaggagattggnaagaaccaattantaattttacattacacnttgt

SEQ ID NO: 6344 - DNA, 145 bp, Homo sapiens
  unsure (93): n=A,T,C or G
  unsure (115): n=A,T,C or G
  unsure (139): n=A,T,C or G
  unsure (144): n=A,T,C or G
ctgaatcaccagctccttttatgatatttgtgtttgtttcacaatttctcaaggactaaagcagctcagtttgcattgctttctgctggtaanggcgggaaaagtggtggtggtnacccccacaggagtgatggtaganaaggna

SEQ ID NO: 6345 - DNA, 267 bp, Homo sapiens
  unsure (55): n=A,T,C or G
  unsure (126): n=A,T,C or G
  unsure (139): n=A,T,C or G
  unsure (155): n=A,T,C or G
  unsure (167): n=A,T,C or G
  unsure (222): n=A,T,C or G
ttggctgacttccacacctagcatctcatgagtgccaagcaaaaggagagaaganagaaatagcctgcgctgttttttagtttgggggttttgctgtttccttttatgagacccattcctattttnttatagtcaatgnttcttttatcaccatnttattaagtaanaaaacatcactgaaatgctagctgcaagtgacatctctttgatgtcatatggaanagttaaaacaggtggagaaattccttgattcacaatgaaatgctc

SEQ ID NO: 6346 - DNA, 222 bp, Homo sapiens
  unsure (222): n=A,T,C or G
cctcatcagcagggatgagatcacagcctacttcatgagagccagctcaatctattccaagctgggcctgggctttcctcacaacttccaagagaccacctacctgaagcccactttttgtgacaactgtgcttggatttctctggggagtgatcaaacaaggatatcgatgtaaagactgcgggatgaacttgtcacaaaacaatgcaaaagatctggtgn

SEQ ID NO: 6347 - DNA, 175 bp, Homo sapiens
ccttagcagtagcctgagctgcccccagggctgtgagctgctgaatcttctgactcatcatttccatgacggcctgttttcatggcgtgcttctcctgaagagctggttggattttctccatctgcttggttagaaaatctatcttcctcttgaagaagtccttggcatcctcag

SEQ ID NO: 6348 - DNA, 252 bp, Homo sapiens
  unsure (119): n=A,T,C or G
ccaccagcatcaaaagaagaaatccttgagggtactgggtgagttggtgggcaagcgctgccaccttcagtgccagcacaatctggggtcagcaaagaggggtagcaagtgtgccttanagatgaagaaatggctaaggaggaaagcactgtaaaggtgacttggggaatcctcctgagacctaagatttgaaactaattgtccaagtcccagcctctgctctgggaggctccaggggccaaggtaagcagg

SEQ ID NO: 6349 - DNA, 196 bp, Homo sapiens
  unsure (162): n=A,T,C or G
ccttagccctgctcctctctattccatcctgtagaggtcgggagtcaggagtcgctggcaggagacagcatgtcacccaggactctgccggtgcagaatatgaacaatgccatgttcttgcagaaaacgcttggcctgagtttcataggaggtaatcaccanacaactgcagaatgtggaacactgagcaggacag

SEQ ID NO: 6350 - DNA, 301 bp, Homo sapiens
  unsure (183): n=A,T,C or G
  unsure (193): n=A,T,C or G
  unsure (286): n=A,T,C or G
  unsure (290): n=A,T,C or G
  unsure (300): n=A,T,C or G
ctgaaagggacgttgttggaagcgttctcggaaaggttcatgtggttctgcaccacgatgtaggccatctcacctttatgtctttcattattcatcacaagaggaatgttcagaagcatcgtgtcactgaaaataaacatccaaagatctcttgcccagggcggagtatctggcctggtcagnaactctaggntgccgtctctgtcgatgaatgatatcatgctcgccagcagaggggtgacagcaccttggacccgctttcagagggtgtgcctgaatgtgcccncctnctggagagcnt

SEQ ID NO: 6351 - DNA, 350 bp, Homo sapiens
  unsure (151): n=A,T,C or G
cctacaagtagggagggagggtaataaaaaaacgaatcccaggaagagcaccacgaaagcgggaagcctgaagtcacccacaaagggcactgcagacaccgcaccaggaatgtttcttaagagctggcagtcctctccagggagagagcanaggaggggaacagccgcagggactatagagtttctaggactccacgatgtgccggcacagcatgctgccatcacacacgctgacctccttgtcctgtgcaattacatgactaggacctgccttcgacaagcgtctgatggtctatgagcacattccgcttaccttcccaataaaataacaaagaaatacaaaacaaaac

SEQ ID NO: 6352 - DNA, 238 bp, Homo sapiens
  unsure (2): n=A,T,C or G
  unsure (5): n=A,T,C or G
gncgngcaggtctgatttctgaggagctggattcaatgtgggaggtgcagcagagctggaagcaccctgcactctgatctctagctgggggctctgtttccaaacttggttgtcctcagtggctgcctcacaccagtatgacccggagtgatcttctgaagctgtggggatctggaattctgaggagagccccctgctttgcactatccttccatccttgtagaaggagaagaggagg

SEQ ID NO: 6353 - DNA, 101 bp, Homo sapiens
  unsure (78): n=A,T,C or G
tgggggaggggacctaaaataaatagactttaacatttcccttgggtgctaatcatagttggaagttgaatttaaggngattatttgggtgacaattaaaa

SEQ ID NO: 6354 - DNA, 123 bp, Homo sapiens
  unsure (57): n=A,T,C or G
  unsure (105): n=A,T,C or G
  unsure (116): n=A,T,C or G
ctggagagagatcaatatgctgaacaaataaaaggagagagggcccagtggcagcanaggatgaggaaaatgtcgcaggaggtttgcacattgaaggaggagaanaaacatgatcncatcggg

SEQ ID NO: 6355 - DNA, 423 bp, Homo sapiens
aaaagtttagagaaggaaagtatagtgttaaaggggttcggggagatttcatcaatggaacggcacagggaaacggctttcaaggagaagaaatatttcacaaaatgaagagacaaaaagggccaacaaattcagcataagacaatatattaatggaggaaaagtcaccatgtttgggaaatgtggagttcaggttagtgaagggctggatctttgtaggcagagataaaatgggcaaggaacatttgcatgaagtaattttatttaattaggagcattatgaggaatcacagcaattttttgaaagagtaatgatatgatcaaagttaattaaagttatgatcttcagaaaaattaatctggccactgtgtacaagaatagattggaatcaaaaggaacctggaggtgggaacaccactttg

SEQ ID NO: 6356 - DNA, 129 bp, Homo sapiens
  unsure (9): n=A,T,C or G
  unsure (73): n=A,T,C or G
  unsure (129): n=A,T,C or G
gtgacccangtagaggaagatatggtgatggtgttgatggatggctctgtgaagctggtgaccccggaggggnccccagtccggggacttctcacacctgaaatccccatgaccgaaacggtggagccn

SEQ ID NO: 6357 - DNA, 248 bp, Homo sapiens
  unsure (103): n=A,T,C or G
ctgatcagactcctggtgccactcccaaaaaactatcaagttgggatcaggcagagacccctgggcatactccttccttaagatgggatgagacaccacgtcntgcaaagggaagcgagactcctggagcaaccccaggctcaaaaatatgggatcctacacctagccacacaccagctggagcttgcttactcctggacgaggtgatacaccaggccatgcgacaccaggccatggaggtgcaactt

SEQ ID NO: 6358 - DNA, 351 bp, Homo sapiens
  unsure (197): n=A,T,C or G
aaattctgcacagaaaaaggagaaagggtattaagatggcaccagagagacacaccatcaaatgttcagttcaggagtaggtctatagagttttctgacagggaatgtcacagaattgccagcatgttcctcaatggactctttgcttcttggagcttctgagacacttcaagacttgaagtgaccactggctgtgncctccagccccagggagcccagaagttctgagatgtgtatcttatttcagttccctactgcagctagggtcttaggagggaccctagttacaggatgaatcaaataccaaaaggtgaggttcaactgttccttgtcctggaatatcattcttgg

SEQ ID NO: 6359 - DNA, 122 bp, Homo sapiens
  unsure (69): n=A,T,C or G
  unsure (96): n=A,T,C or G
cacacgcctgttcccagcaagtgctgaaactcactagacccgctgcctgtttcgaaatggggaaagccntgcgtgcgcgttatttatttaaatgcncctgtgtgcgcgggtgtgggaacaca

SEQ ID NO: 6360 - DNA, 131 bp, Homo sapiens
ctgtgagaggcagtgcgcccgcctcccagggagaacgaggaaccgccaggagacaggtctacctgcaccaccggcaaaccagagggcccaaggccagggccgtaagccctgggagtacactcccttaaaga

SEQ ID NO: 6361 - DNA, 401 bp, Homo sapiens
  unsure (370): n=A,T,C or G
cctaagcatagggccattttgaaacacatgtggctcatcacaaaccacacaatattcatttaatacagggatccgctgttcagcaaactcaattgtctgcaccaggaagccacggtctcgtactggaatgcattttgcaccatttggagcaagctgagaagatgaagatgaagatggtgttaggataccaataagccctgaggtaagagagagcctcctgccctctgcgttaggttccttgaaaagctcagttttggatgacttgggggcactggagtaggacttgctgagcaatttgtgatttttcagtccatataattcttccattctgagattactagagtaagacctgcttaacagtttatggggnttcaagtttgtgttgtgctcacatcgtggat

SEQ ID NO: 6362 - DNA, 107 bp, Homo sapiens
  unsure (4): n=A,T,C or G
  unsure (14): n=A,T,C or G
  unsure (24): n=A,T,C or G
  unsure (56): n=A,T,C or G
  unsure (67): n=A,T,C or G
  unsure (78): n=A,T,C or G
  unsure (86): n=A,T,C or G
  unsure (88): n=A,T,C or G
  unsure (94): n=A,T,C or G
aaanctggctcaanactggcccangcataatactgtcaatctaaaggtaaccggcnacatcaaaaantacatctcaanagaatcangnttaaanatcaacaggagaa

SEQ ID NO: 6363 - DNA, 322 bp, Homo sapiens
aaatcaatagtgattattgcgagcggcagccccagctacacacgtcgctgggagctgattactgctacatctcaccgcagcgtagagtttagtcacagcttctccccacaatattgcaagtttaagtggtggagagtcgcaaagaaaaaacacaagaaaccccaaataataataacaacaaaaacaacaataacaactgtaataataataataataataataaaaaccctaagggatgtatgaactggttttaactaagtaggccaagggatcattggttctgatttgcattcatctctacagtaaataaaacctcgttttt

SEQ ID NO: 6364 - DNA, 254 bp, Homo sapiens
cctgccagatatttgtgagaaatctgccattcgatttcacatggaagatgctaaaggacaaattcaacgagtgcggccacgtgctgtacgccgacatcaagatggagaatgggaagtccaaggggtgtggtgtggttaagttcgagtcgccagaggtggccgagagagcctgccggatgatgaatggcatgaagctgagtggccgagagattgacgttcgaattgatagaaacgcttaagcagttgcctttttt

SEQ ID NO: 6365 - DNA, 388 bp, Homo sapiens
  unsure (121): n=A,T,C or G
  unsure (353): n=A,T,C or G
aaagttgctttgaagctcgtctataaatggcttcaagcaacatgactggttggttgtgagaattaaagggtcattaactgaataactccaaagtcattaacatgaccaaggtaaggatacnagaaataggaaaaggaaaatcctattccaagttggagggccatgccatcaaccacagtggtctgtgccagagcaacactattcgctagtggttctatactgacttctttactggctttccatctttgtatttattccctctgcaatccgtttcattttcagtagaagccagtgtcgaataggaataaagaatctgtgtattgcggtcagacagatttgggctagaataccanctctagactttctagtttccatcactttggggcag

SEQ ID NO: 6366 - DNA, 217 bp, Homo sapiens
aaatcaaggttcataggaaaagacataaatgaggaaactccaaacctcctgttagctgttatttctatttttgtagaagtaggaagtgaaaataggtatacagtggattaattaaatgcagcgaaccaatatttgtagaagggttatattttactactgtggaaaaatatttaagatagttttgccagaacagtttgtacagacgtatgcttgtttt

SEQ ID NO: 6367 - DNA, 343 bp, Homo sapiens
ccacctgcttgagccagggtggcctcctggaagacctggacaacctcatcctggaggacctgaaggaggaggaggaggaagaggaggaggtggaggacgaggagggcgggcccagggagtgacccctgccaggtgcagatacaaaccagacacggtctgtggctactttgtgttattataagatatgagctcaaaccgagatatgaatgaccttggggagccatctgaggccaagatattgacgggggggattcctgggtcccattttcagcgcccagggtcacagatccacagtgggaagttctgtgggacacattggcactgagccacaaagaaggtgtgg

SEQ ID NO: 6368 - DNA, 100 bp, Homo sapiens
  unsure (58): n=A,T,C or G
  unsure (74): n=A,T,C or G
  unsure (96): n=A,T,C or G
  unsure (100): n=A,T,C or G
ccttggtgctcagtggggagactcaggaacgggagcgaatcctctaccagttctccanacgcttccaccattgnaatccggggatcttcccctcantacn

SEQ ID NO: 6369 - DNA, 362 bp, Homo sapiens
ccagcagggattcagccggatcagcatctaccacaacactgccagcaacaccttcagagtcgttggagtcaagttgcaggatcagcaggttgtgatcaattattcaatcgtgaaagggctgaagtacaatcaggccacgccaaccttccaccagtggcgagatgcccgccaggtctacggcttaaactttgcaagtaaagaagaggcaaccacgttctccaatgcaatgctgtttgccctgaacatcatgaattcccaagaaggaggtgcgtgcatcctctaatgacaaagcaaccttgtatttccttccacaaatgaatggaggcagcctaacgtcatgtggcccctccagccagcgtcag

SEQ ID NO: 6370 - DNA, 324 bp, Homo sapiens
aaaaaagggaggaagaatctctgttttaatgtagtttgcttctacaccatctgtcccacaacactgttttaccaccttcagcacaatttttttcatttcctcatcaggagactggaattctcgaataagggattaacatcacttctctagtatagtagttggcatattctgcatccataagaggaataagatacccaatagccttcaagaaagcagccaaaccctttcctctgtgttggcggatacccttccataaaggctttaacacagaatcaaaagattcgataccataaggagttgctgcttcagccaaggcagcaatgg

SEQ ID NO: 6371 - DNA, 121 bp, Homo sapiens
  unsure (1): n=A,T,C or G
  unsure (7): n=A,T,C or G
  unsure (41): n=A,T,C or G
  unsure (62): n=A,T,C or G
  unsure (64): n=A,T,C or G
  unsure (100): n=A,T,C or G
  unsure (115): n=A,T,C or G
  unsure (117): n=A,T,C or G
nctgcancttctgatgatgccccctaccctgtctgtaccgngcggtacttccctagcacagncnatcacaccctgcagtgggcccggcatgagtttgaanaactctaccgactgncngcag

SEQ ID NO: 6372 - DNA, 338 bp, Homo sapiens
aaaattacactttttcttaacctgtctagctgtcggaaaaggtaacagaagatggaactcgaaatcccaatgaaaaacctacccagcaaagaagcatagcttttagctctaataattctgtagcaaaaccaatacaaaaatcagctaaagctgccacagaagaggcatcttcaagatcaccaaaaatagatcagaaaaaaagtccatatggactgtggatacctatctaaaagaagaaaactgatggctaagtttgcatgaaaactgcactttattgcaagttagtgtttctagcattatcccatccctttgagccattcaggggtacttgtgcattt

SEQ ID NO: 6373 - DNA, 348 bp, Homo sapiens; identical to SEQ ID NO: 415
  unsure (121): n=A,T,C or G
  unsure (124): n=A,T,C or G
  unsure (145): n=A,T,C or G
  unsure (273): n=A,T,C or G
  unsure (343): n=A,T,C or G

SEQ ID NO: 6374 - DNA, 274 bp, Homo sapiens
ccttccaattcaggccacatgtacctccagatactatgtggctggctgcctctgcctttttgggcaatctcagttccaaatattctatcatgttgtcatgccagcttttggcttgggaaatatgggtcagtatgtctgtggggaaactgattctgtgtgccggccgcagaggaaggactctgggctggaggaaaggggtagggctcagcgccagtgctaggactggttgaactgtagggtgcagccctggctagtgaccacaccccatgtccag

SEQ ID NO: 6375 - DNA, 299 bp, Homo sapiens
ctgctgcggctgcacaaagagccatttggggaaatcagttcaaggtacaaagcggatctgagcccggaaaatgctaagctcctcagcacattcctaaatcagactggcctagacgccttcctgctagagctgcacgaaatgataatcttgaaactaaagaacccccaaacccaaaccgaggagcgcttccgccctcagtggagcctgagagacactctcgtaagttacatgcaaactaaagaaagtgaaattcttcctgaaatggcatctcagttcccagaagagatactgctcgccag

SEQ ID NO: 6376 - DNA, 395 bp, Homo sapiens
  unsure (385): n=A,T,C or G
ctgagagactctaaatccagtgacaagtctgtctgcctattcaccgattttgattttcaaacaaatgtgtcacaaagtaaggattctgatgtgtatatcacagacaaaactgtgctagacatgaggtctatggacttcaagagcaacagtgctgtggcctggagcaacaaatctgactttgcatgtgcaaacgccttcaacaacagcattattccagaagacaccttcttccccagcccagaaagttcctgtgatgtcaagctggtcgagaaaagctttgaaacagatacgaacctaaactttcaaaacctgtcagagattgggttccgaatcctcctcctgaaagtggccgggtttaatctgctcatgacgctgcggctgtggnccagacctct

SEQ ID NO: 6377 - DNA, 204 bp, Homo sapiens
  unsure (73): n=A,T,C or G
aaaaatgttagcagttttcaaaatcacctgaacatccaagtaggatccacccaggagagatctttaatggagngaccctcacactctataaaactgacaggggcaacgaattgaaccttgacttaacaaaaacacatcctggtattcataagtctctgttaggaagtccgtggaggtaggtgggagccggaagttagggctcag

SEQ ID NO: 6378 - DNA, 289 bp, Homo sapiens
ctgatcgaaatggcattgctgtctctaggttattcacatagctctgctgcccaggccaaagggctagtccaggttggaaagtggaatccagttccactgtcttacgtgacagatgcccctgatgctacagtagcagatatgcttcaagatgtgtatcatgtggtcacattgaaaattcagttacacagttgccccaaactagaagacttgcctcccgaacaatggtcgcacaccacagtgaggaatgctctgaaggacttactgaaagatatgaatcagagttcattgg

SEQ ID NO: 6379 - DNA, 223 bp, Homo sapiens
  unsure (69): n=A,T,C or G
  unsure (125): n=A,T,C or G
  unsure (144): n=A,T,C or G
  unsure (161): n=A,T,C or G
  unsure (171): n=A,T,C or G
  unsure (182): n=A,T,C or G
  unsure (198): n=A,T,C or G
cctggaaggtgtgcaggagtttggtagaggagtgatctaggtgaggggaatggaaggtgcagagaccanagctgagagggcctgaggcactttccagagcgtggggaggggcctccaccaaggcnagaagggctgcaggtccanatcaccagcgtttgtanacagtagtgnggctcttggantttacctgagggccantggagctccagggacctattacgac

SEQ ID NO: 6380 - DNA, 306 bp, Homo sapiens
  unsure (153): n=A,T,C or G
  unsure (163): n=A,T,C or G
  unsure (171): n=A,T,C or G
  unsure (208): n=A,T,C or G
  unsure (225): n=A,T,C or G
  unsure (238): n=A,T,C or G
  unsure (288): n=A,T,C or G
  unsure (302): n=A,T,C or G
  unsure (306): n=A,T,C or G
ctgttcagaaagctcattggacctggttttgaaaataaaacaaagttaaaaccctgggaggagttattgtgcagtgtggagtactcaggctttcttataaagaaaaaaaaaagttatctggtaccaaagtgtgcaacctacagaccctcaggnactgccctgngacttctntgtatgacatcacaaggctgccaagtgcctgtttttntaaaactaggagttggngaggtttggctantgctgaaaccatgcataggattggtttactaaattaaaaccttattacgnacgtcctccaaaanacan

SEQ ID NO: 6381 - DNA, 191 bp, Homo sapiens
  unsure (1): n=A,T,C or G
  unsure (17): n=A,T,C or G
  unsure (83): n=A,T,C or G
  unsure (99): n=A,T,C or G
  unsure (138): n=A,T,C or G
  unsure (146): n=A,T,C or G
  unsure (155): n=A,T,C or G
  unsure (179): n=A,T,C or G
  unsure (183): n=A,T,C or G
nccatttaactggtcangcaattaagtcaagggaaaatccatttgggatttctgagaaagctttgctttccctcataaaaggngatatatatagctggnacaggcccatttccatttttttctttcctggccttcacnatggaccncggcccgcngaccaccctaagggggaatttcancacnctggcggg

SEQ ID NO: 6382 - DNA, 116 bp, Homo sapiens
  unsure (110): n=A,T,C or G
aggtcgatgggcctatttgtttggtgctggcaccaactcgggaactggcccaacaggtgcagcaagtagctgctgaatattgtagaacatgtcgcttgaaatctactttnattcta

SEQ ID NO: 6383 - DNA, 249 bp, Homo sapiens
  unsure (35): n=A,T,C or G
  unsure (57): n=A,T,C or G
  unsure (87): n=A,T,C or G
  unsure (120): n=A,T,C or G
  unsure (127): n=A,T,C or G
  unsure (180): n=A,T,C or G
  unsure (214): n=A,T,C or G
  unsure (239): n=A,T,C or G
ggaggaggctgattgcactccacaaacaggactgnctggaccaacggaaactggcangagggaggtgggaaaggaaaaaggcaaacntttggcttttataaagcaaaggacgtttatttnctgaggncatgacacacgaagtggaatcctagccacggctgcggagctctcgtgatgaangccggagtgctgactgacatgccgggtggaccangagctggagtctgttatcttacacnaatgctcatg

SEQ ID NO: 6384 - DNA, 112 bp, Homo sapiens
  unsure (24): n=A,T,C or G
  unsure (31): n=A,T,C or G
  unsure (34): n=A,T,C or G
  unsure (53): n=A,T,C or G
  unsure (59): n=A,T,C or G
  unsure (71): n=A,T,C or G
  unsure (84): n=A,T,C or G
  unsure (109): n=A,T,C or G
  unsure (111): n=A,T,C or G
ccatcccagtcccggctctccctnttgccanganacaagggctcctttccccnctcggntggccggatacnaatgtcacccccnaagctgcctggaagttccacctccnant

SEQ ID NO: 6385 - DNA, 204 bp, Homo sapiens
ccaaaagatttccccagacacggttctgcacttgatccttcctgagagccctggcagccacgaggagtcacgagagtactctttagaggaggtgaaggagcttttgaacaagttgatgctgatgtctggcaagaaaggatcgtaacaacacggaagtggagaggttttcagaggtcttctgcagtgtgcagaggctcagccagg

SEQ ID NO: 6386 - DNA, 230 bp, Homo sapiens
  unsure (1): n=A,T,C or G
  unsure (163): n=A,T,C or G
ncctgcgtgtgtctgtgttgagcgtgcgtctgtgtgtgcctgtgtgcgagtctgagtcagagatttggagatgtctctgtgtgtttgtgtgtatctgtgggtctccatcctccatgggggctcaaccaggtgctgtgacaccccccttctgaatgaagccttntgacctgggctggcactgctgggggtgaggacacattgccccatgagacagtcccagaacacggcag

SEQ ID NO: 6387 - DNA, 242 bp, Homo sapiens
  unsure (1): n=A,T,C or G
  unsure (3): n=A,T,C or G
  unsure (105): n=A,T,C or G
  unsure (134): n=A,T,C or G
ngnctgcagccccttgaacaggtgaaagctggaatagaagctcattcggaagccaaaaccagtggactcctgtgggctggattggcactgctgtccattcagggnggggcactggcctggctcacgtggggggngtactcctgggatatcatggagccaggttacattcttcatcacatttgcaaattctatggtcttttttgcatactttatagtcactcgacaggattatacttactcag

SEQ ID NO: 6388 - DNA, 156 bp, Homo sapiens
  unsure (11): n=A,T,C or G
  unsure (48): n=A,T,C or G
  unsure (111): n=A,T,C or G
  unsure (119): n=A,T,C or G
  unsure (136): n=A,T,C or G
  unsure (141): n=A,T,C or G
atttcatttcngtttcttttctcgccatgtttttctgtcggaattacngttcgttttggttctatgtactctctaaaatgttatcgtttttcatttgtctactaattttcntgcatttngttactacctgagtatnttaanatctgactggctcca

SEQ ID NO: 6389 - DNA, 261 bp, Homo sapiens
  unsure (133): n=A,T,C or G
ctgcgtcaccacctcctgggtggcagggagacgatacatatttcctaatgaccgggatggttttattaggattggcaagcgggacttcttagcctctctgttggtaataccagggagggaaaggaagggcagnctgccacccaggcaccccgtgcaggttctctggccgatgctctgcgctgagtgcagtgttgatcggtttctcttcccaagcctctcttgttgcttcatgcttgaatctcagcaggtcgccctccgtgg

SEQ ID NO: 6390 - DNA, 153 bp, Homo sapiens
cctcaggtttttgtgttctctgaagctcaggggacaggaactaagtccccattctcgctttggcttcctgctctgggactcagtttcccccgtgcagcagggggcttgggcaagtccaaggagaggtgggggtacccacctgtgacatgaagg

SEQ ID NO: 6391 - DNA, 284 bp, Homo sapiens; identical to SEQ ID NO: 416
  unsure (164): n=A,T,C or G
  unsure (178): n=A,T,C or G
  unsure (275): n=A,T,C or G

SEQ ID NO: 6392 - DNA, 248 bp, Homo sapiens
ctggcgttggcagggaggaatggagagcttgtggaaggtgcgggaagggagggctgtgcttggcctgagagcaggaggacaccgggaacagcacgatgggctatgcccgctctcaaagagcttgatcaggccggagggacctggatggggccagttatacataagacaggccaaaacacacgccctgagagagatggaaaatgaccacaccagagaaaggacagcaccacgtgcctcgaggggcttgg

SEQ ID NO: 6393 - DNA, 175 bp, Homo sapiens
  unsure (150): n=A,T,C or G
gatagcggcagcgaggggctcggagaggtgctcggattctcgtagctgtgccgggacttaaccaccaccatgtcgagcaaaagaacaaagaccaagaccaagaagcgccctcagcgtgcaacatccaatgtgtttgctatgtttgaccanccacagattcaggagttcaaagagg

SEQ ID NO: 6394 - DNA, 252 bp, Homo sapiens
  unsure (118): n=A,T,C or G
  unsure (121): n=A,T,C or G
  unsure (145): n=A,T,C or G
  unsure (148): n=A,T,C or G
  unsure (201): n=A,T,C or G
  unsure (218): n=A,T,C or G
  unsure (224): n=A,T,C or G
  unsure (248): n=A,T,C or G
aaacatgacttggtgctgaaagacacactgctgggacccaagttccctcccacatggacgggatggaggctggagcccaaggtttcagggaaacgtatgtggcctgtgccccctgggngtnatcatggggcacacacattttatntgncagggccagccttggctgttgaggggtcatgggcacacaggaggaccatctgntgacactgaagaccagntgttgnccacagccatggacaataaggaanaata

SEQ ID NO: 6395 - DNA, 338 bp, Homo sapiens
  unsure (131): n=A,T,C or G
aaacttactagctgccaagtagcacacttatgctgctgtgtcccaatccattctgtggtgagtataagtcacaagagtctgcataaaacactatcagcaatcaggatggctatggggcaaggaccgtttanaatgttaccaagtcacaggaccagcaggaaaatggaataatggaagaatgtgaaataaatctgatttgtttgagtagaaggcagctttgattcaggcataaatgcatctcccagattatcatgtaaataaagacctcagaagttgacacttccctcccagtccaccacttaaaacaggacacatgctcagttttcccaatctgtttt

SEQ ID NO: 6396 - DNA, 273 bp, Homo sapiens
caccacacatgatcataactaagccttgacggcatcactgtcccacctactggaacttgtccgtgaaaatccacacagatgctgcacatccccttatcccctacaaggaggctggagatcttccacaatgcaggctgcagcctgcttcttcatttgttaggagcagggaaggaaatgcagaagctgagaaatgagggccaagaaagccaggcagtaggatggagacccaagggacatcagggcagaaacaaaatagtacaaaggagaagagtg

SEQ ID NO: 6397 - DNA, 119 bp, Homo sapiens
  unsure (77): n=A,T,C or G
  unsure (94): n=A,T,C or G
  unsure (108): n=A,T,C or G
  unsure (116): n=A,T,C or G
aaaatcagtggcaccgaggcgcctgcagccgcactcgccagcgactcatctctccagcgggttttttttttgtttgncgtgtgcaatcctcacnctcatgaacatacncaggtttnccc

SEQ ID NO: 6398 - DNA, 262 bp, Homo sapiens
  unsure (188): n=A,T,C or G
  unsure (255): n=A,T,C or G
  unsure (258): n=A,T,C or G
cagaccccaaaattccgggtcctgaagacaggacagagcatgacactgctgtgtgcccaggatatgaaccatgaatacatgtactggtatcgacaagacccaggcatggggctgaggctgattcattactcagttggtgagggtacaactgccaaaggagaggtccctgatggctacaatgtctccanattaaaaaaacagaatttcctgctggggttggagtcggctgctccctcccaaacatctgtgtacttntgngcca

SEQ ID NO: 6399 - DNA, 312 bp, Homo sapiens
  unsure (152): n=A,T,C or G
  unsure (221): n=A,T,C or G
  unsure (234): n=A,T,C or G
  unsure (270): n=A,T,C or G
  unsure (285): n=A,T,C or G
  unsure (288): n=A,T,C or G
  unsure (301): n=A,T,C or G
aaatagagccaaccagtcattttctgagactaaactctggcaaactgcttcttcatgtagggaattgataatttagaaactagtttgcattttcaggtatgtctccaaaggattttttttttttaagtaaactatccgcctaaattgttaancccttttggggcagcaaaaacagcccttattacccatcaacaaccagtttgaacgggaattcagtgttntttgggaaaatgngtttttacaaaggagcagtaattaggcccccactgnttaacagatgacccnaancaaaaaaggaacnaaaatgtaacc

SEQ ID NO: 6400 - DNA, 287 bp, Homo sapiens
  unsure (247): n=A,T,C or G
ccaagggtcgctcactgggcaggaacattgtcaaggccattcatgcttggaatagggtctctcttcagctctgaggcaaatctgttctctaatttacagatgacttcaaggggaacgtgtacccgcacccctctggtgcgtcacattgcttaggaagcctgctgtgtttatcactgggtggctgtcagggctgagatggagagggccagggcctggcgaggtggagcagtcggcccaggtgtcccancaattgttgctggaacagggtctggaacccacaggagagg

SEQ ID NO: 6401 - DNA, 315 bp, Homo sapiens
  unsure (122): n=A,T,C or G
  unsure (134): n=A,T,C or G
  unsure (150): n=A,T,C or G
  unsure (167): n=A,T,C or G
cccgtctgcgtcctgcatccatctccctgttacagtggcccgcatcatgattaaagaatgtggatccctctgtctggggtgggatgccttactttgcacttaatttaataagggcattctcngaggagtagacntttaatacgaagtggnggcatagccctgccganatgtcggtgatggcctggatgctgtaaccacaacctgtggctaaaaattttattttctatcctttacccgtcattatcattagttgctatgattctttctgcattttcggttaactatcatttccaaagacttgtcattcactaatat

SEQ ID NO: 6402 - DNA, 152 bp, Homo sapiens
  unsure (132): n=A,T,C or G
  unsure (148): n=A,T,C or G
aaactgcataatttagtaaaattggtacaatttcttttcacatattaatcaacattagaggactgtaaatgcctccctagtaatacagaaatatccattggaaataaaaatagcaccagtggggaaagtatnaaaaaaataagacaantcag

SEQ ID NO: 6403 - DNA, 177 bp, Homo sapiens
aaataaaggtcactattgctgtgaaatgggatgtcagttttgcaattcttctgcactttcccaccaagctgggatctgggtgagtctagagatatttgtgaaataagctaatttgaaaggacaccacaatccgtcaaaagcgactttcttcctcttccacagcacgatgaaggccag

SEQ ID NO: 6404 - DNA, 213 bp, Homo sapiens
  unsure (197): n=A,T,C or G
aaacattgacccaacatattaccaaactaattcctgtgaaatacaaaaagaataatatatcatgataaaggtaagtttgtttaacccatggttaatttaacatatgaaaatcaatcatctatcatcttaatagatacaaaaaagaatttgataaaagtcaacacttatgataaaaagcaaaacccttaacaaattangtttagactgggcttt

SEQ ID NO: 6405 - DNA, 204 bp, Homo sapiens
ctggaagaagaaaagaaagcaaacaatgagaaacagaaagctgaaagggagctagagggtcaaatccagagattgaacacagagaaaaagaaactaaatacggacctgtatcacatgaaacattctctcagatactttgaagaagagtccaaggatctggccggccgcctgcaacgttcatcgcagccgtataggagaattaga

SEQ ID NO: 6406 - DNA, 206 bp, Homo sapiens
ccagagggaaggcccaagagacgtctctgaagccaccgttcctgattattcagaggcagggtccacagtgagtgactcggtggggctggaggaacccagggtgacccagagggggctctggagcgggtccctaacatctgaaaaagtcctcccagggaactcggagctggaacttccaggcagcttcgggggtgacatttgtattc

SEQ ID NO: 6407 - DNA, 221 bp, Homo sapiens
  unsure (199): n=A,T,C or G
cctgtgtccaggtctccctggcggccctgcagagatcttcctagcccgagagcttctctgcttgggtcctacggttccaagcctggttccattttcttctcatttggtgagagtccacctcaacattcggggctggagtggctcactggcctcccagtgtcgcatggtccgtgcagaggggagcatctctgcctgtctncttctggaccctttgcctttgg

SEQ ID NO: 6408 - DNA, 172 bp, Homo sapiens
ccaaggtgcatgcctacatcatcagctacctgaagaaggagatgccaagtgtatttggaaaggaaaacaagaagagagagcttatcagcaggctaccggaaatctacattcagctacagcgagaataccagatttctgcaggggacttccctgaggtcaaggctatgcatga

SEQ ID NO: 6409 - DNA, 172 bp, Homo sapiens
ctgccctgtcagccctgaagatatcgtgaacaaggatgccaagagcacactgcgggtgctctatggtctgttctgcaagcacacgcagaaggcacacagggacaggacgccccatggagccccgaattgaccctcactgcctccaaagcccagagcctgcctgtcagcccag

SEQ ID NO: 6410 - DNA, 217 bp, Homo sapiens
  unsure (213): n=A,T,C or G
ccatggtaaggaggagggtgggatagggcagatgatgggggcaggggatggaacatcacacatgggcataaaggaatctcagagccagagcacagcctaatatatcctatcacctcaatgaaaccataatgaagccagactggggagaaaatgcagggaatatcacagaatgcatcatgggaggatggagacaaccagcgagccctcttaaantaga

SEQ ID NO: 6411 - DNA, 148 bp, Homo sapiens
ctggttcacgtgtggagctagttaatacgtcctgccaagatgggtaccagttgactggacatgcttatcagatgtgtcaagatgctgaaaatggaatttggttcaaaaagattccactttgtaaagttatccactgcaccctccacca

SEQ ID NO: 6412 - DNA, 197 bp, Homo sapiens
  unsure (195): n=A,T,C or G
ctgacagttctccatggcaactcagtcctccagcagacccctgcatacataaaggtgcaaaccaacaagatggtgatgctgtcctgcgaggctaaaatctccctcagtaacatgcgcatctactggctgagacagcgccaggcaccgacagtgacagtcaccacgagttcctggccctctgggattccgcaaaangg

SEQ ID NO: 6413 - DNA, 187 bp, Homo sapiens
ctgcacagcttctaaaccataatttttaattttgtagctaatttgttagtcctgcaaaggcagtgtagtcccagtcaggaagagggtttttgttacagtctttctttcaaagtgaaactatcaactaagttcctcccaaagttagtttggtatccacccaggaatgaacaaggacagcttggaggtt

SEQ ID NO: 6414 - DNA, 205 bp, Homo sapiens
cctcctgcactccgcccggacccccggccccgccgtggctatccagtcagttcgctgctattcccatgggtcacaggagacagatgaggagtttgatgctcgctgggtaacatacttcaacaagccagatatagatgcctgggaattgcgtaaagggataaacacacttgttacctatgatatggttccagagcccaaaatcatt

SEQ ID NO: 6415 - DNA, 189 bp, Homo sapiens
  unsure (6): n=A,T,C or G
  unsure (153): n=A,T,C or G
  unsure (189): n=A,T,C or G
ccaggncactgccacaatcctcggggtgtggtcaaggggcactcagagacacctgcactagaaattgcattgacattgtgagctggctcagaagacaaaccaattaagatgtagatagaaattaatttaaggtcttttcttaaaaaaaaaagnccacctcattttcagttaacatgtgccattaaatan

SEQ ID NO: 6416 - DNA, 191 bp, Homo sapiens
aaaagggaaaatctcacacataattaagcagtggaaaatgtgctcaatgctatggtgcgtcaggccctctgtctaccaggtttctcccctttctgcagagctgtggaccctgtacgtaccaaacaggtgaacttggtccatctttccttcttcctttttttgcacatttgcatttatatcttcccgtacta

SEQ ID NO: 6417 - DNA, 180 bp, Homo sapiens
  unsure (6): n=A,T,C or G
  unsure (116): n=A,T,C or G
  unsure (170): n=A,T,C or G
cctgcnagaccccccaaagccagcagtcagcctacttcctgttaacactgtttagagaggtggctattttgtacagatcccacaatgcaagcctccaccccacgccagagcaatgngaagcttgtgagcaaattcattggcgaatgcaagatctttcacctctgatatcngccgttttgg

SEQ ID NO: 6418 - DNA, 210 bp, Homo sapiens
ctgggtcattataaaacctcacaccaggagttgtgatggcttcactcttatgcagaccttcatattccaatctcattaaggcttttcttctgacatcctcatagagttcttttattggatcaagcaggtcttttagtactatgtgattaattttgttcttgcaaatgggacaagatataaatccaaatgttatccttgggccaagccatc

SEQ ID NO: 6419 - DNA, 217 bp, Homo sapiens
aaaaacagatccttcaagctaagttaacacttctaatataaaatgtattttttcttcataaaaacaaaggaaaagcaaaagcttttagattcacttgaaagaattctctctctttctctgtctctcacacaaacacacacccatacacacatacatatacacacataacgattacaaagaagttgttttttactgaataagagataaaattttacct

SEQ ID NO: 6420 - DNA, 111 bp, Homo sapiens
  unsure (70): n=A,T,C or G
  unsure (72): n=A,T,C or G
  unsure (73): n=A,T,C or G
  unsure (79): n=A,T,C or G
  unsure (85): n=A,T,C or G
tgtgttggcatgcacctgcagtctcagctacttgggaggctgagacaggaggatcactcatgctcagaangnngaggtnacaganagctatgatcatgacactgcactcca

SEQ ID NO: 6421 - DNA, 181 bp, Homo sapiens
  unsure (173): n=A,T,C or G
cctctttgtctgtgagaggaaatggttccctcactttaagttctgtaggctaatcagaaagggatctctctatagtttcaaaaagtgaaattttacttgcactacagaaataagaaacttacagatttgtccttgaagacctactaacctgcaactttagggtcctgaaagangattaagt

SEQ ID NO: 6422 - DNA, 155 bp, Homo sapiens
ccacaccctcacccctgagcagcccggggggccacagcaagaggtacacatgctgtggacaccagcacccccagacctgacccttggggaaggtgaggaggctaggacgtgggacttcctgacagcggtgggcggcagccaggctgaggctcagg

SEQ ID NO: 6423 - DNA, 184 bp, Homo sapiens
  unsure (173): n=A,T,C or G
  unsure (178): n=A,T,C or G
ctggaaggccggccatccattttagaaatggatgagacttcagcactcaagtttgaaataagagcaacaggttttccagagccaaatccaagagtaattgaactaaacaaggatgagaatgttgcgcatgttctactggaaggactacatcatcaaagacccaaacgttattncaccntagtga

SEQ ID NO: 6424 - DNA, 129 bp, Homo sapiens
ctggctgaggaccagcccgtgcacggggaccttgacctcgtcatgaacctcatggatgcacacaaggttttccagaaggaactgggaaagcgaacaggaaccgttcaggtcctgaagcggtcaggccga

SEQ ID NO: 6425 - DNA, 211 bp, Homo sapiens; identical to SEQ ID NO: 515
  unsure (204): n=A,T,C or G
  unsure (211): n=A,T,C or G

SEQ ID NO: 6426 - DNA, 197 bp, Homo sapiens
ctggctgatgtctgcttggacactccactctgtaatgggcacaccacagggatggatgtcctctgggcagggacccccatggtgactatgccaggagagactcttgcttctcgagttgcagcatcccagctcacttgcttaggttgtcttgagcttattgctaaaaacagacaagaatatgaagacatagctgtgaa

SEQ ID NO: 6427 - DNA, 208 bp, Homo sapiens
ccaggtggccctccgtgtgaggtcatggtcacagcatagtttggagctagggagggactgtcagcctggaggtttggagactcattctggaatctagtgtgggtctagccaacttcagggagaggctgagccagggtaggagtcacaggagcagacgaggatgtggggtgccgtgcacagagctccatgaccagcttgggaagttaaa

SEQ ID NO: 6428 - DNA, 193 bp, Homo sapiens
  unsure (171): n=A,T,C or G
ccttgctcatagtatacacaagccaggttgccgtgcaccactgcgtgatttggactcaaacttagggcacgaagataagctgccacagctctgtcaaaaatgcgtgcctctttcaagacatttcctaaattgatataagcatccagaaagtttgggtcaagggtgacaagncttttcaaagtgatgaattgca

SEQ ID NO: 6429 - DNA, 198 bp, Homo sapiens
  unsure (179): n=A,T,C or G
  unsure (194): n=A,T,C or G
aaaagtttacaggagagccgaccattttcagttgactttttcaggaaaatgattcagtttgaaaaggagcaagaatcctgcaatatggcgaacataagagaatattatgagagagctttgagagagtttggatccgcagattctgatctttggatggattatatgaaagaagaattganccacccccttggtanacct

SEQ ID NO: 6430 - DNA, 198 bp, Homo sapiens
cagacatttattgaactcctgatgtgtgccaggccaggcaccaaggaggagcacacagaggtattagataaagtcctggcccttgaggaacttctggatgatctgaggaaagaaaagtaggtgggcagaagcttctgtcaatcccaggcttctcccctctctctgtggtctcaggaaatgggagagccagaaaggggt

SEQ ID NO: 6431 - DNA, 204 bp, Homo sapiens
ccatctttaagtctggaggcattcctgccctggtgaaaatgcttggttcaccagtggattctgtgttgttttatgccattacaactctccacaaccttttattacatcaagaaggagctaaaatggcagtgcgtttagctggtgggctgcagaaaatggttgccttgctcaacaaaacaaatgttaaattcttggctattacga

SEQ ID NO: 6432 - DNA, 199 bp, Homo sapiens
aaaaatgtttttcagtgagtgcttttaacaaacttaagcttctgccctgccaagggaattaatgttatcttgtgaaaggtgttgctgtttgaattgatgagaaatggaagatgagaactccctaagagttctcataataaatcatctcatcacaaatcaatacggtatacagagttaaagtggaatgaggtaagaagat

SEQ ID NO: 6433 - DNA, 109 bp, Homo sapiens
ccacattttaagtgctcagtagtcacgtatggctaagggctactatactggacagtacagattcatagagtataaaatatgactttaactttggagatggtgaggtagg

SEQ ID NO: 6434 - DNA, 196 bp, Homo sapiens
aaaacctattaagtgtataatcttacaaatagtcatctacaaaatttatggagaaagtgcccagcccattcacatcacatggaccaggaattcttttgtaaatgacttaaggtaacatcatgcagttcagtgcctaataaatgctttttaatgatgaacatttctataatgactcgtaagataccatagtctgatt

SEQ ID NO: 6435 - DNA, 195 bp, Homo sapiens
cctacagacctggctcatgcccttggatgtggctgactctacttctagactgtcctgaagagattatctgaatcttggacagagattatgatgtcatttataacagtgaaaaaacggaaaacctcaatagccactagaagaaatgactgatgagtaaattatattaaaataacacaatttattttttcgtggaat

SEQ ID NO: 6436 - DNA, 198 bp, Homo sapiens
aaatccattgtttctttgttgatttttggttttgatgacctgtctagtgttgtcagtggagtattgaagtcccccactattattttgttgctgtctatctcatttcttaggtctattagtaattgttttataaatttgggagctccaatattaggtggatgtatgtttagaattgtgatattttcctgttagacaagg

SEQ ID NO: 6437 - DNA, 212 bp, Homo sapiens
ccagcagcatgggcaaggaggagctgaggcaccggcgggcgcagatgcccactcccaaggccattgactgccgaaaatgttttggagcacctccagaatgctagagaccttaagcttccctctccagcctagggtggggaagtgaggaagaagggattctagagttaaactgcttccctgttgccttcatggagttgggaacaggcttggaa

SEQ ID NO: 6438 - DNA, 211 bp, Homo sapiens
  unsure (197): n=A,T,C or G
ctgagttcccttcccgaaggtcagctcggggctcccgacgatcatgcagaagtagatgccactgtcttccggcttcacgcttgtgagattgagaatgaaccggcttgcatcccgaaacacagctatcttctcctgttccacctcttcaccgtggatagtcccttttgcggaatcccagagggccaggaactcgtggngactgtcactgctc

SEQ ID NO: 6439 - DNA, 216 bp, Homo sapiens
aaaatgcatgtattataatcatataatcataactgttgttaattcttgattatatacctagggacaatgtgtaatgtaagattactaattggttcttcccaatctcctttcagattttattaggaaaaaaaataaacctcctgatcggagacaatgtattaatcagaagtgtaaactgccagttctatatagcatgaaatgaaaagacagctaatt

SEQ ID NO: 6440 - DNA, 212 bp, Homo sapiens; identical to SEQ ID NO: 417

SEQ ID NO: 6441 - DNA, 189 bp, Homo sapiens
  unsure (1): n=A,T,C or G
nctgaaagccaaggaagagacttataatcaactacttgacaagggcagactcatgcttctaagccgtgacgactctgggtctggctccaagacagaacagagtgtagcacttttggagcagaagtggcatgtggtcagcagtaagatggaagaaagaaagtcaaagctggaagaggccctcaactttgg

SEQ ID NO: 6442 - DNA, 206 bp, Homo sapiens
  unsure (193): n=A,T,C or G
ttgcgctaatcacatttcaagtgctcagcagccacccgtgtctactactacacagtgcagacacagaacatatcatcactgcagatagttctactggacaatgttacgctagaataaacaccaaggcagtcagttaaggcagctatggtttggaaaggcatacggacagagtctgcttagaagagatacaagntgttaataaaaat

SEQ ID NO: 6443 - DNA, 212 bp, Homo sapiens
  unsure (209): n=A,T,C or G
  unsure (211): n=A,T,C or G
ctggtgtatctcatcctcaggttgctttacaacgtcatctcctccagaggaaacgcagcctcgtcatatccctgagaaacaggtctgctgtgtcctccctccgcacgtatagactgtccctccaggaggttagacacctcccctgaaactgcggcttctgtgtccaccttcaccacacttccgtcctcctcatcttggagcacaacctngnc

SEQ ID NO: 6444 - DNA, 212 bp, Homo sapiens
  unsure (191): n=A,T,C or G
ttgaggacaccgaggttcacggtctgagtaacacctcattacaccgaagcctgggcctgtattcccagagctttgggaggctgaggcgagaggatcacttgagcacaggagttcgagaccagcctggacaacatagtgagacccccatctctaaataaaaatagaccaacgctaaagcctgtgctccaganccttcaggcaattggataaga

SEQ ID NO: 6445 - DNA, 217 bp, Homo sapiens
  unsure (172): n=A,T,C or G
  unsure (191): n=A,T,C or G
  unsure (205): n=A,T,C or G
ctgagcaaatggatatgtatctagttgtaagaaatcaagaagaggatataaaatataatcaggatgtggactctgaaacggaataacctctttgtcctgtaacttttttcacttgtaataatacagcattctcaccctattaaatggaaatttagagcacccttaaattccngaataattaaaattgctanttggattgaaaaancccctaagggat

SEQ ID NO: 6446 - DNA, 203 bp, Homo sapiens
  unsure (189): n=A,T,C or G
ccaagcacagctcgatttttgatcagttggatgttgtttcctacgaggaagtcgttcggctccctgcattcaagaggaagaccctggtgctgatcggagccagtggggtgggtcgcagccacattaagaatgccctgctcagccagaatccggagaagtttgtgtaccctgtcccatatacaacacggnccgccaaggaagaa

SEQ ID NO: 6447 - DNA, 207 bp, Homo sapiens
  unsure (205): n=A,T,C or G
ccttgggaaattacctggaaatgcgactgaaatcttccttcctgaggggtctgggctcttggaaatcaaaccctctcaggttgggtggctggacgattctcctcacacttacaatgggacaaggggaaccaggaggcccccaaggggatccctgggttccacacgaactcctcctaccctcattgtgtgacagcagccatgcctnct

SEQ ID NO: 6448 - DNA, 208 bp, Homo sapiens
ccactacatcgcccacgtgaaagatccacagtctggtgaatggtataagtttaatgatgaagacatagaaaagatggaggggaagaaattacaactagggattgaggaagatctagcagaaccttctaagtctcagacacgtaaacccaagtgtggcaaaggaactcattgctctcgaaatgcatatatgttggtttatagactgcca

SEQ ID NO: 6449 - DNA, 193 bp, Homo sapiens
  unsure (164): n=A,T,C or G
aaagcttatttttcaattcataaaaaagacatttattttcagtcaaatggatgatgtctccctcttttcccctattctcaatgtttgcttgaatcttttattattttttttaattctcccccatacccacttcctgatactttggttctctttcctgctcaggncccttcatttgtactttggagtttttctc

SEQ ID NO: 6450 - DNA, 222 bp, Homo sapiens
ctgtactatcttcagttttcaaagagggatgctaagaagggattacatgctactctggggttaggactatgtctcttggattgccctatcttacttggcaccctatgtgaggactaaaactagaatacatttgttactataaataaatgtggcatggtatacctagggaaaaaaataaggaaacagttgcaattacatgggttatcttaaaaaccaaaaacc

SEQ ID NO: 6451 - DNA, 212 bp, Homo sapiens
ctgctctgcgtccacctcctccccaacattgtctcgcacgttcagtgctgccttctggaagaacttcatgtacttgttgaagacagtctggatctcctcgttgatgctgggctgcaggacagctcggaggagatccatggagatggcaggatctgtgaaacttgttgtcatctgtgagcggcggcccctccgctgcacctgccggggcttta

SEQ ID NO: 6452 - DNA, 180 bp, Homo sapiens
  unsure (179): n=A,T,C or G
aaattgcagttattctcccaggggttgaagatacacatggaagttcatttgccagtgcactggctgatgttcaatatttggaaataccccagaacagtactattcagcagttaagagtgagagagtgctttttacataagaacagtgagtggcaggttacagaaactgacaggtgaatna

SEQ ID NO: 6453 - DNA, 189 bp, Homo sapiens
  unsure (140): n=A,T,C or G
aaattagccctataaataaaccaggcattctcttttcttcttgttttgttgttaccttacaggaaaaaaagtttcatatcataattaaggcttagggacacagacttcagagccaataaaattttggttcaaattccagngctacctcctactagctgtgagatattgggctagtttcttaaccattgc

SEQ ID NO: 6454 - DNA, 183 bp, Homo sapiens
  unsure (90): n=A,T,C or G
  unsure (137): n=A,T,C or G
  unsure (161): n=A,T,C or G
aaaaaaagacaatttgagcaggacgaccctctccaatctgggtagcatggttagcctgtgcagtaacaacgtaggcttggaggatgggtncaatgaaaatgattctgattcggaaacgttttgactttggactgtanaagcttttctttgatcacctgtgntggaggaaaggaaagaagcctt

SEQ ID NO: 6455 - DNA, 191 bp, Homo sapiens
  unsure (176): n=A,T,C or G
aaaaatatgtgaactcaaatattgcacttctttcaagatgttatcaattggttattgtactgtatagttttaataattttgattgaaaccctttaacaactctttgtaaattttaactcattttagttgattttcagtactatttacataggaattgatttttatggatatagtanaagaaatgggctgga

SEQ ID NO: 6456 - DNA, 193 bp, Homo sapiens
  unsure (174): n=A,T,C or G
tgcagtctacctgcagcacagcacactccctttgggcaaggacctgagacccttgtgctaagtcaagaggctcaatgggctgcagaagaactagagaaggaccaagcaaagccatgatatttccatggaaatgtcagagcacccagagggacttatggaacatcttcaagttgngggggtggaccatgctttt

SEQ ID NO: 6457 - DNA, 195 bp, Homo sapiens
ctgtgccaagtgcaagaagaagattacaggcgagatcatgcacgccctgaagatgacctggcacgtgcactgctttacctgtgctgcctgcaagacgcccatccggaacagggccttctacatggaggagggcgtgccctattgcgagcgagactatgagaagatgtttggcacgaaatgccatggctgtgactt

SEQ ID NO: 6458 - DNA, 210 bp, Homo sapiens
  unsure (196): n=A,T,C or G
  unsure (202): n=A,T,C or G
ctgctgagctattggtattgctgtgccagaggggaggggatgaggggctctgcgaggaaggagaggagggtcccatcctcagatacagcagtgtgcagtgagaagaccccagtaccgcgtattgtagagattgaggtggggagagaggaagtcagggagaggcgcctgtggccccaggggcaactgaccacgaatncccttnccacccca

SEQ ID NO: 6459 - DNA, 186 bp, Homo sapiens
ccagcaccccaacatcatcactctgaaagatgtgtatgatgatggcaaacacgtgtacctggtgacagagctgatgcggggtggggagctgctggacaagatcctgcggcagaagttcttctcagagcgggaggccagctttgtcctgcacaccattggcaaaactgtggagtatctgcactcaca

SEQ ID NO: 6460 - DNA, 201 bp, Homo sapiens
  unsure (197): n=A,T,C or G
ctgtaattagagaaatgatgacttcctaagagttcagccacgcataattctagatttcaagagcatctaagacttgtggattagcctcatggcatgagagtttcagactcagccttctgagccagtcagggaaagtggagttctgcagcgcaaatgagagcctgggcttggtgtcgagggagctggcttctaattgngcca

SEQ ID NO: 6461 - DNA, 187 bp, Homo sapiens
ccaccactaaaggtcccagttcagggaaagcacaggagccggaagcggtggcatgggcagcatttcttactcagtcctccagcacactctgtgaagtgccctgggggcaatgaaaccttctccctagtattcccgatgacccacgaacaagttgctcccatgcacatcacacacagaaaggacctcg

SEQ ID NO: 6462 - DNA, 174 bp, Homo sapiens
  unsure (174): n=A,T,C or G
ctgcaacgcatcattcggacaggccgtacaggtcactggttgaaccatgggaaggaacactgcttggtgagcagcagtggggcccaatccaataggtggagcacaaagaagaatcatttgatttcttactgagaaaaagttcaaaggtgtggtttcataaggtaatctgctatn

SEQ ID NO: 6463 - DNA, 201 bp, Homo sapiens
ctggcgctgtcctggacttgatgggggatgaagcccagaacctgacgaggggccggcagcagctcaagtgggaccgtaagaagaagcggtttgtgggacagtcaggacaggaagacaagaagaagattaagacagagagcggccgctacatcagcagctcctacaagcgagacctctatcagaagtggaaaccagaaacca

SEQ ID NO: 6464 - DNA, 202 bp, Homo sapiens
ccaaagggaacataaggtaggcagaaaacttaaaagagtttgttaaagtgaagactggagaaattcctcccttcctctgagctgtgaatctctcttcatgaaagccaaaggtagagacagggaggacagggccaggttagggccttccacacacaaacacttctagagttgcccattcctgttatgttcttggaccctaaaa

SEQ ID NO: 6465 - DNA, 204 bp, Homo sapiens
  unsure (182): n=A,T,C or G
  unsure (185): n=A,T,C or G
ctggagaggaggttccccgtaccattattgtaaccacccgttctcagtacgggttaccagaagatgccatcgtatactgtaactttaatcagttgtataaaattgacccttctactttgcagatgtgggcaaacattctgaagcgtgttcccaatagtgtactctggctgttgcgttttcancantaggagaacctaatattta

SEQ ID NO: 6466 - DNA, 206 bp, Homo sapiens
  unsure (202): n=A,T,C or G
  unsure (204): n=A,T,C or G
ctggatatgttttataggaattgggcacttaaggaaagcttcataaaagccattggtgttggactaggatttgaattgcagcggcttgaatttgatctatctccattaaacttggatataggccaagtttataaagaaacacgtttattcctggatggagaggaagaaaaagaatgggcatttgaggaaagcaaaatagatnancc

SEQ ID NO: 6467 - DNA, 143 bp, Homo sapiens
ctagaacctgggtcctagtttgtacctagaatatgaggcaagtggcgagagtgatcgtgttcctgaccctgagtactttgagccttgctaagaccacccagcccatctccatggactcatatgaaggacaagaagtgaacata

SEQ ID NO: 6468 - DNA, 136 bp, Homo sapiens
  unsure (129): n=A,T,C or G
  unsure (132): n=A,T,C or G
tgaattcagtgagagattcacatcattgcaagagccacgcatgtgttggatctgtgtcagtactgccctcacccacttcggtcccatcactgacttggcattaggtctactctctcttcctgggactgncanaagc

SEQ ID NO: 6469 - DNA, 154 bp, Homo sapiens
  unsure (133): n=A,T,C or G
  unsure (136): n=A,T,C or G
aagctgctccacatctaccaacaatcccggaaggacaactccaattccctgcaggtgaaaacgtgccacctggtcaggtactggatctccgccttcccagcggagtttgacttgaacccggagttggcttgancanatcaaggatctgaaggct

SEQ ID NO: 6470 - DNA, 202 bp, Homo sapiens
ctgacattgataccagatctgaattctacaaacacattgtgctttctggagggtctactatgtatcctggcctgccatcacggttggaacgagaacttaaacagctttacttagaacgagttttgaagggtgatgtggaaaaactttctaaatttaagatccgcattgaagacccaccccgcagaaagcacatgggattcct

SEQ ID NO: 6471 - DNA, 198 bp, Homo sapiens
ctggtggctggtgacatcgtcctggacaagctaggggaaaggctagccatcctcctcaaggtgcgagacatggtcagcagccatgtggagcgagtgtttcagatctatgagcaacacgcagacacagttggcattgatgctgtcctgcagccttcagcagtgagcccctctgtggctgacatgttggaatggttgcaa

SEQ ID NO: 6472 - DNA, 192 bp, Homo sapiens
  unsure (12): n=A,T,C or G
  unsure (128): n=A,T,C or G
  unsure (185): n=A,T,C or G
ccaagacagagnccctacccccaaggcaggattcagtctcattttattgtctttcccatccccagcactgtctggtcctgtgtgtcactgaaggaataaagggatgggccctggaaagggtgggtcanagctgaccttggtgaagcctgagtcaggccacagagctgggagtcaggcatgtaganggataca

SEQ ID NO: 6473 - DNA, 204 bp, Homo sapiens
  unsure (200): n=A,T,C or G
ctgtgactgagggcctggtcaccacaattagagcttgatgcctcccggctttgcagggagaccaggcttcccaaaccaagtgccttgagctgcctgctctgcagcccacagaggacagtgctgaccccaggaagtgggagaagtggcccctcgtgacctacagggaactgggaagatgctggccccaaaagccttacggncatt

SEQ ID NO: 6474 - DNA, 210 bp, Homo sapiens
  unsure (193): n=A,T,C or G
  unsure (210): n=A,T,C or G
cctgggacagttgatcttgaaagaagagatggagaaagagagccgggaaaggtcatctctgttagccagtcgctacgattctcccatcaactcagcttcacatattccatcatctaaaactgcatctctccctggctatggaagaaatgggcttcaccggcctgtttctaccgacttcgctcagtataacagntattggggatgtcaacn

SEQ ID NO: 6475 - DNA, 345 bp, Homo sapiens
aaaaagaccacatgaaatgctgattctaattgtgtgtaggtcttgaggattaagcacacaaatttcacaaacttctgtttgagtaaacaaactcagccttctgtaaatatacatgcaagtttggaaacagtaatactgtacctataaatatatgctgtctgttttgtgtacagtatgtaaaaactccttttctgccacactaaaaatgcaagccatttatgggaatcctaaaactagtattgaactaaaactttgctaatgatctttattagaggatcgtccaacttttcacttaccttgggttttcttttcaattcactcttacactagtctgcttatttccag

SEQ ID NO: 6476 - DNA, 264 bp, Homo sapiens
cctgcaagaccccccaaagccagcagtcagcctacttcctgttaacactgtttagagaggtggctattttgtacagatcccacaatgcaagcctccaccccacgccagagcaatgtgaagctgtgagcaaattcattggcgaatgcaagatcctttcacctcctgatatcagccgttttgcaacatcgctcgtggacaattctgtgccattgttgagggcggggcctagtgacagcaaccttgatggaacggtgacagaaatgg

SEQ ID NO: 6477 - DNA, 286 bp, Homo sapiens
  unsure (267): n=A,T,C or G
ctggtgctctgggtctaccctacctgacatccttccagtcttatcctttgtttcctatccaggcccaggcttgtggctgagaacatccactttcagtcccatatacctgcctccaagtgtggtacagagaacttgggcctgctgggggcgcttagccttactctctccaccacctctcccaccaacccccagatgaactgcaggtagacgtttcttccttgcttggagccccagtttttgcatttcattttcattaaaatgaaaggnggtttggttttggttctaa

SEQ ID NO: 6478 - DNA, 382 bp, Homo sapiens
ctgcttatgctgctcgttgggtggcaaaatcccttgttaaaggaggtctgtgccggagggttcttgttcaggtctcttatgctattggagtttctcatccattatctatctccattttccattatggtacctctcagaagagtgagagagagctattagagattgtgaagaagaatttcgatctccgccctggggtcattgtcaggtaaagatggtaaagcctgttgctagtcaagtattgagggtgttgggtgtgtgtgtatatacttaaggctgaggaggtgaaggtgtgaaggaagactcctcaaatgggaatatattttaattcctggaacagttttgaactgctgccttagtgaagacttagttatttgagaaattt

SEQ ID NO: 6479 - DNA, 386 bp, Homo sapiens
aaatttatttgtaaaaagttaaaagagagtgggtctctgtggctctcactgatgttcactctggcatccttcagcatttttcttttttcatttcataattgtaggtcattagcatgcatatcgagtttgcccttacgtggtgggagttcaaacacacaaagacccactctttgcacaaaactgttctcgctggtttggaataggctcccgtgcttttctaatgttattgcagcatggatgtccattacagaattcagataaaatttgctaatgttctgctatgatgtttgatctcatcttaatcacagtgagctcttctatagctcaatatgcggtttgccctcaagtgtgcactgtttattactttgtaatatgccactgtgagt

SEQ ID NO: 6480 - DNA, 329 bp, Homo sapiens
ccaaagctgcctcttgatcaaccacgcaaacaaaaaccatttacctcaggtaccaaccaaccaagcgcagagcccccaccagccccgcctcgggttccaggctcagcagtggcaggcatgagcgactgctgtttccatctttgcaagttagggttctgaaagcatccccaagggtggaatccaaacaataccacactagaaatttggggcttcttcccccttttggtgctacagaagaactgcactgaggtgagatggtacctagaaccacatgactctggaagcacatttatgtctgccaagtggcagcagtgacacagaatcagagg

SEQ ID NO: 6481 - DNA, 376 bp, Homo sapiens; identical to SEQ ID NO: 6158

SEQ ID NO: 6482 - DNA, 428 bp, Homo sapiens
ggagaggagtcgaagtatagataaagataggaaaaagaaagacaaagaaagggaacgtgaacaggataaaagaaaagagaaacaaaaaagggaagaaaaagattttaagttcagtagtcaggatgatagattaaaaaggaaacgagaaagtgaaagaacattttctaggagtggttctatatctgttaaaatcataagacatgattctagacaggatagtaagaaaagtactaccaaagatagtaaaaaacattcaggctctgattctagtggaaggagcagttctgagtctccaggaagtagcaaagaaaagaaggctaagaagcctaaacatagtcgatcgcgatccgtggagaaatctcaaaggtctggtaagaaggcaagccgcaaacacaagtctaagtcccgatcaaggtagtatacttttt

SEQ ID NO: 6483 - DNA, 362 bp, Homo sapiens
ccaacatggtgaaaccccacctctactaaacacacatacacacccacaaattagccaggtgcagtggtacattcgtgtaatcccagctacttgggaggctgaggtgcacaagtgagaatcgcttgagcctgggaggcagatgttgcagtgagccaagatggtgccactatactccagcctgggcaacagagtgaaactctgtcaaaaaaagaaaaagaaaaagaaaaagaaaaagaaaagaaaagaaagaaagaaaacattctagaattccagaagccattctcattccctatttaagtcactaacccaagagtaattaatatcctgagttccaacaccttggatttgtatgggttattttt

SEQ ID NO: 6484 - DNA, 247 bp, Homo sapiens; identical to SEQ ID NO: 2583

SEQ ID NO: 6485 - DNA, 309 bp, Homo sapiens
cctggagatttatgaagtcatgaggaagagccttccaggctctgatccgaatgaaattcaattacaaatggatttgagatgaatcttaatacaaaaaaacagtgtgacagtgtcctgaggaatgggtctacagagcctttggatagctgaattgtagagaacctgggaggctcaatagtatcttcagagtgctccttcatgagaatcacaaacttacacaaaagaagagctatatgtttgctaaactatcattaaataattgagaaaatcaaactcagcatgaacatacctgatagcctgaatgttgaa

SEQ ID NO: 6486 - DNA, 435 bp, Homo sapiens
ccaagccgtagtggggtctgatatcaccagcataaccgagcggtataggatatattctgttaaagatggaaaaaatggaaaatctctgccatttatgttgtgtgacactatggggctagatggggcagaaggagcaggactgtgcatggatgacattccccacatcttaaaaggttgtatgccagacagatatcagtttaattcccgtaaaccaattacacctgagcattctacttttatcacctctccatctctgaaggacaggattcactgtgtggcttatgtcttagacatcaactctattgacaatctctactctaaaatgttggcaaaagtgaagcaagttcacaaagaagtattaaactgtggtatagcctatgtggccttgcttactaaagtggatgattgcagtgaggttcttcaagacaacttttg

SEQ ID NO: 6487 - DNA, 280 bp, Homo sapiens
aaaggcacttttactctttggttttatcattccattttgctaatatttactagctttataaattacagtaaggtacaaaaactcatcttgtaatattttcatttttgaagtgaaaaagtacatatattttgcacaaggttttatactgctaagtgcttggttggggtggtgagatgatgattagatcaggggtgaggctgagagactctgggtttagggctagccctgcctccatctcccttgggtaaaatgaagggtgtggggtaaaagatgcataagg

SEQ ID NO: 6488 - DNA, 333 bp, Homo sapiens
  unsure (331): n=A,T,C or G
cctaggatggttcttgtcctatatccacctagtcttcacctggggctataattctgtcctggaaaaagaactctgaaaacctgggtcaggggaatgattcctaaggaaaacggtctgcatttgagctctggtttgaaagtagccaaggagactgatggtggacactccagatgtggttggaagcatatgtggggaggctggctggttgagttttgttattttctgtatagaaaggttgagatatatcaacacttggaattgttacccatctgcagaattgacttctcaaataaagatgctaaaaatctaaaaaaaaaaaaaaaaaaaaacntg

SEQ ID NO: 6489 - DNA, 324 bp, Homo sapiens
tttcatttcaagtttacaagaggcatggatggagttgtgacgttcttgacaagctgggctaacctttcccgaacttgtttcccggaggcaaggtgctcggtgacccagcgcatcttaaccttgggtctcctaggctcgaggctagggcattacgtttcgtggaaccaaagcagccaattgcatagcaagtattttcctgcattccaattaaatgcttaagaaaaagcagcatcctataaaattgtgatcataaacatccatttccctcagcttttgtgagtgccttgacttacagccaacatcactgtttaactcagtctgttt

SEQ ID NO: 6490 - DNA, 237 bp, Homo sapiens
aaacagagcacagaattaaaccattagtatgtgaatctgcaaaaagagaacttgttttagactcttctacagtttagacttcaatgtgcatactaaatgcataacattcgtatcaaataattaacatttatatacaattaacaaataaggacaaattttatacaaaacttctactactgctataatttttgaaaacatttaacccactagcaagaggtaagacagcactgccttttt

SEQ ID NO: 6491 - DNA, 187 bp, Homo sapiens
tgaatgcaggggctgccgcaataaaacccagatttctttggtgcgaatgccttacgcatgcaaactattgtttcaggaacttatgtctatgagtattgcaccgcgaatgatgagtgtttagctattttacaggagtcaacaagataattaaatatcttggtgtcttgtttctattgtgtggcttttt

SEQ ID NO: 6492 - DNA, 343 bp, Homo sapiens
ctggagaggatgcctgatgacttcctgccaggagaagccaaagccaggacatagtcaaccaaaataactccaggttggtgagggaagggacaaggaaaagaaacactgggaaattcaaagaaaggcaatctcagacactaaaagagcagagagagaaagcgacatgggggacttaaagaggctccttccagggcgctgggcttctcttccagcacagaaggctgcaaaagtggaactggcccccagttcccagaggatcacaaggccaaggatccaatgggcacaccatgaggacccaaggaaaggacagagaaaggaacggctctgggaaagccaaacctgg

SEQ ID NO: 6493 - DNA, 392 bp, Homo sapiens
ccttaacccttgccctgggagcccccaaggataataacatccctttctggggcaacaaaactgggaccgagtgggtaactgatatttgacaggggaacctaaacagtctacggaagtgtcctgagatgggcgtaaagtcaaacagaccaagcacacaggtaacactgaaataggaaagagtaagagcttctgttcaggctggaggtgctcgtatggtgggacaggaaaggggaaaagagaaaggggcaacatggcagacataccacggttcctacagagattaggggcagccctggcccgggaagtacacagggcagagagctgactctcaggccaggaaggagtttagctctgacccatcctcagggaccacggctctcccccagcctcag

SEQ ID NO: 6494 - DNA, 220 bp, Homo sapiens
ccaagtcacccaccctgtatgggcctcagtttccccatgtttacaatgagatactgagctgaatggtaaccaaaagaatcagagtttgcatgtattgagagcattctatgttccacgtacattctgtaatatcaccaatccttacagtcatctgacaggataagtttccatttgacagagaaactaaaacgtggcctataccccacagactgggatttga

SEQ ID NO: 6495 - DNA, 178 bp, Homo sapiens
  unsure (33): n=A,T,C or G
ctggggatgagaactgtcaggagggaaggtcanaagtcccaggatgcacttgaaaagcctctagctccaccagtgaccagctcctggctggactcctggtctggactcagcatcagggaggctctggcctctcgccctcagggctgggggcttcttcacatggtcatcaaagacttgg

SEQ ID NO: 6496 - DNA, 531 bp, Homo sapiens
  unsure (321): n=A,T,C or G
aaataatgtctatccatgtatcatgaaggacagtatgcttcaaattgtcttttgaggcagacatgttctcagtactaaaagacatttttagatggattttattctcaacagatgcaaaatgcaaaataaaatattgacaaacaatacagcaacaaataatttactatcactcaggattataaggctggtgttaagcagaacagccattaaatcagcatcaaaagaacaaatagtaaagtccaaagtattaattacagataacttttcaaaaattcatcattcacccttgatttaattatttctctggcaattatttaatanacttctcggagtctgttaagtacttaaaccaagaactaccattattcctactgggaaaacataaacatttctcaagtggaaagtaaacagtggtggcactatttttatatatggttaaagagacctgtcattgcaataaaagccagcattcacaaaatgaggaagataaggaaagtagcataaatattttctattaacatggctttacaa

SEQ ID NO: 6497 - DNA, 265 bp, Homo sapiens
  unsure (187): n=A,T,C or G
  unsure (235): n=A,T,C or G
  unsure (250): n=A,T,C or G
cctgggaacgtttggggcaattttatataagcagtacaaccataattcctttactcatcactgactttcatgaaatggaatgttaaactacctgttcattcttatttgttttcataccagaaaaaggaatgatgtcctaaagggcagggtggggagagcaggtcgagtgatgataaacaaaacaacnaaacgttaagtttcattgagccattcctctgaattactgacaaagtgncctactcactggtgnaaggggaaactttgg

SEQ ID NO: 6498 - DNA, 342 bp, Homo sapiens
  unsure (330): n=A,T,C or G
ccacttgtgtgggtcctcacaagcaaagagagcactaaacttgacattgggggtccaccactccaactttgctttctgaaggttttggtgtacattgagccccagaaggaaaggagagtatctgtgagtgggggcctcccttgaccccagtacgaagtctatgccctgaatccccagagtagcccttcctggtgcccaactggcctggggacaaacagcgtccactacatctaggactgccggctaagtggacacacttcttgacctcctaccaggaactttggtaaaagctagctttggggaaggggttgggtgtaaatatgagagggnggagggagacca

SEQ ID NO: 6499 - DNA, 345 bp, Homo sapiens
cctagacgaacacaatcacatgttttctttgctgttcctcccgggatgggcctgttttggggtttgggactctgaacccgagcggggttccttcgcttgactttgatcctggtccttaaatgcctttccccactcccctcccgtgggttcaggggccaagcggcccctcctcagagcacgggcagcaccgtctcctggacccctgtgtgccagcctctgcagacgcagaaatagagagtaaaatggaatggctgaatagccctcaaaaccaacgtatgtctagggatcatctacctaaggtagattctacagttttgtacaagcttttttttttttttttttttt

SEQ ID NO: 6500 - DNA, 310 bp, Homo sapiens
  unsure (276): n=A,T,C or G
cctcacaagcatgagtcctcagccccaggacaagtcatctaacacctctgagccccaggatcctcccctctaagaagctgccacctactttgcagagtcttttgagggtgcgttgtcaacagtgcttgatgactaaaggccactgtcagctctgggggtaaggtgacatctaggaggggcaggtcagctctgggagggggtcatctctcgggattcaagccctggctccagcacgtcctccctctgagacccaggagggacgtactgcacctcagnttcctcccgcgccacacgtcaccccttcccgagg

SEQ ID NO: 6501 - DNA, 285 bp, Homo sapiens
ccaaggaccgctgcaggatcgagatgtctatggctgacttgttcacaaaacttgctatcttcttaatgaacgccaccgaaaatgtatcccaggacactatgccatggtccatcagctcaacgaaggccgtcagggtgaaggacagcatgtctccaaagcaaggcttcatgatcttctgcaatttctggtatcgctcagtgccgctctccaccatctgcgtgaggagagagataccgtccaggtttataaactcctgggcaaacgtgacaccccgggagaggctgg

SEQ ID NO: 6502 - DNA, 491 bp, Homo sapiens
ctgtgagagttaagcagatttttttttaaccctccgcttaccttgctgatagtgaagtatgtgaaggagatctagagctctgacgactgccttttgtgctagctgtaggtagttctaacccactctggaggaatattcaatagcaatcattagtactacctactgttttttagaagataaatatttttaattagctttcacttcatgatgaatgtcatgaaagtttttattttcatgaagtttttaagaaatatttaatagaaggtgctgtattacctgttgaaagtatgtttgaaggataatacggatctcagtattttcttctatgatatcaactaacatttcatcaataactttgtgaagctgtttcatttcacgaagtttgatgtcttgttcttccattgtttcatcttttgtgtctttcaaaagacggatttcctttgtgagttctgcacactgttggtaaataatagtcaattattctataaacc

SEQ ID NO: 6503 - DNA, 365 bp, Homo sapiens
ctgacatgctctcaggggtgaagaagtttagcttaaaatacctgatggcgctgcataaactggggatttgggaactgagtttttagctctgtgacacacaacataaaaaacaaaaatccagtctcattagctaaattcggattaaaatctgaaatgtttttatggagttgccaacaggctggaatgtacctgatacagtttaatctgcttttatttctttggctgtcttccaaaccactttcttcctgtaattcttaagttggctagttctccttcctcagaaaaattacccctaagaatcttcctaatagtgagggtgtacttccgaatagaagagtccttcggctgaaatggcatctccaagg

SEQ ID NO: 6504 - DNA, 247 bp, Homo sapiens
cctcgctggaggccccggggctccaggctccctgtcatgtgctcagcccagtgttcctcggtgattcgtaaggactgggtgagtgaatgatgaagtaaggaaaggtaaaaccagagacgtgagggccacgggtcacctgtgactcggccaagctgctggctccagtgccagcccctggttgtggattccagaactttctaggcaacaaagtaacctcccagcagaggttatcaccaacaagacgcag

SEQ ID NO: 6505 - DNA, 224 bp, Homo sapiens
aaaatgtctttataaaatcagttttggaatggaatgtgtgtgttctggaagggtggggaagggaggttaaaaatcaaagctgagctccagtgagtagggatggggttcgccttgctgcccaagaaggggagggagaagagattcgattctgagtctcctactcccgggttctgcgtagagaagccgactgctgctggaggtcggcaacgcggccacaaccgctc

SEQ ID NO: 6506 - DNA, 170 bp, Homo sapiens
ctgccagtgctgcacggatgtccttcttgccctcaatatccttctggctgcggttcaccacgccaatgtagcctcttctcaacgggagcaacttgttctccaagacgtccctggcgtcggtgccctcgtccatcaggtcaagcttggtgatgacaccgatggtccgtagg

SEQ ID NO: 6507 - DNA, 251 bp, Homo sapiens
  unsure (238): n=A,T,C or G
cctaagtgaggtaatcgatgagatttaaggatgtaggatcacgttaatagtagggaaaaaagtcactttagctatgatgaaaggaagggaactgaattctacaaaggcagaatgagagcttttgatgagtaaccatgatacaaatacacaaacagaaaacatcttacaacatgaagaaacagtgatttctctgtgagtaaaattcaacaatcccattcttaatattgaatggaatctntgagttcaccagg

SEQ ID NO: 6508 - DNA, 126 bp, Homo sapiens
  unsure (65): n=A,T,C or G
  unsure (120): n=A,T,C or G
ctggttttgtttttgtttttataaacagagcttctccatttccttagaagagctgtcatcttganctttgtgcttgtgaccatgctcacatgttgtttgacaaaccagctcattcttggnccatga

SEQ ID NO: 6509 - DNA, 284 bp, Homo sapiens
  unsure (226): n=A,T,C or G
tggccctgtcctgcagaatgaggtgtccggcccggtacagtgggtgttcatgcagatctgtctgggcgggaaacaccagcagctccggcatcaaggagtccaggagaaaatgcttccccttgagggcttgtaagtcatcaaggctgccagggaagaaccattcattcatttcctgaatttctccctgccaggccctatttcaacggtccattcatgcaacaaatgntaccacagctatggagaaatcaacagggtgataagggaatccgggatccgcagttgag

SEQ ID NO: 6510 - DNA, 247 bp, Homo sapiens
  unsure (240): n=A,T,C or G
ctggacatggggtgtggtcactagccagggctgcaccctacagttcaaccagtcctagcactggcgctgagccctacccctttcctccagcccagagtccttcctctgcggccggcacacagaatcagtttccccacagacatactgaccatatttcccaagccaaaagctggcatgacaacatgatagaatatttggaactgagattgcccaaaaaggcagaggcagccagccacatantatctgg

SEQ ID NO: 6511 - DNA, 263 bp, Homo sapiens
ccaagagcccacgccacacagtcttgccagttctgtggacgcactctcaggaccccaagcactggcttcagtaaggtgagtgtcttgtggctcatccatgtctgccagggaagtgtgtgcctgttggtggtggttgatggtctctgcagacagtcggaagagttcttcaaactcatgccgggcccactgcagggtgtgctcggctgtgctagggaagtaccgcacggtacagacagggtagggggcatcctcagaagctgcag

SEQ ID NO: 6512 - DNA, 357 bp, Homo sapiens
ctgacagttctccatggcaactcagtcctccagcagacccctgcatacataaaggtgtaaaccaacaagatggtgatgctgtcctgcgaggctaaaatctccctcagtaacatgcgcatctactggctgagacagcgccaggcaccgagcagtgacagtcaccacgagttcctggccctctgggattccgcaaaagggactatccacggtgaagaggtggaacaggagaagatagctgtgtttcgggatgcaagccggttcattctcaatctcacaagcgtgaagccggaagacagtggcatctacttctgcatgatcgtcgggagccccgagctgaccttcgggaagggaactcag

SEQ ID NO: 6513 - DNA, 287 bp, Homo sapiens
ccaagggtcactcactgggcaggaacattgtcaaggccattcatgcttggaacagggtctctcttcagctctgaggcaaatctgttctctaattttcagatgacttcaaggggaacgtgtaccaccacccctctggtgcgtcacattgcttaggaagcctgctgtgtttatcactgggtggctgtcagggctgagatggagagggccagggcctggcgaggtggagcagtcggcccaggtgtcccagcaattgttgctggaacagggtctggaacccacaggagagg

SEQ ID NO: 6514 - DNA, 267 bp, Homo sapiens
  unsure (13): n=A,T,C or G
  unsure (29): n=A,T,C or G
  unsure (45): n=A,T,C or G
  unsure (121): n=A,T,C or G
  unsure (130): n=A,T,C or G
  unsure (136): n=A,T,C or G
  unsure (154): n=A,T,C or G
  unsure (170): n=A,T,C or G
ccaggaaatgatnaaagggtagcatttangaaatcagcaaactanagcctcaaatcgaaggtggacaaatgcattctcaactcaaacaggttgggtaatgctttcataagatacattatgnttttgtgtncacagnacacaaattttattatgnctacaaacagattcangaaagacctccaggctatttccccaaatgattgacaaagtgcaaaacaaaacaaaaaagaggagagcacaaatgaatagcccacttagaagctgaat

SEQ ID NO: 6515 - DNA, 369 bp, Homo sapiens
  unsure (34): n=A,T,C or G
cctaagaactgagacttgtgacacaaggccaacnacctaagattagcccagggttgtagctggaagacctacaacccaaggatggaaggcccctgtcacaaagcctacctagatggatagaggacccaagcgaaaaaggtatctcaagactaacggccggaatctggaggcccatgacccagaacccaggaaggatagaagcttgaagacctggggaaatcccaagatgagaaccctaaaccctacctcttttctattgtttacacttcttactcttagatatttccagttctcctgtttatctttaagcctgattcttttgagatgtactttttgatgttgccggttacctttagattgacagtatta

SEQ ID NO: 6516 - DNA, 190 bp, Homo sapiens
ctgctgctgacttgagtgagaacaagagagaggacggcagcgccaagcaggagctgaaggacttcaggaacttcctgtagaaaagcccccaaaacaaaacaaaccttaattgactaaaaagtattgcatgctcaacttaggataagcactacggcaaaggatacgaaatctaccaagcttgcaagaccag

SEQ ID NO: 6517 - DNA, 272 bp, Homo sapiens; identical to SEQ ID NO: 261

SEQ ID NO: 6518 - DNA, 308 bp, Homo sapiens
  unsure (227): n=A,T,C or G
  unsure (253): n=A,T,C or G
aaagtcaactctagagagacattttgtgtgactggtccaaataaaacagcacatttaatgaggtcatattcttcttaaactttttaagagaagcaaaaacaatggaaaagccattaaaatttacacaaagaccactaaaactctactagtgtcaattaaaacaaagccaataaaacatgaacaacttcaaagttaccatcactttccacactgttctacagttatangaatatattcaagcaccatattgatnataggtaggtaaacgatgaagtcctactttggcggtctgacccacgctcacacaa

SEQ ID NO: 6519 - DNA, 306 bp, Homo sapiens
  unsure (84): n=A,T,C or G
  unsure (227): n=A,T,C or G
  unsure (266): n=A,T,C or G
  unsure (269): n=A,T,C or G
ctggaaggtagtattccgccctcacccagccacccgagtaaatgagaatgatgactgactgagaccctgatggtggtggcttangcaagatgaacgtctgaaatggaggcccagggctgccacgatggctctgtagtcatcagggagggagctccttttatcttgttacctactcccctcttgtgcccctttcttcccttgatctaagaaggttgctccggatctcnccatctggcctgcgttcaatcaacataagcttcctggangancaggaggaggcactgtgctcgcatcacataccagtgg

SEQ ID NO: 6520 - DNA, 284 bp, Homo sapiens
aaaaagtctgaagcaagtttatccagtagatggctgggggtgttactcgcgctgtctctgaggccctcctttgcagacatcatgaccgtaaggcttttggggccagcatcttcccagttccctgtaggtcacgaggggccacttctcccacttcctggggtcagcactgtcctctgtgggctgcagagcaggcagctcaaggcacttggtttgggaagcctggtctccctgcaaagccgggaggcatcaagctctaattgtggtgaccaggccctcagtcacag

SEQ ID NO: 6521 - DNA, 480 bp, Homo sapiens
  unsure (1): n=A,T,C or G
nctgtaagagctggctgagctccatgacgatggacagtgaagatggctaccagacgtgtgtgtctgaggactccagcaggggtgccttcagtcggcagacgagtacagatgatgagtgctttatccccaaggagggggatgattttctgaggaggtcatcttcaaggaggaaccggagcatcagtaacaccagcagcggatccatgtctcccttgtgggagggcaacttatcaagcatgtttgggaccctgccccggaagagcagaaagggaagtgtccgaaagcaactcttgaaatttatccctggccttcatcgtgctgtggaagaggaagaaagtcgcttttgacggattgtggtgtcctttcaaattagcttatttcacaaatatctctagactcacccagatcccagcttggtgggaaagtgcagaagaattgcaaaactgacatcccatttcacagcaatagtgacctttattt

SEQ ID NO: 6522 - DNA, 230 bp, Homo sapiens
  unsure (1): n=A,T,C or G
nctgctccctgagaaagggctgggccttgattccctggcactctgaccttttgagcacagcagagtggggacagtttcgagcagagctgcaggtgggagctgggccagtaggcaccagtcaaggagtgggcagggtaccggcagcccccgcattagcttcctagggctactgtaacatgtgaccacagactgaatggcttaaaccacagaaacctactgtcttacagtgc

SEQ ID NO: 6523 - DNA, 195 bp, Homo sapiens
aaagcttcttgttttaattaaaaacaagcacatattaacagccacatgtgaatgccaaatgattaaaacaaaaaaacaaaaacaagagccatctacactgcagctagggaaagcaaacttcttggcttaagagaagtgagggatgtgtgtacgtgtgtgtgtgtgtgtgtgtgtgtgtgtgtgtgtgtgtgtgtt

SEQ ID NO: 6524 - DNA, 332 bp, Homo sapiens
tgaagaacatctcgaatacaattttggtgggaaaggagccaattgatttcaacagaatcagatctgagcttcataaagtctttgaagtgacttcacagagacgcagacatgtgcacttgaagatgctgccccttccctggtacctagcaaagctcctgcctctttgtgtgcgtcactgtgaaacccccacccttctgcctcgtgctaaacgcacacagtatctagtcaggggaaaagactgcatttaggagatagaaaatagtttggattacttaaaggaataaggtgttgcctggaatttctggtttgtaaggtggtcactgttctttttt

SEQ ID NO: 6525 - DNA, 283 bp, Homo sapiens
aaaaatctactttttccaaaaacagtaacactgacattcctcccctttttcaagggagacagagtagggtccttcaaatcttatttaccaacagatttgacaactgttttaacatcaaatctaaggttttacttcaaatcaacttcagcaggaaggaaagaaggtccagttggacaagctgatgaattttaagtaaccaggggaaggcagacagtggaacaaataggtgggagaccactgtcaaagcatatttttgcccaaaaggtctgcttacttcagtcag

SEQ ID NO: 6526 - DNA, 500 bp, Homo sapiens; identical to SEQ ID NO: 262
  unsure (485): n=A,T,C or G

SEQ ID NO: 6527 - DNA, 249 bp, Homo sapiens
  unsure (1): n=A,T,C or G
ncggccatcggccagaagattttcctgtggagcctgcgggccagcgagctgacgggcatggccttcatcgacacgcagctctacatacaccagatgatcagcgtcaagaacttcatcctggcagccgacgtcatgaagagcatttcgctgctgcgctaccaggaggaaagcaagacgctgagcctggtgtcgcgggatgccaagcccctggaggtgtacagcgtggacttcatggtggacaatgcccag

SEQ ID NO: 6528 - DNA, 334 bp, Homo sapiens
  unsure (31): n=A,T,C or G
  unsure (123): n=A,T,C or G
  unsure (126): n=A,T,C or G
  unsure (128): n=A,T,C or G
  unsure (221): n=A,T,C or G
  unsure (226): n=A,T,C or G
  unsure (267): n=A,T,C or G
  unsure (272): n=A,T,C or G
  unsure (288): n=A,T,C or G
  unsure (308): n=A,T,C or G
aaaaacatgggcttcatgaaaacaccattgntactaacttgggcttagatgggaatctaatgtgaatagttcaagttatgggacttgtctaaatatgtctatactctaaacctgggggaaggnggngnggaacattgacttgactacagccgaatacatgttgggaatcattcccaatcataagacatcgtcgtttctgtaggatgactgcatatgttcanagtanctttttgaatttggttcccttacctttagggatgcgatgtnatagnccaaaatgattacacnaaaacctaagtcttcaaaanccaacttttgttgcttatgactttgc

SEQ ID NO: 6529 - DNA, 441 bp, Homo sapiens
ctgaacacacaactcttaaaccagttacaccaagtgtattactccctcctcccaccctaaaggtaatgatagtagtccataaagctaacctttagtttttctttctttggcttcttgctcttggagtgagtttctctgttgcagacaagtcctgcatttgcttaaaagctcttgcagagttggaattagagctgggtttaactgtttgggagtgtgtactgacaggagcaaagcgagtgccctcaggtcctacaaaaacccagataggaacatttcaaattctaaagccaacactttgatgcagttgtttacagttaattgcagatgtttattttcccaggaatccattctttcctaagaataccctggtttctctgggattcttagaatgataaaaccagaaagccagtgttaagatactacagcatttcattagttgct

SEQ ID NO: 6530 - DNA, 520 bp, Homo sapiens
aaataattattctttttataactaagccatatactggacaagatttataatttagagataatatccccattagtaaagtttatgacccaataaacagctcccactagttaataaatgccaaagccataaaaacaaagactattaatgtaatagaatttctgtacctccctcttttgctggtggtctcaagacactgaagggaaatgctatcttaggaaaaacatttattctcgttatgtaaatatcagtgaattgtcttacaatccatctggaagtctcccagccccccttggtcccaggtggtcctgaaatgctgatgcattctgcttaggtttcaagcagtagataactctggctttcagcacaaataaatcccgaaactaaaattttggggggaggaggactggaatttctgcctcttctcttccctctgcaaaagagaaatcccaactattgtcattgttccagggtaataatttgaaagaagtttcacaacctttccatatacttatattttcag

SEQ ID NO: 6531 - DNA, 292 bp, Homo sapiens
tgctgtccctcctcctgcctcggtccccgccgcaccagtgctgctctgtggctccaccttcacagtgcctgttctgaggctaagggcatggggtgaacaaggtaatgggcatctctggagtttggggtccagcagggataagaatgataaggggatattagagcaggggctctgccatgggtgcaggaccctaggacacacctccctgccaggaaacttgccccaccccctagcagccaccagttctcttcccatttccctgaaggagtgtttggctgccccacaactgtgg

SEQ ID NO: 6532 - DNA, 400 bp, Homo sapiens
  unsure (1): n=A,T,C or G
naaagttgctttgaagctcgtctataaatggcttcaagcaacatgactggttggttgtgagaattaaagggtcattaactgaataactccaaagtcattaacatgaccaaggtaaggatacagaataggaaaaggaaaatcctattccaagttggagggccatgccatcaaccacagtggtctgtgccagagcaacactattcgctagtggttctatactgacttctttactggctttccatctttgtatttattccctctgcaatccgtttcattttcagtagaagccagtgtcgaataggaataaagaatctgtgtattgcggtcagacagatttgggctagaataccagctctagactttctagttccatcactttgggcagatgtcttggcttttt

SEQ ID NO: 6533 - DNA, 250 bp, Homo sapiens
  unsure (1): n=A,T,C or G
  unsure (3): n=A,T,C or G
ngnaggaagacaaagagtattaactgttaaacactgaaatttgacaagttatgactcaaaatgattaagtataacagttttattttctattagtgatatttgtaatctttactttgcctttatgactttgcactcagttcttggtttacaacagtactatgtagaaacacaaaggttgccatcactagttatttttacctgctacagatattttttacctgccatatttacaatgttgagattcaagttt

SEQ ID NO: 6534 - DNA, 312 bp, Homo sapiens
cctttctcccagggtcttattgaagtttgggttttggcataagagatctaagggttgccctaggaggcagaggatggttccctgatcttaaaggctctcaacctctcctctctcctcccttcccccacagtgtgccagagctgtgtggagctggatccagccaccgtggctggcatcattgtcactgatgtcattgccactctgctccttgctttgggagtcttctgctttgctggacatgagactggaaggctgtctgggggttagtggaagagcagagcatgagagtgtgtttgtgtgtgtgtgtgtgtg

SEQ ID NO: 6535 - DNA, 318 bp, Homo sapiens
  unsure (1): n=A,T,C or G
naaaactaagtcagatttttatttttttttccatagaccacatcatttaataataaaaaaaataaaaataaaaattgaacaaaaggaaaaggtggatataaagtggaacctgtgggaaagaggcaagggctgcaggacagaagagactgggaactgcaggggccctgggactcaggaggagatgctgattcagctcataggtgacccagtcctggccccggctgttcccaagagaaggctgtaagtacccagggaggtggtaagcaggatggaggaaaaatcagaggactggggcacctggctgttccccatctctgg

SEQ ID NO: 6536 - DNA, 395 bp, Homo sapiens
ctgtgcaacttggagcattttagcttggtaacactgatcccctttcaggtgagtattgggcttgtaatttgaatttgaatgagaaaccgtaatgtggctactggtaaggtaaaacggataaatgccccagaccaaaacagctcgcaacgaagtatgtttgccgtaaagtcacacagtccaggcttgataatcttctgagaaattgataaaagatgtgtgatgtagacatgagtagcaaggactaaagagataaattcattctgaaactgctttgaatattgtatgttgttgatgggttggaaatatgtcaccttaggaatgagtttgtttttttttaattggagttttaggagttggtaatatcgtggtcagtatatataggcttcacaagttat

SEQ ID NO: 6537 - DNA, 301 bp, Homo sapiens
ccaagcaaagaaaggaaaaggagcagaatgaggctgaagaaagaagctctaggtgattgggggaaaggaaagaattcactagaaatttgtttagggtccagttgatttgtgtatttttgttatcatttaatttgtaattttcgtttcagaagcaaatattcgtgttgtacaaatttctgattgccctaaatgtagagagactgatggggaaagtatgatgggtttgatttttatatcaaatcatcaggcatggagaaatatcttttagaagtgttaaaataaatgttcctactgtatattt

SEQ ID NO: 6538 - DNA, 327 bp, Homo sapiens
aaatagttttatatgctcattggtctcattttctctataattaaaatactagaccagtcttaaaatggggatgattgaagtattgatatttctttttacagttactattttataatttatgcactttgattctgtgattcagatttctaatcagaaaatgtatttttttgtttttggctgttactatgttaaaattgaattatgggcatgtcattttgccatctttgtagtttcacaaattttgtgtaatctacctcaaatgaataatccaagtattggttaactatgatgttggcatctcttattcggcaagcttaaaggctcttt

SEQ ID NO: 6539 - DNA, 302 bp, Homo sapiens
  unsure (252): n=A,T,C or G
  unsure (297): n=A,T,C or G
aaagtgaaataattttttgcaaaggggtttcctcgatttggagctttttttttcttccaccgtcatttctaactcttaaaaccaactcagttccatcatggtgatgttcaagaagatcaagtcttttgaggtggtctttaacgaccctgaaaaggtgtacggcagtggcgagaaggtggctggccgggtgatagtggaggtgtgtgaagttactcgtgtcaaagccgttaggatcctggcttgcggagtggntaaagtgctttggatgcagggatcccagcagtgcaaacagacttnggagt

SEQ ID NO: 6540 - DNA, 342 bp, Homo sapiens
ccttggtgctcagtggggagactcaggaacgggagcgaatcctctaccagttctccagacgcttccaccattgcaatccggggatcttcccctcagtagattctgtacacaccttgacatgtgcaatcatgctgcttaacacggacctgcatggacagaacattgggaagagcatgagctgccaggaattcataaccaacctgaatgggctgagggatggcgggaacttccccaaggagctgctgaaggccctctactggtctatccgcagcgagaagctcgagtgggccgtggatgaagaagacacagccagacctgagaaggcccagccgtccctgccag

SEQ ID NO: 6541 - DNA, 393 bp, Homo sapiens
cctctagcatgggtgacccagccgacctcaggccggtttccgcactgccacaactttgttcaaagttgcccccaattggaacctgccacttggcattagagggtctttcatggggagagaaggagactgaattactctaagcaaaatgtgaaaagtaaggaaatcagcctttcatcccggtcctaagtaaccgtcagccgaaggtctcgtggaacacaggcaaacccgtgattttggtgctccttgtaactcagccctgcaaagcaaagtcccattgatttaagttgtttgcatttgtactggcaaggcaaaatatttttattaccttttctattacttattgtatgagcttttgttgtttacttggaggttttgtcttttactacaagtttg

SEQ ID NO: 6542 - DNA, 347 bp, Homo sapiens; identical to SEQ ID NO: 5482

SEQ ID NO: 6543 - DNA, 266 bp, Homo sapiens
aaaaattccatgtgattcaattatgtatgattacatttcagttttgctatactttatatttggcttgtatgattaaagtaaacaaagtaaattccattgttataattggttttgagtgttataggtttattcaaatccaagatttgattacagttttgataagagtcacagcttaacaggtatctggagttcacatgtgcatagctatttcactgtataaaaatagattaagatattttgagattttggtgatatttcctgttttt

SEQ ID NO: 6544 - DNA, 282 bp, Homo sapiens
  unsure (1): n=A,T,C or G
  unsure (2): n=A,T,C or G
  unsure (10): n=A,T,C or G
  unsure (55): n=A,T,C or G
  unsure (99): n=A,T,C or G
  unsure (105): n=A,T,C or G
  unsure (134): n=A,T,C or G
  unsure (186): n=A,T,C or G
  unsure (196): n=A,T,C or G
  unsure (207): n=A,T,C or G
  unsure (231): n=A,T,C or G
  unsure (235): n=A,T,C or G
  unsure (245): n=A,T,C or G
  unsure (258): n=A,T,C or G
  unsure (268): n=A,T,C or G
  unsure (278): n=A,T,C or G
nncatcccantcccggctctccctgttgccaggacacaaggtctcctttccccgntcggctggccggatacaaatgtcacccccgaagctgcctggaanttccanctccgagttccctgggaggactttttcanatgttagggacccgctccacagccccctctgggtcaccctgggttcctccanccccaccgantcactcactgnggaccctgcctctgaataatcagnaacngtggcttcanagacgtctcttgngccttccctntggacctcgnccgc

SEQ ID NO: 6545 - DNA, 507 bp, Homo sapiens
gaagatcctggaatagcgtcttccatgtgggacatcttaaaagatagtattttggcttcagtgagttacacaaatgaatcaccagtccttattaattcaatgggtctgtttacagagtgtggtaatttcgttctttagatttgcagaatttataaagaaagaaaattacagcctgcacacccaagaccaggacaattcctccaatgaaactggctgcatcaaaggtagactttcgcacaggttgtgaggttggagtcacagtgttatttgttgtacctgatgtagtaactgtcttggaagttgtagaaggggagggctgaactgtgggtttagctgtagaattggctgttggcactggagtggccgtggaaacggaacagaagtctgtcgtgttccccacttgacaatcactaactgttgagttatgtgaacaatagctctcatctttacattctatccaaaagcaggtaagtattaacaacgctaacattaaaacaggaaacgcag

SEQ ID NO: 6546 - DNA, 103 bp, Homo sapiens
  unsure (33): n=A,T,C or G
  unsure (58): n=A,T,C or G
  unsure (82): n=A,T,C or G
  unsure (86): n=A,T,C or G
ggcttgctctattactgtgaagcactaacaaanacaaacctccaactccataaagcancttgcctggctctgaaaatccttnaggntactgaaagcattaaaa

SEQ ID NO: 6547 - DNA, 234 bp, Homo sapiens
gccgccaccaaaatgcagattttcgtgaaaacccttacggggaagaccatcaccctcgaggtacgggccgggtggtcatgaggaagccaaggtccgaataaggtcctgaggtggattttaggaccggcgctgctttccatgtcttagaccatgattccgaatttgggttctaaaacttaagctttgaaatgagtaccttttgctgagcaacgacctagaggtgattttcggtgg

SEQ ID NO: 6548 - DNA, 619 bp, Homo sapiens
  unsure (1): n=A,T,C or G
  unsure (8): n=A,T,C or G
  unsure (470): n=A,T,C or G
ngcatctnacactatgccatgatgaagaagatgcagttgccagaactgcccaaggacatcagctacaagcgatatattccagaaacattgaataagtccatcagacagaggaaccttctcaccaggatgcggataaataatgttttcaaggatttcctaaaggaatttaacaacaagaccatttgtgacagcagcgtgtccacgcatgacctgaaggtgaaatacttggctaccttggaaactttgacaaaacattacggtgctgaaatatttgagacttccatgttactgatttcatcagaaaatgagatgaattggtttcattcgaatgacggtggaaacgttctctactacgaagtgatggtgactgggaatcttggaatccagtggaggcataaaccaaatgttgtttctgttgaaaaggaaaaaaataaactgaagcggaaaaaactggaaaataaacacaaganggatgaggagaaaaacaagatccgggaagagtggaacaatttttcttacttccctgaaatcactcacattgtaataaaggagtctgtggtcagcattaacaagcaggacaacaagaaaatggaactgaagctctcttcccacgaggagg

SEQ ID NO: 6549 - DNA, 255 bp, Homo sapiens
gcgacgggtttgtcagagcaccataacatggtgtgggaagtgaagacaaatcagatgcctaatgcagtacagaaactcctgttggtgatggacaagagagcctcaggaatgaatgactcattggagttgctgcagtgtaatgagaatttgccatcttcacctggatataactcctgtgatgaacacatggagcttgatgaccttcctgaacttcaggcagttcaaagtgatcctacccaatctggcatgtaccag

SEQ ID NO: 6550 - DNA, 149 bp, Homo sapiens
ctgaagttttaggagacagcttagggtttggtgcgggccacggggaggggaccgggaagcgctggggcttgtttctgtttgttacttacaggactgagacatcttctgtaaactgctacccctggggccttctgcaccccggggtgagg

SEQ ID NO: 6551 - DNA, 603 bp, Homo sapiens
  unsure (16): n=A,T,C or G
  unsure (35): n=A,T,C or G
  unsure (39): n=A,T,C or G
  unsure (526): n=A,T,C or G
tgtggggagatttcantgcattgcctcccctgggngttnttcatcttggattattccttgggcctgaatgacttgaatgtttccccgcctgagctaacagtccatgtgggtgattcagctctgatgggatgtgttttccagagcacagaagacaaatgtatattcaagatagactggactctgtcaccaggagagcacgccaaggacgaatatgtgctatactattactccaatctcagtgtgcctattgggcgcttccagaaccgcgtacacttgatgggggacatcttatgcaatgatggctctctcctgctccaagatgtgcaagaggctgaccagggaacctatatctgtgaaatccgcctcaaaggggagagccaggtgttcaagaaggcggtggtactgcatgtgcttccagaggagcccaaagagctcatggtccatgtgggtggattgattcagatgggatgtgttttccagagcacagaagtgaaacacgtgaccaaggtagaatggatattttcangacggcgcccaaaggaggagattgtatttcgttactaccacaaactcaggatgtctgcggagtactcccagagctgg

SEQ ID NO: 6552 - DNA, 258 bp, Homo sapiens
ccatctcagaggcacatttagtgtttgttctacttatgaaatcaaggacaaccaattgtacttatcttacaactgatgttctgggatgggactggaaaacattgattccagaaccactctttttcttaaaatcactggcttttatgacaatgtcttccaagagctcattagaatctataagatcgcaggaatttcgccaagaagggctgcatagaaaccacagagacaactcggccagggctgctcccattgtggtgg

SEQ ID NO: 6553 - DNA, 562 bp, Homo sapiens
  unsure (1): n=A,T,C or G
  unsure (499): n=A,T,C or G
  unsure (556): n=A,T,C or G
nctgtagcagcttctccgccacgtggacaaagtgtgtgatgaccagggcccgctgcggggctgtgggtttgctgaggatcatgagctgcacccactgtgagacgctgttgaagagggagatgaaccgctccaggacggggttgtccacagtgcagccatgagtcacgaaactgtgatagtcctgaaacaggatcttgcagaaggagcgatactccaagtaggtgagatgctccgccagctccatgggctccaggtggtcaaacaacggggacatcttgcgctttttctgtcccacagggttccgctgagtcacctgccgcttccacttgtaggtagggacgctgtctatgtcgatttggctgctgtgccgtcggttcccttcttggtctagcagagccttcagctccttgatctgctcagccaactccgggttcaagtcaaactccgctgggaaggcggagatccagtacctgaccaggtggcacgttttcacctgcanggaattggagttgtccttccgggactgttggtagatgtggaacaacttggccgccanacctgc

SEQ ID NO: 6554 - DNA, 181 bp, Homo sapiens
  unsure (20): n=A,T,C or G
  unsure (69): n=A,T,C or G
  unsure (170): n=A,T,C or G
agttcagtgacctcggcggnatccacggaatagctgttgttttccttggagagtttttccacggcgtanacaatttcattgtgtaggcgaatcaagtagctgacgagagcggtagcacagaggcccaggccccgtcggcgtggcaagaggatctcaaactcagtgtccanatccaagtcag

SEQ ID NO: 6555 - DNA, 232 bp, Homo sapiens
aaagaacagtcccaacaataaccacagagctgacaaaaatgccacctaatctgcatcatttccaggagctctgccacatattcttcctggcccgtaccaagtctcttagcccctctagaagagctaagaaaatgcaggtgtgcacctctgaacagcccatacttggcttttctgaggcaaattcccatggaaaccacattgaaggaagaggcaaaggctggtaggaaatcag

SEQ ID NO: 6556 - DNA, 285 bp, Homo sapiens; identical to SEQ ID NO: 418

SEQ ID NO: 6557 - DNA, 312 bp, Homo sapiens
ggcagtagctcaacaaggaatagagggaggagtgtaattttggtagctggtgttgaatagggcctttgagaatcagactgaacacagtgaaatatgtgcccaaagttcagaaagatgaagtttccagaaactaagaaggtagcacaatatgtggcatcatactcagaaaggaagaccatgccatggggccagaaattcagaaacgtaattcttacattgtgattgcaatggatactcatggaagaaagtgggtagtggccgatttgacttcagagtgacaggtagagaagggaagagcgtgtagaactgtgg

SEQ ID NO: 6558 - DNA, 727 bp, Homo sapiens
  unsure (638): n=A,T,C or G
  unsure (720): n=A,T,C or G
aaatgtttgaagaacagcaaacatcaaataatataataccaaatagaatattatagtctctatgagataataactcatcagctacaaccacctaaaactgaaattttctgtacttagtttctattagtacaacaccttcattcttaatgcttcttagggcatcacaggttttagaaattaatgtatttttagcattccacagtaatgatcactttcaaaaactgcaatatacatctgcatgttacactgacatacaacacataagtattttgtcacacatcaacttttagcctcaaataatagaatacaaaaagctacactggacataacgccacagaacttttgaatatccccttttcccaattgttaacaggtagtacttttttctaaagagaaagtgatgaaaaatccaaaatttctgcatccagtgtttgactccaactttctactttatcgtctcctggtaccaccatatcctgatgcagttctggttttcgtgtctgagtttgaacataccgaatagctgcccgagcctccatgaaggggtgagtaagccctattccacgtgccagggtaggagggaggataggacgggtagtaccacgagtctgagaagggtgttgccgctctattgctgncaaacaaatatcctagtattccaccagttcccaagcctgtccagaaccctgggcctggaatttcatatccttggtggcctgnaaaagca

SEQ ID NO: 6559 - DNA, 320 bp, Homo sapiens
ctgaaggagagccgccaggaagagatgaattctcagcaggaggaagaggaaatggaaacagatgctcgctcgtccctgggccagtcagcgtcagagactgaggaggacacagtgtccgtatctaaaaaggaggtagggattggagctgagtgtggaaggaaagccaggagatgggacttgggtacggaaataacacaatttgtaagtgttcagtaagtaatagcttctattttgtgccaatttccgccctcagcatcttatagatatttttcatttaattgctttgagttccaagtactatacgtgcctacattttacag

SEQ ID NO: 6560 - DNA, 410 bp, Homo sapiens; identical to SEQ ID NO: 4733

SEQ ID NO: 6561 - DNA, 372 bp, Homo sapiens
aaagccattatttctcaaaaagaacggtttatgttttagctgccattttaattaagcttgttaaaaatgaaatggcctaaggatgaactctgtaaactccacatgggcagggccactgttgtatcatggctttgccagtgtggtgatgagatcaggacctggcagatgtgcttggtgaacctaatgaacaaccacctgaggaatgacgtgaagggggaggagattaccaccactaccattggctactaattcaaaactactgtgatggcgtagagcttattttagatatatctgtgattcattattcttttgtcacacttcagcttgccaattctgtaactccttgggatatcttgctgagcttaattgcag

SEQ ID NO: 6562 - DNA, 239 bp, Homo sapiens
gttgtgaggtgagctttttcagaagcgcgatcccaggacacgtcgggaagcaagcatccccagagctgcttggaaagaggaccaaagacgtctaaaaagtcatttggaaatatctctaaatatttgttaccatgtataagctgctaaagagaaattgggcccaacaaaactaattgaataattgaggcagatttgtgtgtatcatcaaattctatccagaagttgaagaatctgaattt

SEQ ID NO: 6563 - DNA, 287 bp, Homo sapiens; identical to SEQ ID NO: 263

SEQ ID NO: 6564 - DNA, 400 bp, Homo sapiens
  unsure (18): n=A,T,C or G
  unsure (22): n=A,T,C or G
  unsure (31): n=A,T,C or G
  unsure (67): n=A,T,C or G
  unsure (183): n=A,T,C or G
  unsure (194): n=A,T,C or G
  unsure (245): n=A,T,C or G
  unsure (313): n=A,T,C or G
cgtccttgtctcacccanaatnacgacgctntcagttcaccaacaaacacgattcagtgctgctagngctgggtcctgttctgggggctggtgatgaggccaagagggaaagagggagctctgtgttccatcgagggggcgacaagcctggaccagatgaaagtgactcatgttgttaattancggcttagggncaaaggtggcccctggaccagtggcctcagcatcacctgggaaaaggttanaaatgaacattcccaggccccacctcagcctcctgaatcagagcatccctttggcaaaccatactganaaacaaccacgtgcatcaccaagcgctgtgaagaaggcaaagctttgagaccttgaaggaatcatcaaactctgggcctcggtgtgc

SEQ ID NO: 6565 - DNA, 316 bp, Homo sapiens
aaaatgccaagataagaaacgatttattatagagagaagaaaaatttctcatccaaaatatagaaatctgtacaactttgccacaatcaatatacatgaactgtacaaatttacaccagttcataatttaccaaataaaagatgactaacaaagttcacaaaatagatggtggtttgtggaaaagacttttacccaattaagtacaaggaaagttacaaaccagacctccactttctaaaaataagaagtttactcagtcttagaaaactacaagctagcaaatgtacagagagctggctggtgctaacaccacag

SEQ ID NO: 6566 - DNA, 271 bp, Homo sapiens; identical to SEQ ID NO: 419

SEQ ID NO: 6567 - DNA, 157 bp, Homo sapiens
cctatcaacctaagcaacagaaataatctgacactaccttatcaggcagattggggaggggagggtgtatctagctctagttcaaattatttggaagtgttcccttgagaaaacccaccagcctaagaagctctggccccaagcttgtcactagcag

SEQ ID NO: 6568 - DNA, 522 bp, Homo sapiens
  unsure (1): n=A,T,C or G
  unsure (6): n=A,T,C or G
  unsure (48): n=A,T,C or G
  unsure (50): n=A,T,C or G
  unsure (80): n=A,T,C or G
  unsure (181): n=A,T,C or G
  unsure (182): n=A,T,C or G
  unsure (252): n=A,T,C or G
  unsure (490): n=A,T,C or G
  unsure (511): n=A,T,C or G
ngcatntaataactacaagttccttgcaactagattactgatattggncngaacaaccatccaagcccttaagagggctntttttcaaaggacacccaatatcatcagcaggttcttggctctagcacttctacttttgtggaactccaaatctcagtaacaccgtcattctttagtttannctgaaatgctgaacatgtgaatggtgaaaaagccgttattcggaatgaagatattctgtctctcctagtncctaaacgttagttgagtattacaatccctgcattcacagaaattattactgaggaagataagactaaaaattaaattattgacgttatgaataaagagaaaatggttttctaataaggaatgaatagtggaatacaacttcagatagaatgttgattccaagaaagccccttggaggaacttctactggatacttaaagactgagaacccagccagatacagggaaaaaaactgggntgaggactatttcaggcaaanggataaaaaaa

SEQ ID NO: 6569 - DNA, 237 bp, Homo sapiens
ctgaaggacatcattgagtacgcagagctcaaaacagacgtgttccagagcctgagggaagtgggcaatgccatcctcttctgcctcctcatagagcaagctctgtctcaggaggaggtctgcgatttgctccatgccgcacccttccaaaacatcttgcctagagtctacatcaaagagggggagcgcctggaggtccggatgaaacgtctggaagccaagtatgccccgctccac

SEQ ID NO: 6570 - DNA, 381 bp, Homo sapiens
  unsure (313): n=A,T,C or G
  unsure (323): n=A,T,C or G
  unsure (369): n=A,T,C or G
  unsure (370): n=A,T,C or G
  unsure (377): n=A,T,C or G
cctggaaagaaatatcgtgtttggaatcaatccaggagtagccccaccggctggggcctacaatcttctgctctgtttggcttctagggcaaaaagacatctgtatattctgaaggcttctgtgtgacaggaaacccaagcctaagaaacaattaagtggttctcatctctaattaactgtgaaaccatttaatccaaacatgtaagcacacactcacttattaagtcacatacttttctaggtgctggggattgagaacgaatcgatgtaagattcctcctttagggcagagacagaccactgacaaatacncagatagacnaggaatttcccatggtaaaaagggatattagtaattaagaagaccnngagactnaaaa

SEQ ID NO: 6571 - DNA, 262 bp, Homo sapiens
aaaatgcatgtattataatcatataatcataactgttgttaattcttgattatatacctagggacaatgtgtaatgtaagattactaattggttcttcccaatctcctttcagattttattaggaaaaaaaataaacctcctgatcggagacaatgtattaatcagaagtgtaaactgccagttctatatagcatgaaatgaaaagacagctaatttggtccaacaaacatgactgggtctagggcacccaggctgattcag

SEQ ID NO: 6572 - DNA, 379 bp, Homo sapiens
aaaatacaatagaattaaaatgtaaacctcaaaaaaggggtgaggaatggagggaagatatgtgagtaggccaggacagaatgagagcgtcgttgtgggttcctgagacaacagttatccaatgtcattgttatttttaatgaaattcaaggaatttgcatttattccaaattggaaaagatgtgaaccaggaacaacctgcctgacagtttatgtatctttggtgattttcctttgaaccatgggaaaaatcatgtttatcttgtagtttacattgtaattctcatccactcctctgtgaagacgtggaactgtgccacccagaacctcctgcaagagaagacttgcttgcccaactgagggggaatgaagtaagcag

SEQ ID NO: 6573 - DNA, 101 bp, Homo sapiens
  unsure (101): n=A,T,C or G
ccacgctaagggcgaattccagcacactggcggccgttactagtggatccgagctcggtaccaagcttggcgtaatcatggtcatagctgtttcctgtgan

SEQ ID NO: 6574 - DNA, 393 bp, Homo sapiens
  unsure (1): n=A,T,C or G
  unsure (341): n=A,T,C or G
  unsure (362): n=A,T,C or G
  unsure (383): n=A,T,C or G
nctggagagagatcaatatgctgaacaaataaaaggagggagggcccagtggcagcagaggatgaggaaaatgtcgcaggaggtttgcacattgaaggaggagaagaagcatgatacgcatcgggtagaggagctggagaggagcttgtccagactcaaaaaccagatggctgagccactgcccccggatgccccagcagtgtcctcagaggtggagctgcaagacctgaggaaggagctggagagagtggcaggagagctccaggctcaggtggaaaacaatcagtgcatcagtctcctgaaccgtgggcaaaaggagagcttcgcgagcaggaggagangcttcaggagcagcaggagangcttcgggaacaggagaagangcttcagcag

SEQ ID NO: 6575 - DNA, 249 bp, Homo sapiens
  unsure (86): n=A,T,C or G
  unsure (87): n=A,T,C or G
  unsure (246): n=A,T,C or G
ggtcttttgcaaaatgaaaagaagcctgttcccaagatgaaaactttattctcaaacatgacagagcgttccttttatcaatggcnnatcgagggaaacataccaatggttcccagtttttcataaagagtgttacaccgtgcgctccaaagagttgccgtgtcagagcttcaccttgggtgaaggaagatgggcaggaattctggaaacagaactcctgagacctacctctgcctgcctaaaaanggg

SEQ ID NO: 6576 - DNA, 335 bp, Homo sapiens
ccaagaaaagattagcagaaactcaagaagagattagtgctgaagtagcagcaaaggcagaacgtgttcatgagttaaatgaagaaattggtaaattgtcagccaaggtggaacaactaggagctgaagggaatgtggaggaatcccagaaagtaatggatgaagtagagaaagcacgggcaaagaaaagagaagcagaggaagtttatcggaattctatgccagcttccagttttcagcagcagaaacttcgagtctgtgaagtctgctctgcctatttaggacttcataataatgacagacgactggctgatcattttgggggtaaactgcac

SEQ ID NO: 6577 - DNA, 274 bp, Homo sapiens
ccaggcatggaaccagcaaggatttaatcagacacagtcttctgcaccatggatgggaccaaattatggagtgcaaccgcctcaagggcaaaatggcagcatgttgcccaatcagccttctgggtatcgagtggcagggtatgaaacccagtgaataaggactccagaatctaaagccagtggcttgaggctacagggagtgtagtaaagccgttgtttacttaaagatttatcaaatcagtcagtgcaaatgtcagatacaatgtatttattt

SEQ ID NO: 6578 - DNA, 687 bp, Homo sapiens
  unsure (535): n=A,T,C or G
  unsure (628): n=A,T,C or G
gctgtgcttttcacatcaagttggcttagttcttggaggaaagtcttagtgactaaaattgtacacagatcacaggacaagagaactagtctaacaaattcaataagaaatcaggacaactgtagactatataaaaactgtcttagaaaattatttacaactttatcatagtgtaaatactctaaatgtaaaataaatctatggattttatataaaaatactccaaagtacaaatgtaagttaaatgctgaataaaacattttcaccttttccagtggatgctattactaagactataatctaggtgtcaaaacttaaagtgataaccacaaagcaatgttttcttaatcactcataattttacatttgttagtagtcatcacgaggtttagagttccactgaaaaagtctcatttttacaaatgcaactcatacactttccttcatggaccctttctctgtttaacacatgttaaaaaagtaaaacaaaattcttagtcaaaagttgacatgctatgtgaagcatataaattgnaaaattatcagtcttaaatacctagttgattctctttacaaaagaaacagtcatgtaatacatcagaaaatgcaaagcacactgctacaaggnacctactcaatctaaaaataatggtccccacttgggaaaatggtaagcactaaatcttt

SEQ ID NO: 6579 - DNA, 313 bp, Homo sapiens
ctgaagaaaaaagcagtcatcgattttaagtccaatgggcacatttatgacaatcggatagttctgaatggcatcgacctcaaagcatttcttgatagtctaccagatgtgaaaattgtcaagatgaagtgtcctgatggaggagacaatgcagatagcagtaacacagctcttaatatgcctgttattcctatgaatactattgcagaagcagttattgaaatgattaaccgaggacagattcaaataacaattaatggattcagtattagcaatggactggcaactactcagatcaacaataaggctgcaa

SEQ ID NO: 6580 - DNA, 285 bp, Homo sapiens
ctgtttccaggagatcagaaaagggtaaatgaatactcaagatttacagcgtcaaaaggctatgttgaggataattcttatgactatgtaaaagacaaggtagtgaaattgtgagggccctgggcccggccactcacagaatgactgaagcatgctgcagtggagaactggaaatgtatctcttgttgccctccatctccacccaccctcaagactgggacttagaattcccacgtccagcactgttgtagatgggaggtacgttgtgctgaactgctgcgctgg

SEQ ID NO: 6581 - DNA, 385 bp, Homo sapiens
aaaagttaacttgaaaatcctcgttgataattcagcagcatgcttctggtcagcctatacagtctctgtcctggtgaggagcatgatcaccaacaggcaagatcttctggccttgaagtttcgcttgagttaaaagagctcatctcaggtaagtaacaggccaagaatggtgggcaccgtgaccactagccaacttgcaatccattctactccaaaggaccgggccagggtacagggtggactgaggcagaccgtgccattcttgctgctcacagaattgctgacttggcaagtataacacctggagtaattatgtggcataagggtggtttcaagcacactgttctggagctcctttgggaagggccttttgtccccataccag

SEQ ID NO: 6582 - DNA, 332 bp, Homo sapiens
  unsure (274): n=A,T,C or G
  unsure (280): n=A,T,C or G
  unsure (295): n=A,T,C or G
  unsure (330): n=A,T,C or G
aaaagaggtatgagggctgggcgtggtggcttatgtttgtaatcccagctacttgggaggctgaggttgcagccaagattgcgccactgcactacagcctgggcgacagagcaagactctcaaaaggaggcatgaaatgcacctcaatcttttgctccaagtctgccaaagattgtcaaaccctccctgttaaaaaaaaaaatcagtttacctactctcccttctatataaaggaccctaaaattaaatgtcaatgccaaaatgcgaagtgcanatcgtnttctctccaaataanagttacttggaatccttaacaaatccaaggagaanaa

SEQ ID NO: 6583 - DNA, 390 bp, Homo sapiens
  unsure (1): n=A,T,C or G
nctgagagactctaaatccagtgacaagtctgtctgcctattcaccgattttgattctcaaacaaatgtgtcacaaagtaaggattctgatgtgtatatcacagacaaaactgtgctagacatgaggtctatggacttcaagagcaacagtgctgtggcctggagcaacaaatctgactttgcatgtgcaaacgccttcaacaacagcattattccagaagacaccttcttccccagcccagaaagttcctgtgatgtcaagctggtcgagaaaagctttgaaacagatacgaacctaaactttcaaaacctgtcagtgattgggttccgaatcctcctcctgaaagtggccgggtttaatctgctcatgacgctgcggctgtggtccag

SEQ ID NO: 6584 - DNA, 358 bp, Homo sapiens
ctggacgtgcagggaggtgaagggctccacgcggatgaggtagtgcatcacgcctgctgcattggagtagtgggtgccatagtggaacttgtcaatggtccctgctgggtcctcaaagctttcatacttctccctcacgagctgggcatgcttggggttcaccacaccgatgggcttagacaggtcccggaagacggctgggttgctgaggtccagggttggggacacgtagtcctgcaggacccaggggaacacagggtactgagacaggtcattgtaggtccgccccgcaatggtgttgagttgcatcaagtactcgaagttggatatctcacgctgtacccatttctgggtaagg

SEQ ID NO: 6585 - DNA, 449 bp, Homo sapiens
  unsure (1): n=A,T,C or G
nctggcagggcagggtcagcctccttggggggaaggtgctgacacaatgaggtcaatgacagactggcgccccacccacgcggggcactcatggctatgttcccaaccaaggccaattaggtatcaattaacaaggacactcgcccaaccacacacccctgtgtagcacagaagcttgagagccaccattcatggggcccatcatggcagcagactaagcagcctcctgcctccccttccttctaacttcccaagctggtcatggagctctgtgcacggcaccccacatcctcgtctgctcctgtgactcctaccctggctcagcctctccctgaagttggcttgacccacactagattccagaatgagtctccaaacctccaggctgacagtccctccctagctccaaactatgctgtgaccatgacctcacacggagggccacctgg

SEQ ID NO: 6586 - DNA, 317 bp, Homo sapiens
ccagtatggaatccagaaggaccgagtggataagagcgctgtcggcttcaatgaaatggaggccccgaccacagcttataagaagacgacgcccatagaagccgcttctagtggtgcccgtgggctgaaggcgaaatttgagtccatggctgaggagaagaggaagcgagaggaagaggagaaggcacagcaggtggccaggaggcaacaggagcgaaaggctgtgacaaagaggagccctgaggctccacagccagtgatagctatggaagagccagcagtaccggccccactgcccaagaaaatctcctcagagg

SEQ ID NO: 6587 - DNA, 263 bp, Homo sapiens
aaaatctagatctctctcattcatttcaatgtatttttactttaagatgaaccaaaattattagacttatttaagatgtacaggcatcagaaaaaagaagcacataatgcttttggtgcgatggcactcactgtgaacatgtgtaaccacatattaatatgcaatattgtttccaatactttctaatacagttttttataatgttgtgtgtggtgattgttcaggtcgaatctgttgtatccagtacagctttaggtcttcag

SEQ ID NO: 6588 - DNA, 514 bp, Homo sapiens
  unsure (1): n=A,T,C or G
naaacttaattaaagagcttgacaagctctgcatattcatgtgtcataagcagtatgtgacaaaaaaaactgtgcagtatataccccctcacgaaatttagtttggcagggaaaacaagatgcacatgttattataaattagaaaatggaagagaagtagaaataaatccatgagtattatatataagtaacagaacaaaaacaacaggataatgtatcccccccaaaggcccagtagagaccatcaaagctcattctgggggtagtcaaggagggagtggagggagaaaaagaacgcagaccttcaaccactaatgaaagaactgaaacatctgtatgtagaaaaaaggtaaaatcaactcactatcatcttcagccttttggttatctcatttaatggtcacagttaagtccgtgagtagggtttttgtacttgaagttcaaatagaagattaagataagcaacttcctcaaggtaagcaaactaattaatagatcaaggttttgaactttt

SEQ ID NO: 6589 - DNA, 331 bp, Homo sapiens
  unsure (9): n=A,T,C or G
  unsure (10): n=A,T,C or G
  unsure (13): n=A,T,C or G
ggcatgcannggncaggtccttatgacagacctggggctggtagagggtataacagcattggcagaggagctggctttgagaggatcaggcgtggtgcttatggtggaggctatggaggctatgatgattacaatggctataatgatggctatggatttgggtcagatagatttggaagagacctcaattactgtttttcaggaatgtctgatcacagatacggggatggtggctctactttccagagcacaacaggacactgtgtacacatgcggggattaccttacagagctactgagaatgacatttataattttttttcccgctcaa

SEQ ID NO: 6590 - DNA, 236 bp, Homo sapiens
cacagccccagaagcgagaggagcaaaccaagaaggagaatgaagaagacaaactcactgactggaataaactggcttgtctgctttgcagaaggcagtttcccaataaagaagttctgatcaaacaccagcaactgtcagacctgcacaagcaaaacctggaaatccaccggaagataaaacagtctgagcaggagctagcctatctggaaaggagagaacgagagggaaagttt

SEQ ID NO: 6591 - DNA, 343 bp, Homo sapiens
caggagtctgcctacctgtcgccctgaccgcttgtggatggagaaggggagagcatctaggcaggcaaacagaagggaagtggagttaaacctctggcatgaagtctgggagtagggtaggctagggggtttcttctatgacacttgacccttccatgctggttcccaagcctattggaggaatgtgggtgtggccgaggtgatggcaagaaaggtgcaagaaagtgagcagtctgcctgtgagtgagcacagatgccggggtgtgtgtgtgtgtgtgtgattttcactgtggggtgtgtctgtgagagctagctgccttacccctccttggcacatagtagg

SEQ ID NO: 6592 - DNA, 297 bp, Homo sapiens
  unsure (1): n=A,T,C or G
nccatcaggaaggtgaaagaggtctttgggacaggggccatgagacacgtggtcatccccttcacccacaaagaggacttagggggccaggccctggatgactatgtagcaaacacggacaactgcagcctgaaagacctggtgcgggagtgtgagagaaggtactgtgccttcaacaactggggctctgtggaggagcagaggcagcagcaggcagagctcctggctgtgattgagaggctggggagggagcgagagggctccttccacagcaatgacctcttcttggatgcccag

SEQ ID NO: 6593 - DNA, 284 bp, Homo sapiens
ctgtactgggcatctcagaatcaccgggaaggctgaaggggtagaattggaagacgggcagaaataacggtcgctaggtggttgcaccagaaccaaaatcatgctagagaatgaccctaggaaaaccactgttgctgctgacggggctgagcacgacaccactgatggcattggggcaggttgcgttccctggaccaggatgtttctgtctgcagcagaatttctctgctgagtcaccaccacatgaccgtaaatccaaggtgacatatctatctccagcctgg

SEQ ID NO: 6594 - DNA, 236 bp, Homo sapiens; identical to SEQ ID NO: 6590

SEQ ID NO: 6595 - DNA, 293 bp, Homo sapiens
  unsure (219): n=A,T,C or G
  unsure (224): n=A,T,C or G
ctggtacacggcagggtcagggttctggatatcaggtaaaacagtcaattgtgtcccagatccaaaggtcagttgccttgcagaaccagaagactccatgtcacccacgaggcagtagtacacagcagtgtcgctcagggaaacccggggcaggctcagagtgctggactttctgtcggcagggataaacagggaggccacttcgtttgtaacttttgncttgnatccttgaataataaatcgtggtccttggctgggaaactgttggtaccacgtgatataatcatttgtag

SEQ ID NO: 6596 - DNA, 286 bp, Homo sapiens
ccttgctgaccctgtggcctttagcctcagagacgaatcgacaccctcaactcagatggatacacccctgagccagcacgcataacgtccccagacaaaccgcggccgatgcccatggacacgagcgtgtatgagagcccctacagcgacccagaggagctcaaggacaagaagctcttcctgaagcgcgataacctcctcatagccgacattgaacttggctgcggcaactttggctcagtgcgccagggcgtgtaccgcatgcgcaagaagcagatcgacgtgg

SEQ ID NO: 6597 - DNA, 371 bp, Homo sapiens
aaaaaatgtgagaagagaaaaaccaggcaggaagcccattttgcgggatagggcaccaggaggtgaagaatgtacacatgtacagttgaggattagatgaatctgagcttgaaaaaggtaataccatgcacaggggaattttctaaaccaaaccacagagatcagtcaattccaatgttttctttctagactgaatgttccagaaatcatctctaattaaggatcccaaaagataatgtacaaaattctaaaaagtaaacagagataattttggataagctgagtaaaatcatcttctgaatgacagagttttatcttgaggctctccacttcacaataattataattaaaaattatgcatctgaatctca

SEQ ID NO: 6598 - DNA, 425 bp, Homo sapiens
aaaagagcctagaacctgggtcctagtttgcacctagaatatgaggcaagtggcgagagtgatcgtgttcctgaccctgagtactttgagccttgctaagaccacccagcccatctccatggactcatatgaaggacaagaagtgaacataacctgtagccacaacaacattgctacaaatgattatatcacgtggtaccaacagtttcccagccaaggaccacgatttattattcaaggatacaagacaaaagttacaaacgaagtggcctccctgtttatccctgccgacagaaagtccagcactctgagcctgccccgggtttccctgagcgacactgctgtgtactactgcctcgtgggtgacatggagtcttctggttctgcaaggcaactgacctttggatctgggacacaatttgact

SEQ ID NO: 6599 - DNA, 369 bp, Homo sapiens
ctggtcttgaattcagcacgagagaagagggacatggagcagagacacgtgctgctgaaacagaaggagctgggtggggaggagccagaaccaagcttaagagaggggcctggtggcctggtgatggaaggacatctcttcaaacgggccagcaacgcatttaagacctggagcagacgctggttcaccattcagagcaaccaactggtttaccagaagaagtacaaggaccctgtgactgtggtggtggatgaccttcgtctctgcacagtgaaactctgccctgactcagaaaggcggttctgctttgaggtggtgtccaccagcaagtcctgcctcctccaggctgactcagagcgcctcctgcag

SEQ ID NO: 6600 - DNA, 374 bp, Homo sapiens
  unsure (266): n=A,T,C or G
ctgagagactctaaatccagtgacaagtctgtctgcctattcaccgattttgattctcaaacaaatgtgtcacaaagtaaggattctgatgtgtatatcacagacaaaactgtgctagacatgaggtctatggacttcaagagcaacagtgctgtggcctggagcaacaaatctgactttgcatgtgcaaacgccttcaacaacagcattattccagaagacaccttcttccccagcccagaaagttcctgtgatgtcaagctggncgagaaaagctttgaaacagatacgaacctaaactttcaaaacctgtcagtgattgggttccgaatcctcctcctgaaagtggccgggtttaatctgctcatgacgct

SEQ ID NO: 6601 - DNA, 324 bp, Homo sapiens
aaaactcagtgaggacttagatgggaaagaatgaggtaaatacaaaggattacaggacaacaactacagcgttgtgtactgtgggaaggggagttgggcactcttggaggactcctgctgaaggtggtcagcctgcctgacaatggaagacatacttgaatggggagcagggtatgtgctttcatatgaaaaaagagctgatgttaaaactcatttggtgaggtcaacgttgtcacataccttcacataagggatagtatattttgggttgcagtcaaacttgtgctcagactggtgaaactgagagtcaggcttttacatttt

SEQ ID NO: 6602 - DNA, 336 bp, Homo sapiens
ccaggaactgaagcgcaggagcccctcccggccattggtggcctcttcctcagggaatggcagcagaggagtggggggaagcctcgtggaagcacagaatctcttgagtgactccaccaactccccccgcccattcatctccatgaagccccgagaccagcacacaaagctggggggactattgagtagaggctgggaaccaggagaagagaaagcaagaagaaaaatattgaggaaaatgaaaaaaaaactgacatgttgggtagaggatcggggttaggggtaaggctcagtatcctccatggggaacgcgagtggggacaggggggccttcag

SEQ ID NO: 6603 - DNA, 190 bp, Homo sapiens
  unsure (29): n=A,T,C or G
  unsure (44): n=A,T,C or G
  unsure (189): n=A,T,C or G
gagcagagagactgttcccttgggtgganaggtgtgggcatganagccacccattgccaagcagcaagaatgttcgtgcttttttccagagaggggaaccccactggtttttgtggaaacaatggaaacttacagatgcctgcctgggatgatgaggcacattcagaacaaatgctttttttttttttna

SEQ ID NO: 6604 - DNA, 232 bp, Homo sapiens
ctgaggtttctcctgctccagggccctcagttcctgcctcatctcatcactcagagttgtctggtccagccccaggcgtatgagtttgcaggcaggatgcctgagcccctcacagagcagtcgcacgccaacgtcatccaggttgttctgctgcaggtctagctccttcaggctggggctggcactaagcacagaggccaggtcctggcagcagtcagacgtgaggccacag

SEQ ID NO: 6605 - DNA, 230 bp, Homo sapiens
ctgccatgtgtgctaaggctggtgtccctttaccaccaaacctaaagcctgcacctccacctactatagaagagaaagttgctaaaaagtcaggaggagctactatagaagaactaactgagaaatgtaaacagatcgcacagagtaaagaagatgatgatgtaatagtgaataaacctcatgtttcggatgaagaggaagaagaacctcctttttatcatcatcccttt

SEQ ID NO: 6606 - DNA, 338 bp, Homo sapiens
ccattcctaaatgaggtgctgactctagatcatcacccttccttcatgcatggcagaacaatcaggaggctcaattagtgtgctatttgtcacactacttagtatcttctgtttaagtagcattttgtgcaattatttaagtcacatgagtcaccagaggaaaactgtaaataatggttagataaaatcacaagcagcctcttaattacccatagtgatcctgccacgaaacctaggaccctttagagggttcagtagagatttttttccagttctgccttgtaaaacttgattttttaagagatgaagtcaattatagggaaggagcccattcattt

SEQ ID NO: 6607 - DNA, 442 bp, Homo sapiens
  unsure (27): n=A,T,C or G
  unsure (421): n=A,T,C or G
ccaccacccccccccgccacgccttanagcagagcagcccctcctctcatttggtgcagaaacagtcaagaggaaccattggcctagagctcctgtgaccgagagcgccacggaagcctggggatgatgtcgggcagcttattctttgcttggctttggtaactaggtggtcccctcaagcatcctcagttcctcttgctgtttatgaatctaagacaaggaagtcctatagaagccaaagggacagggacggaaaggacaggtcccaagggatggggctgtctttacttgtggaaaccaggaaattgctcctctcagccaaccaaggttgaccacacaccacccttccggagcagctcagtcagccctcggggacgagaaaccacaagccgcagagacgctgaggcccaggcaggtgaanaagaagtggctttgggttttt

SEQ ID NO: 6608 - DNA, 546 bp, Homo sapiens
ccagtcacttacttaattcctgtccttcagtgttccatctagagaattaagagatatgatgtataaaatagacatcgagggccattaagagagtaaatacttaaaaatacatgttatgaaagcaaagccaataatcactgtaggagtatgagttgcctaagggccaaaactaatgtaaataagagaaagtgtggatataaatgaccattgtttataaacagttatgaaaaatgctgtgacttgaaatctttcccacatctcccaagaaagtaggtaggagtttatcctttccgtaatctctttttaaccctgctgactattacagggcttgtttaatcacagtggcaagaattacatgtatcttacagtaaagaaacagaatactggaatcgttagagaaccctgatgtgttgacctggataaagtacaaaggtggaagagggaatgagttatgctgttaaaatctcaggctattctgttaatgttcctgctactatgaacccaacttttttttcccccttttgactccttgggcttcctctcctg

SEQ ID NO: 6609 - DNA, 468 bp, Homo sapiens
  unsure (465): n=A,T,C or G
ctggtctgatgtctccctgaaaagttctcgcttgtcacaagaacacttagacttgccttgtgccttagagtcagagctcacacaagaaaatgtggatactatcctagttgagtagcagcttctctttcagaatttttataccaattctgaaaaagaaaatttgcgtggcatttttaattcataaattattttcctcctcaagtttcattgactttttttcttcacagcttatccatggttttaaggttgtatatattagatcttctcataagacatattaatatgtggctattaaaatgtaacattcaattactactgtgaacttttcacaaacgaaataacaatttagaaatcagaaatcaatgtagaaatatggaaaccttaaatagttatttatagaattctaagtttttccagttatagaatcagtaaaatcaaattgaatataaagtaaatgaaatctgnttt

SEQ ID NO: 6610 - DNA, 506 bp, Homo sapiens
  unsure (468): n=A,T,C or G
  unsure (488): n=A,T,C or G
ccaattatttccaatttttattttattcttaaaacttaagcatggtaaaatgttaagctgttttcatccactgatattattctactataaaaagcccttcttgagcagatttgatgataaaaaggagaacatttctaaggtataattagagaagctgttgcatgagaaatcatgtctccatctccattttgctatgcgttatctgaggattgtttctgaaagagatctatttaggcagtgtatgtatgtgtcagcatgtaaaaagtaaagaactgaaaatagacaaaccttgtaaatgcacttcaaaaccaattgtggctcaagtgtaggtggttccccaaggctggtaccaatgagactggggtttgggaattagttggtcatcatccctcctgctgcccagcagtggtcagtcatttttcatgagggatggactaggaaaatgaagtgtctattataaggagagtnctgtacttaaggagcaagtnactacaaacccagttcct

SEQ ID NO: 6611 - DNA, 240 bp, Homo sapiens; identical to SEQ ID NO: 326

SEQ ID NO: 6612 - DNA, 461 bp, Homo sapiens
  unsure (448): n=A,T,C or G
ctgtgcaacttggagcattttagcttggtaacactgatcccctttcaggtgagtattgggcttgtaatttgaatttgaatgagaaaccgtaatgtggctactggtaaggtaaaacggataaatgccccagaccaaaacagctcgcaacgaagtatgtttgccgtaaagtcacacagtccaggcttgataatcttctgagaaattgataaaagatgtgtgatgtagacatgagtagcaaggactaaagagataaattcattctgaaactgctttgaatattgtatgttgttgatgggttggaaatatgtcaccttaggaatgagtttgtttttttttaattggagttttaggagttggtaatatcgtggtcagtatatataggcttcacaagttatgtaatttgtagtggggacatggaatagacatttcatctgtgtcaccccgaggnggttttagggttt

SEQ ID NO: 6613 - DNA, 313 bp, Homo sapiens
ctgaaagagacagactccctggggaaaactaaatataaagacccaggatcaaacagggacacaaaagcaagtatcatgggaggaacttgaaatctctgtggacagcagaagctgacttcaactctgataattgtggcatccataaattgcaaatatagccctgaatagatacacacaaatgtctataatgaaggcccagcagaatggaatgtgtgaccatcttcaggaagaaaataatgaatacatgagtacaagaaaataaattacaaataaaagtcaaacttgaattctatatgtattaaaaatttcattt

SEQ ID NO: 6614 - DNA, 212 bp, Homo sapiens; identical to SEQ ID NO: 6127

SEQ ID NO: 6615 - DNA, 286 bp, Homo sapiens; identical to SEQ ID NO: 421

SEQ ID NO: 6616 - DNA, 274 bp, Homo sapiens
ctgacaagacacctacaccttcccactaccccttgtcctgcccctcagggattagcacccagaattccctgagctgctctccaccccaccagtccccagccctagaggacattggctgcagttcttgtgcggaaaaatccaagaaaaccccttgtgggactgccaatgggccagtgaacacagaggtgaaagctaatggcccacacctctacagcagccctactgattccacggacccccggcgacttccaggcgctaacaccccactaccagg

SEQ ID NO: 6617 - DNA, 314 bp, Homo sapiens
ttgttgcactgcaactctgcctcgaattgggctatgcccgagtatcctcagagtttagatgggcagtgtatttttgcttaagtagaagaatgtagttgtgccactgagaaggataaccagaaaaggttagatatatttgtcagttcacttttactcaaatttccattgagttacttaagaaatcagttcttcaaagtggatatgtacattacaggctctgtcacctacacatacacaggaatcttttgaagaataagatctgggtaatactggagtaggatgtaggaaggttaatgttgtatagatgatgtttt

SEQ ID NO: 6618 - DNA, 304 bp, Homo sapiens
aaatctgggaagctggggggacgagctgtgtatgacatagttcattttcagccatattcctggattgatgggtggagaagttttaacccaggacatgagcatccagatcagaactcatttacttttgcccccaatggacaagtatttgtttctgatgctctctatggacccaagttgagccaccttaacaatgtattggtgtttgctccatcaccctcaagccagtgtaataagccctgggaaggtcaactgggagaatgtgcgcagtggcttaagtggactggcgaggaggttggtgatgcag

SEQ ID NO: 6619 - DNA, 292 bp, Homo sapiens
aaaagacatcggtcagtaacgagcacgatgtggaaaaatgagagaagggacacattcaaccctggagagttcaatggctgctgaagctgcctgcttttcactgctgcaaggcctttctgtgtgtgatgtgcatgggagcaacttgttcgtgggtcatcgggaatactagggagaaggtttcattgcccccagggcacttcacagagtgtgctggaggactgagtaagaaatgctgcccatgccaccgcttccggctcctgtgctttccctgaactgggacctttagtggtgg

SEQ ID NO: 6620 - DNA, 175 bp, Homo sapiens
aaaattagggttcacaagttctttacgattagaacactgaagtgcatttccataaactaagtccaaagcacacagcagcaggtgataagaattgaccaaatcatcactaatcatggggaaattaccgctgtttccttcctcgctgctgacgaggttgctcctcttgagggtattt

SEQ ID NO: 6621 - DNA, 214 bp, Homo sapiens
  unsure (51): n=A,T,C or G
  unsure (70): n=A,T,C or G
aaaattttatctcttattcagtaaaaaacaacttctttgtaatcgttatgngtgtatatgtatgtgtggnatgggtgtggtgtttgtgtgagagacagagaaagagagagaattctttcaagtgaatctaaaagctttgcttttccttggtttttatgaagaaaaaatacattttatattagaagtgttaacttagcttgaaggatctgttttt

SEQ ID NO: 6622 - DNA, 349 bp, Homo sapiens
  unsure (103): n=A,T,C or G
  unsure (183): n=A,T,C or G
  unsure (222): n=A,T,C or G
  unsure (298): n=A,T,C or G
cctcgagggagattgccagcaccctgatggagagtgagatgatggagatcttgtcagtgctagctaagggtgaccacagccctgtcacaagggctgctgcggnctgcctggacaaagcagtggaatatgggcttatccaacccaaccaagatggagagtgagggggttgtccctgggcccaangctcatgcacacgctacctattgtggcacggagagtaangacggaagcagctttggctggtggtggctggcatgcccaatactcttgcccatcctcgcttgctgccctaggatgncctctgttccgagtcaagcggccacgttcagtcacacaggcccttgcttgg

SEQ ID NO: 6623 - DNA, 174 bp, Homo sapiens
ctgagcaggacctctgaaaccctggaccagtggtctcacatggtgctacgcctgcatgtaaacacgcctgcaaacgctgcctgccggtaaacacgcctgcaaacgctgcctgcccgtaaacacgcctgcaaacgctgcctgcccacacaggttcacgtgcagctcaaggaaagg

SEQ ID NO: 6624 - DNA, 298 bp, Homo sapiens
ccacaggaggacagaaagtgaaatgtcagccaggatcgctaaaatgtccttgagtcccagcagccccaggcacgaggatcagctcgaggtcaccagggaaccggccaggcggctcttcctttttggagaggagccatcaaaactcgatcaggatgttttggccgctcttgaatgtgcagacgtcgacccccatcagttcccggccgtgcacagatggaagagtgctgtcctgtgctactcaccctcggacagacagagttggcccagtcccgcggtgaaaggaaggttcaagtctcag

SEQ ID NO: 6625 - DNA, 481 bp, Homo sapiens
  unsure (417): n=A,T,C or G
ccactgcaatgactgtaattaggcccatgataacagcaattaaagtgaaaataaatctcttagatctttttagaattcactgtaacacttcattaattaaatgtattgaaggggaggattcccaaggtctgggcaaagttaccggaatccagattccttcttgagctcgaaccaacattacacttttcctggaatcaaaatgggagttaatacaagtgtataaatgacaattaatgcattggacagtttgattgttcatccaaattttgatatatctcactaacagcatgcaaggaggcttaacagaactctgtatggaaacaggttggaggtaggtaaagcagaatgtctggatctacgttgatactgagagagggagatggtagtggggacaacagacagaatagtttctgcttnccatacttgcagtccagacatggcaatagccaatttccaaagttctgggtggtctgggtcagaa

SEQ ID NO: 6626 - DNA, 360 bp, Homo sapiens
  unsure (304): n=A,T,C or G
cctcttaatggatttcaggcacaagataatttgtggtttcttctactttatccctactgcaattaattccacttttcaaatcccaaactaggaaggtgctgatattcccttttcaattgatatgctttgctacaaagcattagaaaataatcaacattttgcccactcccccaaataagaatctttttagaaggcatgacttcccaatggagatttacacaggccttgtaaatagaacatcacccaaatgcacagaggcactaagaaaaagccggagggtactgcttaccattttaggtgcggncacccagacttattcaaaactagatttcaaaagaaaaaaaaaaattttcactttgg

SEQ ID NO: 6627 - DNA, 372 bp, Homo sapiens
  unsure (34): n=A,T,C or G
  unsure (204): n=A,T,C or G
  unsure (230): n=A,T,C or G
  unsure (315): n=A,T,C or G
  unsure (321): n=A,T,C or G
  unsure (360): n=A,T,C or G
tcttggcacctctaattgctctcgtgtattcggngccgcgactttcacgatggctcgcccaaccttactaccttctgtcggccctgctctctgctgccttcctactcgtgaggaaactgccgccgctctgccacggtctgcccacccaacgcgaagacggtaacccgtgtgactttgactggagagaagtggagatcctgatgnttctcagtgccattgtgatgatgaanaaccgcagatccatgccccatgaagagggacaaagaatgggatataggagtgcacagcccagcctgacctgtgacatctctgtgnttcagncactgtggagcaacatataggcaacattttcatgtttantaaagtggacct

SEQ ID NO: 6628 - DNA, 155 bp, Homo sapiens
cctatcaacctaagcaacagaaataatctgacactaccttatcaggcaaattggggaggggagggtgtatctagctctagttcaaattatttggaagtgttccctgagaaacccaccagcctaagaagctctggccccaagcttgtcactagcag

SEQ ID NO: 6629 - DNA, 334 bp, Homo sapiens
aaaatgaattccggctcaaggagaatttgtaactttagtaggtacgtcatgacaactaccatttttttaagatgttgagaatgggaacagtttttttagggtttattcttgaccacagatcttaagaaaatggacaaaacccctcttcaatctgaagattagtatggtttggtgttctaacagtatcccctagaagttggatgtctaaaactcaagtaaatggaagtgggaggcaatttagataagtgtaaagccttgtaactgaagatgattttttttagaaagtgtatagaaactattttaatgccaagatagttacagtgctgtggggttt

SEQ ID NO: 6630 - DNA, 420 bp, Homo sapiens
ctgcttgggattagaagtttttactgactgaaaaaacagtgggtcccatcctctctgaattttccctgaggagagtcagttcaaccttattacagcagcttttacaaatctatctctaaagtctccctgccgactcaagtttccactgacttgtccccctgcatgcgatgccatgaccttcacaccaacatccaaccacatgtctctcctttggaatctgtgtgccccaccaccaggaacctgttaggcaaaggtggcaccatctccctctgtaaggctgcagcgggtgtctgtcagcatctgacaggggccctttgcgtgctgtgtgttgaatgttgcacttgctgaatgcatgcagttcccgtgagcctgtggctgagctgaaactgacagcgctctgcagcccgatccatcttccag

SEQ ID NO: 6631 - DNA, 309 bp, Homo sapiens
aaaacaacttttaacagatataagatcagtatcattcacattcacacaaacatacacacactttagaaagactgtgtgcttggcttcggcatatttaatatcattaaagaatatatagaatcatccttttatcataaggaatttacatcattgttttctcaaaagctgctattttagattgaaacagcattcagaaaaaaagtacatttcagatggtcagcatcaggatttactacagactttgtaaacagatatctataaataaataaactagggtggagaaaagaatatcctgaggtggctctgtgg

SEQ ID NO: 6632 - DNA, 315 bp, Homo sapiens
ccttcctccgcttccgctgcacctcttccttgtctgggggcagaggaaaatgagattgagcccagttattgtgtcatgcctcaggggcccttcccagaagagccctcagggccggctcctaggaagcacctcctgggaccctcgcacttctgacttggctcatgcatccccacatctagctcttgggaccttcttctagcccagcctggccccccgccagcaccctgaggtcctcagcccagctccaccttccaccagagggtaataggtgaactgtttggaatcagacacgtcccctcctcgcttgcgtttcag

SEQ ID NO: 6633 - DNA, 306 bp, Homo sapiens; identical to SEQ ID NO: 264

SEQ ID NO: 6634 - DNA, 129 bp, Homo sapiens
  unsure (121): n=A,T,C or G
  unsure (125): n=A,T,C or G
  unsure (129): n=A,T,C or G
gtaggaagtgaagagaaccagggcatctggtcaggaggatattgtaatgattcagataagagatggtggcagtggaggtggtaaaaagtgggtagatactagatgtctttttttttttttnaaanaaan

SEQ ID NO: 6635 - DNA, 341 bp, Homo sapiens
atctcaaacaaacaaacaaacaaagaaaaaaaactcttgtctccttaggatatgttacctgctccactgcagactagagaaataaatgtgtattgaaccttttactgcaaacttgaaaatgctagaaaaccaagcatgaagaataaatacatggtgggaaacacacaggcatgtgcatatgcatatacattgtaagttagtaagttagaaagctagctttgttgtatctgaacacatgaatcttttttggtcagtgtaggaagcacagccagatcctataggaatgaatacctcaaatctgttgtctgagattctagagattaaaccactgtgccattttt

SEQ ID NO: 6636 - DNA, 367 bp, Homo sapiens
  unsure (345): n=A,T,C or G
  unsure (361): n=A,T,C or G
aaaaaacttttccaatagaaaatgaaatattattgaaaataatatctattttttagctttcagcaattgatggtgctttgttgtggtgtctgctggaagtctactgccattatagggaaccttgcttgttagcttctctagatctctattctaaacaatctgttagtgatgataaattctgtaggagggtctattctgagccgttaacttcctgtaaggggaaaatgggtgggttaccagaaataccattgaagcagggtgggctgtggggtggaaggttggggtatttgtcttgagaattaaaaactacgaaacacttttgtacacaactgattttttacctgnccgggcggccgctaangcgaat

SEQ ID NO: 6637 - DNA, 262 bp, Homo sapiens; identical to SEQ ID NO: 6571

SEQ ID NO: 6638 - DNA, 155 bp, Homo sapiens
ccatggagacagtggcccagcagaaaagagactactaccagcccctcgccgccaaacggactgagattgagaagtggcggaaggagttcaaggagcagtggatgaaggagcagaagcggatgaatgaggcggtgcaggcactgcggcgcgcccag

SEQ ID NO: 6639 - DNA, 171 bp, Homo sapiens
ctggtgcttgtctggctgggtgaagtgctaggtgtcattggggactgtccagagctagttcagcgctccttcctggtggctagtgttctgcctggccccgatggcaacattaactcacctacaagaaatgctgacatgcaggaggagctaattgcctccctagaggagcaa

SEQ ID NO: 6640 - DNA, 274 bp, Homo sapiens
ccaggcatggaaccagcaaggatttaatcagacacagtcttctgcaccatggatgggaccaaattatggagtgcaaccgcctcaagggcaaaatggcagcatgttgcccaatcagccttctgggtatcgagtggcagggtatgaaacccagtgaataaggactccagaatctaaagccagtggcttgaggctacagggagtgtagtaaagccgttgtttacctaaagatttatcaaatcagtcagtgcaaatgtcagatacaatgtatttattt

SEQ ID NO: 6641 - DNA, 397 bp, Homo sapiens
  unsure (382): n=A,T,C or G
ctgcatagtgcaaaggggtcctcccacacttgtcctttttatggaaatctgctccgctgctctgcaagagttttatacattccacattacctcctgcagcagcagcatgaaggcacgttcttccaaatttatctggggtgtctatttcaaagcccgatgataacaactttctgcagcagtcagagtgagcatttagggcagctaaatgtaaagggaacatgctatggattccacacttggctgtgtcagctccgctggttattaaggtgttaatcaaaagctcatgaccgtatcttgcagccacatggagaggagtgttgccgtccttatccacacagtcaatttcacctccattctgaatgagggtctgtgaccgtgtggnaccttccatggacag

SEQ ID NO: 6642 - DNA, 270 bp, Homo sapiens; identical to SEQ ID NO: 2914

SEQ ID NO: 6643 - DNA, 195 bp, Homo sapiens
cctgctctctttttctccagggtcagaaacaggaccgggtggaagggatggggtgccagtttgaatgcagtctgtccaggctcgtcattggaggtgaacaagcaaacccagagggctccactaggacttcaaattgggggttggatttgaagacttttaagtttccttccagcccagaaagtctctcattctagg

SEQ ID NO: 6644 - DNA, 244 bp, Homo sapiens
  unsure (1): n=A,T,C or G
  unsure (8): n=A,T,C or G
  unsure (15): n=A,T,C or G
ngtctggncctgcanacaggtgctcttgtcctgagtgacaacggcatctgctgtatcgatgagttcgacaagatgaatgaaagtacaagatcggtattgcatgaagtcatggaacagcagactctgtccattgcaaaggctggggtcatctgtcagctcaatgcgcgcacctctgtcctggcagcagcaaatcccattgagtctcagtggaatcctaaaaaaaacaaccattgaaaacatccag

SEQ ID NO: 6645 - DNA, 343 bp, Homo sapiens
cctgaaggacccagggccctctggctggatgcgtttgcctatcaggacccagaattacttacagacctgtttagggctaggcttggcctctttcttgagctcatctggaggggtgtgacaacactcattcttcatccttattctccctggctgtgggcaacacttgtcctcagtgtcaccagatggtcctcctctgtgcccatgacccctcagcagccaaggctggccctgccagataaatgtgtgtgcccatgatcacacccaggggcacaggccacatacgtttccctgaaaccttgggctccagccttcatcccgtccatgtgggaaggaacttgggtcc

SEQ ID NO: 6646 - DNA, 306 bp, Homo sapiens
  unsure (197): n=A,T,C or G
  unsure (243): n=A,T,C or G
  unsure (263): n=A,T,C or G
  unsure (291): n=A,T,C or G
ctggtgtgggtgagtgtcctcggggctggtgaggggacagcagcttcagtggaaacccttccctatgtgtggccgagggcctagaacacgtctgagcgggtcaggtgggttcttcccactggagggcgtggcctcaggctgagagtgaagacggggaaggggaggaagagaacagctcgggctcctgagaccagganccagacctggtaagtacatgaccttaggggctgggcctttgcctgnaatcccaacgctttggaggnccatgcaggaggatcggatcacttgaanccatgagttaaaacc

SEQ ID NO: 6647 - DNA, 471 bp, Homo sapiens
  unsure (404): n=A,T,C or G
aaatgttttacttctttgataaagcagagtacaatagaaaaaaaacaattagtttccagtaatatctatatctctaatcagaattaagtcttccaagacatattacctggaaataaaagcctgttacaataagcaaagcttcaaccagagcggctacttttcgtgccaggaaaaagttcatccctataggaggaatgatgtgctatgtaaaatggctgtaaggtcacagccttgagggcattggaagtatattatcctattccacattaagtatttcagcgaatttcaaacatcagtttatctgcaaccatgctggcaacctttaactgatatttcaatcaaccggtaaaaaataaattaagaaatcccttcacggatattcccgggatttacactgttaaaangtacactgttcattaacatgtaattctggttcagaattacctttgagactccttgctcaaaaattgg

SEQ ID NO: 6648 - DNA, 467 bp, Homo sapiens
aggtccttatgacagacctggggctggtagagggtataacagcattggcagaggagctggctttgagaggatgaggcgtggtgcttatggtggaggctatggaggctatgatgattacaatggctataatgatggctatggatttgggtcagatagatttggaagagacctcaattactgtttttcaggaatgtctgatcacagatacggggatggtggctctactttccagagcacaacaggacactgtgtacacatgcggggattaccttacagagctactgagaatgacatttataattttttttcaccgctcaaccctgtgagagtacacattgaaattggtcctgatggcagagtaactggtgaagcagatgtcgagttcgcaactcatgaagatgctgtggcagctatgtcaaaagacaaagcaaatatgcaacacagatatgtagaactcttcttgaatt

SEQ ID NO: 6649 - DNA, 338 bp, Homo sapiens
  unsure (196): n=A,T,C or G
  unsure (291): n=A,T,C or G
  unsure (312): n=A,T,C or G
aaaaagcatatgccaccttttttattaattattatataaaatgaagcatttaattatagtaataatttgaagtagtttgaagtaccacactgaggtgaggacttaaaaatgataagacgagttccctattttataagaaaaataagccaaaattaaatattcttttggatataaatttcaacagtgagatagctgnctagtggaaatgaataatatcccagccactagtgtacagggtgttttgtggcacaggattatgtaatatggaactgctcaagcaaataactagtnatgacaacagcagttctttgnaataactgaaaaagaatattgtttct

SEQ ID NO: 6650 - DNA, 366 bp, Homo sapiens
ctggaagaagaaaagaaagcaaacaatgagaaacagaaagctgaaagggagctagagggtcaaatccagagattgaacacagagaaaaagaaactaaatacggacctgtatcacatgaaacattctctcagatactttgaagaagagtccaaggatctggccggccgcctgcaacgttcatcgcagcgtataggagagttagagtggtctctctgtgctgtcgccgccacacagaagaagaagccggatgggttctcgagccgcagtaaagcacttctcaagcggcagttagagcagtccatacgggagcagatactgctgaaaggacacgtgacacagttgaaggagtcgcttaaagaagtccag

SEQ ID NO: 6651 - DNA, 287 bp, Homo sapiens
ccaagggtcgctcactgggcaggaacattgtcaaggccattcatgcttggaatagggtctctcttcagctctgaggcaaatctgttctctaattttcagatgacttcaaggggaacgtgtaccaccacccctctggtgcgtcacattgcttaggaagcctgctgtgtttatcactgggtggctgtcagggctgagatggagagggccagggcctggcgaggtggagcagtcggcccaggtgtcccagcaattgttgctggaacagggtctggaacccacaggagagg

SEQ ID NO: 6652 - DNA, 138 bp, Homo sapiens
ccatgttgaaggcaaggaagaaaaaatggaaatggcctgtgccagctatatatatcgccttttatgagggaaagcaaagctttctcagaaatcccaaatggattttcccttgacttaattgcctgaccagttaaatgg

SEQ ID NO: 6653 - DNA, 248 bp, Homo sapiens
  unsure (122): n=A,T,C or G
  unsure (137): n=A,T,C or G
  unsure (147): n=A,T,C or G
  unsure (201): n=A,T,C or G
  unsure (214): n=A,T,C or G
  unsure (245): n=A,T,C or G
ctgctttgaaggctgcacagaaaaccttacttgtttccacctctgcagttgataataatgaagcacagaaaaaaaaacaggaggcattgaaacttcagcaggatgtaaggaaaaggaaacangaaattttataaaancacattgaancacagaagatgttaatttcaaaactggagaaaaacaaaacaatgaagtctgaanataaagcagaaanaatgaaaactttagaggttttgacaaaaaanatt

SEQ ID NO: 6654 - DNA, 305 bp, Homo sapiens
ctgagttcccttcccgaaggtcagctcggggctcccgacgatcatgcagaagtagatgccactgtcttccggcttcacgcttgtgagattgagaatgaaccggcttgcatcccgaaacacagctatcttctcctgttccacctcttcaccgtggatagtcccttttgcggaatcccagagggccaggaactcgtggtgactgtcactgctcggtgcctggcgctgtctcagccagtagatgcgcatgttactgagggagattttagcctcgcaggacagcatcaccatcttgttggtttgccctt

SEQ ID NO: 6655 - DNA, 236 bp, Homo sapiens
  unsure (231): n=A,T,C or G
  unsure (232): n=A,T,C or G
aaaaaagactatgtagaaaagaggtctataaaattgtgcaaaatacccagcattaataaacccgtttcaagtattgccagcatgagcataacccacccatgccgggacctggcttgggagagaagtggaggggcaggctgggatcccttaaagagctctccatgggcaggggaaggaccaggctcccacttccactgtgctgcccaggaactgcacaggagctgaggctgnngggt

SEQ ID NO: 6656 - DNA, 357 bp, Homo sapiens
aaaacaggtacaaaatattgaaatgaccaacgttacatgatttcaagggttgtcctttctgtgcttttatctgtcacgacaggaaggtgtggaaagtttatatccttaatttgactactcttggatattaaaatctttctattaattaaaaagacttttagacaacctcttaaatggaattacactatggaaaacagggctcccccaaaaacacctaggcagaactgagagttctttgaaaaccattcccaataaaaactaaatgaaaaataaatataaaacaaagcttaaaaaaatatgcattacctgacaccaaccttttctggctgacaatatttattcatgaaaacatatcag

SEQ ID NO: 6657 - DNA, 343 bp, Homo sapiens; identical to SEQ ID NO: 6492

SEQ ID NO: 6658 - DNA, 298 bp, Homo sapiens
ctggtggctggtgacatcgtcctggacaagctaggggaaaggctagccatcctcctcaaggtgcgagacatggtcagcagccatgtggagcgagtgtttcagatctatgagcaacacgcagacacagttggcattgatgctgtcctgcagccttcagcagtgagcccctctgtggctgacatgttggaatggttgcaggatattgagagacattatcgaaagtcgtacctgaagagaaagtatcttctttcgtctatccagtggggagactaggcaaacatacaagctttgcccaagg

SEQ ID NO: 6659 - DNA, 453 bp, Homo sapiens
ctggtcaggtactggatctccgccttcccagcggagtttgacttgaacccggagttggctgagcagatcaaggagctgaaggctctgctagaccaagaagggaaccgacggcacagcagcctaatcgacatagacagcgtccctacctacaagtggaagcggcaggtgactcagcggaaccctgtgggacagaaaaagcgcaagatgtccctgttgtttgaccacctggagcccatggagctggcggagcatctcacctacttggagtatcgctccttctgcaagatcctgtttcaggactatcacagtttcgtgactcatggctgcactgtggacaaccccgtcctggagcggttcatctccctcttcaacagcgtctcacagtgggtgcagctcatgatcctcagcaaacccacagccccgcagcgggccctggtcatcacacactttgtc

SEQ ID NO: 6660 - DNA, 359 bp, Homo sapiens
  unsure (142): n=A,T,C or G
  unsure (270): n=A,T,C or G
  unsure (273): n=A,T,C or G
gtctacctgcagcacagcacactccctttgggcaaggacctgagacccttgtgctaagtcaagaggctcaatgggctgcagaagaactagagaaggaccaagcaaagccatgatatttccatggaaatgtcagagcacccanagggacttatggaacatcttcaagttgtgggggtggacaatgctctgttgtgatttcctggcacatcatggaaccgactgctggacttaccattattctgaaaaacccatgaactggcaaagggctanaanattctgccgagacaattacacagatttagttgccatacaaaacaaggcggaaattgagtatctgcagaaaactctgcctttcagcc

SEQ ID NO: 6661 - DNA, 368 bp, Homo sapiens
  unsure (135): n=A,T,C or G
  unsure (186): n=A,T,C or G
  unsure (255): n=A,T,C or G
  unsure (273): n=A,T,C or G
  unsure (274): n=A,T,C or G
  unsure (303): n=A,T,C or G
  unsure (305): n=A,T,C or G
  unsure (353): n=A,T,C or G
  unsure (356): n=A,T,C or G
cctcgggtgatctgcccacctcagcctcccaaagtgctgggactacaggcataagccactgcgcccggcctggtccaggttttctaagatgcaggctgcagattctgtgttctccagtggacacttgcagagganccaggaaggaccacaggtcccttttggaaggaacgttgggcctgtccccangaatgcacactagtatcctttctagtggagtgtctgaggctcacagcctcttgcttaccccaggctcanatcactgagccttagcannggtctctatcctgtttcaaggatgccaananccacaagacaaatggacgtttcagaaggaactctgacggccgagtgancancctgtcctgagg

SEQ ID NO: 6662 - DNA, 147 bp, Homo sapiens
  unsure (140): n=A,T,C or G
cctccaaaagcgagcctctaggtgcacatgtaactatgtgtcttctctgtgcatgcacatgttcaggtctgggcccacccatgagaaacaggagcacccgcagcagaccattttaggaatgtgagctctggggcccatcntgtgttc

SEQ ID NO: 6663 - DNA, 347 bp, Homo sapiens
  unsure (342): n=A,T,C or G
ccaagaacaaggcgtgtgccacagtcacgtagtgacacaggtcacatttgctttctgccagcagaagagactggactccagtgcaggggagtgtgcaaggacaggttctggggggtggaggcatctgtggacatcccagggcaggggtgagggccagaacatccctaggtcctgagactacagtttctccacatttagatcagacattctcttccaaggaaggaaaccaagagaggctggtgaaccgtctggtaatgacaagccctcacttttgcagccctcttggctggtccctcagcaggtcttccctatgaacctgcaaaggagacaggcaggaatganttcca

SEQ ID NO: 6664 - DNA, 168 bp, Homo sapiens
  unsure (132): n=A,T,C or G
  unsure (152): n=A,T,C or G
cctatggaagaagaacacaaaggaactatatctgtagtagaagcccatcctaactactaagaaagccacacgataccctttagatttcacattagaattcctaaactgttagcctaacacctggccctcatnctgaccaacaggaagagganttctgaaccacccatc

SEQ ID NO: 6665 - DNA, 368 bp, Homo sapiens
  unsure (81): n=A,T,C or G
  unsure (88): n=A,T,C or G
  unsure (94): n=A,T,C or G
  unsure (109): n=A,T,C or G
  unsure (122): n=A,T,C or G
  unsure (136): n=A,T,C or G
  unsure (142): n=A,T,C or G
  unsure (145): n=A,T,C or G
  unsure (167): n=A,T,C or G
  unsure (186): n=A,T,C or G
  unsure (225): n=A,T,C or G
  unsure (226): n=A,T,C or G
  unsure (279): n=A,T,C or G
  unsure (304): n=A,T,C or G
  unsure (328): n=A,T,C or G
  unsure (332): n=A,T,C or G
  unsure (337): n=A,T,C or G
agggcgaattgggccctctagatgcatgctcgagcggccgccagtgtgatggatatctgcagaattcgcccttagagcggncgcccgngcaggnccatactaaccctgntaaaatgcccatnttacctggatggcnacccancantgctcctgcccacctgcccctnaatcctcctagaattcagnccccaattgcccagttaccaataaaaacttgtacaccanncccagggacagtctcaaatgcaaatccacagagtggaccaccacctcgggtanaatttgatgacaacaatccctttantgaaagttttcaagaacgggaacntaangaacntttacgagaacagcaagagagacaacggatc

SEQ ID NO: 6666 - DNA, 396 bp, Homo sapiens
ccacataccaagatgtgaacatattcttgtcttatataagaaaaggctcaggttgtatgccacaaactttgaattaaattccagggaaatattgctttggtaacatgaacaatttgtaccacattccattaaaaaaagatttaataaaatccctcaaacagcacttttctacttgtttcggagtacacaattcccaaattagcacaaacaaaacaaagcaaaaaaagaaaaacagacagaatgtaaaatgaaggttgctacttttatgatatcacttccctttcccttccttagctagtgttcttttcctttcccttaatagtaaaggatggtgaatagaaaatgacctattcttatccccatccatttgcttctaggattcctgcttaaaccaaa

SEQ ID NO: 6667 - DNA, 234 bp, Homo sapiens
aaaaagtcttcaggcagagtaatcatgttagaggtggtattcgatggaagaaagtttagagagttaggagtgggggtagaattctagaatttataagagtccaggaagcatagcagtcaggggcaaaaattagcgtaatatggagtaggcaatagaggagctactggagtcagaagtcactgcagagtgcaacataggaagatggactcctagcttacatgagattccctgcag

SEQ ID NO: 6668 - DNA, 245 bp, Homo sapiens
  unsure (58): n=A,T,C or G
  unsure (69): n=A,T,C or G
  unsure (138): n=A,T,C or G
  unsure (237): n=A,T,C or G
ctgcaagaaaacatacctgtcccccaaaagttgtttttatgcactgtgtctcgtctangcaagcgcttncaagaagccaggattcacttgagaatgtgtctctctctggcaggtctcgacatgacaactactgtgtangtgagggagggaactttcaaagcactttgttttcccacttactatgtgtgagaagttgctcctgctctagatctcatgtgccagtactcaccaatttgnaaaaggct

SEQ ID NO: 6669 - DNA, 247 bp, Homo sapiens
ccttcccagtccccacaggtccccgtcctgataggtccctggagctccactggccctcaggtaaactccaagcgccacactactgtctacaaacgctggtgatctgggcctgcagcccttctcgccttggtggaggcccctccccacgctctggaaagtgcctcaggccctctcagctctggtctctgcaccttccattcccctcacctagatcactcctctaccaaactcctgcacaccttccagg

SEQ ID NO: 6670 - DNA, 225 bp, Homo sapiens
aaaatttccttgaataatccatgaaaggaataattcaaatacagataaacagagttggcagtatattatagtgataattttgtattttcacaaaaaaaaagttaaactcttcttttctttttattataatgaccagcttttggtatttcattgttaccaagttctatttttagaataaaattgttctccttctaaaagtcaaaaaaaaaaaaaaaaaaaaaaccc

SEQ ID NO: 6671 - DNA, 172 bp, Homo sapiens
ctgccctgtcagccctgaagatatcgtgaacaaggatgccaagagcacactgcgggtgctctatggtctgttctgcaagcacacgcagaaggcacacagggacaggacgccccatggagccccgaattgaccctcactgcctccaaagcccggagcctgcctgtcagcccag

SEQ ID NO: 6672 - DNA, 340 bp, Homo sapiens
  unsure (311): n=A,T,C or G
ctgcgagtgggtgagttctgtcacaaccgtggcatcaagctggtggtggcagacacgcggggcctgtttgggcagctcttctgtgactttggagaggaaatgatcctcacagattccaatggggagcagccactcagtgctatggtttctatggttaccaaggacaaccccggtgtggttacctgcctggatgaggcccgacacgggtttgagagcggggactttgtctccttttcagaagtacagggcatggttgaactcaacggaaatcagcccatggagatcaaagtcctgggtccttatacctttancatctgtgacaccttcaacttctccgact

SEQ ID NO: 6673 - DNA, 101 bp, Homo sapiens
ttctgagaagctgattaaagctgtgcccaaagaagtgaactttggtttggttttgaatggtgaaggttgccactgctgactatatcaagctattgagacag

SEQ ID NO: 6674 - DNA, 101 bp, Homo sapiens
cggccgaggtctgttttattgctaaactatcatgatacaagccgtataaaaatactttacatataggaaaaataaactacattaaactggagattaaaaac

SEQ ID NO: 6675 - DNA, 199 bp, Homo sapiens
ctgtccccaccaccaccctgtgcagcaggggttaacagacctcactttgtggggggaaaacagaggcttggagaggtcccctaacttgcccactgtcacacgtagtgagtccagagctgggactccatgtttggcccccccctgcactacctctgtggacaggacactgccctccttgcccttggtctctctttcagag

SEQ ID NO: 6676 - DNA, 204 bp, Homo sapiens
  unsure (18): n=A,T,C or G
  unsure (136): n=A,T,C or G
  unsure (147): n=A,T,C or G
  unsure (171): n=A,T,C or G
  unsure (179): n=A,T,C or G
aaaggatctcatgatttntagtattccaagaattttctttcaccaagggcgatttaatatgggtcattcatacttctcttggatttcttgcctttttttaatctccttgccagccaaatgataaatgccaacccanagaatgcagtnaccatgactgccactggaatgaanagggggtnataatcaccctccttaatcattgag

SEQ ID NO: 6677 - DNA, 217 bp, Homo sapiens
aaatcaaggttcataggaaaagacataaatgaggaaactccaaacctcctgttagctgttatttctatttttgtagaagtaggaagtgaaaataggtatacagtggattaattaaatgcagcgaaccaatatttgtagaagggttatattttactactgtggaaaaatatttaagatagttttgccagaacagtttgtacagacgtatgcttatttt

SEQ ID NO: 6678 - DNA, 296 bp, Homo sapiens
  unsure (125): n=A,T,C or G
  unsure (131): n=A,T,C or G
  unsure (174): n=A,T,C or G
  unsure (179): n=A,T,C or G
  unsure (200): n=A,T,C or G
ctgtgttggcatgcacctgcagtctcagctacttgggaggctgagacaggaggatcactcaagctcagaaggtcgaggttacagtgagctatgatcatgacactgcactccaacctgggcagcanagcaanaccccgactcaaaaaaaacatatgaaaagaaaaaagtatggancatanttggggaaaagcaaatagccntatctgagcacagtcgactcatgatgctctcttctactataactgcctttacttttctcataaaagttgaaaaataccattctgccatttgtgcat

SEQ ID NO: 6679 - DNA, 103 bp, Homo sapiens
  unsure (95): n=A,T,C or G
  unsure (96): n=A,T,C or G
agggactgatgccacaggccaggctgcctctggagggtcctgggctggtggcagcttctaatgctctatggaatgaggacatatccttcttcttnnagaatct

SEQ ID NO: 6680 - DNA, 278 bp, Homo sapiens
aaatgactgtgctgcccctttcacatcaaagaactactgacaacgaaggccgcgcctgcctttcccatctgtctatctatctggctggcagggaaggaaagaacttgcatgttggtgaaggaagaagtggggtggaagaagtggggtgggacgacagtgaaatctagagtaaaaccaagctggcccaaggtgtcctgcaggctgtaatgcagtttaatcagagtgccatttttttttgttcaaatgattttaattattggaatgcacaatttttttaa

SEQ ID NO: 6681 - DNA, 201 bp, Homo sapiens
  unsure (187): n=A,T,C or G
ctgccttttggctcagtcagaatattcaagtctccagttccaatctgagaggactttgagagcaaccctgctttgcagacatctggttttgttctcagagcttcagactttgtatttagacaggaagaaatttcctctggtaaactttgtttatgacatccttgaggaatttttgctccaaggttangtggagagttggca

SEQ ID NO: 6682 - DNA, 223 bp, Homo sapiens
  unsure (91): n=A,T,C or G
  unsure (138): n=A,T,C or G
  unsure (150): n=A,T,C or G
ccttccgggccctcgtgcaggagaagatacaaaaaaggaatcagaggcaaagtggagacagacgccagctacccccaccaccaacaccagncaatgaagagagaagaggagggctcccacccctgcccctgcatccangtggagaccaangaggccctccagtgggtccgctctccctggggctggcgacagtggacatccagaaccctgacatcacgagttc

SEQ ID NO: 6683 - DNA, 100 bp, Homo sapiens
  unsure (61): n=A,T,C or G
ggaaagaatagggcacaggtggggatggatggttggttggatatgtcacttttcttatggnaaacaattaaatccatattctctctgcttaaaagaagaa

SEQ ID NO: 6684 - DNA, 448 bp, Homo sapiens
ccaatgtcaatcttatgttggagttactagtgcagaagaagaaacaactggaagcagaatcacatgcagcccaactacagattcttatggaattcctcaaggttgcaagaagaaataagagagagcaactggaacagatccagaaggagctaagtgttttggaagaggatattaagagagtggaagaaatgagtggcttatactctcctgtcagtgaggatagcacagtgcctcaatttgaagctccttctccatcacacagtagtattattgattccacagaatacagccaacctccaggtttcagtggcagttctcagacaaagaaacagccttggtataatagcacgttagcatcaagacgaaaacgacttactgctcattttgaagacttggagcagtgttacttttctacaaggatgtctcgtatctcagatgacagtcgaac

SEQ ID NO: 6685 - DNA, 429 bp, Homo sapiens
ccaaaagaagtaagacagcttgctgaagatttcctgaaagactatattcatataaacattggtgcacttgaactgagtgcaaaccacaacattcttcagattgtggatgtgtgtcatgacgtagaaaaggatgaaaaacttattcgtctaatggaagagatcatgagtgagaaggagaataaaaccattgtttttgtggaaaccaaaagaagatgtgatgagcttaccagaaaaatgaggagagatgggtggcctgccatgggtatccatggtgacaagagtcaacaagagcgtgactgggttctaaatgaattcaaacatggaaaagctcctattctgattgctacagatgtggcctccagagggctaggttagtacaaactcgcattcatggcttggtttcccagaagatctccatttaactttttt

SEQ ID NO: 6686 - DNA, 286 bp, Homo sapiens
ccacttcaagtcacacaggtagataaaaacaggtccttttaggggccaaaggagaggttatcacagcagcagtttggttctcagcagaaatgcccagggcccctgttccacatcaaagctacaagcactgttgtcagggcatggagagtgacgggaccagagccctcctcgtctcagggcagcctgcctggcttcaaggtggagatcacagcgtcctctggggtcataggttcccccactgttccacaggagggaactggtccacctcgcccacctctgtgctcag

SEQ ID NO: 6687 - DNA, 240 bp, Homo sapiens
ccattgacttttctgtcgccaacagatctggcaaaagcaggcttttactacataggacctggagacagagtggcttgctttgcctgtggtggaaaattgggcaattgggaaccgaaggataatgctatgtcagaacacctgagacattttcccaaatgcccatttatagaaaatcagcttcaagacacttcaagatacacagtttctaatctgagcatgcagacacatgcagcccgcttt

SEQ ID NO: 6688 - DNA, 219 bp, Homo sapiens
  unsure (101): n=A,T,C or G
  unsure (187): n=A,T,C or G
aaaaatagccatctttgtacttttttgcaagtttctctataagcttgaaatagtcatgtgatacttcgacaaacatcatatgccttgcagtttttctcggncgtgttctcagggttgagtagtccccttagctacctaactttactttcaatacaaagcacaaaaaagaatatcttcaaataaaagnttgcctgcagaacctggcaaaatgacccatta

SEQ ID NO: 6689 - DNA, 118 bp, Homo sapiens
  unsure (41): n=A,T,C or G
  unsure (72): n=A,T,C or G
  unsure (107): n=A,T,C or G
  unsure (110): n=A,T,C or G
  unsure (112): n=A,T,C or G
agtgtgatggatatctgcagaattccagcacactggcggcngttactagtggatccgagctcggtaccaagnttggcgtaatcatggtcatagctgtttcctgtggncgntntacaac

SEQ ID NO: 6690 - DNA, 308 bp, Homo sapiens; identical to SEQ ID NO: 3350

SEQ ID NO: 6691 - DNA, 226 bp, Homo sapiens
ctgagcggttgtggccgcgttgccgacctccagcagcagtcggcttctctacgcagaacccgggagtaggagactcagaatcgaatctcttctccctccccttcttgggcagcaaggcgaaccccatccctactcactggagctcagctttgatttttaacctcccttccccacccttccagaacacacacattccattccaaaactgattttataaagacatttt

SEQ ID NO: 6692 - DNA, 180 bp, Homo sapiens
ccttgattattgttgcagttcaatgtggctgtgatgggacatttctgttgacccagtcaggcaaagtgctggcctgtggactcaatgaattcaataagctgggtctgaatcagtgcatgtcgggaattatcaaccatgaagcataccatgaagttccctacacaacgtcctttaccttgg

SEQ ID NO: 6693 - DNA, 378 bp, Homo sapiens
ctggctgcacccagccctgggcatccttaggcttcctggctcctggcagattgctcctgtacggactgccacagagctctgatgttgccctgaccaaagccagtggccccctgcctccgaatcagctccaggaagaaagtgtcctcagtaaaaagggacttggtgaagacctgaagcagaaacttgcctttatcaccatctagcaggatcccctgtcgagcaagcagatgaggctcgtgccctgcagctcggatctgcctctcctttcctggctgctggtagtatgccccagggggagccaggaactggcctccagcagttgccaccccctcagtggcctccacaatgttaggcgtatacagccccacgtgctgcagg

SEQ ID NO: 6694 - DNA, 52 bp, Homo sapiens
ccaccctgaccatcaacagggtcgaagccggcgatgaggccgactattactg

SEQ ID NO: 6695 - DNA, 449 bp, Homo sapiens; identical to SEQ ID NO: 52
  unsure (16): n=A,T,C or G

SEQ ID NO: 6696 - DNA, 493 bp, Homo sapiens
cagagacgctgcaaattgcttgtggacggtgtaggccgctgcaggccaccatgaaccggcttccggatgactacgacccctacgcggttgaagagcctagcgacgaggagccggctttgagcagctctgaggatgaagtggatgtgcttttacatggaactcctgaccaaaaacgaaaactcatcagagaatgtcttaccggagaaagtgaatcatctagtgaagatgaatttgaaaaggagatggaagctgaattaaattctaccatgaaaacaatggaggacaagttatcctctctgggaactggatcttcctcaggaaatggaaaagttgcaacagctccgacaaggtactacgatgatatatattttgattctgattccgaggatgaagacagagcagtacaggtgaccaagaaaaaaaagaagaaacaacacaagattccaacaaatgacgaattactgtatgatcctgaaaaagataacagagatca

SEQ ID NO: 6697 - DNA, 369 bp, Homo sapiens
ctgtactcaaacgtaatctttctactgaggccctgaaggggttaaagattgatccacagatgccagccaaaaagccaaagcggggtgtcccaactagtgcctcagccccacctcgtgttaacactcccagcttcagtggacaacctgataaggggtcatcaggaggtgcttacatgttgcagaagctaattgaagagacagataggtttgtagtgttcacagaagaggaatcaggcatgagtgaccagttgtgtggcattgctgcctgccagacggatgacatatacaaccgaaactgccttattgaattggtcaactgtcagatggttcttcgtggagcagagacagaaggctgtgtcattgtgtcag

SEQ ID NO: 6698 - DNA, 484 bp, Homo sapiens
  unsure (446): n=A,T,C or G
  unsure (450): n=A,T,C or G
ctgttcctggggctgctcccacagactatgagactcagcagcccccaggcccaccccagcagcctgtgatgaccccaaacttcacctggtagccatggagttctctgcacccctcattcactcccctctggtcatttcctgagtctaacatgccctttgaggaaggcaggaggccgatccgtgaacagagagacactgggccccagaggtgacggggctccagggacagacacatctctgccctaagagactgtctcctttctggtgactgtcctgggagggttggattctggcacctcacccagtctcacccgtccctctgtgtccccatgtcctcatgacccagcacaggccacagagctgcagcctagacccagagccctctctgtgccctccattggtctccccttggggtgacctctgtgtcaccaggccgtgtggccctnccangctggattggcatccagtcctcagcctagaccct

SEQ ID NO: 6699 - DNA, 121 bp, Homo sapiens
gggggaagaggtttgttaatacgttcgccatgtgctacgatcttgggacgaactgagccacgagcgtggctttgagggccgtccgaacgctgcaggccggccaggtccctgggcgtccagg

SEQ ID NO: 6700 - DNA, 459 bp, Homo sapiens
ccttgctgaacaggcaagaagattctatgaggtgcctggctcaggaggacacgccactataataattcttttttttgagacagagtcttgctctgttgcccaggctggagtgcagtggcgcgatctcggctcactgcaaactccgcctctcgggttcacgccattctcctgtctcagcctcccaagtagctgggactacaggcgcccgccaacacgcccggctaattttttctatttttagtagagacagggtttcaccgtgttagccaggatggtcctgatctcctgacctcgtgatcccacccacctcagcctcccaaagtgctgggattacaggcgtgagccaccacacccggccaataattcttacctctacaagctagtggggggcaaaggtacacccaggacccaaggaactatctatttagaactgaggggtttcccaaggactatgggcat

SEQ ID NO: 6701 - DNA, 140 bp, Homo sapiens
ccaccctgaccatcaacagggtcgaagccggcgatgaggccgactattactgtcaagtgtgggatcgtaataatgaccatgtcgtcttcggcggagggaccaaactggccgtcctaggtcagcccaaggctgccccctcg

SEQ ID NO: 6702 - DNA, 248 bp, Homo sapiens
aaatgtatttacagaactattcctgcataagttataattcagacatccaaattcaggtaattgcctcttgggtaataagacaaataatgatagtctcaacagaaaaaaagcagctcattagtatacacacagattctaatttgcttcattatttagccatctttgccacaaactacctgctaacagttaaaattctgacatggacacgttttagttgagaagttcaattttgcaaagaatttaatttt

SEQ ID NO: 6703 - DNA, 278 bp, Homo sapiens
ctgacactatgggaggcaagtaatgccttgcgtgttgggcttgtatttgaaataactctgatcaaagaccccttgcccgtttcaataaaacactgccacctcacctctatttgcctgaagggcatcttacctgagttttcttttgtatgctggatgctccagatctgggaataaatcgggttgctatctccaggatttacattgctgtacattggctccagctccattggggctagtggtttagagtgagtgggctcttgagggtctatcctggaagg

SEQ ID NO: 6704 - DNA, 337 bp, Homo sapiens
ctgccaccacggcagggcatgggctttgggggcaacaaggagagacaggctgtctcctctaggaacaactcattattcagctaaacgaaatggaagagctccatgtgaccaacaaacccaaattgagccaaaacaacaggcgtccccaccccccagagggataatgtgccaccaccctgtgtgcagtgggagagcaggaatggaggaaatattcctggttcagttacactcctcgtctgtcaggacagatgtgtcaccctatctcggattccgggagggtggctgggggtttccctcaactctgcagcaaatacttcaatgctactgtcatttgagg

SEQ ID NO: 6705 - DNA, 472 bp, Homo sapiens
ccactacgataagcaggtagctgggttttgtagtgagcttgctccttaagttacaggaactctccttataatagacacttcattttcctagtccatccctcatgaaaaatgactgaccactgctgggcagcaggagggatgatgaccaactaattcccaaaccccagtctcattggtaccagccttggggaaccacctacacttgagccacaattggttttgaagtgcatttacaaggtttgtctattttcagttctttactttttacatgctgacacatacatacactgcctaaatagatctctttcagaaacaatcctcagataacgcatagcaaaatggagatggagacatgatttctcatgcaacagcttctctaattataccttagaaatgttctcctttttatcatcaaatctgctcaagaagggctttttatagtagaataatatcagtggatgaaaacagctta

SEQ ID NO: 6706 - DNA, 339 bp, Homo sapiens
  unsure (14): n=A,T,C or G
  unsure (192): n=A,T,C or G
  unsure (210): n=A,T,C or G
  unsure (223): n=A,T,C or G
  unsure (270): n=A,T,C or G
  unsure (271): n=A,T,C or G
  unsure (284): n=A,T,C or G
  unsure (288): n=A,T,C or G
  unsure (293): n=A,T,C or G
ctgatgcctcactnctagatgcagtgctgggaccttcctcttttggagctgtcccatgtacagtggacccaagctcaggaccttcgtggagctgcttctccaacctgagaaactcaagacccatcctcccgctgtcactttggacaatggaaatctacattttcttttcccttttttttttttgagacagantctcgccctgtcacccangctggagtccagnggcacaatcttggctcactgcaacctctgcttcccgagttcaagcanntctcctgcctcancctnctgantagctgggattataggcatgcaccactcacacccagctattttttg

SEQ ID NO: 6707 - DNA, 244 bp, Homo sapiens
cctggtctctggaagatgaacttaaaaccagcttctcaaggtggttcatttaccacacatacttcagtgctcttttctgatttcatgtcccttatcaaggtttatgatttggggaccctcaggatttaagtgatcatggagaaaggaccataggtattgctggctcttaacagggcagttaacatagctgaaggatgtgggctttcttatgttctccatgcctaggacttcctccgtcaggcag

SEQ ID NO: 6708 - DNA, 486 bp, Homo sapiens
  unsure (150): n=A,T,C or G
  unsure (151): n=A,T,C or G
  unsure (170): n=A,T,C or G
  unsure (171): n=A,T,C or G
  unsure (183): n=A,T,C or G
  unsure (184): n=A,T,C or G
  unsure (199): n=A,T,C or G
  unsure (201): n=A,T,C or G
  unsure (341): n=A,T,C or G
  unsure (386): n=A,T,C or G
  unsure (419): n=A,T,C or G
  unsure (431): n=A,T,C or G
  unsure (444): n=A,T,C or G
  unsure (451): n=A,T,C or G
ccttgcctcacatccaaggtcactcggaagaggccatgtctaccctcaatgacactcatggaggaaatgctgagagaagcattcagatgcatgacacaaggtaagactgccaaaaatcttgttcttgctctcctcattttgttatttgtnntatttttaggagttttganngcaaacatgacnncacccagaaattcantnaatgggactttcccggcagagccaatgaaaggccctattgctatgcaatctggtccaaaaccactcttcaggaggatgtcttcactggtgggccccacgcaaagcttcttcatgagggaatctaagactttgggggctgnccacgattatgaatgggctcttccacattgccctggggggtcttntgatgatcccagcagggatctatgcaccccatntgtgtgactgtntaggtaccctctntggggangcattatgtatattatttccggatcactcctggca

SEQ ID NO: 6709 - DNA, 305 bp, Homo sapiens
  unsure (14): n=A,T,C or G
  unsure (15): n=A,T,C or G
  unsure (17): n=A,T,C or G
  unsure (78): n=A,T,C or G
  unsure (165): n=A,T,C or G
ctgcaaatggttcnncngaaacatctgccttggacacagggttctcgctcaacctttcagagctgagagaatatacanagggtctcacggaagccaaggaagacgatgatggggaccacagttcccttcagtctggtcagtccgttatctccctgctgagctcanaagaattaaaaaaactcatcgaggaggtgaaggttctggatgaagcaacattaaagcaattagacggcatccatgtcaccatcttacacaaggaggaaggtgctggtcttgggttcagcttggcaggaggagcagatcta

SEQ ID NO: 6710 - DNA, 420 bp, Homo sapiens
ccggacggagggccggcgaggtgcggggtctggtgatgcgagctgcgcctctcggcaagatttcgcgctgcccatcccgggccctttcatcagtaatcggtagtggatcactctgccaagcggcaggaagaattaaggaaacgacaaggagacgctcggctctctcccgcttggctccttgcggcctcctcttcccttcgctccggcccggtgaaactgaacttataatcgtcactggattgtaagtacccgaggcgaagagagctcgctgagccctgattttttgagtgtctttgttccgggagagtttgtgagttgaaagtatctctgctgggctttctgggccgaaaaccgttccgggggagccgccatttgctttcctgttccctagctagctagctagctctctccgcgttgtcc

SEQ ID NO: 6711 - DNA, 262 bp, Homo sapiens
ctgcaaagtaaatattgagcagtttctgcaaaagaatagcagaattatgaacgtgcattcattctctaatggtttagattgcattatacttagttgttaggttgagcgtaatttttcttgtttcaaattaaatagacagtttcaagcattactttctcaggatgatctctttttgatgcttttttcttacagttacagatttatggtaatggaaagactaggaatagatttacagaagatctcaggccagaacggtaccttt

SEQ ID NO: 6712 - DNA, 292 bp, Homo sapiens
aaatttgtgagcctgcttgggatccattacctagccattcagagatcctgtcaaatgcacagcagattggatactcaccatcccaaaggggttcctcccacctggatggggccaatctctagttgacagtgcccctcagagtgcaccatggagatggaatgtcccttccagagagacttttacacagggaaaagcatttgttggctgggctccaactctcatttggtacaaaaagctttacattcttttccctttttacattacattcttcaaagacttccgtgcttgccag

SEQ ID NO: 6713 - DNA, 515 bp, Homo sapiens
ctgattgagcgaaggaacgagtgagccgagccagtcagcagcattagtgtgatacgtgttgcttttcaattaaagctctctgcctctcggttgagcaactctgagagccggggtccccacccttctgtccccctcatggtgggtcttgtacccaacagcttgccagagcagagagccatgaatagggtttggtttcaggaaagatgaccaggagactcagcccaggagtcagcctgagttcaaatcctggccccacgcttcctgccttgtcaccctgggcatgtgattcagttcttggttcttgtacatttgggtggaaactgacaactgcctgccatggggagaaccagcttgcctgccttctgcaccacggctggcactgatcattagcaggttaaaaaaaaagctttgccaatacgccgggcacagtggctcacacctgtaaccgaggcactttgggaggccgaggcgggtggatcacctgaggtcaggagttcgagatcagcctggacctc

SEQ ID NO: 6714 - DNA, 525 bp, Homo sapiens
ctgttatttccccagtggggcctcccaaggagcttggctgcttggcttgagtgggacaagggcaggggtccctgactccccacctgatcaaaggctggggaggtggtagggagcacccagaactgccggacgggcctcccacaccccaggtgagcaaacaagcacggagcagcttcctgcggttccatctgagtgacatcctcacgggggcagggcacggcttcctggggcctggggacttccctgcctcagtgtgtttcttacacttccctgcctaaggtgatgccacggaggggatggttgagatgactcccacgggccccttccagtccacctttctccgttccgactctgagtttcctcgggtctatagcttatgggaagggagtgaggaggggacaagccagcctccttccccatcaatgcccacaacctcccatcccctggacccagccaccctaggagttctccaccccaccccatctcgcctggcggaggggaccgccgggtttgattgatccatct

SEQ ID NO: 6715 - DNA, 237 bp, Homo sapiens
ccatccgcttcctgaatgctgagaatgcacagaaattcaaaacaaagtttgaagaatgcaggaaagagatcgaagagagagaaaagaaagcaggatcaggcaaaaatgatcatgccgaaaaagtggcggaaaagctagaagctctctcggtgaaggaggagaccaaggaggatgctgaggagaagcaataaatcgtcttattttattttcttttcctctctttcctttccttttttt

SEQ ID NO: 6716 - DNA, 343 bp, Homo sapiens
aaagccattggatgtgccacaatgatgacagtttatttgctactcttgagtgctagaatgatgaggatcttaaccaccattatcttaactgaggcatccaaaatggtgagttggggaacatagagagtacacctaagttcacatgaagttgtttcttcccaggtcctaaagagcaagcctaactcaagccattggcacacaggcattagacagaaagctggaagttgaaatggtggagtccaacttgcctggaccagcttaatggttctgctcctggtaacgtttttatccatggatgacttgcttgggtaaggacatgaagacagttcctgtcatacctttt

SEQ ID NO: 6717 - DNA, 66 bp, Homo sapiens
  unsure (12): n=A,T,C or G
  unsure (13): n=A,T,C or G
  unsure (14): n=A,T,C or G
  unsure (36): n=A,T,C or G
  unsure (44): n=A,T,C or G
ctgtagcttctnnnggacttccactgctcaggcgtnaggctcanatagctgctggccgcgtacttg

SEQ ID NO: 6718 - DNA, 199 bp, Homo sapiens; identical to SEQ ID NO: 53
  unsure (142): n=A,T,C or G
  unsure (160): n=A,T,C or G
  unsure (167): n=A,T,C or G
  unsure (174): n=A,T,C or G
  unsure (187): n=A,T,C or G

SEQ ID NO: 6719 - DNA, 513 bp, Homo sapiens
  unsure (16): n=A,T,C or G
gagggaaggaaattantgatgatgaggcagaggaagagaaaggtgagaaagaagaggaagataaagatgatgaagaaaaacccaagatcgaagatgtgggttcagatgaggaggatgacagcggtaaggataagaagaagaaaactaagaagatcaaagagaaatacattgatcaggaagaactaaacaagaccaagcctatttggaccagaaaccctgatgacatcacccaagaggagtatggagaattctacaagagcctcactaatgactgggaagaccacttggcagtcaagcacttttctgtagaaggtcagttggaattcagggcattgctatttattcctcgtcgggctccctttgacctttttgagaacaagaagaaaaagaacaacatcaaactctatgtccgccgtgtgttcatcatggacagacctgcccgggcggccgcccgggcaggtaaatcaattcaaaatatctcttaaatgcctttgtaaaatcagctctatacta

SEQ ID NO: 6720 - DNA, 373 bp, Homo sapiens
  unsure (26): n=A,T,C or G
  unsure (29): n=A,T,C or G
  unsure (30): n=A,T,C or G
  unsure (89): n=A,T,C or G
  unsure (94): n=A,T,C or G
  unsure (101): n=A,T,C or G
  unsure (117): n=A,T,C or G
  unsure (200): n=A,T,C or G
  unsure (215): n=A,T,C or G
  unsure (218): n=A,T,C or G
  unsure (229): n=A,T,C or G
  unsure (233): n=A,T,C or G
  unsure (238): n=A,T,C or G
  unsure (273): n=A,T,C or G
  unsure (321): n=A,T,C or G
  unsure (353): n=A,T,C or G
  unsure (356): n=A,T,C or G
gcctggatgcacctggaatatgccancannacctgctccacctggtgtgcgctcttaggttcctggaatatcttcttcctggcagccanacggnccagcangccacccttctcccantgggcatggacctggcgcaggtactcgtaggaggggaagaaacagaccacccctccaggaaccacaccgcacaggttacaganaatgcgacccacctngtncatcatctgangcanctctnttttctggaacgtgaattccagcggctggttgganatcccgctgcagatgacgaggggcaggatgttgtctggagggatcacntgaccacaggaaaactccaccacgcgctcagnttncaccccggcacaggcca

SEQ ID NO: 6721 - DNA, 407 bp, Homo sapiens
cctcccatcagtccctggtccgctcgctggcccgcacagacgaggcgaggggcctgctctggctattggaagaggaggctctggtgccaggggccagtgaggacaccctcctggagcgccttttctcctattatggcccccaggaaggtgacaaaaaaggccaaagcccccttctgcacagcagcaaaccacaccactttctcctgggccacagccatggcaccaactgggtagagtacaatgtgactggctggctgaactacaccaagcagaacccagccacccagaatgtcccccggctcctgcaggactcccagaaaaaaatcatcagcaacctgtttctgggccgcgcaggcagtgccacggtgctctctggctccatcgcgggcctggagggcggctcgcag

SEQ ID NO: 6722 - DNA, 292 bp, Homo sapiens
ggaagcagcactggtggtgcctcagccatggcctggaccgttctcctcctcggcctcctctctcactgcacagactctgtgacctcctatgtgttgactcagacaccctcagtgtcagtggccccaggaaagacggccaagattacctgtgggggaaacaatattgggagtaacaatgtacactggtattaccagaagccaggccaggcccctgtcctaatcatctcttttgataacgaccggccctcagggatatctgagcgattctctggcttcaattctggggacatgg

SEQ ID NO: 6723 - DNA, 575 bp, Homo sapiens
  unsure (543): n=A,T,C or G
  unsure (551): n=A,T,C or G
aaatattgcgtgactggggcttttctcttcagcaaggtcacaggcacagagcaggtcggaatcgattgagatgggtttctgcttaatccaaaacttagtgctggctttctgattcgtaacagggtctatctctactttgtctccagagatacctagctgtacgtcggttgtgaatcgcggtctgtggatcatgctgactttgaatgacttgtaatgatggctgctaagcatatcctgtactgtggctatgtcaatttgcgaatcctcctcaaaaaccccgtctgcccttgaacctgaaactttctgggatccttttcctcgcttcactgccttcagtaagatttccttcatggtaacctttgtgttgtccacctgaataagggagaatccatgagcagcatttattcgaacaaagagtgactctttggatgtcagaccaggagatgagtacttttcaaccagggccaaagtactgaagccaaacttatgaatgggctcattggaatccagcggggggaaatcggtgtccacctccccatcatnctcagcantatgcaggcagtaggcactgacat

SEQ ID NO: 6724 - DNA, 315 bp, Homo sapiens
ctgtgcgggtggtagactttggcagtgccacctttgaccatgagcaccatagcaccattgtctccactcgccattaccgagcaccagaagtcatccttgagttgggctggtcacagccttgtgatgtgtggagtataggctgcatcatctttgaatactatgtgggattcaccctcttccagacccatgacaacagagagcatctagccatgatggaaaggatcttgggtcctatcccttcccggatgatccgaaagacaagaaagcagaaatatttttaccggggtcgcctggattgggatgagaacacatcag

SEQ ID NO: 6725 - DNA, 461 bp, Homo sapiens
ctgaagtctgtactggagatgtatggtcacttctcaggtataaaccggaaggtacaattgacttactaccctcatggagtaaaagcttctaatgaggggcaagatccacagagggaaactctggccccatctctgttgctggtactgaagtggggtggagaactgactcctgctggccgtgttcaggctgaggagctggagcgagcttttcgctgcatgtaccctggaggacagggtgactatgctggcttccctggttgtgggctgcttcgtctccatagcactttccgccacgatctcaagatctatgcctctgatgagggtcgtgttcagatgactgctgctgccttcgccaagggccttctggctctagaaggggagctgacacccattttggtgcaaatggtgaagagtgccaacatgaatgggctactggacagcgatggggattccttgagcag

SEQ ID NO: 6726 - DNA, 146 bp, Homo sapiens
ccatgattacccccggcaccttccatttttcctaaaaaaaaatgattacagtagttgtccaaaaatgaaggagctctgttgtcccatgggtaagtctatggcacacaatgtaaaaaatgatctagacacagtgatttaaggatttt

SEQ ID NO: 6727 - DNA, 406 bp, Homo sapiens
ccttctgcagttccctccagagctgatgttccgtaaaatgcgaggcttaagtgaatttccagagaatttctcagccactggagacgtcctgtctcacctgacctcctctgtggacctgtactttggggcgcaccatcccctccatgtgacaatgttgcccaatccctcgcacctggaggccgtcaaccccgtggccgtgggcaaaactcgcggcaggcagcagtctcgccaagacggcgattactctccagacaactcagcccagccgggggacagggtcatttgcttacaggtccatggtgatgcttctttctgtggtcaagggattgttcctgaaacattcacgctgtccaatctcccacatttcagaattggtgggagtgtgcatttgattgttaataaccag

SEQ ID NO: 6728 - DNA, 111 bp, Homo sapiens
  unsure (14): n=A,T,C or G
ccaggctggtctcnaactcctgacctcgggtgatccacccgcctcagcctcccaaagtgctgggattacagacatgagccactgcgcccggcctcttaattaccttttttt

SEQ ID NO: 6729 - DNA, 285 bp, Homo sapiens
aaaaggcaaacactcccaaacagacaaacagtaaacatgcagaaaacagactggagtagaaatcaacaaattagcaattacattatacctgaggtgctggaggatgctgtggcattccctggggacttgtctgggcataataggctgcttgttgtctataatactcagcccaggctgcactataatctggctgaccacctggaggagccccagtcggagcagggactgcctgacccattttcttgtagtactcttcccaagccttggtataatcaacctgtccag

SEQ ID NO: 6730 - DNA, 517 bp, Homo sapiens
  unsure (452): n=A,T,C or G
  unsure (471): n=A,T,C or G
  unsure (485): n=A,T,C or G
  unsure (497): n=A,T,C or G
cctcggatgatgaagacagtgcccaccacaatgcccacgaggcccacagacaaccccagggcgcagaccacagtctctgtgagctctgacataggggctggaatctcaggctcccagtgtttcagaagaggcttgtccagtccccagtgctccaccttgcagtcataactctcctcagcagaagggaggagggtgaggtaactgatcttgaagaaggaatgatcactcttggagaggaagctggtctcagaaacaccttctgtgactgagtgcccattgctcagccatgtgatgttgaccacaggaggaaagatgttgtccacaagacagatgaggatgttgggctgacccagtgtcacgggagacttggaaaacactgtgacctcaggaacctcattggtagcagcggtagagttggagcgtttaatcagactgttcaagttatgttttangacagcgatgtttgtcagngcaaattgcgggtnaatctaaattgnctgagaacaggcaaacacca

SEQ ID NO: 6731 - DNA, 434 bp, Homo sapiens
ccaccaggtgctgtgagtttctgtggctcatggcctctgggctggtcccttgcacagggcccacgctggagtcttaccactctgctgcaggggtggaaggtggcccctcttgtcacccatacccatttcttacaaaataagttacaccgagtctacttggccctagaagagaaagttgaagagtcccagacctactagcattttgcaactatgcttgtaaagtcctcggaaagtttcctcgcgtaccagacagcggcgggggctgatagcaattttagtttttggcctccctatcctctcacatgagaacactgcctggatgcatctcatgatctctggagaatttccccatctttctcttctttccatcgtgtggattcaatagtttggatttgaaggctgccctgcccccgactctcctgccgcacccctgg

SEQ ID NO: 6732 - DNA, 513 bp, Homo sapiens
ctggtggccctgaagaagatcagactggatttgtgagtgctgggacggcccctgagttacccaccctgggccatcacaacctgggcgctccctgatccgttccctctttcctggagtccacgtttaactcctctgggtgctgcccagcagcccttacctgtcctctccccagttcactgccttctgaccagcctttgccggggccctgactgtggagtttggtggatgacgtgccaaggagcacaggtctccattgccggggccctggtcattctgtggggttaaggagaagccgatccccctggctggaagtgcccttcttggcccaagtctctgcccacggctgtgcccttgtttcttgcagggagatggagggggtcccaagcactgccatcagggagatctcgctgctcaaggaactgaagcaccccaacatcgtccgactgctggacgtggtgcacaacgagaggaagctctatctggtgtttgagttcctcagccaggacctgaaga

SEQ ID NO: 6733 - DNA, 378 bp, Homo sapiens
ccagtcaggacacagcatggacatgagggtccccgctcagctcctggggctcctgctgctctggctcccaggtgccaaatgtgacatccagatgacccaatctccttccaccctgtctgcatctgtcggagatacagttacaataagttgtcgggcctctcagaatatagatcggtggttggcctggcatcaacagaaaccaggcaaagcccctaatgtcctaatttatgcgacttccagtttagaagaaggggtctcattaagatttactggcagtggatctgggacacaattcaatttaaccatcaccagtctgcagcctgacgattcagcaacttattattgtcaacattattctgcatctcttcgcagttttgg

SEQ ID NO: 6734 - DNA, 294 bp, Homo sapiens
  unsure (165): n=A,T,C or G
  unsure (231): n=A,T,C or G
ccgggcaggttgggggtaaatcaggggtgctgctattcccccagctacctggaccagccctgccttgagaccgtcaaccgcatcaagttgtacagtgagtccctggcccggtatggcaagagcccatatttatacccgctctacggcttgggcgagctgccccanggttttgcaagattgagtgccatctatggggggacatatatgctgaacaaacctgtggatgacatnatcatggagaacggcaaggtggtgggcgtgaagtctgagggagaggtggcccgctgcaagcag

SEQ ID NO: 6735 - DNA, 580 bp, Homo sapiens
  unsure (520): n=A,T,C or G
  unsure (528): n=A,T,C or G
ccacttagtttgctggctcagtcactacttgaagaccccatttaatttttctctggcagttatagctcttgtgatttcagtacagtctcatctctcagaccaatctcatcaagaaggattgaagggataactatgaggtaagctggacattggagccgtgtttgctgccacgtcagcgtcttgctgggtgaatgtcaagccataaatgggctccagggctctggatctcatcagcattggaaatctattgcctctcatcagtctgaccaaattatgtagagcattaatgtagagactcccattaatgggaatacaagaggcagacctgcccgagcggccgcccgggcaggtccaaagatggctcagaacagatctcacagaaacggtctgagtgtccgtggttaggtatcaggattagtgagagcccagaaccaggtcaaaggactttcacaacattaagttctgtcaactgcccttttataagtactctgaatactgaaggctgttcaagcaatttggnaaattggnaacgatgattatgtttcagaaccccagcaagaaccttgcccatatgcttgtg

SEQ ID NO: 6736 - DNA, 443 bp, Homo sapiens; identical to SEQ ID NO: 541

SEQ ID NO: 6737 - DNA, 177 bp, Homo sapiens
ccaaggaccacctgggctcccaaggagtggagggaggagggattcagttccacaggaaataaatgggaacagcccggtggagaagacaatgacaactgcaggacaacacctcaaccactccagaaaacagcccttgctcctccttctggccttttcatatttccaagttactgtttt

SEQ ID NO: 6738 - DNA, 260 bp, Homo sapiens
aaaatccattttattttcaatctgtaccactggggataatgtacttcataattctaccatagtatgtgtggagttttacagtgaggcttcagttttattaaaattctctgttgtggcttctatgctgttaataatttctgatttttcttctacctttgttattaatattaatattactaatattataaacacagcttaaagagttgtgggtctttttttcaaatttatggtcctttattttaatgtattttttacctgcc

SEQ ID NO: 6739 - DNA, 223 bp, Homo sapiens
cctctttgatgacctttggagaatcaggttcagctctgttcagctccttggggatctcctgtttcacatctcaggagtcactgggaagatgaccacagaaactgcctctgaggatgataactttggaactgcccagtccaacaaggcgatcatcactgccctgggggtagagcggcggaaccgggtgttggcagggctgtacacgggccgctcagacacccag

SEQ ID NO: 6740 - DNA, 363 bp, Homo sapiens
ctggtgtgggtgagtgtcctcggggctggtgaggggacagcagcttcagtggaaacccttccctatgtgtggccgagggcctagaacacgtctgagcgggtcaggtgggttcttcccactggagggcgtggcctcaggctgagagtgaagacggggaaggggaggaagagaacagctcgggctcctgagaccaggagccagacctggtaagtacatgaccttaggggctgggcctttgcctgtaatcccaacgctttggaggcccaggcaggaggatcggatcacttgaagccatgagttaaaaccagcctgggcaacaaagcaagaccctggtctccaccaaaaataagtaattaatttttt

SEQ ID NO: 6741 - DNA, 316 bp, Homo sapiens
aaaatctccaatttatgatttcccttggaaaacaggaagttctggtaacactgagactgcattcgagggtcccacaaaccagacttggtttctcacttcccgtaacagtaacgaatggaagacttgatgatttacattacctgcctggcccctgtagcaacttgagttcaaaactgttggacagggtcatgattccttaacatggtattcaaagcttcatgattggctgggtgcggtggctcacagttgtaatcccaccactttgggaggccgagatgggtggaccacttgaggtccaggttcaagaccagcctgg

SEQ ID NO: 6742 - DNA, 520 bp, Homo sapiens
ctgtggcttcccggcatgccctgtgaccccaagccgcagggtacaggaaagaagtttgtgctgggggactcaaagacccagaggttaattaacaggaaccagggccaggggccttcatctagaggtcagtggagtctccagggcactcatcactgtggctgggagactacagtgtctcggctgcggacttgtggaagaagagggggaaggatgggagaaggggtgactggatgccagccaggaatcctggccttagccctatcctggcctcgcctaatcagccatgtcgttattcttacacctttcttcttgggagacccaacattattctgagatgccatgagactgtttagcttttcttcatggccccagggagtgaggctgagggcagtcacttcccctccaatgccctcgactgcccagtaaaagaatggcgggacccaaggaggaaagagtggggggcagacaacgcttgggggatcagtccactttctctacattcaaactgcagaccaaatag

SEQ ID NO: 6743 - DNA, 605 bp, Homo sapiens
aaaattctatcacaaagggattgcttccttaacagcagctagtacaccactgaatcctttaagctttcagtgtgaatttgtaaaactcaggattgaccttttacaagccttctctcaacttatctgtacttgtaatagcctgaagacaagcccaccacctgcaattgccacaacaattgccatgaccttaggaaatgacctccagaggtgtggtcgcatctccaatcagatgaaacagtccatggaagaatttcgaagccttgcttctcgatatggagatctttaccaggcatcttttgatgctgactcagcaactttgaggaatgttgaactacagcagcagagctgtttactgatatctcatgcaatagaagccctgattttggatccagaatcagcaagtttccgggaatatggatctactggaacagcccatgctgatagtgaatatgaaagaagaatgatgtctgtatataatcatgtcttggaggagcacacagcatgcctctgcaatgccatcattgctttgctgaaaagttcccctttctttccagagatattttttccagaaactacagtctaccagcatcaagcttgctctgtca

SEQ ID NO: 6744 - DNA, 402 bp, Homo sapiens; identical to SEQ ID NO: 3672

SEQ ID NO: 6745 - DNA, 243 bp, Homo sapiens; identical to SEQ ID NO: 622

SEQ ID NO: 6746 - DNA, 204 bp, Homo sapiens
  unsure (14): n=A,T,C or G
  unsure (108): n=A,T,C or G
  unsure (109): n=A,T,C or G
  unsure (154): n=A,T,C or G
  unsure (155): n=A,T,C or G
  unsure (168): n=A,T,C or G
  unsure (185): n=A,T,C or G
  unsure (186): n=A,T,C or G
cctgggatgcacgnagaaaggctgaccacaagttgagacaagatacagaaacaaacaaaaacagcagaaagtccgatcgatggtgtaagtgttgtgttcactgcttanngtgcaggtgagcttgatcgaggctcccagtaaggcagatgtagannggggctgagtcancacaggcagagcacagnnacctgtggagaaaatgaa

SEQ ID NO: 6747 - DNA, 422 bp, Homo sapiens
ccagtttcagaaaatagttggtggtttaattgagcttgttgatcaacttgcaaaagaagcagaaaatgaaaagatgaaggccatcggtgctcggaacttgctcaaatctatagcaaagcagagagaagctcaacagcagcaacttcaagccctaatagcagaaaagaaaatgcagctagaaaggtatcgggttgaatatgaagctttgtgtaaagtagaagcagaacaaaatgaatttattgaccaatttatttttcagaaatgaactgaaaatttcgcttttatagtaggaaggcaaaacaaaaaaaagcctctcaaaaccaaaaaaacctctgtagcattccagcggcttgaccaatgacctatgtcacaagaggtggcgtgtaaggaatgcagccccctgaagacagcactacaagtct

SEQ ID NO: 6748 - DNA, 273 bp, Homo sapiens
  unsure (11): n=A,T,C or G
ctgcagattanatcacattccacagaatctctaagatggtaccaaggcatgccaggaatttcagaaagctttacatctaaatagcttctcgaacattttcgcaaccaaaacacatcggcttcagttgttatctgagaatatcaagaagctgctggccgaaaatgcaaatgtgagctgggtgtggaccatgcttcctctgggctctggggctgtcacacaacgtggggctcaagacagatttggggccatgtgggagaatttcctggggactgg

SEQ ID NO: 6749 - DNA, 263 bp, Homo sapiens
ccaaggctgctcaaagccctggacacctcacgtttatatcaacagagcagttgctagaggaagcagcctcccgccctccagaggggtgtctggtgcccgagccctgttgtttgtgtaccttgtctcagtagtgtccagaggggctcatgcagcatcgcctcatggactaagaggtgacctcacctggtgcaggggactgtgcccggggcactcctccagtggctccccttcctgcccacccctgaggaggcagccctaggtag

SEQ ID NO: 6750 - DNA, 373 bp, Homo sapiens
ctgtagcttctgtgggacttccactgctcaggcgtcaggctcagatagctgctggccgcgtacttgttgttgctttgtttggagggtgtggtggtctccactcccgccttgacggggctgctatctgccttccaggccactgtcacggctcccgggtagaagtcacttatgagacacaccagtgtggccttgttggcttgaagctcctcagaggagggcgggaacagagtggccgagggggcagccttgggctgacctaggacggccagtttggtccctccgccgaagacgacatggtcattattacgatcccacacttgacagtaatagtcggcctcatcgccggcttcgaccctgttgatggtcagggtgg

SEQ ID NO: 6751 - DNA, 255 bp, Homo sapiens
aaagcagccctagtcatggtgctggtgctaccgccttgttttaggagcctgcctcctgtcagtatgaaaccctcacctgaaaaatgccagcctggacaccaaacactgagccccttcaacaggcacattatttccccctgagatccataagggaatttagtttctactattgtagagttctgaaaagaggtaaaatagtagtcctttggtcatcctatttttgctttcaattttgatatttcagactgtaaaagg

SEQ ID NO: 6752 - DNA, 350 bp, Homo sapiens
ctgaaggactgggagggtctgacaagcctgctgctggagaaggaccagagcacgtgccacatggagccagggccagggaccttccacctcctagggtgaaaccaggagagattgcttgcttcacttgtacaaggcaggaacggtggcatggcgtgggggaaacttggagttggaaggtggctaatctttgattctatgtttttgatcctcctggcactccagacctgggtgatatgcaggagagcacactgatagaaatccttgtgtccagtgcccagcaactcctgcctcagcctcccgagcagacctgcccgggcggccgctcaagccctatagtgagtcgtattaga

SEQ ID NO: 6753 - DNA, 342 bp, Homo sapiens
  unsure (15): n=A,T,C or G
  unsure (16): n=A,T,C or G
  unsure (20): n=A,T,C or G
  unsure (118): n=A,T,C or G
  unsure (119): n=A,T,C or G
  unsure (220): n=A,T,C or G
aaaaatggagcacanngacnagaatattcaattctggatggcatgtgaaacctataagaaaattgcctcacggtggagcagaatttctagggcaaagaagctttataagatttacatnnagccacagtcccctagagagattaacattgacagttcgacaagagagactatcatcaggaacattcaggaacccactgaaacatgttttgaagaagctcanaaaatagtctatatgcatatggaaagggattcctaccccagatttctaaagtcagaaatgtaccaaaaacttttgaaaactatgcagtccaacaacagtttctgactacaactcaaaagttt

SEQ ID NO: 6754 - DNA, 206 bp, Homo sapiens
aaaaagttgttaggtcattatttgtcggggagggaatgacagaggcgactccttctctcaacactggctaaaaacaagacaggcaaaatacaatacaatattctggttgggatcctggaacagaaaatgaatgttagcagaaaaactggtaaaatattaataaagcgtgtagttcaattaatagtattataccaatgttaatttcc

SEQ ID NO: 6755 - DNA, 338 bp, Homo sapiens
  unsure (223): n=A,T,C or G
  unsure (254): n=A,T,C or G
  unsure (255): n=A,T,C or G
  unsure (290): n=A,T,C or G
cccggagatctgttgctagacgactgttttccaactccagttgttctgtttggcctttgcactcctctaactgggcagagacttgttccagcaccctagaaacctcctgcttttcctcaattgccacatcacgttcctgcagggcttgctggctcttgactgtgagtttctctgtgagttgtcgggaccgactcagcaaagctgtccatgttgtataatccanttgcatggacctccagtcttgttgcaaggtnnaagtaagactcactgtctgctgaaccagctcttcntgcttggcatgaagccctaccagttgggtctgggcatccttcagaagg

SEQ ID NO: 6756 - DNA, 118 bp, Homo sapiens
gtgaatggagcagttctgagaaccacccttttgctaagggagcttgggagccacatggctgctcccttcacactgggtaacagtgtagtatcctgtgagagaataaatgtattcattt

SEQ ID NO: 6757 - DNA, 265 bp, Homo sapiens
aaaatccagaatgcacaaagtactgcacaatttgatcactaaatcattagttgataagcgaacctcacacaacagcttcatgtcagccaaggccacaaacaccgtgtaccacacatgtgaacggacagattgacatgttaaaaacacaacatcagtgcatgttggggattcctggtgccagaaacaggggtgacgggagggcagaactagtccttagcagcttcctcctcctttattttagctgaggcactctctcgggctttgg

SEQ ID NO: 6758 - DNA, 408 bp, Homo sapiens
cctatcataattcccccgcgtaccttgcttacataaatgcaaaaagtcgtgcagaagctgctttagaggaagaaagtcgacagagacaatctcgcatggagaaaggagaaccgtacatgagcattcagcctgctgaagatccagatgattatgatgatggcttttcaatgaagcatacagccaccgcccgtttccagagaaaccaccgcctcatcagtgaaattcttagtgagagtgtggtgccagacgttcggtcagttgtcacaacagctagaatgcaggtcctcaaacggcaggtccagtccttaatggttcatcagcgaaaactagaagctgaacttcttcaaatagaggaacgacaccaggagaagaagaggaaattcctggaaagcacagattcatttaaca

SEQ ID NO: 6759 - DNA, 272 bp, Homo sapiens
ctgcctgggcaccaccgacaaggacgtgctcatctccgagttccagaggctgctcggcttccagctcaatcctgccggttgcgccttcttcctggacatgaccaactggaacctacaagcagcaattggcgcctattatgactttgagagcccaaacatcagtgtgccctctatgtcctttgttgaagatgtcaccataggagaaggggagtcaatacctccggatactcagtttgtaaaaacatggcggatccagaattctggggcagagg

SEQ ID NO: 6760 - DNA, 244 bp, Homo sapiens
  unsure (17): n=A,T,C or G
aaatctcacaaaattgntttgataaacatactcttataattcttgcaacaccttgggaaatagttggttctatattactgttttatagctgaggagaaagactcacatcatttactaagatcatatagctagctagtaaatgtttgagtgaaaatacaaacaaaggttttctgactttaagagctagagttttttccactataccatattgcatctgttgtaattgttaactaatgtgcatttt

SEQ ID NO: 6761 - DNA, 200 bp, Homo sapiens
gggggactgggggaggggtagctgctatctttgagacagaaagatgcaggacagcatttcatatgtaaccatttgaatgtttttgctgtttttagaattcagagcccttgctggggggtgcctgggagatggggtaagaagagctttcatttgtctggtagatagatagcatgtaagggggtggttgtcccaggaggcag

SEQ ID NO: 6762 - DNA, 93 bp, Homo sapiens; identical to SEQ ID NO: 55
  unsure (14): n=A,T,C or G
  unsure (17): n=A,T,C or G
  unsure (59): n=A,T,C or G
  unsure (60): n=A,T,C or G
  unsure (70): n=A,T,C or G
  unsure (72): n=A,T,C or G
  unsure (78): n=A,T,C or G

SEQ ID NO: 6763 - DNA, 493 bp, Homo sapiens
aaatatatgcttttctagaatttgatgtttgaccatttatgacttaattaccagagagccagtaaattaggacagtgtttcaacaagcctaggctatctcgtaagttgaaaaatatcccactatagttgcttcatgagtatgaagtaagatggcctctgatttacactggttcaatttacaaattttcaactttatgataggtttatccgggtactaaatgcatttcaacttgatagtttcaacttatgataggtttaccaggatgtagtcccactgttgaggagcatctatttaggggttaattactttagtaataagtggaaagtaagataccttgagtaatgtttgcctataaaattgtcagcgtatttttacactattggctcaagaatgttataatgctaagggacataagttggcaaccacttggtttttggaaggactttcggtattgtattagaagtctgccctagctgttaaatttctgggtat

SEQ ID NO: 6764 - DNA, 229 bp, Homo sapiens
  unsure (25): n=A,T,C or G
  unsure (69): n=A,T,C or G
  unsure (87): n=A,T,C or G
  unsure (142): n=A,T,C or G
  unsure (143): n=A,T,C or G
gccaccctgaccaccaacagggtcnaagccggcgatgaggccgactattactgtcaagtgtgggatcgnaataatgaccatgtcgtnttcggcggagggaccaaactggccgtcctaggtcagcccaaggctgccccctcgnncactctgttcccgccctcctctgaggagcttcaagccaacaaggccacactggtgtgtctcataagtgacttctacccgggagccg

SEQ ID NO: 6765 - DNA, 372 bp, Homo sapiens
  unsure (12): n=A,T,C or G
  unsure (13): n=A,T,C or G
aaattttctggnncatgagaagaaatgtggattgctaattcaaaaagaatatatgaaaatcatatatatatactcaatttttatttacccttagagacaatgattattcattagatttttatccacaggaaatcttgtaatattttaagttttaggataatctattctcagttgctttattaacatttcagctttcctttattttaattcatttatcattttagtcattagaatgaatgcctgttatatggtagatactgtcataggcacaaaaatgaataagacacggtccctatccatcatcaaggagcttataatctgaaaaggggggtggtggcagacacataagaaactagttacaataaaaggcag

SEQ ID NO: 6766 - DNA, 79 bp, Homo sapiens; identical to SEQ ID NO: 54
  unsure (14): n=A,T,C or G
  unsure (44): n=A,T,C or G

SEQ ID NO: 6767 - DNA, 334 bp, Homo sapiens
  unsure (120): n=A,T,C or G
  unsure (172): n=A,T,C or G
  unsure (265): n=A,T,C or G
  unsure (266): n=A,T,C or G
  unsure (277): n=A,T,C or G
  unsure (325): n=A,T,C or G
aaaatgatgtaaagatgtaataaaattccttttcattgtaaaatagtaattaagtcaatttacacagacctttgtatttaatatgtctccctatttgtatagaatttcagatgggtctanatgagaaccctatgcataagcttggatcttgatgaaaggttaccaggatcangatcaaaaattgggaaatactaagctcttgaagatatttttctgatataattagattgaaaagagcaattttgaaaatgctgtgtttctccannaagtacagggngcattatttgacatcaattacttaaagaagttatgagttgttccccanacagatttt

SEQ ID NO: 6768 - DNA, 260 bp, Homo sapiens
aaaccaaaatatgtccaactgcaaagcatgtaagtaacaattttagagggtatacggaggtgaccctaagtaacaaggaatcacatatagtgagcaagcaatttgcttttcagtttttggtcaatccttatgattatttagaggagaaagctcagtttggtgctggtatatcttatgtttatcacccgacagttgttaatctctttttaacaaagaatacaggccaaggccctgtgactttagctggctttggtatttgg

SEQ ID NO: 6769 - DNA, 527 bp, Homo sapiens
ctggtggaactgggcccaggtaggggaaccctcgtgggagatattttgagggtgttcactcaacttggatctgtgctgaaaaattgtgacatttcagtacatctggtagaggtaagccaaaaattaagtgagattcaagcattgacactgactaaagagaaggtcccgttagagcgaaatgctggatccccagtgtatatgaaaggtgtcactaagtctgggattccaatttcctggtaccgagatctgcacgatgttccaaaagccttgtgatgaataaaagctttaactgctatttcagggtacagcttttatcttgcacatgaattttttgatgttcttcctgtgcataaatttcagaaaacaccacagggatggcgagaagtatttgttgacattgatccacaggtttctgataaactgaggtttgttttggcaccttctgccaccccagcagaagccttcatacaacatgacgaaacaagggatcatgttgaagtgtgtcctgatgctggtgttatcatcga

SEQ ID NO: 6770 - DNA, 232 bp, Homo sapiens; identical to SEQ ID NO: 57

SEQ ID NO: 6771 - DNA, 182 bp, Homo sapiens; identical to SEQ ID NO: 4551

SEQ ID NO: 6772 - DNA, 191 bp, Homo sapiens; identical to SEQ ID NO: 58
  unsure (18): n=A,T,C or G
  unsure (19): n=A,T,C or G
  unsure (27): n=A,T,C or G
  unsure (47): n=A,T,C or G
  unsure (86): n=A,T,C or G

SEQ ID NO: 6773 - DNA, 346 bp, Homo sapiens
ctgagtgagttccctgggagggctctcttcctggcttggagacggcctccttcttgctgtggccttacacggtggagataaagaactctggtctctcttccactttcttacaagggcactaatcccatcatggaggccccatcctcatgacctcatctaaaccaattacctcccagaggctttacctccaaataccgtcacattgggagtgacagcttcaacatgaatttggggaagacaaaaatattcagttcataagagaggcttacacaatagtctaatcaaatgacagtattgagcaggggcagtgggagcagagagaaagggacagactcaaagacatttt

SEQ ID NO: 6774 - DNA, 545 bp, Homo sapiens
ctgtgttcttaggggttctgagggccatgcagctctgttgcaccatgattctgtcttctctcttgcccactgcctgaaggaaatttggagtgggctgggcccagagctcccctgtatagcaggccctgtcctggagggcctggcagggacatggcttagcctgttggcccctagtcccgagacctcataggccacaggggtccactgtggcttgtttgggcctggggtggggctcatggagtggtgggtgttggactgagactctgaccagggacagggggatggggtcacagccaagccactccacccctaccccatgcacacagcactcagagcccagaccctctcctaagagcccccaccaaaatcctctctaggggcaggggatagagcaagacatgtcccccacccagagcaggggctgcggtcagggagctcaggggactcagccactccatggcagagccctgtttaatacaacttgtgtctgggatggcctggatcagagaccctatctaaggagcatgttcagaaaccatgttgct

SEQ ID NO: 6775 - DNA, 517 bp, Homo sapiens
ctgaggcttggaaacgtttcttgtgttgccctgaaaaatctttgagacctcagggaggctctgtctctcttaaaaggtggagaaagatgccattctctccctaaggtctggtggagtctccccatcttgcatacccttctgcaagccatctatctctgctcactctccaattgacccgcctgggaacaagggatgaggaggagttgggggctggggggaatcctgccagtgggtgaagccctgtggcaggaaggtatatgtggacatagagtatacctgattctctttcttcagccactgactgcttgggttgggctgtgaatgataatggaatggctggagtctgctgttgtcagaaggcagggagggtgatgaaggactgacccacatggactgggatgtgtgtcggttatgggcatgactgcacgttcactctcagtgggatctgggcaacatggagttcattgtcctgttgcttacttactgcaatgtctttggccctccttttcaactggtt

SEQ ID NO: 6776 - DNA, 426 bp, Homo sapiens; identical to SEQ ID NO: 56
  unsure (9): n=A,T,C or G
  unsure (155): n=A,T,C or G
  unsure (156): n=A,T,C or G
  unsure (166): n=A,T,C or G
  unsure (196): n=A,T,C or G
  unsure (339): n=A,T,C or G
  unsure (393): n=A,T,C or G
  unsure (409): n=A,T,C or G
  unsure (416): n=A,T,C or G
  unsure (417): n=A,T,C or G

SEQ ID NO: 6777 - DNA, 526 bp, Homo sapiens
ggaagaggcgtcccaggaagccggcctgccggcaggagcgggccccagccccacctttccagccctgggcatcgggatggactcctgcgtcatccccctgaggcacgggggcctgtcactggtgcagaccacggacttcttttaccccttggtagaagatccctacatgatggggcgcatagcttgtgccaacgtgctgagtgacctctacgccatggggattactgagtgtgacaacatgttgatgttactcagcgtcagccagagtatgagtgaggaggaacgcgaaaaggtaacgccactcatggtcaaaggctttcgggatgcggctgaggaaggagggacggcagtgaccggtgggcaaacggtggtcaacccttggattataatcggtggagttgccactgtagtatgccaaccaaatgagttcataatgccggacagcgccgtcgttggggacgtgctggtgttaaccaaaccgttaggaacccaggttgctgtcaatgcccaccaatggctggataat

SEQ ID NO: 6778 - DNA, 638 bp, Homo sapiens
ctgcttcagactaccaaactggtggaagaacatttggattctgaaattcaaaaactggatcagatggatgaggatgaattggaacgccttaaagaaaagagactccaggcactaaggaaagctcaacagcagaaacaagaatggctttctaaaggacatggggaatacagagaaatccctagtgaaagagacttctttcaagaagtcaaggagagtgaaaatgtggtttgccatttctacagagactccacattcaggtgtaaaatactagacagacatctggcaatattgtccaagaaacacctcgagaccaaatttttgaagctgaatgtggaaaaagcacctttcctttgtgagagactgcatatcaaagtcattcccacactagcactgctaaaagatgggaaaacacaagattatgttgttgggtttactgacctaggaaatacagatgacttcaccacagaaactttagaatggaggctcggttcttctgacattcttaattacagtggaaatttaatggagccaccatttcagaaccaaaagaaatttggaacaaacttcacaaagctgggaaaaagaaaactatccgaggaaagaaatatgattcagactctgatgatgattagagctca

SEQ ID NO: 6779 - DNA, 410 bp, Homo sapiens; identical to SEQ ID NO: 60

SEQ ID NO: 6780 - DNA, 332 bp, Homo sapiens
cctgattctcgcgattattctcgaatcacctcctgtgttgtgctgggagcaggactgattgaattacggaaaatgcctgtaaagtctgagtaagaaacttcatgctggcctgtgtgatacaagagtcagcatcattaaaggaaacgtggcaggacttccatctgtgccatacttgttctgtattcgaaatgagctcaaattgattttttaatttctatgaaggatccatctttgtatatttacatgcttagaggggtgaaaattattttggaaattgagtctgaagcactctcgcacacacagtgattccctcctcccgtcactccacgcag

SEQ ID NO: 6781 - DNA, 385 bp, Homo sapiens
ctggcttccgagaggcaattctgtccttggaagccaggtttgaccatctgtaatcagccttgtgagaagtctcgtttgagggggccagggatggaacgggagggcgcatatcgtatgaggtatgggcattgtgttaagctgggggaagttgcagcttgtcctgaattacatggagaggaataaagtgggtgagtaggaggagccatttcatctgaaagcctgaggcccctctggtcccctcgataaaccccactggtgtcccaggccacaggtaacaggagaatagacatttaatgtcacagaatgtcagagcaggcaaggccttcagtgatcactctttctaggcttaggacgggttggggttagaaagggtgatcactgaagg

SEQ ID NO: 6782 - DNA, 482 bp, Homo sapiens
ccacaagatatgttctagagacgtccatgagtcctcttgctgtgtgggagcggcatccacagacttctggaataattggcctgtgaggaagctcatcaaagctgcaaacagtacaatgaatgcaatagagagccagagggccttattagcctttctgatggaggacttgagatttgttgcccaggaagctattgtgtcataaactgaagagacatcccactttgatggattatttttcttttcagaaagacttggcttccttgtcctttctactgtttcttctccagatggctctgagtcatctttagttctgtaaataaatgttgtttttaatatttgaaactaaggataatatgctataattattcataaaatattgctgaatcttactgtaactcaagaggctcacaaatatttgttctgttttagggaaagttgataaatatctaactctaaaaatcaaatcaccagatttataattt

SEQ ID NO: 6783 - DNA, 309 bp, Homo sapiens
ccatctgtccagcaggggctccagcagtcctttttgcacactctggattcttaccggatattacaaaaggctgccccctttgacaggagggctacatccttggcgtggcacccaactcaccccagcaccgtggctgtgggttccaaagggggagatatcatgctctggaattttggcatcaaggacaaacccaccttcatcaaagggattggagctggagggagcatcactgggctgaagtttaaccctctcaataccaaccagttttacgcctcctcaatggagggaacaactaggctgcaagacttt

SEQ ID NO: 6784 - DNA, 254 bp, Homo sapiens
  unsure (41): n=A,T,C or G
  unsure (184): n=A,T,C or G
aaatgaatttggggaaggaagtgcgctggagaaatccttanctgtcagccaaggtggagagctctatgaagagtggctggaacttagaaacggttgcctctgctgttcagtgaagtgaggaatgtgtttactgtgtacatggtttactagaaatgtttattgattatatttccagctttaattntcttgagtaatttaactgaatttacacagtttgcttcattgtattttcaaacaaatagaaaataaactta

SEQ ID NO: 6785 - DNA, 259 bp, Homo sapiens; identical to SEQ ID NO: 59
  unsure (132): n=A,T,C or G
  unsure (149): n=A,T,C or G
  unsure (151): n=A,T,C or G
  unsure (188): n=A,T,C or G
  unsure (207): n=A,T,C or G
  unsure (209): n=A,T,C or G
  unsure (211): n=A,T,C or G
  unsure (227): n=A,T,C or G

SEQ ID NO: 6786 - DNA, 415 bp, Homo sapiens
  unsure (336): n=A,T,C or G
cctacaaggagtcctacaaagaccggcggcggcgcgcacacactcaggctgagcagaagaggagggacgccatcaagagaggctatgatgaccttcagaccatcgtccccacttgccagcagcaggacttctccattggctcccaaaagctcagcaaagccatcgttctacaaaagaccattgactacattcagttttgcacaaggagaagaaaaagcaggaggaggaggtgtccacgttacgcaaggatgtcaccgccctaaagatcatgaaagtgaactatgagcagattgtgaaggcacaccaggacaaccccatgaaggggaggaccaggtntctgaccaggtcaagttcaacgtgtttcaaggcatcatggattccctgttccagtccttcaatgcctccatctcagtgg

SEQ ID NO: 6787 - DNA, 327 bp, Homo sapiens
ctgacatctggagttcatagcaccataaaggttattaaggccaaaaaaaaacatagagaagtaaaaaggaccaattcaagccaactggtctaagcagcatttaattgaagaatatgtgatacagcctcttcaatcagattatctaggggaagctccagcttctcatctgcttgatttgagtcccatggagaagctctgatatgtggtaaggtggaaaaatatgacacggtgcgatcaaggcattagaggatgaagctattgaagtgaaaacaaaattgaagaggcaaattcttttgagcagagggtaatttttttcttatttcattt

SEQ ID NO: 6788 - DNA, 132 bp, Homo sapiens
  unsure (24): n=A,T,C or G
  unsure (98): n=A,T,C or G
gtgagtccaaactccagagaaagntgtgtgtgtgtgtgtgtgtgtgtgtgtgtgtgtgtgtgtgtgtgtttgtgtgaggtctgggggcttccccccanatgggtgtgagtgcatggtcctactgtacacaca

SEQ ID NO: 6789 - DNA, 342 bp, Homo sapiens; identical to SEQ ID NO: 306

SEQ ID NO: 6790 - DNA, 269 bp, Homo sapiens
ccactcctggaaacccactgatagatgagtttcccccattcttctggcctccgccacatgatcaggaagctggacttgctcttatccaaccactcgaggttccctttcttcctcagttcctctaatacaatctggatcgactccacaggaagctttcgctgtagcttgacgttgttgaagagcgggctctcctgagcttccatcaccgtcatgctggactgtttgtgcaggcggcagaaggacaggaccagcgagcaccaggcggccag

SEQ ID NO: 6791 - DNA, 361 bp, Homo sapiens; identical to SEQ ID NO: 61
  unsure (9): n=A,T,C or G
  unsure (10): n=A,T,C or G
  unsure (30): n=A,T,C or G
  unsure (72): n=A,T,C or G
  unsure (205): n=A,T,C or G
  unsure (282): n=A,T,C or G

SEQ ID NO: 6792 - DNA, 298 bp, Homo sapiens
aaatgactgtgctgcccctttcacatcaaagaactactgacaacgaagtccgcgcctgcctttcccatctgtctatctatctggctggcagggaaggaaagaacttgcatgttggtgaaggaagaagtggggtggaagaagtggggtgggacgacagtgaaatctagagtaaaaccaagctggcccaaggtgtcctgcaggctgtaatgcagtttaatcagagtgccatttttttttttgttcaaatgattttaattattggaatgcacaatttttttaatatgcaaataaaaagttt

SEQ ID NO: 6793 - DNA, 262 bp, Homo sapiens
aaaggtatgtctcagtctggatttgaaacctcttagtatcaacaggaagaaacgttttgtatctattacaatgaggaaatctttttcaaaagatatttgggacaaagtacttccatccattcctgctctccaagctttcaagccctccccaggggttaaataggaaatgtatgtttgctggcctcctcaccgtccaacgtgacatttttttggtaccatctattctgctgtaatagaactaaatcatccatcgatgtcccag

SEQ ID NO: 6794 - DNA, 345 bp, Homo sapiens
cgctcagctcctggggctcctgctgctctggctcccaggtgccaaatgtgacatccagatgacccaatctccttccaccctgtctgcatctgtcggagatacagttacaataagttgtcgggcctctcagaatatagatcggtggttggcctggcatcaacagaaaccaggcaaagcccctaatgtcctaatttatgcgacttccagtttagaagaaggggtctcattaagatttactggcagtggatctgggacacaattcaatttaaccatcaccagtctgcagcctgacgattcagcaacttattattgtcaacattattctgcatctcttcgcagttttgg

SEQ ID NO: 6795 - DNA, 341 bp, Homo sapiens
ccacagctaacatcattgcagcacctttactccttcggctttttgccagcaccaacattggccccttccaggatagaccctcaagagcccactcactctaaaccactagccccaatggagctggagccaatgtacagcaatgtaaatcctggagatagcaacccgatttattcccagatctggagcatccagcatacaaaagaaaactcaggtaagatgcctttcaggcaaatagaggtgaggtggcagtgttttattgaaacgggcaaggggtctttgatcagagttatttcaaatacaagcccaacacgcaaggcattacttgcctcccatagtgtcag

SEQ ID NO: 6796 - DNA, 244 bp, Homo sapiens
aaagggaaaagtaaatttaacagttgcctttttttttaatgtcagggcagatcttattttacagtacagtgggggaaatagaaacatgtgaaaggcaaaaggcaggctcctaaattaatgtcagtgaagttcagggtgggcaaatgagtgtgtgtgaggtataggaaatgctgatgacttctttaatgcttgaagtccgttcacaggtatctagccctagaatgcctagaacaggaagaggcag

SEQ ID NO: 6797 - DNA, 437 bp, Homo sapiens
ctgtctcaaaacaaacaagcaaaaatacaaagaaaaatctggttatcaactgaaggctttcagcagaagcagcaccaccattatgtgttttgttttgttccctgacatatcccagattagaatagtaccttacacaggtgatcaataaatgttaaacagatgacagcacttaatagcatgggctctgacaagcagttagcactcaataaacacttattgtgtaatggtttgttttgttcacggacgtatatgaagcactagaacagtggctgctaacagagtagggctgaataaatatttgttaaacaggtgaaaacaattagtaaaaaaggacctagcacaaaatgagctctcaatacttatgtaatactttgctgagtgtctagaattatgtctgtcatatagtaggtggtcaatatacctaacttgttaaacag

SEQ ID NO: 6798 - DNA, 371 bp, Homo sapiens
ccatcggcctggtgggcttcctcgtgggcaccgtcctcatcatcatgggcacatatgtgtccagtgtccccaggtaatgatccttctgagagaaatgacttgtgggagacaccctgcagatcctcatgggtttgtgacagaccctgcgtgctcagtgccctttaagtgcatcccgctgtgctgactttgagtgggatcaacatctgtcctacgggtcccctcttttttggccccagtattcatggcagggtttgttggacacctactagcttcccttcccattcaacacacacacacattcttgctctacccaaagctctggctggcagcactaaatgctttggtggtgtttgcactgtgtcctttccagg

SEQ ID NO: 6799 - DNA, 216 bp, Homo sapiens
aaaagtaatacttggtgctaagaatttcaggattattgtatttacgttcaaatgaagatggcttttgtacttcctgtggacatgtagtaatgtctatattggctcataaaactaacctgaaaaacaaataaatgctttggaaatgtttcagttgctttagaaacattagtgcctgcctggatccccttagttttgaaatatttgccattgttgttt

SEQ ID NO: 6800 - DNA, 368 bp, Homo sapiens; identical to SEQ ID NO: 62
  unsure (211): n=A,T,C or G
  unsure (244): n=A,T,C or G
  unsure (320): n=A,T,C or G
  unsure (327): n=A,T,C or G
  unsure (334): n=A,T,C or G
  unsure (342): n=A,T,C or G
  unsure (348): n=A,T,C or G

SEQ ID NO: 6801 - DNA, 383 bp, Homo sapiens; identical to SEQ ID NO: 63
  unsure (260): n=A,T,C or G

SEQ ID NO: 6802 - DNA, 389 bp, Homo sapiens
ctgctgttgtgaacttcattctgccttttctttctaattctctgggtccagatctgtttacaccacctcctggtacaacacccctaagagctgactttggcagttgtgtatctctgttactggggcttgaattaaacatcttagtgaacaaactttagctttactcttcaatactgaaaaaaaaaatgttatgcccatggttaaaccagtatcctactcaatccttctgtgatgttactcacaaaatgaattgcataaaatcggatacctgagattgttttggctgggaggatccttgaattataaagattaaattagattaatcaggaatgacctctgttactccttatggggacattcaacttctgactgaactttttttttccttt

SEQ ID NO: 6803 - DNA, 547 bp, Homo sapiens
ccaaaactcttccttttggaaccacatgaaagtcttgatgctgctgccatgatccctttgagaggtggctcaaaagctacagggaactccaggtcctttattactgccttcttttcaaaagcacaactctcctctaaccctcccctcccccttcccttctggtcgggtcatagagctaccgtattttctaggacaagagttctcagtcactgtgcaatatgccccctgggtcccaggagggtctggaggaaaactggctatcagaacctcctgatgccctggtgggcttagggaaccatctctcctgctctccttgggatgatggctggctagtcagccttgcatgtattccttggctgaatgggagagtgccccatgttctgcaagactacttggtattcttgtagggccgacactaaataaaagccaaaccttgggcactgttttttctccctggtgctcagagcacctgtgggaaaggttgctgtctgtctcagtacaatccaaatttgtcgtagacttgtgcaatatatactgttgtgggttg

SEQ ID NO: 6804 - DNA, 309 bp, Homo sapiens
cagcaaggaacacaaaggcatctgccacctgagcaagtatcgaacaccatcacctgcatccttcaagggttccaggtagatctccagcctcttgtaggagagaaccaagttgaaaaggtcaaacgctggggacttggtaggaaaaggtggagactccaggggagcctcgggcatcacgctggggctcagctccggcccactcccctcacgttctgatgtctgcatcccggccgctggctccgtgagggaggcggcagggtcgggcaggagcaggggtagagccactgggccccggagcgtttcttcagg

SEQ ID NO: 6805 - DNA, 435 bp, Homo sapiens
ctggctgaaggtggaaggatggtgtattccacgtgttcactaaaccctattgaggatgaagcagtcatagcatctttactggaaaaaagtgaaggtgctttggagcttgctgatgtgtctaatgaactgccagggctgaagtggatgcctggaatcgcacagtggaaggtaatgacgaaagatgggcagtggtttacagactgggacgctgttcctcacagcagacacacccagatccgacctaccatgttccctctgaaggacccagaaaagctgcaggccatgcacctggagcgatgccttaggatattaccccatcatcagaatactggagggttttttgtggcagtattggtgaaaaaatcttcaatgccgtggaataaacgtcagccaaagcttcagggtaaatctgcagagaccagagaaagcacacag

SEQ ID NO: 6806 - DNA, 227 bp, Homo sapiens
ctgggttttgggagaaaggagatgctaccaagtcttggatgttagggcgagaccctgcaagttgagtattagagagcttgtctttcaaggcaggttcctggggcttcagggctaggagggaggagcctgcccttttaacagaaccccagtcacatgcggctcaagtcactcagaggctgttgcatttcagggctatgttggtcctttgtttacctcctaaaccacag

SEQ ID NO: 6807 - DNA, 347 bp, Homo sapiens
aaaaagcattcagattaagagattgaaaagagcgaggcatctaaggctggggggtggggaaggaaaagctgtggagcactacccctcccccaggccacaaaagtcaagggatgtctcttccactggtagcctcaccacacagcttactgaaatcaacaatgttaaatatttagcttcacaaactctgtaaaaatgagttgttgtgacctacaaaaaaggtatatacatattttacataatacaatatcttaaaggtcatatttacaaaaaaatctattcacagaaacactgcgagattctgattcagaatgcagtacctggccttgggttttcagaagtttattttt

SEQ ID NO: 6808 - DNA, 299 bp, Homo sapiens
tccacctcggagagctgggccaggcgcggggccctgaggctcacgtccatctcgtccccgatgcaggccagccgcagggccaatgcgtcactgccctccatgcattccaaagaatcgaagtcctccatagggtccaggtcctcttcagagtcagtcatgccaagaacctccatggtcgggggttccaggagctgctcatacaggagggtctccatcaagatgtctctggagaggggtcttacttcagacatttctcctctggcggcggcgatgctggcagcgtctgtaagccacccggg

SEQ ID NO: 6809 - DNA, 306 bp, Homo sapiens
  unsure (260): n=A,T,C or G
cgctgcgttacccggaaccgccgggccgaacagcatgacgtccgctttggagaactacatcaaccgaactgttgccgttattacatcagatgggagaatgattgtgggaacactgaaaggttttgaccagaccattaatttgattttggatgaaagccatgaacgagtattcagctcttcacagggggtagaacaagtggtactaggattatacattgtaagaggtgacaacgttgcagtcattggagaaatcgatgaanaaacagattctgcgcttgatttggggaatattcgagcagaaccttt

SEQ ID NO: 6810 - DNA, 226 bp, Homo sapiens
ccaagatgtggatgtgaccaccaacccagatgaggaacttgatggggatgaccgctatgacttcgaggtggtccgctgcatctgtgaggtccaggaggaaaatgacttcatgattcagtgtgaagagtgccagtgctggcagcatggggtctgcatgggattactggaagaaaatgtgcccgagaaatacacctgttatgtttgccaagaccctccaggtcagagg

SEQ ID NO: 6811 - DNA, 456 bp, Homo sapiens
aaaatcccagtttcagggaacaggactcaggtgggagccacgcctaaaagccttccacagagagagtgtggttaagcgcataggcgtcgctatcctcttcctccaaaagcagcttgtcgatggtcaacgagctggcggctcttctggggtcttccatgtcctgaaggactggctctgggatagagatggggagctggacaaactggggcccaggtagggctggggccggaggctggtactgcagggtggaggtgggtagtgtggaaaggggctgaggccacgggaaataggtgaggggtgcctggtgctctgggccctccagcgggggccccactgcgggcgtggcggagcttcctgtcgtgacattggtgatgagtggcggagaggcataggtcaacactgaggagggccccaccaccgtgtagccggggcacacgggctgcacatacatgtcag

SEQ ID NO: 6812 - DNA, 301 bp, Homo sapiens
ccagaaccttggcctggtccacagcgtcgagcaggttcttggcgtccacagccagggtgtgtgaagccgtcagcatctgcctcttgcactcctcactcagggaggtcacggcgttctgctgcgccagccgcatcttgttgatgagctctgccaggtctttgttgagcagtttctgggtgccctcgatctctgtccgtgaagatgacggcaaggaaggcaggagatcatccacgctcccgatgagcttccgcagggtcagccccacattcttcaccaccaccacgtagccctcggggggcag

SEQ ID NO: 6813 - DNA, 443 bp, Homo sapiens
ccatggagaaacgcagagcagtccagaaccagtggcagctacaacaggagaagcatctgcagcatctggcggaggtttctgcagaggtgagggagcgtaagacagggactcagcaggagcttgacggggtgtttcagaaacttggaaacctgaagcagcaggcagaacaggagcgggacaagctgcagaggtatcagaccttcctccagcttctgtataccctgcagggtaagctgttgttccctgaggctgaggctgaggcagagaatcttccagatgataaaccccagcagccgactcgaccccaggagcagagtacaggagacaccatggggagagaccctggtgtgtccttcaaggctgttggtctacaacctgctggagatgtaaatttgccatgacttcctggaggacagcagcatggagaaagatcctagaaaagg

SEQ ID NO: 6814 - DNA, 448 bp, Homo sapiens
ccaggtggccctccgtgtgaggtcatggtcacagcatagtttggagctagggagggactgtcagcctggaggtttggagactcattctggaatctagtgtgggtcaagccaacttcagggagaggctgagccagggtaggagtcacaggagcagacgaggatgtggggtgccgtgcacagagctccatgaccagcttgggaagttagaaggaaggggaggcaggaggctgcttagtctgctgccatgatgggccccatgaatggtggctctcaagcttctgtgctacacaggggtgtgtggttgggcgagtgtccttgttaattgatacctaattggccttggttgggaacatagccatgagtgcccctcgtgggtggggcgccagtctgtcattgacctcattgtgtcagcaccttccccccaaggaggctgaccctgccctgccag

SEQ ID NO: 6815 - DNA, 545 bp, Homo sapiens; identical to SEQ ID NO: 307

SEQ ID NO: 6816 - DNA, 393 bp, Homo sapiens
ctggagagagatcaatatgctgaacaaataaaaggagagagggcccagtggcagcagaggatgaggaaaatgtcgcaggaggtttgcacattgaaggaggagaagaagcatgatacgcatcgggtagaggagctggagaggagcttgtccagactcaaaaaccagatggctgagccactgcccccggatgccccagcagtgtcctctgaggtggagctgcaagacctgaggaaggagctggagagagtggcaggagagctccaggctcaggtggaaaacaatcagtgcatcagtctcctgaaccgtgggcaaaaggagaggcttcgcgagcaggaggagaggcttcaggagcagcaggagaggcttcgggaacgggagaagaggcttcagcag

SEQ ID NO: 6817 - DNA, 332 bp, Homo sapiens
ctgctcacctcactggtctaaacactcatgggctaaccttgtcctagtccatgatttcagtggtgtttggaaaagatgatttttctaactcagtcactcattcacatttatgggccgacattcctttttgttgttgtttttttgagacagagtctcattctgtcacccaggctggagtgcaatggtgcgatctcggctcactgcaacctctgccttctgagttcaagcaattctcctgcctcagcctcccaagtagctgggattacaggcgtgtgccaccacacccatctaaagtttgtatttttagtagagatggggtttcgccatgttgg

SEQ ID NO: 6818 - DNA, 244 bp, Homo sapiens
ccagaaacatttggacaactgtgtctcaaaaacagtgtgttctcgtttcgcttctgtgcctcagtctttaagatacaaaactatctcaggacaccacatcctgggcccagcctgcagagtggtcacttttctgccactgccctcaatatgagggagcactgaaaggctcttgacttagaaccccttcccctttctgtctaaagccgaggagccatctgtggttgcgagcacgcagcacaccagg

SEQ ID NO: 6819 - DNA, 429 bp, Homo sapiens
ccaggtggctcatgcagtcaccggagctttgcttcaggacatgtgtgctacaagtccaggctggacaaccccaagaactgtgagggttcagcaagcggggtgggtccactgagctctcaacacaagcttccgggacccagaccctcatctggaaaccacacaggccagccctgcgatgctctgtgtagcagggagcaagggtcacaccacagccacatctgcttcattcgggggatccaacttggcatgtcttggtaaaggcattcatggtgctgcccaggacaccagcaagcactgaagtcctcacaagttacttcaggagtttaaccctgcacacgcccaacagaagggttttcaccagctctgagcctggacacttacaggcacactgtatgttcaagtcagttattctgtctccatctagaaagg

SEQ ID NO: 6820 - DNA, 103 bp, Homo sapiens
ccagggcgtgtaatgacttcagtattggcctcgtgttgttggtactcactatccgatccaggcagggaaatggtcagtgcgtgtgtgtcgggtggggtggggg

SEQ ID NO: 6821 - DNA, 302 bp, Homo sapiens
ggcccggcgatgtcgctcgtgctgctaagcctggccgcgctgtgcaggagcgtcgtaccccgagagccgaccgttcaatgtggctctgaaactgggccatctccagagtggatgctacaacatgatctaatcccgggagacttgagggacctccgagtagaacctgttacaactagtgttgcaacaggggactattcaattttgatgaatgtaagctgggtactccgggcagatgccagcatccgcttgttgaaggccaccaagatttgtgtgacgggcaaaagcaacttccagtcctacag

SEQ ID NO: 6822 - DNA, 571 bp, Homo sapiens; identical to SEQ ID NO: 625

SEQ ID NO: 6823 - DNA, 277 bp, Homo sapiens
gcttgaaggaatttcacttccttgggtgctggtaccttattcacagcagatggtcatgcttagaaaaccctgcttcagggtcagtgactgaaaaaccaggggtgccatgccagtgcctttgtcagggctgttttctgcttaaccactttctcagaataatgcagaagaaacccagtccgctaccttttgagtgtgtgggaaataagaacggggtgggagaggagatgggagatgcaggtcgaaggacaaaaaggagcagatgagcaggatgaacagg

SEQ ID NO: 6824 - DNA, 287 bp, Homo sapiens
cctgctctcctcacacattgtgtggtttggggttaatgatggagggagacacctcctcatagacggcaggtgcccacctttcagggagtctcccagcatgggcggatgccgggcatgagctgctgtaaactatttgtggctgtgctgcttgagtgacgtctctgtcgtgtgggtgccaagtgcttgtgtagaaactgtgttctgagcccccttttctggacaccaactgtgtcctgtgaatgtatcgctactgtgagccgttcccgcctagccagggccatgtctta

SEQ ID NO: 6825 - DNA, 334 bp, Homo sapiens; identical to SEQ ID NO: 65
  unsure (183): n=A,T,C or G
  unsure (192): n=A,T,C or G
  unsure (193): n=A,T,C or G
  unsure (203): n=A,T,C or G
  unsure (211): n=A,T,C or G
  unsure (227): n=A,T,C or G
  unsure (228): n=A,T,C or G
  unsure (235): n=A,T,C or G
  unsure (244): n=A,T,C or G
  unsure (245): n=A,T,C or G
  unsure (313): n=A,T,C or G

SEQ ID NO: 6826 - DNA, 214 bp, Homo sapiens
ccacaccttgatgaaatcattttcctcctcgacctccaactggcatcactctggatctcaattttgatatttaccaccacaccaagtatgttccttcacatgtccatacctagttttctttttttctaaataataagtgatcctcccacttcagcctcctgagtagctaggactacaggtgcacaccaccatacccaactaattttttgttttt

SEQ ID NO: 6827 - DNA, 377 bp, Homo sapiens; identical to SEQ ID NO: 66
  unsure (335): n=A,T,C or G

SEQ ID NO: 6828 - DNA, 330 bp, Homo sapiens; identical to SEQ ID NO: 308

SEQ ID NO: 6829 - DNA, 373 bp, Homo sapiens; identical to SEQ ID NO: 6

SEQ ID NO: 6830 - DNA, 80 bp, Homo sapiens
aaacaagaatgaatcattactgtgtatgttagggtattaaaactgtttcaccagtacagtgaaagttgtttcaacatttt

SEQ ID NO: 6831 - DNA, 281 bp, Homo sapiens
cctcagaccgggttctgagtacacagtcagtgtggttgccttgcacgatgatatggagagccagcccctgattggaacccagtccacagctattcctgcaccaactgacctgaagttcactcaggtcacacccacaagcctgagcgcccagtggacaccacccaatgttcagctcactggatatcgagtgcgggtgacccccaaggagaagaccggaccaatgaaagaaatcaaccttgctcctgacagctcatccgtggttgtatcaggacttatggtgg

SEQ ID NO: 6832 - DNA, 159 bp, Homo sapiens
aaattttacatgctgaaaagctgcagagcagaggaaccaaaccaggtttatttgtgctaccaggaggtgttcttaatgggaacaggcctcctatctttagtcactttgtacaggatgatatccatgagtactttagtgtttgtatatgttttttctttt

SEQ ID NO: 6833 - DNA, 465 bp, Homo sapiens
aaaggtggagcttttcaaaaagggaaactgggagcacttacagcccaggtctatgttactggtaagaagtggtttgtctcaggaataatgtaccctgtggagagtactttgtgtcagcctcactgagaacaaaaaaagcactcctttccccatgattaacactcatgtgtcaggaaagtacagtcaatgtatgctaaaaatccacttgaacaattagctcgcttttttccctcatttgctttcagagtaaatgtgctttcagagtattaggtcggcctaatacatgatacattttaagaaggggaggaaagcgcattgtataccctgatgctgggacccaatagaagacaggccccctggctggcctttggttctccctggagctgacaaagggaaggggcttggaaagcagccactgtccccgcctagtttgggcctttacagacacacctttccttttggcag

SEQ ID NO: 6834 - DNA, 536 bp, Homo sapiens
cctggcatttcctactggatgttctctcaataattgtgctgcccattatactcccaatgccggtgacacaacagtattacagtatgatgacatctgtaaaatagactttggaacacatataagtggtaggattattgactgtgcttttactgtcacttttaatcccaaatatgatacgttattaaaagctgtaaaagatgctactaacactggaataaagtgtgctggaattgatgttcgtctgtgtgatgttggtgaggccatccaagaagttatggagtcctatgaagttgaaatagatgggaagacatatcaagtgaaaccaatccgtaatctaaatggacattcaattgggcaatatagaatacatgctggaaaaacagtgccgattgtgaaaggaggggaggcaacaagaatggaggaaggagaagtatatgcaattgaaacctttggtagtacaggaaaaggtgttgttcatgatgatatggaatgttcacattacatgaaaaattttgatgttggacatgtgccaataa

SEQ ID NO: 6835 - DNA, 553 bp, Homo sapiens
ctggagcagaaggcggcccgttcacttcagccagatccacttgtctcccacctcggtgttgtacccagggctgtacttgcggcccggcagctctctgaactgatgtaagacacggtcagtctgatgagctccaatggtgacttccgggagaaagataggaatgcttgtgtaattcagcacctcaaacttatcctgaaccagtaatcgcaggtggtataaagtgcgattgtcctgcttgagccacggccctttatcgaacttcaggtattcaatgtcctctaccaccttttttgaatcttgagcttcccttgcagaatattgtaaaacctcacatttttcactcatctcagggagaaaggttttcttataggcattctcaatgtcctgtagataggcagaggtgatcttcatttcatgtggctaaacagaagcagaaaaatcaaactgggaaacatttagagttcattctctttgacctgtgcgtatataaaatgcgaagacaatcactgaccaccaatttcttacaactcacaccgggcactgtggggactgc

SEQ ID NO: 6836 - DNA, 251 bp, Homo sapiens
aaatgaaatttgaaaaccaaatagtaagaaatggaaagagatagttgtaagaatccatttaccaattttacagctaaaaattaaagtgaagtagaaatagcaaaagataacagacaaatatattattttaggtcattaatttatagtgccttatcatcttaagttataaatagaataaggattttgttatataaaaactatcaaaaaagtatcagtgaaaagacatgacctccatgaaatgtgctgagtgg

SEQ ID NO: 6837 - DNA, 443 bp, Homo sapiens
  unsure (159): n=A,T,C or G
aaaaatatttttagtagagatgggttttcgccatgttggcacactggtctcgaactcctggtctcaagcaatccacccccctcagccttccaaagtgctgggattacaggtgtgagccacaacacccggccggctcttttttttttttttcttctttanagacagggtttcgtgctgttgcctaggctggagggcagtggtgcaatcatagctcaatagctcactgcagcctcaaccctctggctcaagtgatcctccctgctcagcctcccaagtagctgggactacaggggcgcaccatcacaataactaattttttatgttttgtagaaagggagtcccactatgttgcccaggctggtctcaaactcctggcctcaagtgcaccatcacacccgactaatctttgtatttttagtagagatggggtttcaccatgttgg

SEQ ID NO: 6838 - DNA, 289 bp, Homo sapiens; identical to SEQ ID NO: 4564

SEQ ID NO: 6839 - DNA, 300 bp, Homo sapiens
ccataaagatgattttgtcatcacaaaagaccatgatagtatcagttagttcataaccaaagagccatgtctgtaaggcagttgatttggcataaacaatttcttcatcaacacccactgatacaacaatggcatcaacgttggcatactcatcttctcctttccgccaattgctgtacagtctcttcactcgccgataataagcgtctttgtccagagtcacagccatagccccggacgccgcttctcctcgggttccgagaatcacgcgaggtcccggctcagccacccgctctcggc

SEQ ID NO: 6840 - DNA, 240 bp, Homo sapiens
aaatatgggaaggcaatgcagaactcttgggaattatcgagttctgataccccaaaagaatgaaatcaaacttctgttaatgggatgatgggtcgtggaatgggacaccttgggcacttgctaacaggaacataggaaaattggagttgaaacttcgcaggctctgtaacgaatgtggatgactgctacagaataaggctgacttcctgtaattatgatatttagtaacgcgatgtgttt

SEQ ID NO: 6841 - DNA, 51 bp, Homo sapiens
  unsure (32): n=A,T,C or G
gatcctgcgttaatctatgactatgccattgngctattcaagggtcaagga

SEQ ID NO: 6842 - DNA, 189 bp, Homo sapiens
ccaaataaccaaggtgaagaaaggtaaggggaagaaaaaaaaagaaaaaaaagggctgtatccaaacaaaaacaactcgagatcagagaattggtctatatttcattaagataaattgtttcaaatgaaacatttggtaattgagaatactactttaatatctgagctacttagggccctttccttttt

SEQ ID NO: 6843 - DNA, 463 bp, Homo sapiens
  unsure (15): n=A,T,C or G
  unsure (16): n=A,T,C or G
  unsure (28): n=A,T,C or G
  unsure (74): n=A,T,C or G
  unsure (113): n=A,T,C or G
  unsure (156): n=A,T,C or G
  unsure (178): n=A,T,C or G
  unsure (263): n=A,T,C or G
  unsure (350): n=A,T,C or G
  unsure (355): n=A,T,C or G
  unsure (371): n=A,T,C or G
  unsure (387): n=A,T,C or G
  unsure (390): n=A,T,C or G
  unsure (391): n=A,T,C or G
  unsure (414): n=A,T,C or G
  unsure (421): n=A,T,C or G
  unsure (423): n=A,T,C or G
  unsure (426): n=A,T,C or G
  unsure (435): n=A,T,C or G
ctgtgcgtggaccanntcagcttccggntgtgactggagcagggcttgccgtcttcttcagagtcactttgcangggttggtgaagctgctcccatccatgtacagctcccantctactgatgtttaaggatggtctcggtggttaggcccactanaataaactgagtccaatacctntacacagttatgtttaactgggctctctgacaccgggaggaaggtggcggggtttaggtgttgcaaacttcaatggttatgcggngatgttcacagagcaagctttggtatctagctagtctagcattcattagctaatggtgtcctttggtatttattaaaatcaccacancatanggggactttatgtttnggttttgtctaagagntannttatctgcttcttgtgctaacanggctgtngntgntagggcccnttatacctgggggccagcctttggaaat

SEQ ID NO: 6844 - DNA, 520 bp, Homo sapiens
cctggcagcactggagggcaggcagggaaagtagggtgggtaacccagcctggcaaatgcacggcagctagaaaacctcttcaggttctggggtggctgggccatgagaggggaggccaggcagggctgtcaaggtaaccggggtcagatcatggagttgcctgccaggctccacaggagtgggggacagaagcagagcaacccagctaccagccgggccctgagctccctcagggtgaccagggaggagctgtgactggctggggaggcagggctggggccgaggttccccaggacgacaggagggagccaaggcactctaagaggtggaagaagaggaccagaagctggtgagtgcatcactggagcccataggagggctcctgactgtcctcaaaagcctcagacctcagtgtccactttctccatccaagaaatggggctgtgatctctgcttatgacagcacaagcttgcacagaagtggaggcgggaaataagcacaagtgtgccttcccagcc

SEQ ID NO: 6845 - DNA, 418 bp, Homo sapiens
aaaaatggagagtctgaattttattagagctcacacaccatatattaacatatacaactgtgaaccagctaatccctctgagaaaaactccccatctacccaatactgttacagcatacaatctctgttcttgggcattttgtcagtgatgctgatctttgccttcttccaggaacttgtaatagctggcatcgttgagaatgaatggaaaagaacgtgctccagacccaaatctaacatagttctcctgtcagcagaagaaaaaaaagaacagactattgaaataaaagaagaagtggttgggctaactgaaacatcttcccaaccaaagaatgaagaagacattgaaattattccaatccaagaagaggaagaagaagaaacagagacgaactttccagaacctccccaagatcag

SEQ ID NO: 6846 - DNA, 479 bp, Homo sapiens
  unsure (11): n=A,T,C or G
  unsure (17): n=A,T,C or G
  unsure (18): n=A,T,C or G
  unsure (198): n=A,T,C or G
  unsure (396): n=A,T,C or G
ccttgcctcanatccanngtcactcggaagaggccatgtctaccctcaatgacactcatggaggaaatgctgagagaagcattcagatgcatgacacaaggtaagactgccaaaaatcttgttcttgctctcctcattttgttatttgttttatttttaggagttttgagagcaaaatgacaacacccagaaattcantaaatgggactttcccggcagagccaatgaaaggccctattgctatacaatctggtccaaaaccactcttcaggaggatgtcttcactggtgggccccacgcaaagcttcttcatgagggaatctaagactttgggggctgtccagattatgaatgggctcttccacattgccctggggggtcttctgatgatcccancagggatctatgcacccatctgtgtgactgtgtggtaccctctctggggaggcattatgtatattatttccggatcactcctg

SEQ ID NO: 6847 - DNA, 486 bp, Homo sapiens
  unsure (348): n=A,T,C or G
  unsure (349): n=A,T,C or G
  unsure (406): n=A,T,C or G
ctgtgctggccccgacacagctccagttccacccatgacatctggctgaggaggcttatgggagcggcttctcatgcacagttactgtccctctctggagggtcctttaatggggactgtgcaaagcagtgacactaactgccagtacactcacttttctgaggtgaaaataaaaaggtttattcaaggataaatgaactctggttaaattactacttcattttcattactacttcatatattagatttcagagtgtgtgagatggacagtgtattctggaaattttaatttaacacccatccacaaatacttatttcaaggaaggctaatcatcttcattaaattgnncactttttcgtgtagactttttctctccatgtttactaaaacagggagatccacgangcacatttttttaacctcgcaaaactcttaattctaacttaattactaaactctgccttcaaccaaattttcaatatctt

SEQ ID NO: 6848 - DNA, 223 bp, Homo sapiens
ccactgactcaggtgaccttctaccgagatggctcagctctgggtccccccgggcctaacagggaattctccatcaccgtggtacaaaaggcagacagcgggcactaccactgcagtggcatcttccagagccctggtcctgggatcccagaaacagcatctgttgtggctatcacagtccaagaactgtttccagcgccaattctcagagctgtaccctcag

SEQ ID NO: 6849 - DNA, 249 bp, Homo sapiens
ccttcatgtgtatgtctggcaatcactttgacctacttagtaggtaacaaacatgatgccaccagctacagtgattatttaggcttatgtaacactataaatgaaaaggggagtagtagagcacccccattatctaaagcggggatcagcaaactttctctgtgaagagctagacagtaaaattttaggttttatgggccgcatagggtttgtgtctcatattattctgtgtcgttgtcataacccttt

SEQ ID NO: 6850 - DNA, 361 bp, Homo sapiens
aaaaacctgtacacagtgtttattgtggttaggaagcaatttcccaatgtacctataagaaatgtgcatcaagccagcctgaccaacatggtgaaaccccatctgtactaaacataaaaaaattagcctggcatggtggtgtacgcctgtaatcccagtgacttgggaggctgaggcaggagaatcgcttgaacccgggaggcggaggttgcagtgagctaagatcgcgccactgtactccagcctgggcaacagcgagactccatctcaaaaaaaaaggaaatgtgtatcaagaacatgattatccaggggtattttctaattcagatcatcaaactgattatatagaagagttggcttt

SEQ ID NO: 6851 - DNA, 494 bp, Homo sapiens
ctgcaagaggctgacagaggccaccaccagaaattccttgaggtgagtttcaatgttcttgttgtagagcgtgaagagggcagcagacacctggatgatggctttggtcaagcaatgaatattgttgttgtaaccatccttctcaatgctataaaaggaagaagggtcagtggcaaggagtgggagggaaactgccagaaagatcaagagcaggcaggccaccttatattcctcctcaggagatgaagtatcagctttcagattagcaatggcagccaccaaggctgggtcaatgtcacagcccacacctgcagcagatgccagctcaaagatactcaaggtcaccttgatgtctgtgtctggagtgacaaactccttcaagcactcaatgggacccataagaaatgggcagtgggaggagaaaacctcccgaagtccctcttgggccatggccctgaaactgaggataaccccaatgatggtcatgcgcttta

SEQ ID NO: 6852 - DNA, 189 bp, Homo sapiens
ctgcttgagaacagagactgctaccccatcctgcccatgcaggcaggctcttgccagccccgttctgacccgtgtccccccaggctctgcctgggcagaagactcaccttggaggagtgggccctggagtcctgtccctcccagaagcccccagggtgggatttctcaggctgccagggcaggcccagg

SEQ ID NO: 6853 - DNA, 295 bp, Homo sapiens
aaacagaggaaccgaaaaatgaggtttacagtctcatcacatgaacactcaaatctgtacccaaggaaacagcggtattatatttactgtcacagctagaccctatcaggtgaacagggctctccacctgcggctgttgcttcgcaaaatatctttcctctccacgtgaacaagtagctctagagtgcttttaggcagagtgacggtgatgtcatgggcaccacgccaatcttattcctggacaatgacttaagccccatcgtgagaatggttttttcctcttcaacacattttt

SEQ ID NO: 6854 - DNA, 186 bp, Homo sapiens
aaaaacttaaatatttcggaggcacatgttggactactttgttttaattaaactgctagtatttctttgtcaaggatgtttctagttttttgctttattgccttgcattctaatgcagtttgttctgtaactcgagagccagtagcattggattgatggaagtgtagggtttatgaattattgcag

SEQ ID NO: 6855 - DNA, 357 bp, Homo sapiens; identical to SEQ ID NO: 87
  unsure (230): n=A,T,C or G
  unsure (292): n=A,T,C or G

SEQ ID NO: 6856 - DNA, 308 bp, Homo sapiens; identical to SEQ ID NO: 88

SEQ ID NO: 6857 - DNA, 326 bp, Homo sapiens
cctgaggctgctggaggttgctacatgggtgatgaccccatctctgctatcttccccctgcccgttgtgtaccatcttgctcttgggaaagtggcattcacacccccttcctggctgggttagtctcatttgaatacttccacgtgctcccaccctcggcattcaacttcccacacaggtgggggctgtctggatgcacagggtgattcctccagaccttcctttgattgggtctttgtctgttgattgacactttgtgacaggtcacctttccattgcaatgtctagttgtgaggctacctcatgactcaatttccagtgggttt

SEQ ID NO: 6858 - DNA, 495 bp, Homo sapiens
cctcttggcctcacatacagttggtatatgaattcttcttgagatttttggagagccctgatttccagcctagcattgcaaaacgatacattgatcagaaattcgtacaacagctcctggagctttttgatagtgaagatcccagagaacgtgacttcctgaagactgttctgcaccgaatttatgggaaatttcttggattaagagcattcatcagaaaacaaattaacaacattttcctcaggtttatatatgaaacagaacatttcaatggtgttgctgaacttcttgaaatattaggaagtattatcaatggctttgcattgccactgaaagcagaacataaacaatttctaatgaaggttcttattcctatgcatactgcaaaaggattagctttgtttcatgctcagctagcatattgtgttgtacagttcctggagaaagatacaacactaacagagccagtgatcagaggactgctgaaatttttgg

SEQ ID NO: 6859 - DNA, 418 bp, Homo sapiens
ctgggccttcaggaaggtggtccacttcttctgcagcagcttttcgccgcccacgtcattcttgcagactctagccacccgcgatgtgtggagcctctcaaagaagtcaaactcgctggctgtctcctcgaagaagaagtagacgacctgggtcgaagggatggctgccacaaaggaggcgtcatgatgcagccagcggaggaagttgtcggtcttgaggacaagctgggatcccagtgtgcgcatcaggatgggctcactgcccaggaagttgttcatagtaccagaatagagcatcccatccaccaagacagccgtatgcttgtgagcggggtcaaaggggctttggccttttccctccatgaccttgtcctccgagatgggcaacaggtaggaatcttgaagttcctaaatgggg

SEQ ID NO: 6860 - DNA, 269 bp, Homo sapiens
caggctccaaactccactaaccagagctgtgattgtgcccgctgagtggactgcgttgtcagggagtgagtgctccatcatcgggagaatccaagcaggaccgccatggaggaaggtcaatattcagggatcgaggagcttcccaggaggcggtgttgcaggcgtgggactcagatcgtgctgctggggctggtgaccgccgctctgtgggctgggctgctgactctgcttctcctgtggcactgggacaccacacagagtctaaaaca

SEQ ID NO: 6861 - DNA, 192 bp, Homo sapiens
cctaccaccttcagaagtcgacctgtggcaaatgtggctaccctgccaagcgcaagagaaagtataactggagtgccaaggctaaaagacgaaataccaccggaactggtcgaatgaggcacctaaaaattgtataccgcagattcaggcatggattccgtgaaggaacaacacctaaacccaagagggcag

SEQ ID NO: 6862 - DNA, 206 bp, Homo sapiens; identical to SEQ ID NO: 89
  unsure (142): n=A,T,C or G
  unsure (143): n=A,T,C or G

SEQ ID NO: 6863 - DNA, 417 bp, Homo sapiens
aaacagagaacaaagggattcactcagagatcagaatacgaagcttcctctcagcatcatgggaggagataaaataattcattctatggtctttgttccattaagacttggtgctttcttcagtaacagtatgtgaaatgtggctgactttgagtcccccactgtgtaagtggaattatttttcactgcagcatttctgagtctttttcttgttccttactctgaactgtaaaattaagttcataaaggcatttggcaagggtggaggaagcttccatgttactaatggctagcactgataagttattttcatgtctctttaacaatctttctaaatatggaaggctgcacagcaaaattctttttcaatcttcattcatgtttctagaaaatttagaaaatggtgtcagaaaacag

SEQ ID NO: 6864 - DNA, 336 bp, Homo sapiens
ctggcaggtagaattcagggacactgctaaacatcctacagtgcacacccacaacaaagaattaattggtccaaaatcaccatagtgccacatttcacaaactctgagccaagtcatccttttccatcacagtgtgtcagcggataatatcgaaaatgtaaatatcaagtagcaaaaataggtgttcagagattgagtgatagatataaaattaaatagctgaaggctcagagtgagaagtaaggctgggttggtggggtttcatcatgacaatccttgtggaactctttgtttctgtaaactctgtgtatgtgtatgtacaacttttgatatttt

SEQ ID NO: 6865 - DNA, 373 bp, Homo sapiens; identical to SEQ ID NO: 90

SEQ ID NO: 6866 - DNA, 545 bp, Homo sapiens; identical to SEQ ID NO: 307

SEQ ID NO: 6867 - DNA, 428 bp, Homo sapiens
ctgatgaagaacacgggtgtgatccttgccaatgacgccaatgctgagcggctcaagagtgttgtgggcaacttgcatcggctgggagtcaccaacaccattatcagccactatgatgggcgccagttccccaaggtggtggggggctttgaccgagtactgctggatgctccctgcagtggcactggggtcatctccaaggatccagccgtgaagactaacaaggatgagaaggacatcctgcgctgtgctcacctccagaaggagttgctcctgagtgctattgactctgtcaatgcgacctccaagacaggaggctacctggtttactgcacctgttctatcacagtagaagagaatgagtgggtggtagactatgctctgaaaaagaggaatgtgcgactggtgcccacgggcctagactttgg

SEQ ID NO: 6868 - DNA, 347 bp, Homo sapiens; identical to SEQ ID NO: 91

SEQ ID NO: 6869 - DNA, 308 bp, Homo sapiens; identical to SEQ ID NO: 3350

SEQ ID NO: 6870 - DNA, 299 bp, Homo sapiens
cctctatgccagagaaggagccctcagttctgagaaaagtactattggaggatgaggtgttggctgccatggtgtctgtcattggcactgctacaacccacctgagccctgagttagctgcccagagtgtgacacacattgtgcccctcttcttggatggcaacgtgtcctttctgcctgaaaacagcttcccgagcagattccagccattccaggatggctcctcagggcagaggcggctgattgcactgcttatggcctttgtctgctccctgcctcgaaatgtggaaatccctcag

SEQ ID NO: 6871 - DNA, 421 bp, Homo sapiens; identical to SEQ ID NO: 92

SEQ ID NO: 6872 - DNA, 406 bp, Homo sapiens
ccagcagaaatggtctataaatctacacatttgtcctaaaacctaaagccatgtagaccttttatacagtaagatacccacttacgtgcagtgaggtgtattcctataggtgacatcaaagtcatgcaacaagacactggcgtgaagaagtaatttctgagagtcagacagaacaataatatgaactacatagaactggataataccaatcaaaaagcgaaaatgcgaaacagctttcctgggacaagagtcaggtaattttgttcataggtaatacaaatgcacttacacacacctctaaaaacatactttcttggccgggcgcagtggctcatgcctgtaatcccagcactctgggaggccgaggcagacggatcatgagatcaggagttcgagaccagcctgg

SEQ ID NO: 6873 - DNA, 589 bp, Homo sapiens
ctgctgtttacttatcaaggttatagttcgtgcttctaactggagcactagctgctaatgcatatctagagaaaaaaatcttcctttgcagttagtgccaaaaggattcaaggcttgtctggctgcaaaatgagatttttatcaggcatcttgagcattattataaagcagatgacagtatcgtgtttggggtagtgaaattaaagcccataccaaagtgggccagccaagagcaggtgtcagcctgggacagatgtgaacaccaggaataaaagagcagttatgtaatccatttcgacgcacttctggaactgtaaactgtaaacaaatgctgcaaaggttaactattttctaaaacttacttttttccagtgggaaaacaaatatttggtatggtaacccaaacttatcactgcttttttgctcagtttcacacgttgtaactcaaattactctaaacgtgtttaactgccaaacagctacctgcatgttagaaaccagacaatacaaaccacctaataagaaaggttccctaatagaaatactaatacaaaaaaatgccttagctggagcaacttaaaaatcaaat

SEQ ID NO: 6874 - DNA, 470 bp, Homo sapiens
ccttggagactcacgagttttgagagcaaaatgacaacacccagaaattcagtaaatgggactttcccggcagagccaatgaaaggccctattgctatgcaatctggtccaaaaccactcttcaggaggatgtcttcactggtgggccccacgcaaagcttcttcatgagggaatctaagactttgggggctgtccagattatgaatgggctcttccacattgccctggggggtcttctgatgatcccagcagggatctatgcacccatctgtgtgactgtgtggtaccctctctggggaggcattatgtatattatttccggatcactcctggcagcaacggagaaaaactccaggaagtgtttggtcaaaggaaaaatgataatgaattcattgagcctctttgctgccatttctggaatgattctttcaatcatggacatacttaatattaaaatttcccatttttt

SEQ ID NO: 6875 - DNA, 324 bp, Homo sapiens; identical to SEQ ID NO: 93
  unsure (16): n=A,T,C or G
  unsure (182): n=A,T,C or G
  unsure (183): n=A,T,C or G
  unsure (185): n=A,T,C or G
  unsure (193): n=A,T,C or G
  unsure (209): n=A,T,C or G
  unsure (280): n=A,T,C or G
  unsure (285): n=A,T,C or G
  unsure (288): n=A,T,C or G
  unsure (294): n=A,T,C or G
  unsure (308): n=A,T,C or G

SEQ ID NO: 6876 - DNA, 366 bp, Homo sapiens
ctggaagaagaaaagaaagcaaacaatgagaaacagaaagctgaaagggagctagagggtcaaatccagagattgaacatagagaaaaagaaactaaatacggacctgtatcacatgaaacattctctcagatactttgaagaagagtccaaggatctggccggccgcctgcaacgttcatcgcagcgtataggagagttagagtggtctctctgtgctgtcgccgccacacagaagaagaagccggatgggttctcgagccgcagtaaagcacttctcaagcggcagttagagcagtccatacgggagcagatactgctgaaaggacacgtgacacagttgaaggagtcgcttaaagaagtccag

SEQ ID NO: 6877 - DNA, 600 bp, Homo sapiens
  unsure (11): n=A,T,C or G
  unsure (563): n=A,T,C or G
ccttgcctcanatccaaggtcactcggaagaggccatgtctaccctcaatgacactcatggaggaaatgctgagagaagcattcagatgcatgacacaaggtaagactgccaaaaatcttgttcttgctctcctcattttgttatttgttttatttttaggagttttgagagcaaaatgacaacacccagaaattcagtaaatgggactttcccggcagagccaatgaaaggccctattgctatgcaatctggtccaaaaccactcttcaggaggatgtcttcactggtgggccccacgcaaagcttcttcatgagggaatctaagactttgggggctgtccagattatgaatgggctcttccacattgccctggggggtcttctgatgatcccagcagggatctatgcacccatctgtgtgactgtgtggtaccctctctggggaggcattatgtatattatttccggatcactcctggcagcaacggagaaaaactccaggaagtgtttggtcaaaggaaaaatgataatgaattcattgagcctcttgctgccatttctngaatgattcttttcaatcatggacatacttaatatta

SEQ ID NO: 6878 - DNA, 605 bp, Homo sapiens
gtcattgttttcaacagtgacttttatttacttaaagccagcagtagttcccattactctcataatgttatagttaaggcttgatttagttccagaaaataaatagggtaaatttttaatatttccctagctctgtctgctatagggaatttcagagtatgaaggtaagatgaagcagatatataagaacatttttagataatgacaatttttccttaaaatttggtgagaatttagtttcttctcaagattctgtacttctatccataaaagtaaatttctattttagtagctctgtaagaactaggccagagaagagtattacccataatagtaaatagcaaatactttggcaagtctgaattagagtacaagtgaagacattcacaaacacactttttacatctcctggatgtggtacgggctgtatgttagaattaaagcatcacaactatctgattgtagggtgctggtgggcaatgcaatcaatcaacacgtctaccccaacagatgtggagacgcatggaaaaaatacatcaaccaaagtggtcagggagaacaaaacacagaaaacaccataaaactgaagacattatctcttcttg

SEQ ID NO: 6879 - DNA, 227 bp, Homo sapiens
aaagtttaacttcctggttctcttcacccccttgcctctagtttcagtaaacaactttcccgccagtcctaatcactagttcacatctgttaccctggtcacctgctccatcctgactcatctcggtcacctgctttgaccggagtcacctttagttacctcttcctaaccgtccttcccaccaaactgctcaccccgccactctggctcgtactcctgctctcttt

SEQ ID NO: 6880 - DNA, 322 bp, Homo sapiens
aaagttgctgagctgcactatcttatattttagttgcttaggaaatgatttataatcccaacaagataatctccttgagaataagccttatgtctcattcattttggtgaaccccataacaaatacagtgcctgttaatagatgccaataaatgtttgagcaaagagtgaatttcagaaggactatgctctacctgagaatccatcacatttagtacaatcacccattttggaaaacagttcatactcccttttaagggtgtcattctgattaactcagttgctgacctactcatttcaacaatagaaaacactaggaattt

SEQ ID NO: 6881 - DNA, 403 bp, Homo sapiens
aaaatctcttaggccaaattaccttattgaggaggaagggagaactgaatttgaatcaactaaaataagattgatatctttcctcattggaaaaaaacatgaaaacacagggactcgtaagaatgctaacatttgtatgttgtttccatttctactccaggtgttgccacatctgcaaacttcctgggagagtaatggggattcgagtgcttcgattatctttggtggtcatcctcgtattattactggtagctggtgctttgactgccttacttcccagtgttaaagaagacaagatgctcatgttgcgtagggaaataaaatcccagggcaagtccaccatggactcctttactctcataatgcagacgtacaacagaacagatctcttattgaaactttt

SEQ ID NO: 6882 - DNA, 508 bp, Homo sapiens
  unsure (304): n=A,T,C or G
  unsure (406): n=A,T,C or G
  unsure (412): n=A,T,C or G
  unsure (419): n=A,T,C or G
  unsure (433): n=A,T,C or G
  unsure (439): n=A,T,C or G
  unsure (475): n=A,T,C or G
  unsure (492): n=A,T,C or G
ctgaacaatatagaaaagtgcagaggcaagtgcctttccagaaccgcgtggtgacttagaagcggggcttgcgcttgcggccggtgtactgggtgtcaggtctgacttccctgccctggcgcctgtgccgctccttcttctccagcacccatgcccgactcttcctcaccattccccgcctcgacatccttaatgggaacctgtggcggagacacagctatgagctgatggacagacctgcccgggcggccgcccgggcaggtgtacaagcttttttttttttttttttttttttttttaccanagttgacttttaatttgtcctaaagccgctgaagcaaaaaccatgataaaacattctgctttcttttcttttacaaccccacgaacgcaaaaaaaaaaaaancaaaancaaaacnaaaaaaagaaacancatacnaaacccaaactatttgtaggaaaaaatggttttgtncatgggatgaaacaatntaaattcaaaacttac

SEQ ID NO: 6883 - DNA, 214 bp, Homo sapiens
  unsure (16): n=A,T,C or G
aaaaacaaaaaattanttgggtatggtggtgtgcacctgtagtcctagctactcaggaggctgaagtgggaggatcacttattatttagaaaaaaagaaaactaggtatggacatgtgaaggaacatacttggtgtggtggtaaatatcaaaattgagatccagagtgatgccagttggaggtcgaggaggaaaatgatttcatcaaggtgtgg

SEQ ID NO: 6884 - DNA, 354 bp, Homo sapiens
ctgtccctggatagtgccacctttgcctctccccaggattttgggcttgttttgcaaacactcaaagagtacaacctagccctgaaaagactgagcttccatgacatgaatctcgctgactgtcagagcgaggtgctccttttgctacagaatctgactctgcaagagattaccttctccttctgccgtctgtttgagaagcgcccagcccaatttctgcctgagatggttgctgctatgaagggcaactccacactgaagggcctccggctgccagggaaccgcctggggaatgctggcctgctggccttggcagatgttttctcagaggattcatcctcctctctctgtcag

SEQ ID NO: 6885 - DNA, 150 bp, Homo sapiens; identical to SEQ ID NO: 94
  unsure (16): n=A,T,C or G
  unsure (17): n=A,T,C or G
  unsure (31): n=A,T,C or G
  unsure (82): n=A,T,C or G
  unsure (91): n=A,T,C or G
  unsure (92): n=A,T,C or G
  unsure (107): n=A,T,C or G
  unsure (108): n=A,T,C or G

SEQ ID NO: 6886 - DNA, 167 bp, Homo sapiens; identical to SEQ ID NO: 95
  unsure (14): n=A,T,C or G
  unsure (70): n=A,T,C or G
  unsure (95): n=A,T,C or G
  unsure (107): n=A,T,C or G
  unsure (121): n=A,T,C or G
  unsure (122): n=A,T,C or G
  unsure (149): n=A,T,C or G
  unsure (156): n=A,T,C or G

SEQ ID NO: 6887 - DNA, 442 bp, Homo sapiens
ccttcttcactgaagagtatgtcagggaccaccctgaggaccaggacaagctgacccacctcaaggacctgattgcatggcagatccccttcttgggagctgggattaagatccatgagaaaagggtgtcagataacttgcgacccttccatgaccggatggaggaatgtttcgagaacctgaaaatgaaggtggagaaggagtacggtgtccgagagatgcctgactttgacgacaggagggtgggccgccccaggtctatgctgcgctcatacagacagatgtccatcatctctctggcttccatgaattctgactgcagcacccccagcaagcctacctcagagagctttgacctggaaattagcatcacccaagacgccgagagtggagcaggaggaaccgatctccccggggagcaccctgcctgaggtcaagctgc

SEQ ID NO: 6888 - DNA, 442 bp, Homo sapiens
  unsure (314): n=A,T,C or G
ctgtgcagcgccgtggagcacatgcattcacgccgggtgatgcaccgagacatcaagcctgccaacgtgttcatcacagccacgggcgtcgtgaagctcggtgaccttggtctgggccgcttcttcagctctgagaccaccgcagcccactccctagtggggacgccctactacatgtcaccggagaggatccatgagaacggctacaacttcaagtccgacatctggtccttgggctgtctgctgtacgagatggcagccctccagagccccttctatggagataagatgaatctcttctccctgtgccagangatcgagcagtgtgactaccccccactccccggggagcactactccgagaagttacgagaactggtcagcatgtgcatctgccctgacccccaccagagacctgacatcggatacgtgcaccaggtgg

SEQ ID NO: 6889 - DNA, 395 bp, Homo sapiens
aaatgaagaagatagcatttctaacctgaaattagggacattaaatggatctcaggaagaaatgtggcaaaaaacggaaactgtaaaacaagaaaatgctgcagttcagaagatggttgaaaatttccagaagaaccaactccacattcaaccaggttgtgttgaagaggttgtttatgagtcgcaccaaccggccgcctctgtccctttcccggatgatccggaagatgaagcttcctggccgggaaaacaagacggccgtggttgtggggaccataactgatgatgtgcgggttcaggaggtacccaaactgaaggtatgtgcactgcgcgtgaccagccgggcccgcagccgcatcctcagggcagggggcaagatcctcactttcgaccag

SEQ ID NO: 6890 - DNA, 307 bp, Homo sapiens; identical to SEQ ID NO: 96
  unsure (17): n=A,T,C or G
  unsure (135): n=A,T,C or G
  unsure (211): n=A,T,C or G
  unsure (216): n=A,T,C or G
  unsure (222): n=A,T,C or G
  unsure (237): n=A,T,C or G
  unsure (244): n=A,T,C or G
  unsure (260): n=A,T,C or G
  unsure (272): n=A,T,C or G
  unsure (288): n=A,T,C or G

SEQ ID NO: 6891 - DNA, 337 bp, Homo sapiens; identical to SEQ ID NO: 98
  unsure (17): n=A,T,C or G
  unsure (308): n=A,T,C or G
  unsure (320): n=A,T,C or G

SEQ ID NO: 6892 - DNA, 342 bp, Homo sapiens; identical to SEQ ID NO: 99
  unsure (96): n=A,T,C or G
  unsure (97): n=A,T,C or G
  unsure (112): n=A,T,C or G
  unsure (113): n=A,T,C or G
  unsure (128): n=A,T,C or G
  unsure (129): n=A,T,C or G
  unsure (139): n=A,T,C or G
  unsure (143): n=A,T,C or G
  unsure (151): n=A,T,C or G
  unsure (154): n=A,T,C or G
  unsure (155): n=A,T,C or G
  unsure (209): n=A,T,C or G
  unsure (250): n=A,T,C or G
  unsure (257): n=A,T,C or G
  unsure (272): n=A,T,C or G
  unsure (279): n=A,T,C or G
  unsure (285): n=A,T,C or G
  unsure (289): n=A,T,C or G
  unsure (320): n=A,T,C or G
  unsure (324): n=A,T,C or G

SEQ ID NO: 6893 - DNA, 366 bp, Homo sapiens; identical to SEQ ID NO: 100
  unsure (292): n=A,T,C or G
  unsure (332): n=A,T,C or G
  unsure (336): n=A,T,C or G
  unsure (352): n=A,T,C or G

SEQ ID NO: 6894 - DNA, 285 bp, Homo sapiens; identical to SEQ ID NO: 321

SEQ ID NO: 6895 - DNA, 260 bp, Homo sapiens; identical to SEQ ID NO: 548
  unsure (14): n=A,T,C or G
  unsure (247): n=A,T,C or G

SEQ ID NO: 6896 - DNA, 293 bp, Homo sapiens
  unsure (242): n=A,T,C or G
  unsure (243): n=A,T,C or G
  unsure (262): n=A,T,C or G
ttcaaagcaggcttgggtctccccacacactgcctgccaggacagtcctacaggatgagcaggggacccacagttcacggaggaggctctaggtcctggaagaataaagtgggtgatggaggggggtatagggatggaaatgagggatccaggggtcaaggccagattctaaactcagactccagagatcagagaagaaggaacacagcctgccctgggtatatggagaaattgaggctgtnnaggagaggggctgggccangacacctgtgaaaaggtgacttgggagggct

SEQ ID NO: 6897 - DNA, 305 bp, Homo sapiens
ctgcaggacatgtagagaaaccaaaccgggaaatcttacaaggagttgaaaagattaatgtcccaacctgatgagattacggccttgagacaataaggtggagcaacagaacaatgggaaagaggactgggagaggaatctaagaaccagatggcttcagctctctagaggagctgagcctattcacagtgcctaacctggaagcctgtgaggaacaggcctcaggcccttgccatgacctacttaggctacaatttcctttaaggcagcccctagctctgggaaggaatactggtagccagtgg

SEQ ID NO: 6898 - DNA, 571 bp, Homo sapiens; identical to SEQ ID NO: 97
  unsure (349): n=A,T,C or G
  unsure (470): n=A,T,C or G
  unsure (537): n=A,T,C or G

SEQ ID NO: 6899 - DNA, 131 bp, Homo sapiens; identical to SEQ ID NO: 101
  unsure (17): n=A,T,C or G
  unsure (31): n=A,T,C or G
  unsure (92): n=A,T,C or G

SEQ ID NO: 6900 - DNA, 330 bp, Homo sapiens; identical to SEQ ID NO: 102
  unsure (16): n=A,T,C or G
  unsure (36): n=A,T,C or G
  unsure (227): n=A,T,C or G
  unsure (244): n=A,T,C or G
  unsure (245): n=A,T,C or G
  unsure (250): n=A,T,C or G
  unsure (260): n=A,T,C or G

SEQ ID NO: 6901 - DNA, 192 bp, Homo sapiens
tctgaacacagaatctgaggagcacactgttcaaacagttgggacagacaggtccctgcaaaggctactgcctttttaaaacacatggggtggggatcatggacggcatggaaaggggagagaaggtgaggaaacaggcggcggggagagaatgagaagaggaacaggtatgcgctggggaagatggggcag

SEQ ID NO: 6902 - DNA, 369 bp, Homo sapiens; identical to SEQ ID NO: 103
  unsure (30): n=A,T,C or G
  unsure (38): n=A,T,C or G
  unsure (71): n=A,T,C or G
  unsure (72): n=A,T,C or G
  unsure (91): n=A,T,C or G
  unsure (92): n=A,T,C or G
  unsure (176): n=A,T,C or G
  unsure (205): n=A,T,C or G

SEQ ID NO: 6903 - DNA, 459 bp, Homo sapiens
  unsure (31): n=A,T,C or G
  unsure (35): n=A,T,C or G
  unsure (263): n=A,T,C or G
  unsure (311): n=A,T,C or G
aagctttttttttttttttttttttttttgnttgnacacagatgctttattttggatgttaatatgtcaacattgtatgcaagattctcttacaatgaagttttccatatatcacaaaactcaatttagtcagggtaattgctgtattaatgtgaaaaccttacaataaaatgcagtattatgtatgtgtagtcagtttccatgcaagtatggctgctacatgttatgtctggcatttgtataacatactggaagaaactcanaggaacaaaacagtataaaggtgacttaagatgcctgacatgtttaanataaaaaatcttgcaaaaagcaacaaagcagctaactgaaggattcaaccagtaccaacccaaatatgtattatgtccaataagcccagacttatccacaatatattaccatttaggataatttaatgctcaagaaaaaatatgcttt

SEQ ID NO: 6904 - DNA, 454 bp, Homo sapiens
gtttcttacccggtctgagtacgacaggggcgtgaatactttttctcccgaaggaagattatttcaagtggaatatgccattgaggctatcaagcttggttctacagccattgggatccagacatcagagggtgtgtgcctagctgtggagaagagaattacttccccactgatggagcccagcagcattgagaaaattgtagagattgatgctcacataggttgtgccatgagtgggctaattgctgatgctaagactttaattgataaagccagagtggagacacagaaccactggttcacctacaatgagacaatgacagtggagagtgtgacccaagctgtgtccaatctggctttgcagtttggagaagaagatgcggatccaggtgccatgtctcgtccctttggagtagcattattatttggaggagttgatgagaaaggaccccag

SEQ ID NO: 6905 - DNA, 479 bp, Homo sapiens
aaactgataagaaacaatgaataggaaaggaaacctgctaaaatctcttagaatttacacgattcttattctactacaagaaagcattatttggtacaaggtgtatttgtggatgtacatgaacagtatatatattatccggatcatgttgtgctatgtacaggtctttacaattcttcctgaaggttaaaacagttcattagaattcaaaatgcgtaatcatctgtaagttggcacttgttaggctcttgtcagcattgataactggcatgttttattgcagcccagttccagccagtgtttgccaacttgtacaacagaagtccagcaataggtgggtagagtgcaggaaaaacagtgccatgtttctcaattggagaccctgaaataagtgaagttactagctgctaaataaatgtcactcaaaagcagtctcttggctttttcttacacagcgggcaacttttcttttacctcgg

SEQ ID NO: 6906 - DNA, 305 bp, Homo sapiens
cctatccccttgccgatgcccacctcaccaagaagctactggacctcgttcagcagtcatgtaactataagcagcttcggaaaggagccaatgaggccaccaaaaccctcaacaggggcatctctgagttcatcgtgatggctgcagacgccgagccactggagatcattctgcacctgccgctgctgtgtgaagacaagaatgtgccctacgtgtttgtgcgctccaagcaggccctggggagagcctgtggggtctccaggcctgtcatcgcctgttctgtcaccatcaaagaaggctcgcag

SEQ ID NO: 6907 - DNA, 135 bp, Homo sapiens; identical to SEQ ID NO: 322

SEQ ID NO: 6908 - DNA, 487 bp, Homo sapiens
ctgttcctggggctgctcccacagactatgagactcagcagcccccaggcccaccccagcagcctgtgatgaccccaaacttcacctggtagccatggagttctctgcacccctcattcactcccctctggtcatttcctgagtctaacatgccctttgaggaaggcaggaggccgatccgtgaacagagagacactgggccccagaggtgacggggctccagggacagacacatctctgccctaagagactgtctcctttctggtgactgtcctgggagggttggattctggcacctcacccagtctcacccgtccctctgtgtccccatgtcctcatgacccagcacaggccacagagctgcagcctagacccagagccctctctgtgccctccattggtctccccttggggtgacctctgtgtcaccaggccgtgtggccctcccaggctggattggcatccagtcctcagcctagaccctcag

SEQ ID NO: 6909 - DNA, 299 bp, Homo sapiens
  unsure (123): n=A,T,C or G
  unsure (194): n=A,T,C or G
  unsure (198): n=A,T,C or G
  unsure (199): n=A,T,C or G
  unsure (264): n=A,T,C or G
  unsure (275): n=A,T,C or G
  unsure (291): n=A,T,C or G
ccttttttaagtgacctgtaactcatatcagtgaaaaagaacatgctataaaaagattccacaaagtgagagcattaagctcaaaggtcctgaggtaggtgtgtttgaggagctggtgtgtancggctgtataagaagtcaacctccttattttcaggtacatttattattattttaaccccaagcagaattgnctanntgggtccctcacctttacacaatagtcataggatttgactgttatcaaaaagtaaatccactctnagaggccatanatttcctattactgangttcttca

SEQ ID NO: 6910 - DNA, 254 bp, Homo sapiens; identical to SEQ ID NO: 104
  unsure (84): n=A,T,C or G
  unsure (90): n=A,T,C or G
  unsure (92): n=A,T,C or G

SEQ ID NO: 6911 - DNA, 373 bp, Homo sapiens; identical to SEQ ID NO: 107

SEQ ID NO: 6912 - DNA, 75 bp, Homo sapiens; identical to SEQ ID NO: 108
  unsure (44): n=A,T,C or G
  unsure (48): n=A,T,C or G

SEQ ID NO: 6913 - DNA, 485 bp, Homo sapiens; identical to SEQ ID NO: 109
  unsure (475): n=A,T,C or G

SEQ ID NO: 6914 - DNA, 265 bp, Homo sapiens
cctttgtgggatttacttgttgtccagcaagaaactgtaggagcttcctaatatctatgtgcacttcagccatgtgttccacgtttctgtcctcatgggtgctttcagaggctaatggaggatttccaagatctttaaactgaactcaaagaatgcaaaagcggcaagttcagacaaggcaagaacaggacctttagtccattttaagccataaatattacacaaaatatgcctctaactgaaactgagaggtataaaaacatat

SEQ ID NO: 6915 - DNA, 337 bp, Homo sapiens
cctggcaaggaacatggtgcatggtaggtggcagaagggacctctgtgctcagagctgtgcctcaggacccatcgttcagatgggaagactgaggttggggagatgtgtcttgggttaggaagctgggctcggggcaggggtcagcgcgggcatggcaggcacggtgaatgtgaacttctcagtctggacaaaggcaacgcccttctcatagtaggcagcctcgttaatgaacacggggtacaccgtggactctccctcatagagcaggtcctccccactgaacatctggaagatgggagcaccaggctgcagtggctggaagtctcggtcctgcag

SEQ ID NO: 6916 - DNA, 399 bp, Homo sapiens
tcagaatataaccctcatgcctggacccctgagagcttctgatcccagctattagggacagaagaagcctccaaatctggaaggtgctgaatgccctgctgactgggaaagtttcagggcactgatggggtctacctggtaagcggagggcctgaggaaacctgtagcttcaatcatgtctggtaaccgggtgcctgagccccaatctgggttgtgaggaaataggggagaggtatcctgggccacatcccagcctaacacctgtgaggttcattttaggaactaacctcattagctataaggatcatgcagaggcagcaaagccgggtgcgatgagctcagcctttactcattcacatacaccatcacactttaattccaatctgtatattgcttttt

SEQ ID NO: 6917 - DNA, 561 bp, Homo sapiens; identical to SEQ ID NO: 110
  unsure (456): n=A,T,C or G
  unsure (471): n=A,T,C or G

SEQ ID NO: 6918 - DNA, 340 bp, Homo sapiens
ccaacatggcaaaaccccgtctctactaaaaatacaaaaattagccagcgtggtggtgcatgcctgtaatcctagctactcgagaggctgaggcaggagaatcgcttgaacctgggaggcagagtttgcagtgagccgagatcgtgccattgtagtccagcctgggcgacagagtgagtgagacttcgtctcaaaaaaatagaaaaaatacatataaaataaaaataaatcaggaatgcaagatccaagtaactggactcccagtccagtgttcttggtcgagttgctctttgagctgttcaatcaaccaataattactgggagccaactatgtgttagg

SEQ ID NO: 6919 - DNA, 366 bp, Homo sapiens; identical to SEQ ID NO: 105
  unsure (146): n=A,T,C or G
  unsure (158): n=A,T,C or G
  unsure (352): n=A,T,C or G
  unsure (363): n=A,T,C or G

SEQ ID NO: 6920 - DNA, 485 bp, Homo sapiens; identical to SEQ ID NO: 106
  unsure (475): n=A,T,C or G

SEQ ID NO: 6921 - DNA, 255 bp, Homo sapiens; identical to SEQ ID NO: 111
  unsure (223): n=A,T,C or G
  unsure (249): n=A,T,C or G

SEQ ID NO: 6922 - DNA, 120 bp, Homo sapiens
ctggtgggagggagcatggatttggaggtggagaagtcactcctggtcctcggagggggtgggctgtgtgcctagttcagtgtgactcggggattggtgagggcggacaggtttctgagg

SEQ ID NO: 6923 - DNA, 433 bp, Homo sapiens
cctagagagtcacatgtctcagttcagaaatctatcgaagtggcagagctggaattcaaacacaagcagccgttctctgctattccaccctggtgtccaagcaacatggtagggcagaaggaagaggatcttacaaagagtaagggaaagggagaggggcagaggctgcttctcagagccaccaaaggacaaaataagacaggtgtgagcccagtggaggaggcacggggcagagaccagccactgttgctggcacgctggtgcacgtagcactgtggcagatggacctggagaggaagcaggagggacagcacaatggagccaagaaaggacttagcatggccgggcgcggtggttcatgcctgtaatcccagcattttgggaggccaaggtgggcagatcacctgaggtcaggagtttgagaccagcctgg

SEQ ID NO: 6924 - DNA, 98 bp, Homo sapiens
ctgatgatcgggaagaggatggctgctcccaggccgttccattggtgccactcacagaggaaaatgaggaagccatggaaaacgaacagtttcagcag

SEQ ID NO: 6925 - DNA, 365 bp, Homo sapiens; identical to SEQ ID NO: 112
  unsure (31): n=A,T,C or G
  unsure (38): n=A,T,C or G
  unsure (222): n=A,T,C or G
  unsure (229): n=A,T,C or G
  unsure (237): n=A,T,C or G
  unsure (250): n=A,T,C or G
  unsure (341): n=A,T,C or G

SEQ ID NO: 6926 - DNA, 517 bp, Homo sapiens
  unsure (14): n=A,T,C or G
  unsure (408): n=A,T,C or G
  unsure (479): n=A,T,C or G
  unsure (504): n=A,T,C or G
cctggagaacatangtgagttgctcaagacccagcacaagcatccatgattcctgtaataaggcttccctctgctgttttcactgcagccttaccaagtatggttgggtgtgcaaagtttacattttaaggacctctgctgctgccactgtcattgtggttaatgatggctttaaggtttattcttattcccgtatctttgagagaggaagagagtgggattgctacccacattttaatgaaggtggagctgagccgtagaactctctgggagccatccaacctggctgtggctcataacaaggcccagagcaggggctgttgccgaaaggctgtggagcaacaagttgacatctgacctgacatttgcctatgaacgtttgtcacacttccgctgtgagttgctgangcgaggtgtccaggcccaacccctcaatgtaggcttctgtgagcaggagtttgaacagacctgagccccangcaccgaggagggtgctggctgtangtgaatggtagtg

SEQ ID NO: 6927 - DNA, 525 bp, Homo sapiens
ctgacccctttcccgcgcactgaaagggcagagggtgaggcagtctggcccttggacccttcggccagaaattctcccttgcctccttgattgaggtgtcccagatgtagtattcccacaggggtctggcaggcccctcctgtaaccactccagtcacattttctgctcttgaggcagaggtgacatcaggacgtttacagcctccacatgaattgagtgttcatttacctcagtattaccgtgttcatttttgtcctcgtgctacagttagctccctgccgcctcttgcaggtcttacttcagctcttgcctgtgacccacacagcttctgggctctgcctctgctctaagaagtgctgtgggggtagagaaccaggaaggacatgctgttgggaatgtacacctgggcagaggtggccctgttaagatgtgactgtagccacagccagggatgggatccctgggtctctggaatctgaaacctcaacaaataccagtcttgacccctagcagcagagataaga

SEQ ID NO: 6928 - DNA, 341 bp, Homo sapiens
cgcagggtgatgtgggcctggccatgggcaagctctacggcaacgacttcagccagacgaccatttcccgcttcgaggccctcaacctgagcttcaagaacatgtgcaaactcaagcccctcctggagaagtggctcaacgatgcagagactatgtctgtggactcaagcctgcccagccccaaccagctgagcagccccagcctgggtttcgacggcctgcccggccggagacgcaagaagaggaccagcatcgagacaaacgtccgcttcgccttagagaagagttttctagcgaaccagaagcctacctcagaggagatcctgctgatcgccgagcag

SEQ ID NO: 6929 - DNA, 192 bp, Homo sapiens
cctaagcataatataatagattctggggattcagtggaagagtgagagtggggtgatggataaagtactacacactgggttcagtgtacactgctctggcaacgagtgcaccaaaatctcggaaattactgctaaagaagttactcatgtaaccaaacaccacctggtccccaaaactactgaaattttttt

SEQ ID NO: 6930 - DNA, 94 bp, Homo sapiens; identical to SEQ ID NO: 114
  unsure (14): n=A,T,C or G
  unsure (78): n=A,T,C or G
  unsure (87): n=A,T,C or G

SEQ ID NO: 6931 - DNA, 369 bp, Homo sapiens
ccactctgtctgcaagatgttttagtggaatgttgtagccaaagttagatctgaagttggaagcttcttctcttgctatgtctgctaaagaacgagcatctgccaacaaacctgctactgccattccaacatgccgatcaacattaaaaagtcttttgttggaaccttcttcataaagtttagaaaggactaatttttctaccccaaagacaacaccatctttgcatctgattccaatagctgtactactattttccacagccttcatagcatattcaacttgaaaaactcttccgtcaggagagaatgtagaggctgacaggtcatacccagtgccgattgagctcatcgtgctaaacccaaagggac

SEQ ID NO: 6932 - DNA, 297 bp, Homo sapiens; identical to SEQ ID NO: 323

SEQ ID NO: 6933 - DNA, 563 bp, Homo sapiens
  unsure (403): n=A,T,C or G
  unsure (533): n=A,T,C or G
ccacacattctctaagaagtcagcactttcctggactgggcacttgtggctagaagggtatgcactacttgctaatttctaaaacctcaaaccttaattttcccccatcttaaaatgggaatcagcttctggaaaagctaataactgtttacaattgtcagacttctaaaaagtgctaatttgttcccttaacagagcaaatgatgagagacaccattttcctgcagattaaaaacaatatataaacatatgattcaacgatgtcaacagctttcagtctatgaatcttgtccaggtcactttgggtcacttggttctttcatcagaacatgttcaagatttctgacattcctttttccgaactttcgattttggtgcatttggattttcttgtttgtagaangtctttaacatttccactgcttcctcagcccgatatccagggatacactgaaatggtcccccagtgtttggtaggtcagcagaggcaatatttagaacagagccacaaccaccaaatcgttcattctganagccatatacaaccagcgggattttcatca

SEQ ID NO: 6934 - DNA, 66 bp, Homo sapiens; identical to SEQ ID NO: 113
  unsure (12): n=A,T,C or G
  unsure (31): n=A,T,C or G

SEQ ID NO: 6935 - DNA, 491 bp, Homo sapiens
  unsure (370): n=A,T,C or G
  unsure (478): n=A,T,C or G
ctggcagctcacattttacattagagagtggggtccccacattttacattacagagcggggtccctgagctgcaggaggagagcctgcagggctcttgggtagaattgcacttttgcaataagggaaacgggagcaatgtttcagcctcagtttctatttataatactgacacaaaaagaatattgctggatacatagcatggatctagatagagcagctccaggagttctcacggtgacagcccccctcactcacagacaccatgtgatactaatagggcttagacacaaagcactgaattcccaaagcattgaaggagaaagacagctctcagtctgagtaaaaccgtattgagagaagaaaagaggntgaaagaatcttaaaagacaaattcagattacatgtaacattggtcaaattgaccagaaaatattcttccaaaagaagttcttctctaaaacaccaaaagtgcacagntactctcagcatg

SEQ ID NO: 6936 - DNA, 386 bp, Homo sapiens; identical to SEQ ID NO: 115
  unsure (260): n=A,T,C or G
  unsure (261): n=A,T,C or G
  unsure (285): n=A,T,C or G
  unsure (352): n=A,T,C or G

SEQ ID NO: 6937 - DNA, 365 bp, Homo sapiens
cctatttaagggttcccagcagaatgggccattgtccgcctctccagttgcatgactggagtttgatggccttttgttctttctgagctgtagctggagcttgcttgttggttcacaggaacaagcaaggttcatctaaactgtaggcaaaaacttaaaaacaactagtgagtttagaatttaatggcaaatgtatgataagttttgaaacacaatttctttctctctagtcctcatttttggaaaaaacaaacaaaaaaacataaatcatgataggactgagttgtttgcaaaatagattgtagtcttacacttggtctgattatttgcataaagtgcaagaggaataattatttctacatagg

SEQ ID NO: 6938 - DNA, 511 bp, Homo sapiens; identical to SEQ ID NO: 470

SEQ ID NO: 6939 - DNA, 308 bp, Homo sapiens; identical to SEQ ID NO: 117
  unsure (17): n=A,T,C or G
  unsure (31): n=A,T,C or G
  unsure (32): n=A,T,C or G
  unsure (182): n=A,T,C or G
  unsure (227): n=A,T,C or G
  unsure (229): n=A,T,C or G
  unsure (237): n=A,T,C or G
  unsure (260): n=A,T,C or G
  unsure (285): n=A,T,C or G
  unsure (288): n=A,T,C or G

SEQ ID NO: 6940 - DNA, 203 bp, Homo sapiens; identical to SEQ ID NO: 118
  unsure (15): n=A,T,C or G
  unsure (16): n=A,T,C or G
  unsure (17): n=A,T,C or G
  unsure (193): n=A,T,C or G

SEQ ID NO: 6941 - DNA, 293 bp, Homo sapiens; identical to SEQ ID NO: 119
  unsure (235): n=A,T,C or G
  unsure (243): n=A,T,C or G
  unsure (250): n=A,T,C or G
  unsure (257): n=A,T,C or G
  unsure (259): n=A,T,C or G
  unsure (260): n=A,T,C or G
  unsure (273): n=A,T,C or G

SEQ ID NO: 6942 - DNA, 436 bp, Homo sapiens
  unsure (245): n=A,T,C or G
  unsure (343): n=A,T,C or G
ctggaaaaggccaaagagagtcttaagaacgtggatgagaacattcgcaagctcaccgggcgggatccgaatgacgtgaggcccatccaagccagattgctggccctttctggtcctggtggaggtagaggacgtggtagtttattactgaggcgtggattctcagatagtggaggaggacccccagccaaacagagagaccttgaaggggcagtcagtaggctgggcggggagcgtcggaccanaagagaatcacgccaggaaagcgacccggaggatgatgatgttaaaaagccagcattgcagtcttcagttgtagctacctccaaagagcgcacacgtnggagaccttatccaggatcaaaatatggatgaaaagggaaagcaaaggaaccggcgaatatttggcttgttgatgggtacccttcaaaaatct

SEQ ID NO: 6943 - DNA, 266 bp, Homo sapiens; identical to SEQ ID NO: 120
  unsure (131): n=A,T,C or G
  unsure (205): n=A,T,C or G
  unsure (211): n=A,T,C or G
  unsure (249): n=A,T,C or G
  unsure (250): n=A,T,C or G

SEQ ID NO: 6944 - DNA, 335 bp, Homo sapiens
aaaagaaaaaaaaaaaaaaaaacaaacccacatgatttcaaggagtctggcattcctgaatccttcttccctgccaggtgcctgtcacctgtcttcactgcctccttttccctgtcatgctcatcagcttatggcttctgtctaagcacctgaacagaggactgaaacctccactgcaggctggttttaggtcttgaattatgtaagaatcttgcacagcactgctaatgtaaatttcagttgtttttccctctaggacaaacacttaccaaaatatgcaacttttttttggtgggaagagagattgtcctgtgatttctacccatttcctgagg

SEQ ID NO: 6945 - DNA, 188 bp, Homo sapiens; identical to SEQ ID NO: 116
  unsure (90): n=A,T,C or G
  unsure (122): n=A,T,C or G
  unsure (167): n=A,T,C or G
  unsure (177): n=A,T,C or G

SEQ ID NO: 6946 - DNA, 193 bp, Homo sapiens
cctaactcagggtcccgaccctcaagggcacagagagcagagcctacgatgactggggtctcctcccctttatagccaaactcggtgagcagctcccggatctccagttccaccagttccaccatctcagagtcctggacagcgtcagccttgttcacatacaccaccacatgctccaccccaatctgtctgg

SEQ ID NO: 6947 - DNA, 268 bp, Homo sapiens
cctagagaacgagctgctcatcatgtttctaatataatttctggggtgaaatgaatgatttccttactggcttagagaaaaccaaggtcaataaaatgcagattgacttaactattagaaaagatgggatgacttctgggaaccacttaactcttcaaatgactgttgaaagagaaaaagcaaaactgaaatcccaccagaccattttgtgtgcctgtttctaatcgatacaaagttaagcatgagctaaaatcagacaaagcacttt

SEQ ID NO: 6948 - DNA, 282 bp, Homo sapiens
cctgggccagcttgggcaagccaagatcagatgtctctgtgttcgggaaggtctccgtgtgggaaagcccttgggggatcccgggtgaggagtgttgccccatccagagaatgaatgagttcctttaagtgccaccgccagcaagcccagaggcacacagtccgagtgcacccgcttagcctttacattcctctccaccgacaaaaggaaggggaaactcaatcagcaggacttcagaaagggccttgtgtttatagctttgtcaagtaaatttggacgcag

SEQ ID NO: 6949 - DNA, 345 bp, Homo sapiens
aaaagctagtaagaattgaaatttagcatcacagttcttgaccagaatataattacagctacccctaatgtgagggtagggacagcgatgtgtgttatatccccagcatctagcagtgtcacagaagagacaaagacatttttctggtatgcatgagtataagaatggtttgcctaaataagactgtcctcatggctctgtgactgtgcctcttgtcaggtgtatgagtttagagtcaaagaatctagcatcatagctccagctcccgctgaggatgtggatactcctccaaggaaaaagaagaggaaacaccggttgtgggctgcacactgcagaaagatacag

SEQ ID NO: 6950 - DNA, 521 bp, Homo sapiens
cctcaggaatagtacggaatgcccgaagaaaattattgccctggcaagggtcaccacgagagaggtccaacatgtgaaacaggaagcccagctcacatgccagacagaactccttctggcaaaggtggttttgaattagacagcgtacaggctccaggaaatagagcacctggatcatgcagttacagtaggcgttgggaatgtggggctctaatccagcaaacaaggtcttattgtagtgtttgaagtcaaagtcctccagccctagcttggaatatttgatggtcaccttgcggtatttcttagaaaccatgtggagatgtggttcctcttctcgtcctactggtgactcagtgacctggctgaagctgtcaaattcactgtctgactccttgagtctgtagggtatctgattgcgcagcctggtgcggggattgggcgcatagccaatgaagcccaccttcttcatggtgcgcagaatctctgcatccacgggtggtgctcgcctgggagctggagca

SEQ ID NO: 6951 - DNA, 425 bp, Homo sapiens
ctgttacttcacagctctgacctcagttttctcatctctaactaggtcaccggcacttccctcagggtttgtgagagttaaatgaagtcaagtgcggaacacccagcacaggccctggtgcatcgggaacgaatctgctctgggtgcaccctcacctcacagccagccacatgtgcaagggaagctttcagaatgtccttgagtaagggtgccagcagccctttcttgatcctgaccaggtcctcaagggagaacaggtggagctcatcagtcaagtgtcccggcacctgctcgaactcctttaatgcactgccagagaggaaacaaagaggaattcagaaacccacccacacagaggacagggaagaatggggccagttgttttctcttggcactcacacttaattttttttttaactcaattt

SEQ ID NO: 6952 - DNA, 373 bp, Homo sapiens
aaaactaaaaaaatcaaaacacttcattgtgaaggtacagaaataaacagtgatgatgagcaagaatcaaaagaagttgaagagactgctacagctaagaatgttctgaaactcctttctgatttcttagatagtgaggtatctgaacttaggactggagctgcagaaggactagccaagctgatgttctctgggcttttggtcagcagcaggattctttctcgtcttattttgttatggtacaatcctgtgactgaagaggatgttcaacttcgacattgcctaggcgtgttcttccccgtgtttgcttatgcaagcaggactaatcaggaatgctttgaagaagcttttcttccaaccctgcaaacactgg

SEQ ID NO: 6953 - DNA, 210 bp, Homo sapiens; identical to SEQ ID NO: 121
  unsure (14): n=A,T,C or G
  unsure (182): n=A,T,C or G

SEQ ID NO: 6954 - DNA, 310 bp, Homo sapiens
aaagtacttttaagaaaaaaagcagggccttggaagttttggttcttttttcctcccctgttgcaaattctcatggtttgggttgggtggtggagagcgcgtgtcatctgcgggtggcactgcccacggtgggcgggcgggcctctctactcgaaggtgaccacgtttagattctgagacgggaagtggagggtgaataggtcacggcggcctttttttttttagtttaacttttccttttttgctgtctagtcatcctcgtcggtcttctgcttcttggtatcgacatcgtcatcctcatcatcttcag

SEQ ID NO: 6955 - DNA, 292 bp, Homo sapiens; identical to SEQ ID NO: 122

SEQ ID NO: 6956 - DNA, 400 bp, Homo sapiens
ctgggtttatccaaaccaataaataatgctacattagaatcctgagccagggactgtgatggtgttagacaatccatgatgtccacaagttaataaagaccccactttaagaacaaaatatggctgggagcggtggctcatgcctgtaatcccagcactttgggaggctgaggcagtggatcatgagttcaggagattgagaccatctggccgacatggtaaaaccccgtatctactaaaaatacaaaaattagctgggcatggtggcatgtgtctgtcgtcccagctactcaggaggctgaggcaggagaatcgcttgaacctaggagatggaggttgcagtgagccaagattgcagcactgcactccagcctgggaaacacagcgagtccccgtcttt

SEQ ID NO: 6957 - DNA, 550 bp, Homo sapiens
  unsure (528): n=A,T,C or G
ccagtctctcagaaatgtcctctgaactggcactcaattttgtagcacataatccttttccagttttctctaaatggactgtgcactcaggggaactgttctctgtggtttccagatagttgttgggaacagatgcctgcaagaagctgtcctgttgaccatccaaagtgtcttctacgcccaactggatggcttcggcaatttccacctcatctgcaatagccatcaaacggcgacgcatcctggtgaagtgagtggaactggaaacactcagcatttctaacagttttgaaaacacatggggtactgtagtaaccattcttgcagaactcaagtagatccttctggaaagtttgccaaccattgagtgggaattatcaatggactgcaaagcaaaggttaagagggacagcagcttcttatacctgatttcaacaggctcagcttgtgaaacatcagtactgacaatatgaggataaaattcagcaggaaattccaacaacagtctatctataagacaaaggcggncaagaagttcttgccaattgtt

SEQ ID NO: 6958 - DNA, 357 bp, Homo sapiens
  unsure (167): n=A,T,C or G
  unsure (276): n=A,T,C or G
  unsure (303): n=A,T,C or G
  unsure (310): n=A,T,C or G
  unsure (339): n=A,T,C or G
aaattttgaacttgtttcaatcaagttgtagccaaaacaaaaaggtcataattactgtgctcatataagagatgtgacgagggaaggagggagggagaaatgcaggaaaggagtggggagaggaggaagggaggaagagagggaggaaagagtaaggtacacatcangttaaaaggggcagaattaggaataaaactaagcacttaatctaatctgatcaggaagaaactttgccctttattcagattttattgcatttcataatcacagaaaaanaacatccaactttattcttaaatgtgnctcaagntaaaaatggcaggaatgaatagcccttanttagcacacactattttt

SEQ ID NO: 6959 - DNA, 413 bp, Homo sapiens; identical to SEQ ID NO: 324
  unsure (11): n=A,T,C or G
  unsure (16): n=A,T,C or G
  unsure (17): n=A,T,C or G
  unsure (368): n=A,T,C or G
  unsure (387): n=A,T,C or G

SEQ ID NO: 6960 - DNA, 537 bp, Homo sapiens
  unsure (485): n=A,T,C or G
  unsure (497): n=A,T,C or G
  unsure (500): n=A,T,C or G
  unsure (510): n=A,T,C or G
cctctggccggagctgcctggtcccagagtggctgcaccacttccagggtttattccctggtgccaccagccttcctgtgggccccttagcaatgtcttaggaaaggagatcaacattttcaaattagatgtttcaactgtgctcctgttttgtcttgaaagtggcaccagaggtgcttctgcctgtgcagcgggtgctgctggtaacagtggctgcttctctctctctctctcttttttgggggctcatttttgctgttttgattcccgggcttaccaggtgagaagtgagggaggaagaaggcagtgtcccttttgctagagctgacagctttgttcgcgtgggcagagccttccacagtgaatgtgtctggacctcatgttgttgaggctgtcacagtcctgagtgtggacttggcaggtgcctgttgaatctgagctgcaggttccttatctgtcacacctgtgcctcctcagaggacagntttttttgttgntgngtttttttgnttttttttttttggtagatgcatgact

SEQ ID NO: 6961 - DNA, 507 bp, Homo sapiens
ccttgctgcagggtgtgacagtgagcgattccatgcctgtgcgggggttgtagctcttctgcttacagaaccctggatccagcacataaatgatgccctcaatggtgagtgatgtctcagcaatgttcgttgccacaaccacctttcgtgccccaggtggtgtgggctggaagatacgggcccgcatgtcagagggcagattggcataaatgggcagcaccaggagctcccggattttggagcccaggcggcggcagcgatcctggagcatctcacaggcagcctcaatctcctcctggatagagggtagggagagcagcaggggtcccagagtcacagaaggccaacatgccggccctgtcttcccctgggatacatcatcccctctccccaccatgtcaggcacctgtcctgtcaggaacaccaggatatccccagggggctgggtcacatggatctgcaacacagatactacacaagcttccaagtagtcagcctctggagcct

SEQ ID NO: 6962 - DNA, 243 bp, Homo sapiens; identical to SEQ ID NO: 622

SEQ ID NO: 6963 - DNA, 371 bp, Homo sapiens
aaaaacagatgcagacacaagggagaaagccatgtgcaggcaaatgtggagactgaagaatgcagccatgagccaaaaacaccaaagagtcaccagaaactaggagagaaatgtggcgtgggttctccagacacagagaaaggatcttacagagaagaaaagattatgacagggaaacttatctgccaaataatattagtagctaagatttctgagctcttatataccaggcaatattctaagcagattacatgtactgcatctttattttattttatttttttaattttgagctcttgctacattatccaggctggtctcaaactcttggggctcaagggatccacccacctcagcctcctgagtagctg

SEQ ID NO: 6964 - DNA, 453 bp, Homo sapiens; identical to SEQ ID NO: 636

SEQ ID NO: 6965 - DNA, 324 bp, Homo sapiens
aaatgacgctgatcttaagtctgaaataaatggaaagcagaaaaggtgagccagttgatttgaatgcattggatattagtgttagaaacaatgtatagtttagattgaaactgaactgacttatttagcacttaaacaaaaatttgacaatgtttttagttttttttaagacagcttagtgtggtgatacttagaattctatggtttgatgtttcttttagaaatgagaagtatagttttattttttaatataaaaaatggttttaatactaaaactagtaatttgatactagttgtttataaacattgtaaaatatatctttt

SEQ ID NO: 6966 - DNA, 364 bp, Homo sapiens
cagagtctcgctcggtcacccaggctggagtgcagtggcgtgatctcggctcactgcaagctccacctcctgggttcaggccattctcctgcctcagcctcccaaatagctgggattacaggtgcccaccaccacactggctaatttttgtatttttagtagagacagggtttcacaatgttggtcaggctggtctcgaactcctgacctcaagtgatctgcccacctcagcctcccaaagtgctgggattacaggcatgagccaccaaatctggcccaaattgagtttaataaagagcttgagtgatgctcagattagggagggagtgaccgggaatgctggggtctggaactgggggcccgg

SEQ ID NO: 6967 - DNA, 299 bp, Homo sapiens
cctttctccatggggcctggaggagatgcattagtctccgggtaaccggcaggaagggcctccacagtgggagcagccggatgcagcctggtcccggggcctgagctgggattgggcagggtcagggctcctcctctcttccagggcagatgtctgagtgagggacagaggctggttctgatgaggggccctgcagtgtccttagggacgttgcccagtgactcctggggtcaaggacagaggctgctggggtgggcctgggagctgctgagtctcatagtctaggggagcagccccaa

SEQ ID NO: 6968 - DNA, 474 bp, Homo sapiens; identical to SEQ ID NO: 123
  unsure (374): n=A,T,C or G

SEQ ID NO: 6969 - DNA, 215 bp, Homo sapiens; identical to SEQ ID NO: 637

SEQ ID NO: 6970 - DNA, 318 bp, Homo sapiens
ctttggaagaagggaaggtaaaacttacactcagtactgattgctacccttttctcatggatatggaagcagacaagtagagtttgatttgatttgcctctatgctaaatgtttttcttcttaaattcagaagcaattgcaagaactttctcgatacatatggcccctctgataaaggcagggggaagaactgccttccagtgaacactccccaaagcaggatccagaatgctgcaaagaggagcccagccacctatggtcattctcagaagaagcacaaatgctcagtgtattacagtaaacacaaaaccagcacag

SEQ ID NO: 6971 - DNA, 160 bp, Homo sapiens; identical to SEQ ID NO: 126
  unsure (96): n=A,T,C or G
  unsure (151): n=A,T,C or G
  unsure (152): n=A,T,C or G

SEQ ID NO: 6972 - DNA, 125 bp, Homo sapiens
  unsure (99): n=A,T,C or G
ccgagggggaagaggtttgttaatacgttcgccatgtgctacgatcttgggacgaactgagccacgagcgtggctttgagggccgtccgaacgctgcangccggccaggtccctgggcgtccagg

SEQ ID NO: 6973 - DNA, 286 bp, Homo sapiens
  unsure (16): n=A,T,C or G
  unsure (17): n=A,T,C or G
  unsure (252): n=A,T,C or G
aaaaagcatttagatnnagagattgaaaagagcgaggcatctaaggctggggggtggggaaggaaaagctgtggagcactacccctcccccaggccacaaaagtcaagggatgtctcttccactggtagcctcaccacacagcttactgaaatcaacaatgttaaatatttagcttcacaaactctgtaaaaatgagttgttgtgacctacaaaaaaggtatatacatattttacataatacaatatcttanaggtcatattttacaaaaaaatctattcacagaa

SEQ ID NO: 6974 - DNA, 562 bp, Homo sapiens; identical to SEQ ID NO: 471
  unsure (343): n=A,T,C or G
  unsure (542): n=A,T,C or G

SEQ ID NO: 6975 - DNA, 445 bp, Homo sapiens
cctggggacatcgcagaatgccttcccctcattgtattgccctctgtcctagacatcctagcatgacacaagatactattaacatcctacagagaaaaagaaaaacacccaggtcacactctaagagtttatgatggcaaccatcctcaggtttttccaaatctgattttattccccaaggcaatttattcacattggaagatacccattgtgatggggccagcaactttcatcttagcagcagcttgtatttaatacatttgtatttaagacatgtgcagaggatttttgaaacagaatttaatataatagtaatataaattcaacacttgtttctcatataaagaaagcaaacatttagccttttattaagttactgaagaaaattttcttaactcagtgaagaatatctccccaaatttacagcaaccttcatatttacctc

SEQ ID NO: 6976 - DNA, 388 bp, Homo sapiens
ccaaatctggatttaagttcaactcagccagaatccaaagcagcttcttttagattcactatgccacatcccaccaaacccaacccagcacattgtattaggaaaaatcctaaaacttttgattaaatggtaaaaggaagtaactacctggagaaaataaggcttccgctaccttccgtcctccctcccagggcttggcaaaaagagatcttgagcatgaggaaggaacagcttcttcagaaacaggaattagctgtatgttggcttctgcataccctcttaagattcaatatggggcaggacacagtggctcacccctgtaatcccagcacttcgggaggccgaggcatgtggatcacttgaggccaggagttcgagaccagcctgg

SEQ ID NO: 6977 - DNA, 434 bp, Homo sapiens
  unsure (259): n=A,T,C or G
  unsure (417): n=A,T,C or G
cctggaaaacattctccaaaaagaagctgcaacatgtgtggacaatgggcttttcatgcctctcttactgtctcttactgtctattgacctggtgcaagaaacatgctctggtgatggctgtgagggaggaatcaccaccattccccccgactcatattacagatggggaaaccgagacacacattcaacaaagcgcgcatcacatggggagttcagggttagcctggagtacgaacacacgttctccccatggcccantcagcggcccacctggcctcttcccctccctttagtaaccccatcagcagcagcataaaaatctaacccttcattttgctgaaagcccctgcagatgacagtttccttcctatcatgtctgcagagctccaaggctgggggcgatgttgaggccgaanccagccacagtgcctca

SEQ ID NO: 6978 - DNA, 200 bp, Homo sapiens; identical to SEQ ID NO: 124
  unsure (96): n=A,T,C or G
  unsure (97): n=A,T,C or G

SEQ ID NO: 6979 - DNA, 552 bp, Homo sapiens
aaaccaaagcatttttttatagtttctagctaggtttatagaaactagtggagctatgggcagtcagttaaaaacaggccatagatagcataatgaattataacacccctgtccaagtcctatagagaaaaaaaaaatccctacttttgactacagttacacagcagatcccaaagagctttgtagtagtttaacgtactacaacttatcagaaagatgaggcacttgacagttacattaaggagctaaagtcaatacggcagttgtagatttgctaatgccactgtatttttctgctcatagcatggacccattcatatgactaatttaggtacaggcttctccagtcagaatgagattgaaggtgcaggatcgaagccagcaagttcctcaggcaaagagagagagagggacaggcagttgatgcctccaccagcctttccagtgactggaataaaaacagagtccgatgtaaggaatgggtctgggaccttaacagggagccatggtgagtgtgatatagctgggggaacaggggagtggctaagactg

SEQ ID NO: 6980 - DNA, 155 bp, Homo sapiens; identical to SEQ ID NO: 125
  unsure (11): n=A,T,C or G

SEQ ID NO: 6981 - DNA, 201 bp, Homo sapiens; identical to SEQ ID NO: 127
  unsure (96): n=A,T,C or G
  unsure (97): n=A,T,C or G
  unsure (123): n=A,T,C or G
  unsure (133): n=A,T,C or G
  unsure (163): n=A,T,C or G
  unsure (167): n=A,T,C or G

SEQ ID NO: 6982 - DNA, 198 bp, Homo sapiens; identical to SEQ ID NO: 128
  unsure (13): n=A,T,C or G
  unsure (14): n=A,T,C or G
  unsure (17): n=A,T,C or G
  unsure (44): n=A,T,C or G
  unsure (174): n=A,T,C or G
  unsure (183): n=A,T,C or G

SEQ ID NO: 6983 - DNA, 177 bp, Homo sapiens
  unsure (14): n=A,T,C or G
aaaaaatgatgttngaagtgaaaaaaaaaggatattcagggtcaaatcatgtacattacagatattatctaaattcttctagaatttatttttcatgaaatattgatgtattttaatctatgttaaaatatcttcaatgaggaaaatgtcacagaataaatttatattacacatttt

SEQ ID NO: 6984 - DNA, 259 bp, Homo sapiens
ccacctttttgataaagaccagcaccaagaggatggcaaacaggatcccgaagatgatggggatcaccaccagggctctcagccgatcctggggacctggagaaatcaggacttcagcatgcacccctcacctgcagtttctccctaccctcaacctgccgtgacttgtcagactccagaatcttccaatgtcagagctcatctacatcagaaggttcaaaccgcggtccttggggaaatgcggctggcagatgtcttt

SEQ ID NO: 6985 - DNA, 485 bp, Homo sapiens; identical to SEQ ID NO: 129
  unsure (14): n=A,T,C or G

SEQ ID NO: 6986 - DNA, 77 bp, Homo sapiens; identical to SEQ ID NO: 130
  unsure (14): n=A,T,C or G

SEQ ID NO: 6987 - DNA, 161 bp, Homo sapiens; identical to SEQ ID NO: 131
  unsure (14): n=A,T,C or G

SEQ ID NO: 6988 - DNA, 285 bp, Homo sapiens
ctgctccctcctcccccaggggcctggcctcttacaagggattgcgtgacagcgtacacagccttctccatggagatgacatgcaaccctctgcaacatacagggacccagaagtctcggcccccagcccccttcctctctaagactcaagaatctgggctctcagccagatgtggtagctcacgcctgtaatcccagcactttgggaggctgagatgggtggatcacgtgatgtcaggagttcgagaccagcctgggcagcacagtgagatcctgtctctattt

SEQ ID NO: 6989 - DNA, 470 bp, Homo sapiens
ccttggagactcacgagttttgagagcaaaatgacaacacccagaaattcagtaaatgggactttcccggcagagccaatgaaaggccctattgctatgcaatctggtccaaaaccactcttcaggagggtgtcttcactggtgggccccacgcaaagcttcttcatgagggaatctaagactttgggggctgttcagattatgaatgggctcttccacattgccctggggggtcttctgatgatcccagcagggatctatgcacccatctgtgtgactgtgtggtaccctctctggggaggcattatgtatattatttccggatcactcctggcagcaacggagaaaaactccaggaagtgtttggtcaaaggaaaaatgataatgaattcattgagcctctttgctgccatttctggaatgattctttcaatcatggacatacttaatattaaaatttcccatttttt

SEQ ID NO: 6990 - DNA, 577 bp, Homo sapiens
  unsure (400): n=A,T,C or G
  unsure (544): n=A,T,C or G
  unsure (564): n=A,T,C or G
ccacaagaaagacctacaaagaccacatgggaggaaaaagaaacatctgtaaagactgaatgcgtggcaggagtaacatctaataaaattgaagttttggaagaaggaacagctaagatgatcacatgtcctacaaagacagctacaaaagcaagtacaaatggtaagatgcttgagtgaactttgtagagtttattggcactttgggttccctagtggaaatagtgtggtacaggagtagtcaggaatggcttgaatgtctagataaggcaagcttaggcaacacattttaatagtgtagaaacgagtagatgttattctgtaggccctggaaaaattcccagaatacttctggctgtaaatattagatgaaaataactaacaattgctaaaaccatanaaaccaaagttgttttggtggtacagggatattataagttctcactccccctcccccattattagttatgctatcagcaagtgtttttgttcatgtctcctttcttggttggctaaattagcaacagctccaatcatcatgctnactcaagacaatatctgaangctgggagtgctg

SEQ ID NO: 6991 - DNA, 482 bp, Homo sapiens
ctggacaacccgtacatcgtgcggatgatcgggatatgcgaggccgagtcctggatgctggttatggagatggcagaacttggtcccctcaataagtatttgcagcagaacagacatgtcaaggataagaacatcatagaactggttcatcaggtttccatgggcatgaagtacttggaggagagcaattttgtgcacagagatctggctgcaagaaatgtgttgctagttacccaacattacgccaagatcagtgatttcggactttccaaagcactgcgtgctgatgaaaactactacaaggcccagacccatggaaagtggcctgtcaagtggtacgctccggaatgcatcaactactacaagttctccagcaaaagcgatgtctggagctttggagtgttgatgtgggaagcattctcctatgggcagaaggccatatcgagggatgaaaggaagtgaagtcaccgctatgttagaga

SEQ ID NO: 6992 - DNA, 314 bp, Homo sapiens
ctgttgttagttatatagcagtacaggacatatgtaatcttgttgagatgtgtcttctaaagacacatttctgagtagctcaaacatatcaggaaagttggttctgtgtacttttgttaatcattgttttgattcaaacttaagtaatcttagatgttgatttggtttttattgtatttcctttcctaattaggacttaaccaccaccatgtcgagcaaaagaacaaagaccaagaccaagaagcgccctcagcgtgcaacatccaatgtgtttgctatgtttgaccagtcacagattcaggagttcaaagagg

SEQ ID NO: 6993 - DNA, 294 bp, Homo sapiens; identical to SEQ ID NO: 132
  unsure (234): n=A,T,C or G
  unsure (236): n=A,T,C or G
  unsure (237): n=A,T,C or G
  unsure (249): n=A,T,C or G
  unsure (253): n=A,T,C or G
  unsure (266): n=A,T,C or G
  unsure (278): n=A,T,C or G

SEQ ID NO: 6994 - DNA, 483 bp, Homo sapiens
  unsure (160): n=A,T,C or G
  unsure (387): n=A,T,C or G
  unsure (465): n=A,T,C or G
aaaataggtgtcctgataacttccaggatattattcggaacacccgtttccccaactacgataagtccattgccggatgctgaataaacttcgcccattaccacttggatttcttgatagtcttatgtttccatcatccatcgtaatgtgttcagctcancttcctagaaacattgaacaacggtttagaaattttgcccaataacccggcaccctctaggtttttaacagtgaatgttacttgtgcaagtcaggaatctgataccaattaaatggtgacagctttgccaataaacaaggatatgctcttccatggctaggaagggagactgccacggctgacaggtcccaaagatacatggagattcacaatccagaattaaccancaaccaaactgctacaggttattactcaccatctggctcaaactgacagttctcggggtgctagggcacaagagcganagagtagactcaagatgg

SEQ ID NO: 6995 - DNA, 270 bp, Homo sapiens
cggaggtggtcaaggctaaagccggagcaggctctgccaccctctccatggcgtatgccggcgcccgctttgtcttctcccttgtggatgcaatgaatggaaaggaaggtgttgtggaatgttccttcgttaagtcacaggaaacggaatgtacctacttctccacaccgctgctgcttgggaaaaagggcatcgagaagaacctgggcatcggcaaagtctcctcttttgaggagaagatgatctcggatgccatccccgagctgaagg

SEQ ID NO: 6996 - DNA, 433 bp, Homo sapiens
aaaacaacataaatagaatacacttcttttaacaaagcctggccttggtggctttctagcttgcagtctaagtaacgtttggtttgcagaagggattccctgggagacggctgtgtggggcaacctcacttactggttgtgtgttctccatgggaaaagcaccagatggggaagcccaggatcagatgtaagctgcaagcttctttctctcttcaaactgcttgtccactgccagagacagggcctggaggaacccctctatggtgacggtgggggcctggacatacagcgcatgagccagaaaggggagttttctcaggacccggccgctgaggccctcgctcttccttgaaatgtcattcaaaagaaggctcaattttgacacgttgttttcaatgaagccaatcatctctagctctcggagggtcagcag

SEQ ID NO: 6997 - DNA, 419 bp, Homo sapiens
cctcaggccccttgcttgggtcatgctgccccctgtcggctgctgcccctgcctcttcctctgagttctaacaacacagacactggtgcctgaaagccctgctgctgccagggagtcagaattctggctgcctctacttgggaatctcctcccatgtggggatctgcagaacatccagatggggccatcccacctcatgatccattcactcccagtgggatacactggaattcaacccggagactggagcccaacagattaaggcagaattctccttgctctggaggcaggtctgcgggaagggggtgaagtctagctgcccctcatgtcccatgccggtgagggtacttggcttcccacagctaagcccaggagcttcctatatcccatctgctgagacagcaaggggtgcggcctgg

SEQ ID NO: 6998 - DNA, 449 bp, Homo sapiens
ccaaagccagacctggcagaactgatggatacctggtgaggcagcggagcccctgggctcccaccccattccctcctcccggggctgcacaggtgagtaggtggaaggtaaggggggcagggaggggaaagaggtcctgggcttaaagcctgggcttggagtactgctccttgacactcagggtcaggcagagagaaaagagacagccttcaaggcagtccatgtctgggtgccccgggtcaggtggggagtgggggccatttttccctgagcacaggctgggagggagtggagggatgagcaggatgggatgggctgtccctcgggtttggtatatttgctcctagagcagcccaggaggcacggtggctctgaagcatcactcacttctgtcccgttcttgacagcgccattcgcgaacgatttcccaagttactacgcctggatgg

SEQ ID NO: 6999 - DNA, 362 bp, Homo sapiens
ggaaggaaggaagaagaaagacaggaaggaaggaaaaaggaggaaagaaacaaaagggcaagcaggccgagcaggtctaggattggctagtttgaataattttggcaggctgcaggtgtagggactgtcttaagttgcctggaagcttggaagctataatagagaatggggagggtgggaatatgagccttggatgggctggctactatgaaaggcccactcctggatgagttatttcctctctctaggaattagctaaccctgatgggtccctccccagtcagcaaggccccggatgccacaacttaaagtacagaaaatgtagttaacacagccaccacgaattgactagttgagtgttt

SEQ ID NO: 7000 - DNA, 381 bp, Homo sapiens
  unsure (14): n=A,T,C or G
  unsure (15): n=A,T,C or G
  unsure (17): n=A,T,C or G
aaagttttattatnnanacacatggaattaacggtgttatccatgtatttgcaacagcagagaaagagtgagagtggaccatccccataggggacacttatcctttggctaaactaatataaataatggaaataacacctaatacaataatacagcacataaaagagattacattaagagaagagacaggaactgcggagaggagtcctgagtatggaggagatgcggctcatggagaagcatccaggctcaggtgaccttccctgaagacttcctgtctctgagcagctcagttcagttccaggtcatacacgtactcctggacccaggactcactggggtcagcgcagacttgcttgcctcttttggtttggaatacca

SEQ ID NO: 7001 - DNA, 551 bp, Homo sapiens
  unsure (465): n=A,T,C or G
  unsure (512): n=A,T,C or G
ccttgcctcagatccaaggtcactcggaagaggccatgtctaccctcaatgacactcatggaggaaatgctgagagaagcattcagatgcatgacacaaggtaagactgccaaaaatcttgttcttgctctcctcattttgttatttgttttatttttaggagttttgagagcaaaatgacaacacccagaaattcagtaaatgggactttcccggcagagccaatgaaaggccctattgctatgcaatctggtccaaaaccactcttcaggaggatgtcttcactggtgggccccacgcaaagcttcttcatgagggaatctaagactttgggggctgtccagattatgaatgggctcttccacattgccctggggggtcttctgatgatcccagcagggatctatgcacccatctgtgtgactgtgtggtaccctctctggggaggcattatgtatattattnccggatcactcctggcagcaacggagaaaaactccaggaagtgtttnggtcaaaaggaaaaatgataatgaattcattgagcctct

SEQ ID NO: 7002 - DNA, 298 bp, Homo sapiens; identical to SEQ ID NO: 133
  unsure (24): n=A,T,C or G
  unsure (150): n=A,T,C or G
  unsure (156): n=A,T,C or G
  unsure (163): n=A,T,C or G
  unsure (167): n=A,T,C or G
  unsure (249): n=A,T,C or G

SEQ ID NO: 7003 - DNA, 228 bp, Homo sapiens; identical to SEQ ID NO: 329

SEQ ID NO: 7004 - DNA, 373 bp, Homo sapiens; identical to SEQ ID NO: 134
  unsure (260): n=A,T,C or G

SEQ ID NO: 7005 - DNA, 506 bp, Homo sapiens
  unsure (15): n=A,T,C or G
  unsure (425): n=A,T,C or G
gttggtttttttagnttctctctctgatctttagtttttccctttgttttcggtttctgggactttctcacactctcccctttcctccctttccccttttcctcatactcctcatttcttctgttttccctctgaggtcctatttgaaatgttttatttttcttctccctaaccttccagccctctcctctccctccccctgtgggcaggacctgaggctctaaagggcactccagtgtctcccttcggtctttcctgtcccttcaccgtcttgcttatcttcccacgggtggagaaaggtgccctgcctctgggcttttgctatctggccctctgtcttccacctcggggtggagggagttggcgggagcagtttttgaatgactgcagtttggggttggtgaggagagggaggttttcttcanggcctgctatttcctgagccttcctctctgaagcttgggaaatgacaccttttttactacgttagtgtttcccagagattt

SEQ ID NO: 7006 - DNA, 540 bp, Homo sapiens
cctacccactttagccagcgtcccctccagcagccatcagcaagccaacccactccaagccagggccccctttggtccttgcacttgaggtgctttgttcagggctgggtcaggagtggcagagacgatgtccaccacctcagtactggggaaagtagcctggttcctcctcgtgggtccagctacttggactgctggctgggttctggaagctgcctcggccccagggcagtgctaagcagctcagtcagggcatccagcttccccgccagcgtgtcaatctgtttctccagggcccggtgtgagctgctcagattctgctgcaggtcatacaggatcatgtgcatcttggagatgtccaccatggagttcacttgttcccggagcttccggtgtttcagccgcacctggcggagcgcgttgatggcggccagcagcttgcgctgatgcctgcgggcagcatgagactccttcctgcgagtatgtttgtagaacatccaggcttcttgtagcactcgggcagcggactccttcatctct

SEQ ID NO: 7007 - DNA, 402 bp, Homo sapiens
ccaacatgatgaaaccccgcctccactaacaacacaaaaattagccaggtgtggtggcgggcgcctgtaatcccagctattcaagaggctgaggcaggagaatcgctggaaccggggaggtggaggctgcagtgagccaagattgcactccaacttgggcaacagggagagactcagtctcaagaaaaaaacaaacaaacaaaaaaaccaaccaaacaaaaaaactttcttgtggtacttatcttttttgatcatttcatcttggaaactcatatcatgttcaaataaacacaataaagaaggaatgttcccagaccatgctattcaatgtggactttcttttataagctatgagaagaatactttggagaagcaagaaacttgggttattttttgttattt

SEQ ID NO: 7008 - DNA, 406 bp, Homo sapiens
cgggcggagaagctggagtgactctagggcagccgcatctttcgcgtcaggatctcaccaccttggatgttaccaagttgacgccactttcacatgaagttatcagcagacaagccacaattaacataggtacaattggtcatgtagctcatgggaaatccacagtcgtcaaagctatttctggagttcatactgtcaggttcaaaaatgaactagaaagaaatattacaatcaagcttggatatgctaatgctaagatttataagcttgatgacccaagttgccctcggccagaatgttatagatcttgtgggagcagtacacctgacgagtttcctacggacattccagggaccaaagggaacttcaaactagtcagacatgtttcctttgttgactgtcctgg

SEQ ID NO: 7009 - DNA, 487 bp, Homo sapiens; identical to SEQ ID NO: 135
  unsure (429): n=A,T,C or G

SEQ ID NO: 7010 - DNA, 194 bp, Homo sapiens
  unsure (91): n=A,T,C or G
cctacagacttatttcttcttggacacacccacggtgcggtcacggcggccagtggtcttggtgtgctggcctcggacacgaaggccccanaagtgacgcagccctctatgggcccgaatcttcttcagtcgctccaggtcttcacggagcttgttgtccagaccattggctaggacctggctgtattttccat

SEQ ID NO: 7011 - DNA, 310 bp, Homo sapiens
aaaggatggcccggcccccagtaaacgccgattcctgctcgcggccttctacgcccattactggagcagcagccatcagtgtagacgacgacgaagtctcccatgtaggaaaacgtgtctctgctaactggaggcgccggctccacgctcgacttcatgtgctttgcatacggctctgcgctttcatgtccatctccatccagtggctcacggagtcgcttgctggctttcgcctccgattcttgtccatgttgattttcatgcccttctgaaacttccgggcttgcagatttcctgacaaaggcccagg

SEQ ID NO: 7012 - DNA, 368 bp, Homo sapiens; identical to SEQ ID NO: 136

SEQ ID NO: 7013 - DNA, 202 bp, Homo sapiens
ccaatatggtgaaacctcatctctactaaaaatacaaaaattagccaggtgtggtgctacacgcctgtagtcgcagctacttgggaggctgaggcaggagaatcgcctgaacctgggaggcggaagttgcagtgagcaagatcatgaaaagcaaaatactcaaggacttttaatataaccaccaacacagtgtgccttctgg

SEQ ID NO: 7014 - DNA, 472 bp, Homo sapiens
  unsure (422): n=A,T,C or G
cctcggcctcccagagtgctgggattacagatgagagccaccgcacctggcctggcaaacttcttttacaaagagtcagagagtaaatatttcaactttgcaggctgtaccatccgtctcaattatgtagctctgctgttgtagcggatgccagaggtcacacgtgaaccaatgagcgtgcctgggttctaatatagctgtagtcccagctactcaggaggctgaggcaggagaatcgcttgaacctgggaggcggaggttgcagcgagcctagactgtgccattccactccagcttggtcgacaaagcaagactccgtctcctcaggggcagacaccgggcaggcagcttcctcggccactgcgttggagtagaggaagagatcctcgtaatccacgtttgcgggatccttctgcctgcanggctgtgtcagcagctccctgcgcggctcaattggcttctgctggtggaa

SEQ ID NO: 7015 - DNA, 153 bp, Homo sapiens
ccagctacaaagtggaatgcttctcgaagggcacggtcaggaggcgggcggccgcctcgtccaagaaccagcacagtttcccggtgtggggctggaccagggcggcgggcagcgggttttcctcctggtcctccaaaacgcgcttcagaacag

SEQ ID NO: 7016 - DNA, 389 bp, Homo sapiens
acgattcacagaggagctaccagatgaacgggaatctggactgcttggataccaggtacaggcttctccagtcagaatgagattgaaggtgcaggatcgaagccagcaagttcctcaggcaaagagagagagggacaggcagttgatgcctccaccagcctttccagtgactggaataaaaacagagtccgatgaaaggaatgggtctgggaccttaacagggagccatggtgagtgtgatatagctgggggaacaggggagtggctaagactggtctaaagctattagttttctcagccgggcgcagtggctcacgcctgtaatcccagcactttgggaggccgaggtgggcagatcacctaaggtcaggagttcaagaccagcttgg

SEQ ID NO: 7017 - DNA, 275 bp, Homo sapiens
ctggtggggtcagtggaagttctgtcactggatctggtttcagtgtctcagaccttgccccaccacggaaagcccttttcacctaccccaaaggagctggagagatgttagaagatggctctgagagattcctctgcgaatctgtttttagctatcaagtggcatccacgcttaaacaggtgaaacatgatcagcaagttgctcggatggaaaaactagctggtttggtagaagagctggaggctgacgagtggcggtttaagcccatcgagcag

SEQ ID NO: 7018 - DNA, 130 bp, Homo sapiens
aaactggtgggtttgggcacgtggttttaggtggctagagcctcagctctcgaggtcatcctgatatgacgaatgttcgtaaagcacttagcacagcacttggcacatcatgagtgttcgatccatgtgg

SEQ ID NO: 7019 - DNA, 419 bp, Homo sapiens
  unsure (15): n=A,T,C or G
  unsure (257): n=A,T,C or G
  unsure (262): n=A,T,C or G
aaaaaataacctagnctatgcaaaacatcaaagtgaattttccatgaatgtttttaatattctcatctcaacattgtgatatatgctactaaaaaccttttcatatacatcttacctcatttcaagtgaattattttaatctttttctctctttccaaaaatttaggaatgtttagtgtaattggatttcgctatcagttcccatccttaagttttgatattcaatatctgatagatacactgcatctttggtcatntaagntttgtttacaaatgtgcaaattatttagagcatagactttataagcattaaaaaaaactaatggaggtaaaacctaaatgcgatgtgaaataattttagtgttgataccgtatgtgtatttttattctaataaacttttgtgttccagattgaaaaa

SEQ ID NO: 7020 - DNA, 282 bp, Homo sapiens
ctaatacgactcactatagggctcgacggccgcccgggcaggtctgagccgtgcgctctccttttgcactcattcctggaggacggattccgctagacaccctccagcatcgctgactttataaagcggaaaaacggaaaacgtgactttgtaatagacaaacattgttttttaatggggttccatgggggggcgttcagcctttctgtttgctgtgtgctgtccagatgcctcttgggcgtcctgttgttctcttcccgtgttgtacgaagggtaccgtgg

SEQ ID NO: 7021 - DNA, 59 bp, Homo sapiens; identical to SEQ ID NO: 137
  unsure (17): n=A,T,C or G

SEQ ID NO: 7022 - DNA, 334 bp, Homo sapiens
  unsure (37): n=A,T,C or G
  unsure (38): n=A,T,C or G
  unsure (46): n=A,T,C or G
  unsure (47): n=A,T,C or G
ccatgtccatggccctgcacttcctcatcctgctcgnnccgccccnncctctcattttccaggtgaccccactgagcgggcgccagtgggtggtggtgctccagatatctctgcctgtcatcctgctggatgaggccctcaagtacctgtcccggaaccacatgcacgaagaaatgagccagaagtgagcgctgggaacagagtggagtctccggtgtgtacctcagactgatggtgcccatgtgttcgcctccgccccccacccttgccaccacactcgcccacttgcccaccgggtcccgccggataaatgacaggcccgaggtcagaatgg

SEQ ID NO: 7023 - DNA, 223 bp, Homo sapiens; identical to SEQ ID NO: 6848

SEQ ID NO: 7024 - DNA, 296 bp, Homo sapiens
ccacagaccgtgggcgcattcttgtccacacgtccagtcttgcccaggggcagcaccaggaaggcccctcccccgctggcctcacagatcagggccacaaacttagggttgacagcacagaagccactgtcccaggtggtctgtgagacgcgcacatcttcatagcactggtcggccttggccggctgtccaaacacgtggcggaacttgctggagcggaccacctgccggctcattctgctgccgagagaggacagtgatcccccaaaagccggaggaggaggaggaggaggaag

SEQ ID NO: 7025 - DNA, 508 bp, Homo sapiens
  unsure (316): n=A,T,C or G
aaaagacaaaaacaaaacaaaaataccacagctcaagataaagagtcctatacagaaatcacaaaaaggacagaccatctaaggaaaaattaaaaagacgacacaaggacaggctgggcagcctgggtcagggctcctggctggtgacctgctttgagtaggtttcttgcaggtacttcttaaaagctgtggggtttttccagagctcggcagcatgtgtgttcaagggactatcaatgttgggttctcctagaaggctctggatggagagcagaatggtcctgacatcatacagggcagaccacttttccttcangatgtccaggcatatgttaccctgggtgtccacgttggggtgatagcagggcgtgaggaacttcactgtgggcgcattgtaagggtagccactggggaactctagcgagagcttatacctcaggtcttcatatactgttccagccttattcttaacaactttaacaaaccccatcctgcggaacagagaccg

SEQ ID NO: 7026 - DNA, 151 bp, Homo sapiens
  unsure (12): n=A,T,C or G
  unsure (14): n=A,T,C or G
  unsure (48): n=A,T,C or G
  unsure (95): n=A,T,C or G
  unsure (96): n=A,T,C or G
  unsure (108): n=A,T,C or G
  unsure (146): n=A,T,C or G
cctgggatgcangnagaaaggctgaccacaagttgagacaagatacanaaacaaacaaaaacagcagaaagtccgatcgatggtgtaagtgttgnnttcactgcttanggtgcaggtgagcttgatcgaggctcccagtaaggcanatgta

SEQ ID NO: 7027 - DNA, 537 bp, Homo sapiens
  unsure (384): n=A,T,C or G
ccaaggctatcatggatttcagattggtggaccttccccttggcttacccttttataaatggatgctacggcaagaaacttcactgacatcacacgatttgtttgacatcgacccagttgtagccagatcagtttatcacctagaagacattgtcagacagaagaaaagacttgaacaagataaatcccagaccaaagagagtctacagtatgcattagaaaccttgactatgaatggctgctcagttgaagatctaggactggatttcactctgccagggtttcccaatatcgaactgaagaaaggagggaaggatataccagtcactatccacaatttagaggagtatctaagactggttatattctgggcactaaatgaangcgtttctaggcaatttgattcgttcagagatggatttgaatcagtcttcccactcagtcatcttcagtacttctacccggaggaactgggtcagctcctttgtggcagtaaagcagacacttgggatgcaaagacactgatggaatgctgta

SEQ ID NO: 7028 - DNA, 357 bp, Homo sapiens; identical to SEQ ID NO: 138
  unsure (167): n=A,T,C or G
  unsure (168): n=A,T,C or G
  unsure (174): n=A,T,C or G
  unsure (315): n=A,T,C or G
  unsure (325): n=A,T,C or G

SEQ ID NO: 7029 - DNA, 176 bp, Homo sapiens
ccgccatctgcggtggagccgccaccaaaatgcagattttcgtgaaaacccttacggggaagaccatcaccctcgaggttgaaccctcggatacgatagaaaatgtaaaggccaagatccaggataaggaaggaattcctcctgatcagcagagactgatctttgctggcaagcag

SEQ ID NO: 7030 - DNA, 419 bp, Homo sapiens
  unsure (14): n=A,T,C or G
  unsure (15): n=A,T,C or G
tgggagccctcagnnccagcctcatcactgtgtgaccctgggtctgctcttagcctccccatggctcacgttcctgccctggatgggatgtgagtggggcccacatcgtggagctgtggtggggcctgcagtcatgaatggcaagtggtccctgatgtgcagtgtctcattagttgcactgcagttaactgtggctcctgcagggcaccctgcccagaatgcccagaagagaaccatgcatacctgcactgcatttgagagccatgagctggaggctgtggttcgtgccagcaaggagcctactgtctggtgtgctgtaggcatctggagagggagagggcctgggtaggagctgggaggaagataattttcaactatggggcttcagtactgcagcgccccgagccaggctctgtgct

SEQ ID NO: 7031 - DNA, 338 bp, Homo sapiens
ccattaggagcctcgcctggaacggggcccccacaaagctcctgagcctgggccacatcactcaggctcctgttccccatctccaggctcgcagcggacagaactccactttctgaagaaacaagaaggtaactgtatcacgtgctaacaacttaaggttctaaaatactttgcttctcacttgaagaagtcctagaacaaaagcctaaggtgaggccctcagaaatccaactggcaatgtcccggaagtacagatcccgccaaggtggggatctaagcccagggccatcaaccgcagcttggtccaaatgctctgagcagtggttttggctctgtgg

SEQ ID NO: 7032 - DNA, 374 bp, Homo sapiens
ctgctgcactgcactttgcgattcaacaagtcagggaagaaaacatcaggaagcagctaaagaagctggactgcgagagagaggagctattggttttccttttcttcttctccttgatgggcctgctgtcgtcacatctgacctcaaatagcaccacagacctgccaaaggctttccacgtttgtgcagcaatcctcgagtgtttagagaagaggaagatatcctggctggcactctttcagttgacagagagtgacctcaggctggggcggctcctcctccgtgtggccccggatcagcacaccaggctgctgctttcgctttttacagtcttctctcctacctccatgaagacgcggccatcagggaagagg

SEQ ID NO: 7033 - DNA, 191 bp, Homo sapiens
cctgccggaggcgcaagcccctcgggcggcctttggtcatgctgagctcccacacacacaccacagtgctggtcccagaggtgacaatcgttgttggggatgggcacacggcgcacagacagcggccccaggcagccaggttctcgaatgtcatcaggaccttgtcggagccgtagctccccaagcagcag

SEQ ID NO: 7034 - DNA, 430 bp, Homo sapiens
  unsure (346): n=A,T,C or G
gcaaatactgggtgcccaatatatgtcagacacagttctagatgctagggagacagtagtgaacaagtccttccctaacctaaggtagatactgttccagcttttctagaaactagtcgaattaaagttgagctacatacaaacttagcatctctgggaaagagaaaatatttgacaaaggtgaattggggccttttttaacgctcatctcttcctgtaacatctctgtttagggaaggtgggaaccctggaaaagttacataaaatgtatttattgttaaatgtgtttagtctcataagaaaagcagtctttcacttggtaatcctaatactgtccttgaactangttagtctattttaagcatggcaggctacttttggtcttgagttattttagcttaaattaactcaagctaatttaagtttacag

SEQ ID NO: 7035 - DNA, 374 bp, Homo sapiens
  unsure (78): n=A,T,C or G
  unsure (79): n=A,T,C or G
  unsure (294): n=A,T,C or G
ctgatgcctcactactagatgcagtgctgggaccttcctcttttggagctgtcccatgtacagtggacccaagctcannaccttcgtggagctgcttctccaacctgagaaactcaagacccatcctcccgctgtcactttggacaacggaaatctacattttcttttcccttttttttttttgagacagagtctcgccctgtcacccaggctggagtccagtggcacaatcttggctcactgcaacctctgcttcccgagttcaagcaattctcctgcctcagcctcctgagntagctgggattataggcatgcaccaccacacccagctattttttgtattttttactggagacagggtttcaccatgttgg

SEQ ID NO: 7036 - DNA, 264 bp, Homo sapiens
ctgagaaaaatgcaattgagggacttttctgaattgagaaaaggatgacattctttggagagcagactttctaccctctccatctatcattgaatgttatattcattgctgccactagttaaatattaggtagacattgactggtagttacaatcaatgacacagtcactggcctaattactttggtgatttttataccatggtgtctgacattcccaggtgttttgtataaggcacacgtatttcaagagctcttcagccagg

SEQ ID NO: 7037 - DNA, 418 bp, Homo sapiens
  unsure (94): n=A,T,C or G
  unsure (95): n=A,T,C or G
ctgctgttccgccaaggacagcatccttccggttgcgatggcgattgcagactccagggccccagtggtggagaaagtccagcaactgccgcanncaccctggaaaggccaggggagagcagaggacatcagtgatggggacgccgtgagacagccctgccttctgccttcctctgctgaccctgccagagctcccgagtccccaggtgccttggcagtttaccaagccctgttccagatccattcattctgagcctcgcaggccctgttccagatccattcattctgaggctcgcaagccctgttccagatccattcattctgagcctcgcaagtcctgagaggcttgcaaaggagcaggagcagcaggtggcctctgaccagtgcctgtggactcccaatcaccacctcttggtgg

SEQ ID NO: 7038 - DNA, 244 bp, Homo sapiens
  unsure (220): n=A,T,C or G
ctgccaccaggcatccacccaactgggcgctaaaggagcctggagccgggcctgtgtctgtcagcagagcaagatgtggttcattccgcagccgggcaggggccaaccctgaaccagcatgggccgggtgccaggatgctgaggctcatgggatacagcctggagaagagctgtgtccacgagtacccagttcaaggtccagcgtggttagtgtcctcanagaacatgcctgtccagagcacag

SEQ ID NO: 7039 - DNA, 290 bp, Homo sapiens
  unsure (7): n=A,T,C or G
  unsure (8): n=A,T,C or G
  unsure (34): n=A,T,C or G
  unsure (78): n=A,T,C or G
  unsure (86): n=A,T,C or G
  unsure (87): n=A,T,C or G
  unsure (89): n=A,T,C or G
  unsure (96): n=A,T,C or G
  unsure (186): n=A,T,C or G
acctaanncatggccctggctaggcgggaacggntcacagtagcgatacattcacaggacacagttggtgtccagaanagggggcnnanaacacantttctacacaagcacttggcacccacacgacagagacgtcactcaagcagcacagccacaaatagtttacagcagctcatgcccggcatncgcccatgctgggagactccctgaaaggtgggcacctgccgtctatgaggaggtgtctccctccatcattaaccccaaaccacacaatgtgtgaggagagcagg

SEQ ID NO: 7040 - DNA, 391 bp, Homo sapiens
  unsure (319): n=A,T,C or G
ctgtctcatatgtccagcaccgggcaacgttacgaatggtgtaaccaccgcctcccagcatcagcataggcaggttaaagctcttgacaaattccacacacttggcgtgtcctttgatagttagattgaagcaacctaaccgatccccagatagggagtctgagccacactgtaagaccaccgcactaggctggaacatctccattactttggacatgaccggcttgaaaatggcctcataggactcgtcatcaatcccgtctcggagcgggtagttaacagcataatacttgcctttgccagccccaatatcccgtangtccccagttcctgggaagtactctccatacttatgaaaggacacagtcatgacccggtccgtggtgtagaa

SEQ ID NO: 7041 - DNA, 340 bp, Homo sapiens; identical to SEQ ID NO: 325

SEQ ID NO: 7042 - DNA, 250 bp, Homo sapiens
  unsure (215): n=A,T,C or G
aaatatgttgctagaagtaaaagctagagccaaggaaaaaacaggtggtaaggtgcgccaaggccaaagccagaataaagaagtacttcaggagtatattgcaggtgccgacaccatcatggaagacccagccaccagggattttgtagttatgcgggccagaatgatggcagccaagttgttaggagcactttgttgctgtatttgtgatccangtgtaaatgtggtaactcaagaaattaaaccagac

SEQ ID NO: 7043 - DNA, 445 bp, Homo sapiens
  unsure (398): n=A,T,C or G
  unsure (419): n=A,T,C or G
  unsure (421): n=A,T,C or G
  unsure (432): n=A,T,C or G
cctattttgaccaaagtatacagtaaagataacgatggagatctagcatgcttactacctaaacttatggagattgatggactgcatgcaaaagatacatgaatgggatttgtggtagcagtatgcctattttgggaagcataggggctgccaagatgagaggctaccaggtaacaggccacaatgaccctgaggtttcccattctcttactgagatggggaagaaagatagtaaagaaacatttggaatggtattatatttgaaatgagaaggtacaaatgatgattttcatatccagcactcccagcaaccaaacccaaatcacctcaaactgtagaggagtgttgcagcgactagcagtagtaagagatgtgactggtgaaaacatgaggctgtntccatttcgacactcctcttntnctgggtgagangagccaggtgtgg

SEQ ID NO: 7044 - DNA, 228 bp, Homo sapiens
cctggtactgaggaataacagcatttcgtggctcagttaatatttgtacaagtgttttctcatctaggctatgcaatggaaccaccacaggcaaccgtcccacaaactcaggaatcatgccaaactcaatcagatctctggcttccacatgacgcaataaccgatctttttcttcaatgtcttggtgagtattcgattccccacttcgattagcaaggtctgcagcag

SEQ ID NO: 7045 - DNA, 188 bp, Homo sapiens
aaaggaatgtggatcatagtgatttttccttttaattttattgctcagaaatgaggcatatcctaaaaatcctggagagctgtatttaatgcatttttgcactaagtggtccttagtttaattctattgtatctgtttatttaacaaaaaattcatcataccaaaaagtgtaagtgaaaacccccttt

SEQ ID NO: 7046 - DNA, 156 bp, Homo sapiens
ctgtggcagccagcataacctccctccgtgcttccatctacctttagaatgaggggttagtaaggctgggcgcggtggttcacgcctgtagtcctagcactttgggaggctgaggtgggtggatcacttgaggtcaggagattgagatcatcctgg

SEQ ID NO: 7047 - DNA, 447 bp, Homo sapiens
ctgcaagtcatgccttgggcacctgcacttttcagagcattcagaggagaagcaatatcagggtggtccagaggtgaatccgggtgcctcagggggggaccggctcatctgtgaccgatcgaacagccaggagggtgtttccatggcaacaggacacggaagtcaccgtgtaagggtgtgtctcatccaactgcactggccgagggagtccggcatcctcatccctccttcccaatcgacctcgcgcccctttgccccaagagtacacttcgctctctgccccaatagctacagtgaaggcatccccacaggctaccattgccatcttgatgccctcaaggccttggaccttacagggtgcccgactgcctcggcgagtattggtgcccaactgtccgtgctgattgctgccaaaagtgtagcaatcacccgaggcagtcacagcag

SEQ ID NO: 7048 - DNA, 529 bp, Homo sapiens
  unsure (360): n=A,T,C or G
  unsure (377): n=A,T,C or G
ccaagaacaaggcgtgtgccacagtcacgtagtgacacaggtcacatttgctttctgccagcagaagagactggactccagtgcaggggagtgtgcaaggacaggttctggggggtggaggcatctgtggacatcccagggcaggggtgagggccagaacatccctaggtcctgagactacagtttctccacatttagatcagacattctcttccaaggaaggaaaccaagagaggctggtgaaccgtctggtaatgacaagccctcacttttgcagccctcttggctggtccctcagcaggtcttccctatgagcctgcaaaggagacaggcagggaatgagttccatgttcgagatangggaaactgagggccangggagaggcagtgactcgcccgagggcacacggcagaatgcaggcagaggcagagtggccctgggcatcctgagtccagttctgggcactctgcacctcacaggcctggactcagtccttgccaccaccactctcagagtccttctcatgga

SEQ ID NO: 7049 - DNA, 188 bp, Homo sapiens
aaagggggttttcacttacactttttggtatgatgaattttttgttaaataaacagatacaatagaattaaactaaggaccaattagtgcaaaaatgcattaaatacagctctccaggatttttaggatatgcctcatttctgagcaataaaattaaaaggaaaaatcactatgatccacattccttt

SEQ ID NO: 7050 - DNA, 310 bp, Homo sapiens; identical to SEQ ID NO: 6954

SEQ ID NO: 7051 - DNA, 301 bp, Homo sapiens
cctgtgcagagagcgccctgggctcaaaaaggccctggggcctgtgggcattctccctggtcccacacccaggatccctgggcctgtgggcactctccctggctctgtgcccccactatggaggcagagcccgaatcagcaagtcagtcttcggcagcaggagtgacgggctgtctggatgtgggggtgcaggcacttcctcccacactcagaacttaactttcttctaaggagtccagcccagctctacattcttttgactcccaaagtggcttacagatgccctggtgttttttttttt

SEQ ID NO: 7052 - DNA, 79 bp, Homo sapiens; identical to SEQ ID NO: 139

SEQ ID NO: 7053 - DNA, 289 bp, Homo sapiens
ctgtgttaccctgggcaagccctcacctttctgtgcctgtcccctctttgctgtaaaatgggggtactaatacttaagtcttcccttcccccacagttgctactaacaaacagaaaaacggtacccatgtgctccagggtcacctctgacctttttttcctccagatgtccagctcgccgctgtccaagaaacgtcgcgtgtccgggcctgatccaaagccgggttctaactgctcccctgcccagtccgtgttgtccgaagtgccctcggtgccaaccaacggaatgg

SEQ ID NO: 7054 - DNA, 326 bp, Homo sapiens
ccacgttgtgccccgagatgagatccggaagctgatggaaagccaagacatcttcaccgggactcagactgagctgattgctggaggccagctcctttcctgcctctcacctcagcctgctccaggggtggacaatgtcccagaaggaagcctgccagtgcacggtgaacaggcgctgcccaaggaccagcaaatcactgccttggggagagaggaacctgtggcaatagagagccccggacaggatcttctgggagaaagcaggtctgaaccagtggatgtgaagccatttgcttcctgcgaagattctgaagctccagtcccag

SEQ ID NO: 7055 - DNA, 177 bp, Homo sapiens
ctggcttcttgatgtcctggaagagagcgcggccgccacgctggttttgcatcttcaggagacgctcgtagccctcgcgcttctcctcggccagttcgcggaagaagtggctcacgccttccagagccacatcatcgcggtcgaaatagaagcccagagagaggtaggtgtaggagg

SEQ ID NO: 7056 - DNA, 227 bp, Homo sapiens
cacaaacagtccagcatgacggtgatggaagctcaggagagcccgctcttcaacaacgtcaagctacagcgaaagcttcctgtggagtcgatccagattgtattagaggaactgaggaagaaagggaacctcgagtggttggataagagcaagtccagcttcctgatcatgtggcggaggccagaagaatgggggaaactcatctatcagtgggtttccaggagtgg

SEQ ID NO: 7057 - DNA, 539 bp, Homo sapiens
  unsure (418): n=A,T,C or G
  unsure (425): n=A,T,C or G
ctgccaacctgagtgagttgtgccgcagttgtgagcaccccttggctgaccacgtatcccacttggagaatgtgtcagaggatgagataaaccgactgctggggatggtggtggatgtggagaatctcttcatgtctgttcacaaggaagaggacacagacaccaagcaggtctatttctacctcttcaagctactgcggaaatgcatcctgcagatgacccggcctgtggtggaggggtccctgggcagccctccatttgagaaacctaatattgagcagggtgtgctgaactttgtgcagtacaagtttagtcacctggctccccgggagcggcagacgatgttcgagctctcaaagatgttcttgctctgccttaactactggaagcttgagacacctgcccagtttcggcagangtctcangctgaggacgtggctacctacaaggtcaattacaccagatggctctgttactgccacgtgccccagagctgtgatagcctcccccgctacgaaaccactcatgtctttgggcga

SEQ ID NO: 7058 - DNA, 235 bp, Homo sapiens
ccacacggtcacacaaggcttccgcctcagccaggttatgggtggtcaggaggacacctctctctgtgtttttaacgactgcctggattgcctgccacatttgctgctgccctgtggggtctatgcccgtagatggttcatccaggagcaagacaggtgagtttcccaggaggctcagcacaaaacacaactttctcgtgattcctgctgttaatttctgcacaggaacattcag

SEQ ID NO: 7059 - DNA, 518 bp, Homo sapiens
  unsure (473): n=A,T,C or G
  unsure (506): n=A,T,C or G
ccagaacgtgaaccactggacaggatatagctgttccagcttagggagcccactcgggcagagtgactggtcatatttcgaagccgtttctgctgctgcacatcccatagctgcacctcagcactgctggtgcccacagccaagtagttgccctctttgatccaggccacagaggatatatattccccaggctgctccatttgcaaaagctgcaggatgtcaccagagcttgcactccacaggtacacactgttgtccagtgccacggccagtacattcccagaactccaatccacaaggttcaggtaatagtcatttcggatttcaggcgcatccaggatacggtctggcagggaaggaatgtaacggcaggtcttccggctggagccaggagtggccttttggctgtagagtactttcagtctgttctgataaccctctggcgcattttgtggttttccactgagccgaangatcttggcttcctctacatcaaaaccgttcangttcaaagccca

SEQ ID NO: 7060 - DNA, 367 bp, Homo sapiens
ccattatctacatgtgttttcagcacctggttggttctaaatgggatctggagacccagcttcttggagatttttaagaggaagtattaactggacaaatggaatgggcaccagaaagaaatacagggtcacccagaatggcagaaacctaggtttcccagagtggaaagagagaggagacattcaacaaacaagtatttattgagcgcctactatgtgccaggcactgttctagacccccccccagaagaaaaaacaaaaaacaagatagaggcagcaaacacaaattctgagggagaggaaaggggcagttgagtaagacggctaagggaactgagaagcctgaggtgatgggggctctgcctta

SEQ ID NO: 7061 - DNA, 196 bp, Homo sapiens
ctggggctcaaactgctgccagtgctggtgagtgatccccacatcggtgcgtagccccagggccaaaacttcctccagcagctccagcctgcccagggggacacgcttccgggtgccatgtccatcaagggcttctggaccccgaaggccgtgatgaagatgttgactaccacgatgatgaacaccaggcccgtgg

SEQ ID NO: 7062 - DNA, 373 bp, Homo sapiens; identical to SEQ ID NO: 141

SEQ ID NO: 7063 - DNA, 373 bp, Homo sapiens; identical to SEQ ID NO: 142

SEQ ID NO: 7064 - DNA, 185 bp, Homo sapiens
cctctacttaccaccaggtacagcatgaggcacggctgtctatgatgttgctggacagcagagctgacgacgggttccacctgctgttgatgactcccaaacccatgatccgggcttttgaccatgtcctgcatctccgtccactgagtcgcctgcaggcagcgtgccaccggctgaagctctgg

SEQ ID NO: 7065 - DNA, 246 bp, Homo sapiens
ccttaccacaatcactttgccaccatcaccttacctttgcaaacaagccaggccaaaaaggctcaacatttacaccggctgctttaatgagggcattgatcttatcctccgtgactgtcacctcatcgtcgtgcagaatgagggccgagtagatgcaggcgagctcggagacagaggccatggcgcgggcgagtgtagggctggcgctgccggacgcggtgctagtcgccggatgaagtgagggcc

SEQ ID NO: 7066 - DNA, 210 bp, Homo sapiens
cgcagcttcttggcttaggtacttctactcacagcggccgattccgaggccaactccagcaatggcttttgcaaatctgcggaaagtgctcatcagtgacagcctggacccttgctgccggaagatcttgcaagatggagggctgcaggtggtggaaaagcagaaccttagcaaagaggagctgatagcggagctgcaggactgtgaagg

SEQ ID NO: 7067 - DNA, 240 bp, Homo sapiens; identical to SEQ ID NO: 326

SEQ ID NO: 7068 - DNA, 132 bp, Homo sapiens
ctgcagagatatcaatgggaacagaggtttcagaagaagatatttgcaatattctgcatctttgcacccaggtgattgaaatctctgaatatcgaacccagctctatgaatatctacaaaatcgaatgatgg

SEQ ID NO: 7069 - DNA, 239 bp, Homo sapiens; identical to SEQ ID NO: 140
  unsure (80): n=A,T,C or G
  unsure (81): n=A,T,C or G
  unsure (92): n=A,T,C or G
  unsure (93): n=A,T,C or G
  unsure (113): n=A,T,C or G
  unsure (114): n=A,T,C or G
  unsure (126): n=A,T,C or G
  unsure (127): n=A,T,C or G
  unsure (142): n=A,T,C or G
  unsure (143): n=A,T,C or G
  unsure (183): n=A,T,C or G
  unsure (196): n=A,T,C or G
  unsure (201): n=A,T,C or G

SEQ ID NO: 7070 - DNA, 321 bp, Homo sapiens
ctgggtaaggcatgctttgagggaagactccaccagcccggccaggaaagggcagcaggcgcagtgcccctatggggcccacatgactggtaacagcagcaggacacctcttccaaagctgtccaccagccccactaggggctcctactcatggcaaaaaagactacatgagcccacaactgtcaactaacacagtgccacctcctcccaaagcaaacacatatacatacaatgttaagaacctattatcagaacagcagtgcagcagaccctggccttggtctctgaaagtcctgtgtcactggctgtaaggacgcttgg

SEQ ID NO: 7071 - DNA, 237 bp, Homo sapiens
aaagttgagaggcagttcacatcctaagtgatacctagaaacctgccttcttgttcgcaaatgatcaacatgaacatacagaatggctgacatttggacctttggataagcttaaaacatggattgtggaatgtctaatagagggcttttctctcttttttttaataatgactgtcccacactttaattcctcaatgatatgtggatgctaactaaatcagatgaaatgttttcttt

SEQ ID NO: 7072 - DNA, 368 bp, Homo sapiens
ctgtcatcttttgaaacggagttcaacacacagccgcatcgtaaggtagaaggaaacttcaacccttttgcctctccccaaaagaaccgacaatcagatgaaaacaacttaaaagaccctgggggctccgagttcgactcgatcagcaaaaacacatgggctcctgctcctgacacatgggctcctgctcctgaccaaactgagcaagaccagaatagactgtcacagaactctgtaaatctgtctcccagcagtcacgcaaacaacttatcagtagtgacttacagtaaggggctccatgggccttaccccttcggccagtcttaaacgggtgtcagcaagaagaaaaattaacaaaagacagaagg

SEQ ID NO: 7073 - DNA, 378 bp, Homo sapiens
ctgaggtctcttgagggagcttagccaatgtgggagcagcggtttggggagcagagacactaacgacctcagggcagggctctgatattccatgaatgtatcaggaaatatatatgtgtgtgtatgtttgcacacttgtgtgtgggctgtgagtgtaagtgtgagtaagagctggtgtctgattgttaagtctaaatatttccttaaactgtgtggactgtgatgccacacagagtggtctttctggagaggttataggtcactcctggggcctcttgggtcccccacgtgacagtgcctgggaatgtattattctgcagcatgacctgtgaccagcactgtctcagtttcactttcacatagatgtccctttcttgg

SEQ ID NO: 7074 - DNA, 353 bp, Homo sapiens; identical to SEQ ID NO: 327

SEQ ID NO: 7075 - DNA, 267 bp, Homo sapiens; identical to SEQ ID NO: 143

SEQ ID NO: 7076 - DNA, 264 bp, Homo sapiens
cagagatctattaatgagatgaagcggttggaagaaatgtcaaatatgtttcagagctctggagtccagcaccaccctccagaaccaaaagcccaaacagaagggaatgaagattcagagggcaaagagcaaccttgggaaatggtgatggataagaaacactttaagctgtggcggcgcccaattacaggcacccacctttaccagtaccgagtttttggaacctacacagatgtgacacctcggcagttcttcaatgttcag

SEQ ID NO: 7077 - DNA, 353 bp, Homo sapiens; identical to SEQ ID NO: 327

SEQ ID NO: 7078 - DNA, 181 bp, Homo sapiens
  unsure (20): n=A,T,C or G
  unsure (27): n=A,T,C or G
  unsure (28): n=A,T,C or G
  unsure (43): n=A,T,C or G
gttgactcatacaccctcantgtcagnngccccaggaaagacngccaagattacctgtgggggaaacaatattgggagtaacaatgtacactggtattaccagaggccaggccaggcccctgtcctaatcatctcttttgataacgaccggtcctcagggatatctgaggcgattctctgg

SEQ ID NO: 7079 - DNA, 473 bp, Homo sapiens
gttcggggagagggtggtagcacagggcttgggatatcggcagtgtgggaaatgcgaagcatttctcatcatcatcatctctgctacagtcatgtttctgcatgtcagcgagcgacactgtccctgcctcaggttggaggttttatcagccaaagtgtttttttcatgtatcgttcgttccattcatccactctgtgccttgtcagcctttgaaaggcttggttgctcccaggctgctgttctcagggaccttaaaagggacctggttagtcttggggcagagagtatctacttgggcactctcttccaagaaagaccttgtctccattttcattagacaatgcttcttgtgtgtgttctggaagatcttctaaatggaatgcttgttgcactgttcccaggcgagtggctgccatgagacctgaggaccacacttgggggaccaatcatgtccttcaccactgtgccttaga

SEQ ID NO: 7080 - DNA, 497 bp, Homo sapiens; identical to SEQ ID NO: 638
  unsure (20): n=A,T,C or G
  unsure (90): n=A,T,C or G
  unsure (149): n=A,T,C or G
  unsure (196): n=A,T,C or G
  unsure (197): n=A,T,C or G
  unsure (203): n=A,T,C or G
  unsure (396): n=A,T,C or G
  unsure (402): n=A,T,C or G
  unsure (411): n=A,T,C or G
  unsure (427): n=A,T,C or G
  unsure (454): n=A,T,C or G
  unsure (458): n=A,T,C or G
  unsure (466): n=A,T,C or G

SEQ ID NO: 7081 - DNA, 566 bp, Homo sapiens
  unsure (405): n=A,T,C or G
aaatgattctttatttcaataaactttaacaaacaatatataatatttcttccttaaaaagctcattcaaagatcataggcagacttcttccccattgtattttagttggggagataaaggcaaaaagaggaaatgtaagctatcttacagtcattctgagaacctctggtttcatgctatactttcccagctaaaagttactaatttacgaagttcagatactgaaacttaaaaatcaagatccatatattaggatgtcctgctgtcacactggtggtggcccattgtgtcggagtctggtaaatggacctgcccgggcggccgctcgggcaggtctgagaatatcatatggtactaacaaaggaaaaaactatactgaagaagaagatcgttttctgatttgnatgcttcacaaacttggatttgacaaagaaaatgtttatgatgaattgcgacagtgtattcgcaactctcctcagttcagatttgactggtttcttaagtccagaactgcaatggagctccagaggagatgtaataccttaattactttgattgaaagaga

SEQ ID NO: 7082 - DNA, 283 bp, Homo sapiens
atggcgtcctccacataggcagtggctgtggtttctaccccgggtggccgggggcagtgctgagctgggactgttgtttgcccagcctgggctgcagaaagcagcagttaaagttcgtttctggtcactgctccaggaagccaccttactctgagggtcaagaattgccgcttccttttagttactgtaagttcctcctctgcccctggtttgtttcccgcggcacttctggatacccccaggtcccagacccttccagactcaaaccatgaactttcggcag

SEQ ID NO: 7083 - DNA, 259 bp, Homo sapiens
  unsure (111): n=A,T,C or G
  unsure (112): n=A,T,C or G
ctgccacctgtgaccaagggctcccagcccccacggttctgcttccagtccaagagctggaagaggtgtgtgccagtgaccctggagctgaccaaggtgtggaggcaggcnnaccagaccttcatctctctactgcaggccgtgaggctaggcaggtgggctctgccctgacagtccagccccaacaggtgttcagatgaggtgacccgccagctccaggccacagcttcccacaaggtggggcgagatgggattgtgg

SEQ ID NO: 7084 - DNA, 158 bp, Homo sapiens
aaaggcaaatattatccagcaagcagtctaccctgtcctttgcaattgctcttctccacgtctttcctgctacaagtgttttagatgttactaccttattttccccgaattctatttttgtccttgcagacagaatataaaaactcctgggcttaagg

SEQ ID NO: 7085 - DNA, 143 bp, Homo sapiens
gggatatgaggtcagaagggtagcaggagggcaggtcttgttcagccatggtaaagggtttggcttgactcctggtgaaatgaaaagtcttgggtgtgggggcggtttaagcagagaaatgataggatctgatgtatattttt

SEQ ID NO: 7086 - DNA, 428 bp, Homo sapiens
cttctctattaccctccttaccaccacagctccagccaagcttggagtgatctgcaaacccaatatgtgagtttagtgtatagaaaacacatgaatgaaaggcaaaaggggccaacattggtatttgggttttttttttttttgagctgtcactaggctcctgaccttccctctgaactccaccctgcagggcaggccaacagacaagctttctttctttctttttcttttttttatatgagatggagactcgctctctcgcccaggctgcaatgcagtagcacgatctccgctcactgtaacctccccctcctgggttcaagcgattcttctgcctcagcctcccgagtagctgggattacaggtgcacaccaccacatccggttaatttttgtatttttagtagagacggggttttgccatgttgg

SEQ ID NO: 7087 - DNA, 287 bp, Homo sapiens
ctgtatgcccatggacaaataaccattctgacctcagcttcatcctctgtaaatgagtctaattcaagaagcataagtctactgatgactagcgatggcatctccaccagcctcagccctcaaaaatgcaaccaggaaataagattaccttgactgcatcagggaccaaacaaaacttcccctggggaccgaagaaagatcagccctttttggaaacatacaggatatctaccacttcaatagtgaacttctgcaagatttggaaaactgtgaaaatgatcctgtgg

SEQ ID NO: 7088 - DNA, 228 bp, Homo sapiens
ctgccactgaagcccagcctgttgcaatctggggaattagcaggctgggggttgcccatcagtgtcttctgagtgcccggtgtgccctgtcaaggtgtctggtcggagagcagggtggagaagtactttctctgtggcccggtgcagtggctcacgcttgtaatcccagcactttgggaggctgaggtgggtggatcacctgaggtcaagagtttgagaccagcctgg

SEQ ID NO: 7089 - DNA, 166 bp, Homo sapiens
  unsure (13): n=A,T,C or G
  unsure (14): n=A,T,C or G
  unsure (141): n=A,T,C or G
ccttaaaaattanngcacgaccaaaaagaatgatttggtgagagatgtgtagctgattgacaattttagtgtgaattcatattcatttaacccagcagcaatctacataagctatgctttttcccgcctgtatttatgttncttagcttataaagtcccaatatat

SEQ ID NO: 7090 - DNA, 331 bp, Homo sapiens
  unsure (13): n=A,T,C or G
aaatagaaaacantatattgaaagtggtgggtttgatctttttatttagaaacccacaaaatcagaaacacagtacaaataaaacagaaatcaaactataagttgacttttagttcctaaaaagaaacatatttcaaaagcaatggaatctagaattcttataacatgaataacaaaatgtacagcaagcctatgtagttcaattaatatataaggaaaaggaaggtctttcttcatgatacaagcattataaagttttactgtagtagtcaattaatggatatttccttgttaataaaattttgtgccataatttacaaattagttcttt

SEQ ID NO: 7091 - DNA, 516 bp, Homo sapiens
  unsure (498): n=A,T,C or G
aaatgtatagggtattaaatacaagcttctaaaattttcagtatctatattggctttctctaacagctctacagcaaagtttgacatgttttttgtgtgtgtcatgtattgtaagttgtaatatctgtaggagtgagttggacattctaaattagcagtaaaaaattcacaattacagctcagcttgtttattcattatagtttccacatttccaacttccaagtgaactttatatatactacagtgaattatagataaatacagccatggtggacctttccctcaatagtgattttttgtacaaacagtataattaaaaggaaaagcttttatattttatgcaaggtaaatgtttcctaaatgtcacaaaagtgatagaaaacatagctttttgggatctggtccagcattagagtttctaattctgagacccaccagcttgtgtttcatcttctttatatcctgtcagaatacatacttaaatcatgtgggtatgngaaagatgttgtttaact

SEQ ID NO: 7092 - DNA, 402 bp, Homo sapiens
  unsure (15): n=A,T,C or G
  unsure (25): n=A,T,C or G
  unsure (119): n=A,T,C or G
  unsure (120): n=A,T,C or G
  unsure (231): n=A,T,C or G
  unsure (346): n=A,T,C or G
  unsure (364): n=A,T,C or G
  unsure (387): n=A,T,C or G
aaaaatgttttcccncgggtaattntctattatatattttcatatgggcaaagggaaaaaatgataaatcctctgtaatcacaaaccccaatttcgttttgtttattcagcttctaaannattgaacacccagacttttaattcaacctttaagaaccttatcatttatgtttcagtagatatcaaagtaatccatgtttgtgtcaaatgatcatagaaaataaatagaanagacagtgaagcaagtaaaaagaaaagcattgttttaatttgtttgcattaatttttttcatttgtcaaaatgcttcttttgtttgccacagtaaagaacagtttttattgtttngtaagtaaaattacgtancttgattttgtatgtaaagattnatttccataataaaa

SEQ ID NO: 7093 - DNA, 418 bp, Homo sapiens
  unsure (15): n=A,T,C or G
  unsure (16): n=A,T,C or G
ccattacatcctctnnttaatttacataatacagatacttgagaaagttgttgtggtgttgtatgccaagaaaattctttttattggtgcctatattgtaacaattatttttaatgcattgtattttgaagtaacggttcagttaaatttttcacctgctgtgtaactgaaacacaattacagtttataatcatctgtagaagtctggagataattttgcaactcatgttatgggttaaatgaatatttttgtaaaagtaaaagcaacaaatttataaattgattatttgaaactttacaacacaattgcatcccaaatacaaattgtattgcttattcattatagctattcgtcctgtaatctgtttctaggtgaagcatactccagtgttttaggggtttttgaaaataaatattt

SEQ ID NO: 7094 - DNA, 357 bp, Homo sapiens; identical to SEQ ID NO: 6074

SEQ ID NO: 7095 - DNA, 226 bp, Homo sapiens
  unsure (15): n=A,T,C or G
  unsure (17): n=A,T,C or G
  unsure (32): n=A,T,C or G
aaataacaaactatncncataaaaaggagcanaaataatatggaatgtttttgacgaaaacaaacttatggattcaataaataatataaaatgcctttgtgctaaaatagaactcttgtttcttatatatatatagttcagtgatctttatgctatccagaaaaagccagatctattataattaaacatagaaaaataccatttaacaataaaactaaaaaaatgg

SEQ ID NO: 7096 - DNA, 254 bp, Homo sapiens
  unsure (14): n=A,T,C or G
  unsure (15): n=A,T,C or G
aaaatatcttttannggttttatataaaaatgtctgagtatgattttgtgtgaaagttctgataccagttgtaatagagtcaaatttatgtgagcaataaagaagaaattggcagatattggaaaaatattttgtgaaaagctgtatttattataaatactagggccatgacatagtaccattggggttaagtcattttcccaatctatttataatttaatgatatgttagtgcctctgttatatgtcaagttt

SEQ ID NO: 7097 - DNA, 378 bp, Homo sapiens
aaagtatttacccacagaactcataaaaaggtcaatttggtaaaaggacgttttgacccaagagcatctaatatttaagcttattttattggataagcatatctcttgtccatcacaagttatagaaaagttatatacgactaaaagaaaaagttatctactgtaattataggaagttgtcacaacaggaattcagctcaagaacttcttgcaattactgctacaacgtctataaatgggaaaagcaagcattaaaatagattaataaaatataaaattaagactggaaaattccagagacaagctgtatccttagaagaataaatagttaaaattattcagtaagctgacgtatttaaccattactgggcctgtaaa

SEQ ID NO: 7098 - DNA, 120 bp, Homo sapiens
  unsure (16): n=A,T,C or G
  unsure (80): n=A,T,C or G
  unsure (81): n=A,T,C or G
  unsure (90): n=A,T,C or G
  unsure (91): n=A,T,C or G
  unsure (108): n=A,T,C or G
aaaatgtgtccctccnttgggagagaatcattttgttctttactaacaataatttgaaaattggtaatttaatatcttgnnaatatgaanntattatggtatagattngcttctaggaga

SEQ ID NO: 7099 - DNA, 397 bp, Homo sapiens
aaatctataatctggttcaagtgcaaatcaggtgctttctgttagtccttccaaaaaaggcatttttaatatttttggcacaaatgaaatgtcatcatgccaacaattctaattacaatacatatatccaaacctttagagtagcaatcatatacatacagtataaaactgagtatttacaaatgtattcagcataaatgtaaccttcgtgggtgaatcagaactcattagccatacccacactaataataattataaaaggtaaatacaattcctttctttcatttgcttatgctggttgttgtgggttgacattcatgtgaggaggatgtcctagaagaccaattctttgtttctgcttcctttgttctgtcatctgatcctttaattccgacag

SEQ ID NO: 7100 - DNA, 421 bp, Homo sapiens
ccaaaatgatggatcctagggttcttcatcacatgggtggtatggcaggacttcagtcaatgatgaggcagtttcaacagggtgctgctggcaacatgaaaggcatgatgggattcaataatatgtaaagaaaatgccttaatataaactgactcagttgaatacctaatttgctgagacctcagcgtttcccttctttttgcgaattggggggaaagtgtatttttcttgcttatcatgcactctttccttttcttctcgcccgcttttcccctccttttctttttccttccttctttcctccctttaatataagggagaaatacatggtttttgtggaaatcattatatgtttgctttagattttcttctgttttcaccatcataacacttaagtttaaatcatgatgtaaaattttag

SEQ ID NO: 7101 - DNA, 556 bp, Homo sapiens
  unsure (543): n=A,T,C or G
ccttttatctacttctttgcatgtaaagggtataagagaaaggttatgaggatgctgaaacggcaagtcagtgtatcgatttctagtgctgtgaagtcagcccctgaagaaaattcacgtgaaatgacagaaacgcagatgatgatacattccaagtcttcaaatggaaagtgaaatggattgtattttggtttatagtgacgtaaactgtatgacaaactttgcaggacttcccttataaagcaaaataattgttcagcttccaattagtattcttttatatttctttcattgggcactttcccatctccaactcggaagtaagcccaagagaacaacataaagcaaacaacataaagcacaataaaaatgcaaataaatatttcatttttatttgtaaacgaatacaccaaaaggaggcgctcttaataactcccaatgtaaaaagttttgttttaataaaaaaatttaattattatttcttgccaacaaaatggctagaaaggactgaatagattatatattgccagatgttaatactgnaaacatacttttt

SEQ ID NO: 7102 - DNA, 388 bp, Homo sapiens
  unsure (14): n=A,T,C or G
  unsure (15): n=A,T,C or G
ctgaagtgtggctnncataaataactgtttattccaaaatatttacatagttactatcagtagttattagactctaaaattggcatatttgaggaccatagtttcttgttaacatatggataactatttctaatatgaaatatgcttatattggctataagcacttggaattgtactgggttttctgtaaagttttagaaactagctacataagtactttgatactgctcatgctgacttaaaacactagcagtaaaacgctgtaaactgtaacattaaattgaatgaccattacttttattaatgatctttcttaaatattctatattttaatggatctactgacattagcactttgtacagtacaaaataaagtctacatttgttt

SEQ ID NO: 7103 - DNA, 239 bp, Homo sapiens
  unsure (13): n=A,T,C or G
  unsure (15): n=A,T,C or G
  unsure (16): n=A,T,C or G
  unsure (29): n=A,T,C or G
  unsure (80): n=A,T,C or G
  unsure (118): n=A,T,C or G
  unsure (125): n=A,T,C or G
  unsure (168): n=A,T,C or G
  unsure (182): n=A,T,C or G
  unsure (223): n=A,T,C or G
ctttttttttttntnnttttttttttttngagtattgttttattaaccaaaacacaaaaccaaaatgaaaactggcttanaatataaaattctcatttttcaaagtgaaagtttgaanatactanctaaagttgataacttaaatagtggtaaaagtaaataacttanaattatggcagcantcacaagaagaaacagaaaacagggggactagggattcggnggtagacttttacttt

SEQ ID NO: 7104 - DNA, 394 bp, Homo sapiens
aaataactttcttaaccccgcccattaagatcacagtaaacatacaataatttttattatggaaattaatctttacatacaaaatcagctacgtaattttacttacaaaacaataaaaactgttctttactgtggcaacaaaagaagcattttgacaaatgaaaaaaattaatgcaaacaaattaaaacaatgcttttctttttacttgcttcactgtctcttctatttattttccatgatcatttgacacaaacatggattactttgatatctactgaaacataaatgataaggttcttaaaggtttgaattaaaaagtctgggtgttcaatattttagaagctgaataaacaaaacgaaattggggtttgtgattacagaggatttatcatt

SEQ ID NO: 7105 - DNA, 332 bp, Homo sapiens
  unsure (14): n=A,T,C or G
  unsure (15): n=A,T,C or G
aaatagaaaacagnntattgaaagtggtgggtttgatctttttatttagaaacccacaaaatcagaaacacagtacaaataaaacagaaatcaaactataagttgacctttagttcctaaaaagaaacatatttcaaaagcaatggaatctagaattcttataacatgaataacaaaatgtacagcaagcctatgtagttcaattaatatataaggaaaaggaaggtctttcttcatgatacaagcattataaagtttttactgtagtagtcaattaatggatatttccttgttaataaaattttgtgtcataatttacaaattagttcttt

SEQ ID NO: 7106 - DNA, 408 bp, Homo sapiens
ctgtgcaagaaaaattaaatgaaatagtagatcagataaaaactagaagagaagaagaaaagaaacaaaaagaaaaagaagcagaagaagctgaaaagcaattattccatggtactccagttacaattgagaatttcttaaattggaaagccaagtttgatgcagaactcttggaaattaaaaagaaaaggatgaaagaagaagaacaagcaggaaaaaataaattaagtgggaaacaactatttgaaacagatcataatcttgacacatctgatatccagttcttggaggatgctggaaacaacgtggaggtagatgagtctttgttccaagaaatggatgacttggagctggaggatgatgaagatgatccagactataatcctgctgacccagagagtgactcag

SEQ ID NO: 7107 - DNA, 519 bp, Homo sapiens
aaaaaaagaaaaataaaataaagtgttttgattatttagggctgacttacatttcagtatgtgacaaaaattcaaacccaaatgcatctagctcactcagtttcagacaggtcctatgttcagcccctaaacgaatggcacaatgccaccaattttgggattcctgagtttggttcccttaagttctcagagttttcccaactctcaaaaccaaagcatcatgggagtgacagggccactggcaagactttttgccagtcagcctagttcttcttttaagatgcagtagtctcaaagcttaaagtcagaaaatcttgcaatacaagagtaactgcaagaacatataaagaaggaaaagaaaggacggggtttctagttgctaagatttgccaaacatggctacaaaactggtaaacaaacctttcttgagtgcaaagtccattagcccaacttgccatgaagagatttgaaataaaaatgaacaaatcaatttctgttgtagatacaaagcgaaaaaat

SEQ ID NO: 7108 - DNA, 485 bp, Homo sapiens
aaatgcattcttcacaagtaattcagcatatatttttatatcatgtttacttatgcttaagaattaaagcaagtatatttattactctgatggaaatatgggaaatctctcattcatgcaatatacagggataatattcaagcgaagggaaaattcccgctttttatttttgtaaatgtatccatatataatcatcgacatgacagatgaggaaacccatgaagtttcccactagtcagatatacattttcacttcatcagaagcacctgatatctacagctaatttataattagatactgtttcaatgaaaccaaaatgagccctacaagttcctataaacaaaagcttccaatgtactaggacagtcagtaattaatgcatcattcagaggattatggctgttccttaagaagtgcaagttcaaacctgtcaacaccagaggtaatcattttatattaatttatacgtaataccatttacctg

SEQ ID NO: 7109 - DNA, 452 bp, Homo sapiens
  unsure (420): n=A,T,C or G
aaaaatgttttcccgtgggtaattttctattatatattttcatatgggcaaagggaaaaaatgataaatcctctgtaatcacaaaccccaatttcgttttgtttattcagcttctaaaatattgaacacccagacttttaattcaacctttaagaaccttatcatttatgtttcagtagatatcaaagtaatccatgtttgtgtcaaatgatcatagaaaataaatagaagagacagtgaagcaagtaaaaagaaaagcattgttttaatttgtttgcattaatttttttcatttgtcaaaatgcttcttttgttgccacagtaaagaacagtttttattgttttgtaagtaaaattacgtagctgattttgtatgtaaagattaatttccataataaaaattattgtatgttttactgngatcttaatgggcagggttaagaaagttattt

SEQ ID NO: 7110 - DNA, 500 bp, Homo sapiens
  unsure (375): n=A,T,C or G
  unsure (493): n=A,T,C or G
cccaacttgcccttcaagttctacttcagtttgataaggctataaatgcagcactggctcagagggtcaggaacagagtcaatttcaggggctctctaaatacgtacagattctgcgataatgtgtggacttttgtactgaatgatgttgaattcagagaggtgacagaacttattaaagtggataaagtgaaaattgtagcctgtgatggtaaaaatactggctccaatactacagaatgaatagaaaaaatatgacttttttacaccatcttctgttattcattgcttttgaagagaagcatagaagagactttttatttattctagaattgcagaaatgactacactgtgctataccagagaattccagtanaaagaaacttgtaactctgtaggcctcttacatcacctttattatacagcatgaaaaaccataacttttttttaaggacaaaagttgttgccttcctaaagaaccttctttaataaantcatttt

SEQ ID NO: 7111 - DNA, 509 bp, Homo sapiens
aaataaataaatagctagactggtgactgattcttcagcaaaaatattttatgatccagcagattattcactgatttgacatagtctggctgtacccaggaatggagcctgcacggtgaatggctttgtatagaacctctttgtctacaccattatgtgcgctgataagcgttcatggaacgcgttgaaattgtaattatatctgaggaattctgtatagattagaattctgtatagattagagagtgttgaaacggatgatttctatgctgagtttgtgctggtgtatgtgtgaagtgagtgagttgggtgtattgtgcgctaaacttttctgatagaggaagcctgattaaagaatggtccgtgctaaggacttgttagatctagttcactctccatttaataattatatgctatttctatattttcattctcctatcacctgtcttgcctttttcattatttttattatgaaacttgtgtaaatacaatttttgtttctgtacttt

SEQ ID NO: 7112 - DNA, 328 bp, Homo sapiens
aatatggatcagagcatttattttggggaggaaaacagtggtgattaccggcattttattaaacttaaaactttgtagaaagcaaacaaaattgttcttgggagaaaatcaacttttagattaaaaaaattttaagtatctaggagtatttaaatccttttcccataaataaaagtacagttttcttggtggcagaatgaaaatcagcaacttctagcatatagactatataatcagattgacagcatatagaatatattatcagacaagatgaggaggtacaaaagttactattgctcataatgacttacaggctaaaattagtttt

SEQ ID NO: 7113 - DNA, 280 bp, Homo sapiens
gtacaaaactttttatatcaaaaggctttgcacatttctatatgagtgggtttactggtaaattatgttattttttacaactaattttgtactctcagaatgtttgtcatatgcttcttgcaatgcatattttttaatctcaaacgtttcaataaaaccatttttcagatataaagagaattacttcaaattgagtaattcagaaaaactcaagatttaagttaaaaagtggttttggacttgggaacaggactttataccttcttttactgtaacaagt

SEQ ID NO: 7114 - DNA, 244 bp, Homo sapiens
  unsure (15): n=A,T,C or G
  unsure (16): n=A,T,C or G
tgcactcaaagcttnntaagatagttaagcgtgcataagttaacttccaatttacatactctgcttagaatttgggggaaaatttagaaatataattgacaggattattggaaatttgttataatgaatgaaacattttgtcatataagattcatatttacttcttatacatttgataaagtaaggcatggttgtggttaatctggtttatttttgttccacaagttaaataaatcataaaact

SEQ ID NO: 7115 - DNA, 484 bp, Homo sapiens
  unsure (342): n=A,T,C or G
aaattgttctcaaaattagggaaataaaagagaatgaaattgtggcaacttttttccctcctagttaccagatgtatgctactcatggtgggtcctggcttccctaaagataattggaagacttcattggattgatagagagaaactgcgtaatttcattttagcatgtcaagatgaagaaacggggggatttgcagacaggccaggagatatggcaagtaatatttctgacatatttctataaattatttcagcgtttgcattacttcatggttccatggatttccagggtggcattccgagtgttgctttgaaagcagtttttttttctatttattgtanagtgtatgaaggatatagaacaatcttacagaaatttcttgtcgcttgttgctaacaaaattagtatatggtaaaggtcaggtattcataatttgaagttaaagaagttttcattttgtgatctgtatataaattctttttt

SEQ ID NO: 7116 - DNA, 292 bp, Homo sapiens
caggtaaagtaattcgtttaataatagatgtgtttttagaggaaatgctgttacttggaattaattttccagttatacagtcttctataacttactaataatattctatatgtactttatgtaatttccctaaaaagaatgaactaccactacactatggtgttaaaccaaaatatagggaaaataaacactaactgctgcttatggataatgttgcaactacttgttatgcatataaatattttactttttcacatgtatagattgcatttcttaggtgttttaatttttt

SEQ ID NO: 7117 - DNA, 352 bp, Homo sapiens
ctgtaaggaggcggcagacggctaccagtgctgtatgatggcgcagtacaaccggcacgacagccccgaagatgtgaagcgacgagccatggccgaccctgaggtgcagcagatcatgagtgacccagtcatgcgccttatcctggaacagatgcagaaggacccccaggcactcagcgaacacttaaagaatcctgtaatagcacagaagatccagaagctgatggatgtgggtctgattgcaattcggtgatgacttgttcatccccccttcccttcgccctcatgtggaaagaggagctgggaccgcggcgagcagcacggagcggaagggagagcaggggagagaagg

SEQ ID NO: 7118 - DNA, 237 bp, Homo sapiens
  unsure (15): n=A,T,C or G
  unsure (40): n=A,T,C or G
  unsure (41): n=A,T,C or G
  unsure (210): n=A,T,C or G
  unsure (220): n=A,T,C or G
aaaaaattaactacnaaaagcttttatatttaagaactgnnagtgtttcaaaactatgctgttttgtgttgttatagttgtaacatatttctcaattttcctgtttttcttttagtttattgacaagactacctggtcggcctaaattcacattttcattcacgctttttgggcatttgagatcaaagagtaagtatggtttctacaagntacttcattnttctacttattcttttt

SEQ ID NO: 7119 - DNA, 396 bp, Homo sapiens; identical to SEQ ID NO: 6096

SEQ ID NO: 7120 - DNA, 436 bp, Homo sapiens
  unsure (12): n=A,T,C or G
  unsure (13): n=A,T,C or G
  unsure (16): n=A,T,C or G
  unsure (120): n=A,T,C or G
  unsure (139): n=A,T,C or G
  unsure (165): n=A,T,C or G
  unsure (195): n=A,T,C or G
  unsure (224): n=A,T,C or G
  unsure (226): n=A,T,C or G
  unsure (286): n=A,T,C or G
  unsure (305): n=A,T,C or G
  unsure (308): n=A,T,C or G
  unsure (342): n=A,T,C or G
  unsure (364): n=A,T,C or G
  unsure (410): n=A,T,C or G
  unsure (422): n=A,T,C or G
  unsure (424): n=A,T,C or G
tttttttttttnnttnttttttttttttatggaaggttctcaggtctttatttgctctctcaaattccaggaattgacttatttaattaatccatcaacctctcatagcaaatatttganaaaacaaatttatattcanattcttattttcagtagggaagtaanaagttgcagctcagtgcacataaagttganacagagatggagacatccagccccacctntntggaacaagaaagatgactggggaggaaacacaggtcagcatgggaacaggggtcacagnggacacaagggtgggctgnctntccacctcctcacattatgctaacagggacgcanacacattcaggtgcctttgcanaaagagatgccagaggctcttgaagtcacaaaggggaggcgtgaanaaatcctgcatntnagtccctcacaa

SEQ ID NO: 7121 - DNA, 497 bp, Homo sapiens
  unsure (277): n=A,T,C or G
  unsure (346): n=A,T,C or G
  unsure (372): n=A,T,C or G
  unsure (391): n=A,T,C or G
  unsure (396): n=A,T,C or G
  unsure (402): n=A,T,C or G
  unsure (403): n=A,T,C or G
  unsure (428): n=A,T,C or G
  unsure (430): n=A,T,C or G
  unsure (431): n=A,T,C or G
  unsure (443): n=A,T,C or G
  unsure (444): n=A,T,C or G
  unsure (449): n=A,T,C or G
  unsure (460): n=A,T,C or G
tataacacctctagtagaaagcaagcaatagttaaggtggcaggaaggcaatctactttcaaggcttttattaaagtttagaaatgatcagtggtcttcagaagattataaatttcagtctaaactgaaatgcgtttttaattttctgaataagtaacttccagtttacgatgaaaataagtgatcagtttctctgaccaaagaaagaggccattgcatgtgattggactgacctcttcctgtggtgactagaaagtgctaaaagaatattctttantattttctctcatactaaggggttaatatggaatgtgtttgaaattgcaaattgaataattgtccaggntttttttttataccttgctaaattangttcctcttttaatctagngatangatacnngtgatgccagtgatgacagcttttnannagccaaggatannctganttggaaataangctgaaatgaatacatgactgggaataatggggactg

SEQ ID NO: 7122 - DNA, 131 bp, Homo sapiens
  unsure (21): n=A,T,C or G
  unsure (22): n=A,T,C or G
  unsure (32): n=A,T,C or G
  unsure (33): n=A,T,C or G
  unsure (57): n=A,T,C or G
  unsure (58): n=A,T,C or G
  unsure (68): n=A,T,C or G
  unsure (69): n=A,T,C or G
  unsure (90): n=A,T,C or G
ttactaaatatttaggagatnncagtgcattnngggttgttttttttttatataatnnatacatatcnnccctttgcagtgatagcatanaagagtaagtatggccttaggtacaacacgttttttacctg

SEQ ID NO: 7123 - DNA, 388 bp, Homo sapiens
ctgaagtgtggcttgcataaataactgtttattccaaaatatttacatagttactatcagtagttattagactctaaaattggcatatttgaggaccatagtttcttgttaacatatggataactatttctaatatgaaatatgcttatattggctataagcacttggaattgtactgggttttctgtaaagttttagaaactagctacataagtactttgatactgctcatgctgacttaaaacactagcagtaaaacgctgtaaactgtaacattaaattgaatgaccattacttttattaatgatctttcttaaatattctatattttaatggatctactgacattagcactttgtacagtacaaaataaagtctacatttgttt

SEQ ID NO: 7124 - DNA, 308 bp, Homo sapiens
  unsure (17): n=A,T,C or G
ccatttaccagactccnacacaatgggccaccaccagtgtgacagcaggacatcctaatatatggatcttgatttttaagtttcagtatctgaacttcgtaaattagtaacttttagctgggaaagtatagcatgaaaccagaggttctcagaatgactgtaagatagcttacatttcctctttttgcctttatctccccaactaaaatacaatggggaagaagtctgcctatgatctttgaatgagctttttaaggaagaaatattatatattgtttgttaaagtttattgaaataaagaatcattt

SEQ ID NO: 7125 - DNA, 146 bp, Homo sapiens
  unsure (16): n=A,T,C or G
aaaaaaattaaatacncttaatttactaaatatttaggagataacagtgcattaagggtttttttttttatataatacatacatatcacccctttgcagtgatagcatagaagagtaagtatggccttaggtacaacacgtttttt

SEQ ID NO: 7126 - DNA, 318 bp, Homo sapiens
aaagaaaccaccaccaacaacaaaacaaccaaaaaccatgttttatgtcaaagctctgtagcacagagaatgtggtgtcacagatacatcgccgagagaggtttctttctttcttttttttttttgagacagagtctggttctgtttcccaggctggagtgcagtggtgggatctcagctcactgcaacatccgcctctggggttcaagtgattctcctgtctcagcctcccaagtagctggaattacagggacccgccaccacgcccggctaatttttttgtgtggttttagtagaggtggggtttcaccatcttgg

SEQ ID NO: 7127 - DNA, 382 bp, Homo sapiens
aaacttgtgataggcatatctatgaaacctttgtaaatttagtttattgctttaccattattttactaggtaaaattagagaacagattttgttctctaatttttaagccttatttacatatgcagaaacagcttaaatattttgactagattagacaaacagttaatagatccaccattaggaatcaatatattatgtcataataaacatcctttttctttcactgaaatttcttttagaaataaacttatttttgcttgttatgttttgaaacttgacataggatattttccctctggctacacattcacctacccttgttctctatttagattattcaaataaagttagtttgcttttatagcaaaaaaaaaaaaaaaa

SEQ ID NO: 7128 - DNA, 559 bp, Homo sapiens
ggattacttgagccccagaggttgaggttgcagtgaaccatgatcacaccactgcattctagcctgggtgacagagtgagaccctctccctcctaaaaaaatccttaagaaatatattgatgcttggttcctttggtcagaattttgatttaaggtgttgggagtgtagcacagatgttggaataaacctctcaaactgattttaatatacaaacaaggtcgagaaccaccaaggaagagtttttatgcataaagattcctgtactctaccctagaactaatacatctgaatctctgggaatggagtataacaatcagatttgaaaaggtttctttagtaattttaaggactgaccagtttagacactgctttgttagagtaaaatgattaggtacctagtatcaacctagccatccaaccttatattaataactaggaaaataaagggttggagcctctgtgtttctttgttgaaaaatctgctactattattagatctgtgaaaacaattgaaaattcggttattatcaccttaaaagtacaaaacctatagatttt

SEQ ID NO: 7129 - DNA, 374 bp, Homo sapiens
  unsure (269): n=A,T,C or G
  unsure (326): n=A,T,C or G
aaaggttattcactatatgaaaacagaaagggaacaattacaacaatgaaattgttttaacttttttaaatctgattctaatgtgtattgacatatatttaattatataaaagactgtgggaaaggggcattaacagtactctagaagagtaaaggataaaaatccctctttttcccctagcttccagtttgacaagagggaatacttaatcgaatcctgtccacaaaaacagctaacagtactgtgctttgaaaaaaaaaaaaaaaancaaacctgacttcatataattcttaatacatcctgtgctgctgttggtttttttaanacttctagcagtagctataggttccggtctggcactttaggtattttt

SEQ ID NO: 7130 - DNA, 53 bp, Homo sapiens
aaaaaaaaaaaaaaaaaaaaaaaaaaaaaaaaaaaaaaaaaaaaaaaaaaaaa

SEQ ID NO: 7131 - DNA, 317 bp, Homo sapiens; identical to SEQ ID NO: 6103

SEQ ID NO: 7132 - DNA, 115 bp, Homo sapiens
  unsure (12): n=A,T,C or G
  unsure (18): n=A,T,C or G
  unsure (80): n=A,T,C or G
  unsure (81): n=A,T,C or G
  unsure (85): n=A,T,C or G
  unsure (99): n=A,T,C or G
  unsure (105): n=A,T,C or G
ccacttgtgtgngtcctnacaagcaaagagagcactaaacttgacattgggggtccaccactccaactttgctttctganngttntggtgtacattganccccanaaggaaagga

SEQ ID NO: 7133 - DNA, 212 bp, Homo sapiens
  unsure (14): n=A,T,C or G
  unsure (15): n=A,T,C or G
  unsure (106): n=A,T,C or G
  unsure (107): n=A,T,C or G
  unsure (154): n=A,T,C or G
  unsure (173): n=A,T,C or G
  unsure (174): n=A,T,C or G
  unsure (193): n=A,T,C or G
ccaggctgcactgnngctagctcaatgtttgttgcattcagcttctcctccattacttgtttgaggatgatgagtgaagacttgatggcttctttcaaagtcatanncttgtggtaaacttcttgcaaggagctctgggcaccctctgaagcanagccaattgctcgagcatnncactgtacaaaggtcccanatgggtccatatgaaacag

SEQ ID NO: 7134 - DNA, 388 bp, Homo sapiens
ctgaagtgtggcttgcgtaaataactgtttattccaaaatatttacatagttactatcagtagttattagactctaaaattggcatatttgaggaccatagtttcttgttaacatatggataactatttctaatatgaaatatgcttatattggctataagcacttggaattgtactgggttttctgtaaagttttagaaactagctacataagtactttgatactgctcatgctgacttaaaacactagcagtaaaacgctgtaaactgtaacattaaattgaatgaccattacttttattaatgatctttcttaaatattctatattttaatggatctactgacattagcactttgtacagtacaaaataaagtctacatttgttt

SEQ ID NO: 7135 - DNA, 383 bp, Homo sapiens
ccattattccatgtgcttaaatgataatttccttattcagtttcagaagaaaaagaatgaaattgggtaactgtcattgcgttagctttatgttgaattgggaaattgtggcataaagcttaaattcgtgtttatcaaatgtgaaccatagtagtataatgctgctttgtatataatgtaagtgctacaaatagtctcagcactgaaaatgtattgatacctcttaaatgaatgcaacttttgatgtaggtgttttgctatgcctcagaaaatatctgtctgagaatttgttaatctgtttgataatgaagatacttcctgttttcttgtttcatattttcatgttcaaaatttaagttttacatttttactactgttaattt

SEQ ID NO: 7136 - DNA, 263 bp, Homo sapiens
ccactgtctgcagcatgggcagaaagtgctcaaagtccagcaccttcacattcatctcatcactcttggggttccccaggaccttgagcacctcggcgttggtagggttctggcccagggccctcatcacatccccacactggctgtacaggatcttgccatcacctgttcggtcaaacagctggaaggcctccttgaactctgcggtctggtcttcggtgaagtcacacatcttgactgctcagctctccgggaccttttcc

SEQ ID NO: 7137 - DNA, 242 bp, Homo sapiens
ccatcttgttgctgcttggttagatcatatagctaatgaattaggcaggggagctattttttgaagatgatgaactaaatgttgaagacaagtttgagatctgtaaaatgtgattttttacttccacttataatacttgtgattggggaggtttgtggaaattcaattatgatgaaaaacctatcttttttgtaatgttggcatacttggggaatttagtggcaaatacattccccagcagg

SEQ ID NO: 7138 - DNA, 551 bp, Homo sapiens
aaatatatgcttttctagaatttgatgtttgaccatttatgacttaattaccagagagccagtaaattaggacagtgtttcaacaagcctaggctatctcgtaagttgaaaaatatcccactatagttgcttcatgagtatgaagtaagatggcctctgatttacactggttcaatttacaaattttcaactttatgataggtttatcagggtactaaatgcatttcaacttgatagtttcaacttatgataggtttaccaggatgtagtcccactgttgaggagcatctatttaggggttaattactttagtaataagtggaaagtaagataccttgagtaatgtttgcctataaaattgtcagcgtatttttacactattggctcaagaatgttataatgctaagggacataagttggcaaccacttggtttttggaaggactttcggtattgtattagaagtctgccctagctgttaaatttctgggtatttatcctaaggaattaattaaaagagttaatttgttccttttcttcagtgggccattg

SEQ ID NO: 7139 - DNA, 527 bp, Homo sapiens
aaaaattactaaaaggtttactttgttcattaataaaacatttaacaattcaaattatatgcaccttttacctagttgaaaaaaatacacattcctgttttcacattatagcaactgattaagctgaagctgtaagtcattttttatagatgagtgatccgcatctccatcaattagaacactggaaaagatgttttataaaagaggtatttaattttgtttgtaggattaactcatgcaaataataaaaaagatatcctgttggttcaatagtacactgtctcctttaaggaaggaagcgtgatgaatgaatgatgtgtagacttgagggatgactattaaaggggacgtaggatgaagagaaagaacctacagatgacaatgaatgtaaacttatttttcttcatgtgtaagcagtgtgctcgctggtgatatccagatcctaacaagattacttggttagctggttaggaccagtaactggattgcgaccactatgataatattttgaaccaaatgttaatgct

SEQ ID NO: 7140 - DNA, 363 bp, Homo sapiens
  unsure (16): n=A,T,C or G
  unsure (19): n=A,T,C or G
  unsure (26): n=A,T,C or G
  unsure (27): n=A,T,C or G
  unsure (138): n=A,T,C or G
  unsure (161): n=A,T,C or G
  unsure (163): n=A,T,C or G
  unsure (164): n=A,T,C or G
  unsure (206): n=A,T,C or G
  unsure (263): n=A,T,C or G
  unsure (264): n=A,T,C or G
  unsure (271): n=A,T,C or G
  unsure (337): n=A,T,C or G
ctgttctcatacagancgnaaatcannacgaaatatggaaaacatttatttcctttccttcaaaatttaacttacattccactttaatagctgttgaaggttaattaaaatgcagcaaagtataactacgttacgcangtgacttcagttattttaatgtnannaaaatcagactatggtatcttacgagtcattatagaaatgtncatcattaaaaagcatttattatggcactgaactgcatgatgttaccttaagtcatnnacaaaanaattcctggtccatgtgatgtgaatgggcttggcactttctccataaattttgtagatgactattngtaagattatacacttaataggtttt

SEQ ID NO: 7141 - DNA, 526 bp, Homo sapiens
taacagtaaaaaaattaaagagcgttcaagaataaattcttctggtgaaagtggtgatgaatcagatgaatttttgcaatctagaaaaggacagaaaaaaaaatcagaaaaacaagccaggtcctaacatagaaagtgggaatgaagatgatgacgcctccttcaaaattaagacagtggcccaaaagaaggcagaaaagaaggagcgcgagagaaaaaagcgagatgaagaaaaagcgaaactgcggaagctgaaagaaaaagaagagttagaaacaggtaaaaaggatcagagtaaacaaaaggaatctcaaaggaaatttgaagaagaaactgtaaaatccaaagtgactgttgatactggagtaattcctgcctctgaagagaaagcagagactcccacagacctgcccgggcggccgcccgggcaggtccaagaagcatgctggcgagcgcgataagaagctggcggccaagaaaaagacggacaagaagcgggcgctgcggcggctgtagtgggctctct

SEQ ID NO: 7142 - DNA, 437 bp, Homo sapiens; identical to SEQ ID NO: 345
  unsure (368): n=A,T,C or G

SEQ ID NO: 7143 - DNA, 327 bp, Homo sapiens
aaaaaaagaaaacaactgcgaaaaaaaagtaggctatgtatcttaagcatataaacatttgaccctttcttaaaaggtgccacaggtaatactaatctattttctatgtggaaagtgtttatgaatacagaaccaatttaggcaaaatgagatgcaaattattctagatgtaaagagttgaattttttttttaaagtacacagttttaacatactatccactctatcaagcagacttagagggattccggaaggcagagctttcagtaaccttctaaaaaattattcaatattattacacagaatcagagattgctgtgatttttat

SEQ ID NO: 7144 - DNA, 547 bp, Homo sapiens
ctgctgacagttctttggtggaaaagtaagttgcgtacttacccaagctgcccaaatgattatcaagccaagtttgtttttcaaaaataggttttaagatacaccaaagaaactatacaatacaaaaatttaacaatgaagttaaagtatatagcaaaagccaaatatgacaacacacatgtataatgtagaaaagaatcctttcagtcctagaaaactaaaatggggagaacttactgaagggtaacatacataaaatgagtactaatagcaaggaataatcctaaacattttcccaataaactgactaagcctcaaaaggacagcttaggaaaatgattaacatgcagtttttcttttttcctagccaattcagttctacttagataaatctggttgccaatcaatacatatataaattaatttttttctgctcaattactaccattttttctttttcaccttttccccaattttctctagcaacactttttcctttggtttgatcagttgaactcaaaaggtttggtacctaaaatgagtatca

SEQ ID NO: 7145 - DNA, 228 bp, Homo sapiens
ctgcttgcctgcaaagatgagcctctgctggtcgggggggatgccttctttatcttggatcttggccttcacattttcgatggtgtcactgggctccacctccagagtgatggtcttgccggtcagggtcttcacgaagatctgcataccacctctcagacgcaggaccaggtgcagggtcgactccttctggatgttgtagtcagaaagagtgcggccatcttccag

SEQ ID NO: 7146 - DNA, 404 bp, Homo sapiens
  unsure (16): n=A,T,C or G
aaattttctcacttangacttttcaaagccatctcaaaggagcttcctcaaaacatttaatgttggcatcaccccacaagtactcagaaataagtgttaaaatagaaatccaatccagtaatgggaaactgacttagattatcttatttgtttgtatatttatttgtcatctatctctcttattcactgccctattttcaacatctacaatagtgcttagtaatgaatacacatgcagtacacaaaggtgctaacacaatacatgactaatgatgagggctatgcacatttatacagaatgagaattatttagtccaaaaaatatctggaaagcataaatgctgtaattggataaagctaaaattctattactctattgaaatcagatatcaagtgatactttt

SEQ ID NO: 7147 - DNA, 267 bp, Homo sapiens
aaattacaaagtaataaaaagctttgctatttaattaaaaaaaaaaaaggaaaaaggggaaacagaggtaaataaattaggaaaacacacacacggagaaaacaaacaaaaataaaataaaataaaaacaaaaaggtgttaactaggaaggatgggttaatccaaaacccagccctgactccaggctcctcctcagaaaggtggaaccagggagaggggggaccccaggtgactgtcaggaccagggaagtaatttataactcagag

SEQ ID NO: 7148 - DNA, 492 bp, Homo sapiens
  unsure (13): n=A,T,C or G
  unsure (14): n=A,T,C or G
aaatggtattacnnataaattaatataaaatgattacctctggtgttgacaggtttgaacttgcacttcttaaggaacagccataatcctctgaatgatgcattaattactgactgtcctagtacattggaagcttttgtttataggaacttgtagggctcattttggtttcattgaaacagtatctaattataaattagctgtagatatcaggtgcttctgatgaagtgaaaatgtatatctgactagtgggaaacttcatgggtttcctcatctgtcatgtcgatgattatatatggatacatttacaaaaataaaaagcgggaattttcccttcgcttgaatattatccctgtatattgcatgaatgagagatttcccatatttccatcagagtaataaatatacttgctttaattcttaagcataagtaaacatgatataaaaatatatgctgaattacttgtgaagaatgcatttaaagctattttt

SEQ ID NO: 7149 - DNA, 342 bp, Homo sapiens
aaaaatggagcacagtgacgagaatattcaattctggatggcatgtgaaacctataagaaaattgcctcacggtggagcagaatttctagggcaaagaagctttataagatttacatccagccacagtcccctagagagattaacattgacagttcgacaagagagactatcatcaggaacattcaggaacccactgaaacatgttttgaagaagctcagaaaatagtctatatgcatatggaaagggattcctaccccagatttctaaagtcagaaatgtaccaaaaacttttgaaaactatgcagtccaacaacagtttctgactacaactcaaaagttt

SEQ ID NO: 7150 - DNA, 363 bp, Homo sapiens
  unsure (337): n=A,T,C or G
aaagttacagagtgtttcctagatagaagattagttcatttggttcattttgtctttgaagcaagccaagctcatgagccagttggttatttgtcataaatgaacacccatcactatatgctatgttgaggggaggcaagtctgatcttcgaataattgataaagtttaatatctttgtagccaaaatacaatttgcaaaccctaactccagatgtgtcgtatgaatcttgacaaccaggtcttgagatttgttttactgattgccaatcaggtatattatttgtgatgttcgtgggagcatgcaaattagaagacagtgttgtgggagttcctcantattgaattacatgtgtgcactcagg

SEQ ID NO: 7151 - DNA, 297 bp, Homo sapiens
ctggcgacgtgccactttgcgctaggggagtacagaatgacatgtgaaaaagtccttgatttgatgtgctacatggtactccccattcaagatggaggcaaatcccaggaggaaccctcgaaagtaaagcccaaatttagaaaaggttcggatctgaagctcctgccttgtaccagcaaggctatcatgccatactgcctccatttaatgttagcctgttttaagcttagagctttcacagacaacagagacgacatgacattggggcatgtgattgtgttgcttcagcaagagtgg

SEQ ID NO: 7152 - DNA, 334 bp, Homo sapiens
  unsure (18): n=A,T,C or G
  unsure (256): n=A,T,C or G
  unsure (277): n=A,T,C or G
  unsure (311): n=A,T,C or G
aaaagatttacatgttcntatacaatttataaagttaaaaattctctgtacaaaatcttacatgtacagagtttatataagccccattcttatggctgtatcaccacacagatttgcttaaaactataatactacaaacactcgggttcttcatattcaatcttggcacccatatagcaatacactattctgaaatgtaaattacaaaggaaataaaatgtaatcatgcagacattttttaatataagaaaatgcnataaaatatactacaccagancaacatttatcaattccatagatactgagttttnaacttactgcactgttttcatat

SEQ ID NO: 7153 - DNA, 304 bp, Homo sapiens
  unsure (14): n=A,T,C or G
  unsure (15): n=A,T,C or G
  unsure (17): n=A,T,C or G
aaaaatacaaattnnancaaaatattaagaatttttaggatgggaattataaaagtcaacgctgaacaaaattctacttttagatagtatgtatcttaaaatattatgaaaaatattctttattctgaaaacaatgtcaggaaagaatacctgagttctctaaaaccactagttctaatttcaaattgctgttttggtaacataaagaaaacacatttacaatttaacactgcagttacctgtcaaataattagaatagaataaatgttgcatatacattaggttgaacattatatatattttt

SEQ ID NO: 7154 - DNA, 402 bp, Homo sapiens
aaaaagccaacactttgccaagcttgttatatcttattatttcttgattctctttgagtaaaaagcccaaatgactgtatggaagagagatgaatggtagaggagagaggaaacacaggttctctaatgtactaaatcaggactttggcaaggaagttataaaaatataatatattcaaatcagtaacttcataatttattagacatcccatttattagaactctaagttcttttgcttttatataaatgaaacatttattctataaatagaaatgtatttttcagaattttctttgggttggtttcttggtagcatctcccagtaatacatgaataacatactgaaaccatgatacaatgtttaggtagatatacatatacatatgtggtcatgtgttttt

SEQ ID NO: 7155 - DNA, 346 bp, Homo sapiens
  unsure (78): n=A,T,C or G
  unsure (133): n=A,T,C or G
  unsure (173): n=A,T,C or G
  unsure (194): n=A,T,C or G
  unsure (206): n=A,T,C or G
  unsure (215): n=A,T,C or G
  unsure (218): n=A,T,C or G
  unsure (237): n=A,T,C or G
  unsure (295): n=A,T,C or G
  unsure (302): n=A,T,C or G
  unsure (316): n=A,T,C or G
  unsure (317): n=A,T,C or G
cctgagcgtcaatcatatgttgcagttagtatacaactgactaaaacaagcaagcagagaaaagcatcagccttccanagttactgtctgcttaaggcagaaacagcagtaaataatgaggaaaatgaattanctccagtgctggaacaactaactaacttggtgttacctgnaagtgaaaactcaagtgtcanatgaagggaggnggagttatnctnttatagtacagtggcctgntatctttttaatgaatatatacaagccaacatccaatttctattattacaattagggngtcttgngagctgtgttatgnnaatatggaggaagaaaactatattggctg

SEQ ID NO: 7156 - DNA, 201 bp, Homo sapiens
  unsure (13): n=A,T,C or G
  unsure (14): n=A,T,C or G
ggagaagacagannataaagataaaccccttatttataaaggtgaggggaagtggcttcgaaacattgactattaccgtttagatggttccactactgcacagtcaaggaagaagtgggctgaagaatttaatgatgaaactaatgtgagaggacgattatttatcatttctactaaagcaggatctctaggaattaatct

SEQ ID NO: 7157 - DNA, 559 bp, Homo sapiens
aaatggacttttctgtaagaatgtaaaactcaaaaatttgtcaagtatgtatctgatccacacaagtccctagaaaggttttctgtgtagtcttcattaacgcaaatctttgtgaatgtttcactcttactgtaggatcttgaatatgttttacaataatgaagctacaaagtttttatgcagtgcattcattgtaaactataaataacatttgtattaaaaggaaagctgggtaatacaaaaataggagagactctgaggagcaggcaatctgttgaggctcagtatatcttatttgctttgtagtctgctgtcattcctttcaaagagcacacagcacatgaggcatagtaatcatctgtcttgttaacctctctaatttagaaatctgttgttcgtaaaactggaccaattatcacaaactatcatttgcataattaaccgcaagtctgttacaaagcattttgttagtggtatcaacaaatgcaggaggatggacatttataaaaaatgggttttgttaagcttgccaactccttagatatcatggactatactg

SEQ ID NO: 7158 - DNA, 286 bp, Homo sapiens
  unsure (42): n=A,T,C or G
  unsure (47): n=A,T,C or G
  unsure (103): n=A,T,C or G
  unsure (110): n=A,T,C or G
  unsure (149): n=A,T,C or G
  unsure (164): n=A,T,C or G
  unsure (171): n=A,T,C or G
  unsure (177): n=A,T,C or G
  unsure (182): n=A,T,C or G
  unsure (187): n=A,T,C or G
  unsure (199): n=A,T,C or G
  unsure (202): n=A,T,C or G
  unsure (207): n=A,T,C or G
  unsure (210): n=A,T,C or G
  unsure (230): n=A,T,C or G
  unsure (264): n=A,T,C or G
  unsure (274): n=A,T,C or G
  unsure (276): n=A,T,C or G
gtacaagcttttttttttttttttttttttttttcaggccanaccanaacatttttattggtttagtcacttaggcatgctaaggtccccctgggttaggganatttcanccgtgagtgtgcaggtgtgcatgcacatagggggatatntattgggatgcaaanaggtganagcagntcttnaaaancgctggcaaaanaanaatgngtnttgaaaccatgacgggttanaagctcctaactccacttccagggctgccttcanaaatcctttntnttgaccatgg

SEQ ID NO: 7159 - DNA, 485 bp, Homo sapiens
  unsure (15): n=A,T,C or G
aaatatagcattcanattgtaattggtatgtttttgccatctggtccactcaattgtatatttttattttgcaaaacaacccaaaacttactttacgttgctttgttcagtaccttttgaattcccccagaagagttgttttcaaaacaaacattccagaatgaatgtcgctcttcaatggaacgtctttattgtgcttgaagtatttcttctctggttgtaattctaaattacagagtcatttgagctttctcccctcccgctagtatctttacaggagcagggaagagcagtagaggatgtataattttgggcgaagttaaattacaatttatttgaggttattcctaaacctatttatttggtgttttggaggagatcacacactaagagaacgttgattgcctcggctattgtgctggctggacactttggtcactttttgaagcatgttaataaatgtcactgattaaaaacagacctgc

SEQ ID NO: 7160 - DNA, 291 bp, Homo sapiens
  unsure (11): n=A,T,C or G
  unsure (12): n=A,T,C or G
aaaattgtttnngtcttttcttaaagcaatattcactgttacaccttggggacttctttgtttatccattcttttatcctttatatttcatttgtaaactatatttgaacgacattccccccgaaaaattgaaatgtaaagatgaggcagagaataaagtgttctatgaaattcagaactttatttctgaatgtaacatccctaataacaaccttcattcttctaatacagcaaaataaaaatttaacaaccaaggaatagtatttaagaaaatgttgaaataattttttt

SEQ ID NO: 7161 - DNA, 315 bp, Homo sapiens
  unsure (14): n=A,T,C or G
  unsure (150): n=A,T,C or G
aaaactgtggattnttttttaagttacagaaaatccagttctgcaccacaatacaactgtaaaaaaatctgcatcatcttaaaactgtgcagtaatgccatttttataactgcataaattttattagcgttctaaacagttttgcaattnttttttgtattatatgcttgcaggttatatcttagtgcaattcagtcccaaatactttaattttgaaaagaaaaaaaaacatacatttttgagtgtaaaatacccctacaagatataaacaggggcgttttcccctcttaatactttggttttcaatacagtcag

SEQ ID NO: 7162 - DNA, 423 bp, Homo sapiens
  unsure (12): n=A,T,C or G
  unsure (16): n=A,T,C or G
  unsure (17): n=A,T,C or G
  unsure (25): n=A,T,C or G
  unsure (33): n=A,T,C or G
  unsure (34): n=A,T,C or G
  unsure (286): n=A,T,C or G
  unsure (312): n=A,T,C or G
  unsure (313): n=A,T,C or G
  unsure (330): n=A,T,C or G
  unsure (343): n=A,T,C or G
  unsure (344): n=A,T,C or G
  unsure (402): n=A,T,C or G
  unsure (418): n=A,T,C or G
ctggcaacttanacgnngggagcanagaattcnnttatccaacatcaacatcttggtcagatttgaactcttcaatctcttgcactcaaagcttgttaagatagttaagcgtgcataagttaacttccaatttacatactctgcttagagtgcaagagattgaagaattctcttatccaacatcaacatcttggtcagatttgaactcttcaatctcttgcactcaaagcttgttaagatagttaagcgtgcataagttaacttccaatttacatactctgcttanaatttgggggaaaatttagaaatatnntggacaggattattggnaatttgtctatanngaatgaaacattttgtcatataagattcatatttacttcttatacatttcgataaagnaaggcatggttgtggntaatc

SEQ ID NO: 7163 - DNA, 321 bp, Homo sapiens
  unsure (42): n=A,T,C or G
  unsure (43): n=A,T,C or G
  unsure (51): n=A,T,C or G
  unsure (52): n=A,T,C or G
  unsure (286): n=A,T,C or G
tcttaatatccttccctataatttcaattatttggattaatnntagaaatnnaataggtttattctaaaattaatccaaataattgaaattatagggaaggatattaagaagagaaaagattacaagacagaggaaagcataaaagaaaataaggtaattaaaacttcaaatcaggaaaaaggttctcaaaaatctgactttgcctacccaggtacagttggtggctatcaaattaggactcagtaattacttgtgtcactgagtgaaagctgctcattgctgccnagaacctacagagaaggccaaggggctgacgtaca

SEQ ID NO: 7164 - DNA, 417 bp, Homo sapiens
aaatatttattttcaaaacccctaaaacactggagtatgcttcacctagaaacagattacaggacgaatagctataatgaataagcaatacaatttgtatttgggatgcaattgtgttgtaaagtttcaaataatcaatttataaatttgttgcttttacttttacaaaaatattcatttaacccataacatgagttgcaaaattatctccagacttctacagatgattataaactgtaattgtgtttcagttacacagcaggtgaaaaatttaactgaaccgttacttcaaaatacaatgcattaaaaataattgttacaatataggcaccaataaaaagaattttcttggcatacaacaccacaacaactttctcaagtatctgtattatgtaaattaaaaagaggatgtaatgg

SEQ ID NO: 7165 - DNA, 545 bp, Homo sapiens
ctgcaaataatgcttgaatacaagtggctaagccaacaacagaataaatacttttatagtagttttataatcctgaaattcgaaagctttcccaattgcacttgcatctaaacaaaactgttgcagtttttactctatttattttgttccccatgtttatgaaagtcctgcacagtttcaaaggcatggtaaataatatatcaatgtttatgtagtctgttacagaaacagctatagataacattatccagtgaagagcaaaattcaagctttagaaaatattcatgcatgcaattttgacatatctaaaaataggtttttgtatatttatggtgggaggtggttgggaacttttaacaaaatggggtgttaatttttgtacagtctgtgggcatttacacatttttaatgtattaaaatttggtaattatgtgtacattaaattaataaaagttacttctagttatgatttgtgaattccctaagaccttggattttttttaagtaactttatatcagaaatgatactgcatctttatattttt

SEQ ID NO: 7166 - DNA, 379 bp, Homo sapiens; identical to SEQ ID NO: 4720

SEQ ID NO: 7167 - DNA, 498 bp, Homo sapiens
  unsure (450): n=A,T,C or G
cccaacttgcccttcaagttctacttcagtttgataaggctataaatgcagcactggctcagagggtcaggaacagagtcaatttcaggggctctctaaatacgtacagattctgcgataatgtgtggacttttgtactgaatgatgttgaattcagagaggtgacagaacttattaaagtggataaagtgaaaattgtggcctgtgatggtaaaaatactggctccaatactacagaatgaatagaaaaaatatgacttttttacaccatcttctgttattcattgcttttgaagagaagcatagaagagactttttatttattctagaattgcagaaatgactacactgtgctataccagagaattccagtagaaagaaacttgtaactctgtagcctcttacatcacctttattatacagcatgaaaaaccataacttttttttaangacaaaagttgttgccttcctaagaaccttctttaataaactcatttt

SEQ ID NO: 7168 - DNA, 384 bp, Homo sapiens
  unsure (10): n=A,T,C or G
aaaacattgntttctaaacactaacaaaaaaaattaagggcaaactgaaaatacaaatgagatttacaggcactgtgtgtagaatgtgcaaaaattcacttagcttttcttttgtttttttggtgttgctttaagaaactttatcaaatatatttcttacaaatataaagctttctctcccaattgaaggcaattaaaaaaattcaaagtttatcaatactcagtacacaggtgaaccagtcaaattcattttctttctggaaaagaataacaaaccaatatttaggatgttcagagactcaacaaaaaccattctagaaatcacccagaacaattgttttctgttgccaaagccttttgttcttcaaaagtcaccatccacca

SEQ ID NO: 7169 - DNA, 509 bp, Homo sapiens
cacaatttttaacgcttatgtagtccgccatcaaaacatcaatgtactgaagattttaagcagcatgaggcaccatcacgtttttgtttcttccccctcatttccccgcccctaccagatctgtttttgatgtttagcctagaagtagcaagaaggatgaactgaagcagattagagatcgagctggtaatccagatgagaaataatgaaagtcttctctagggtaatagtggtgaggtaaaggcaaaaggatagctgacagacgttaggaggtgaaatggcacaggacttggtgaaaaactggttaggagaagaggaaagagaaaagcccaggttatcctcagatttatggtttggacaacaggaagaatagcaatttctccaagtcgagtcctattataaatattttcatttttgtattttcacttttgagtctcaatttaccaagataacttcctttcaatcagcaaaacacctgtttactacttactaacaatattaaagatgca

SEQ ID NO: 7170 - DNA, 515 bp, Homo sapiens
  unsure (14): n=A,T,C or G
  unsure (17): n=A,T,C or G
  unsure (288): n=A,T,C or G
  unsure (412): n=A,T,C or G
  unsure (423): n=A,T,C or G
  unsure (449): n=A,T,C or G
  unsure (461): n=A,T,C or G
  unsure (465): n=A,T,C or G
  unsure (469): n=A,T,C or G
  unsure (491): n=A,T,C or G
cagaggcaactgtnccncgtcagaaaacagaaggaaagaacttctccagaggataattgtggagcttgttgaatttatatctcccaaaacccctaaacctggagaacttgggggaagaatatctgggtcagtggcttggagagtagcccgaggtgaaatgggtctacagagaaaagaaaccttgtttattccctgtgaaaatgagaagatttctaaacagctccacctttgttacaatattgtgaaagatcgttatgttcgagtttcaaataacaatcaaaccatttntggatgggagaatggcgtgtggaaaatggaatctatattcagaaaagttgaaacagactggcacatggtatatttggcccgaaaggaaggatcatcttttgcttatatttcctggaagtttgantgtgggtcagntttggcctaaaagtagatagcatttntattagaacaantagntcanacttttcagacttggaacagtngaatggaaattgcgatctgataca

SEQ ID NO: 7171 - DNA, 205 bp, Homo sapiens
gaaggaaagaacttgcatgttggtgaaggaagaagtggggtggaagaagtggggtgggacgacagtgaaatctagagtaaaatcaagctggcccaaggtgtcctgcaggctgtaatgcagtttaatcagagtgccattttttttttgttcaaatgattttaattattggaatgcacaatttttttaatatgcaaataaaaagttt

SEQ ID NO: 7172 - DNA, 460 bp, Homo sapiens
  unsure (393): n=A,T,C or G
ggcagtggtaccatgttttgttctcccatataaacatcacacatccaaaacatggtaccactgccgtaaatggatgtgtgatgtttatatgggagaacaaaaagctgatgtatagccctgtatacagtgtagatactatttttgtaaaaacacaaggctaaattaatgaacaagaatactgaatatttcatcattaaaaatttcttgtatttcttgtgcattaatctgacgataatttccctgtatattatgttcatttagctgtttgtaatttttgttaattagatcaggttgtctgcatttgttggtgtaagtgaacatcatcacagttatcctgagttgagtttaagccaaatacatgcatagaaaagggtcttcctattaatggaaganggtaatttttaggatgtgtattatttcagttttgtatgtttaactttttattaaataaagtgttttt

SEQ ID NO: 7173 - DNA, 361 bp, Homo sapiens
aaacagatcaactcaatagttaacgttatataataaagaatatggtaattttaatgacaaaaatcgtattgtgaaatagcgcactctatactgagatgaatgaggggaaaaaagtcaaaactcctttcaaaactatattcaaagcatcagaaaaaatttttttttctttttacaaagttatgtataagtcatagggaccaccaaatactgaaatatgaagactctatgaccaaagttcaaaactgattttaaggaactgtgtgaagcaagacaggaaaatttgtatttaacactctatagaacttcacagtaaagctggaatttagagactaatggcttaacaggagtactgccaacaagg

SEQ ID NO: 7174 - DNA, 417 bp, Homo sapiens; identical to SEQ ID NO: 4827

SEQ ID NO: 7175 - DNA, 365 bp, Homo sapiens
  unsure (12): n=A,T,C or G
  unsure (13): n=A,T,C or G
cgtttatctcgnnctttaatttgctaaagctgtgcacatatgtaaaaaaaaaaaaaaaaagattattttaggggagatgtaggtgtagaattattgcttatgtcatttcttaagcagttatgctcttaatgcttaaaagaaggctagcattgtttgcacaaaaagttggtgattcccaccccaaatagtaataaaattacttctgttgagtaaactttttatgtcatcgtaaaagctgaaaaaatccctttgtttctatttataaaaaaagtgcttttctatatgtacccttgataacagattttgaagaaatcctgtaagatgataaagcatttgaatggtacagtagatgtaaaaaaaattca

SEQ ID NO: 7176 - DNA, 577 bp, Homo sapiens
tttggattttatttgagccaaaatatatatacttaattttagttatgccagaagtaagtataatttctcagtccaaggatgttaggaagcaacttacagagcatgcttcaaatagaattctcttggcctttgaaggtaactattttcaaacttaatagtagagtcaagcaagaatggacaattagagttttcaaaattgaaaaatattatgtattttatataatcattacctatggtttacagattttatttttatgatacatatctctaagtagtggtacactgaggacatagcaaatatgcaataaatacttattaagctgaagtgaactaacaaaaaccattaattacaccatttctaacaaccaaaccagctattgcttttcagtgttttggtgatacgttggagtaggaagtcatattcaaattggttagatccttggaagaaatagtagtatttgtttttagagtagaagactgcatcaattttaggcccgattccttggaagttcttggtaatcagtttgggataaccagggtccatcatctgtctcctttcatcatacctccaatactg

SEQ ID NO: 7177 - DNA, 571 bp, Homo sapiens
  unsure (14): n=A,T,C or G
  unsure (506): n=A,T,C or G
  unsure (527): n=A,T,C or G
  unsure (540): n=A,T,C or G
aaagaacttttgcnctgtgctgaaaatgaaatatctcttgcagtaagtaatacaatgtgccaattcataaaatgtaagttaacaggtttctcaatttaacattttcaaagacgatattaaggtcaaaaatgtcacatctatggtagcacatatagaagggcattatagatatgatgtccatccctatgaagcttacaaatttgacaatgctcaataaaagcttttagaatcacatccaatagtgtcacagtcaaagaatcacaaatctgtgtcctgtaagttctctccttctaaaatcttcatgttaacttttctactcattgccatttgttaatactaacccttaaaaaaaagaaataggaaaagaaaggctgcaataaacttgatcaggtacagaaattattgctactatacttcactacaaagcttgtctatacagtatcatatgacctttgattatgaaaaaatcagaataaaaatctttagtgacataagccttacaatcntatacaacattcacatggcantattagacagttnagcacccaatacccatagttgacaaaatgtc

SEQ ID NO: 7178 - DNA, 399 bp, Homo sapiens
  unsure (12): n=A,T,C or G
  unsure (13): n=A,T,C or G
  unsure (130): n=A,T,C or G
  unsure (131): n=A,T,C or G
aaagcactaatnnattgcagtctttattttagaaaaatgtgaagcatttttttctcccctaaaatgaatatatttagatgacaagtctttagtgctggtagaggaactaattgattttgtactatagtannaaagtgtttatatgtttcaccagaaataaaatatgtagggtttgtatgtaatcttctgtgtttatcctatgttgatttaccttaaatttgcaacatacatatccacataaatattcatgactttcttatatttcattaaaatgttttatggcttcttaaaatcatcactgtgcttctaaatatttttacgtaaaatcattgtataatgctatactgtgatatacatgaaagtttatcttgaacagtgctctttaacaatattaaattt

SEQ ID NO: 7179 - DNA, 198 bp, Homo sapiens
  unsure (10): n=A,T,C or G
  unsure (12): n=A,T,C or G
  unsure (13): n=A,T,C or G
aaattattancnncttaacagtttagtcccacctcttacttcctgcctcagtctgctttctctactgtctggattaattaggcagcctgctataaagttaaagtcacacatttctattttgcaaacactgtgattactctttgctttgtagtttgctttgctttgtagggttctgcttttaagtttttctctttttca

SEQ ID NO: 7180 - DNA, 357 bp, Homo sapiens
ccaagacactaatttttatgtataatcacaatattttatactcacctttattgactaaaaataattatgctacatgttgtcctgcatcagaagaattatttcttcttgccagtgttttgggatttgaagataatggttcactcaaagaacctattattttctctactgaggaacccaatgtagaacttgcactgatatttttattactgcctttatatgaatctataggtatctaaatgttaaggcatgtatgatctttgatcatttcttttttcaaattaaagttgtataaaagtttcaatatcttgccttaaattagttgcctattctttctaggattcaaatattgtgacattt

SEQ ID NO: 7181 - DNA, 342 bp, Homo sapiens
  unsure (248): n=A,T,C or G
  unsure (249): n=A,T,C or G
  unsure (268): n=A,T,C or G
ccacttgtgtgggtcctcacaagcaaagagagcactaaacttgacattgggggtccaccactccaactttgctttctgaaggttttggtgtacattgagccccagaaggaaaggagagtatctgtgagtgggggcctcccttgaccccagtacgaagtctatgccctgaatccccagagtagcccttcctggtgcccaactggcctggggacaaacagcgtccactacatctaggactgccggctaannggacacacttcttgacctnctaccaggaactttggtaaaagctagctttggggaaggggttgggtgtaaatatgagagggtggagggagacca

SEQ ID NO: 7182 - DNA, 451 bp, Homo sapiens; identical to SEQ ID NO: 2871

SEQ ID NO: 7183 - DNA, 298 bp, Homo sapiens
aaaggcttaatggcaataatcaggggaggaagaagagtatgtttattttacataactgacggaaaaataaattcaacaaatagtaaatagaatttaatatggtctcatgcgccctgaaggaggtggtgcccgatttggaggggtaattgctatgtccaagtaatctcctatctggaacttctgcgactgcagggtcatggaatcatcagtcccctttctgccagacatggtgctgccaatctccttaactcgatagccaggtcttttaacatctgtaaaaacgattgcaaaattgaag

SEQ ID NO: 7184 - DNA, 540 bp, Homo sapiens
ccaacatggtgaaactctgtctccaaaaatacaaaaattagctgggtgtggtggtgtgcacttgtggtcccaggtacttgggaggctgaggcaggagaattgcttgaacctgggaggtggaggttgcggtgagccgagatcgcaccactgcactccagcctggtgatagtgcaaaactccgtctaaaaaaaaaaaaaataataataataataaaaacaagtcctaagaaaaatgcccaggtgctttctggcatggtgatttgcaccacatagaactaaagacgatgtcagaccaagcttcttcctttctctctccccgcataggatgaagatttgataaagtggaaggcactgtttgaggaagtccctgagttactcactgaggcagagaagaaggaatgggttgagaaactgactgaagtttctatcagctctgatgccttcttccctttccgagataacgtagacagagccaaaaggagtggtgtggcgtacattgcggctccctccggttctgctgctgacaaagttgtgattgagg

SEQ ID NO: 7185 - DNA, 335 bp, Homo sapiens
gagccctttaagatgataaaggacccaatgcaggtaatcctgtttttggactcacgtaatgtagaatgcaaagtttagtgattatttaatctgggcctaagctagtgagagtatggaacaatggcccataaggactcctaagcgccgaagccaaggagcctcctcccttcctggttcaccccgcccaagggacctgcccccattcctgtggccctggggcccagcttccaatagtgtcagaagcaacttgtggctttgccttggttgtgagatgggtacattccaaaggagcagcctgggggagggggcaggctcagccagcccttggaggctca

SEQ ID NO: 7186 - DNA, 345 bp, Homo sapiens
  unsure (12): n=A,T,C or G
  unsure (14): n=A,T,C or G
aaatattttggncntattttataataaaatattttggcaaaaataaaatataaggtttagtttattttctattaatggtagatctggagagtattttacatttctaaatagtatctacttaatttgactgctttcacatttgtttctgaaaacactgctattcgcttttcagaattttgagattaaaagcacctaaaaataagataaaataaaatttaagtaaaatatttgtttgatgctcgaaagttgacaaattcacaaacttactttaagtgtcttacatgatatatgccaccacagaaactttattgcctgctaagacttatttgactaaatctaatcttt

SEQ ID NO: 7187 - DNA, 226 bp, Homo sapiens; identical to SEQ ID NO: 6075

SEQ ID NO: 7188 - DNA, 405 bp, Homo sapiens
  unsure (11): n=A,T,C or G
aaaaatctggntataaaaaaagtaataacctaattttttattaaaaaagaaaaaagaatttttaccaaaacttcaatatagaagtgaatgtgcttagaatggtaatagaggatctaacttttaaccaggctatcaacttctggaatatttactttcaatttggaaaaatattgttattcagaacctgaaatacattataaaactggaaatggaatcttttaggtgaattctttctttcaaaccctcataaatcagaaaaaataagccaaatttgaaggcaaaagatctttacatttagggatagtttctaatgaaagaaatcaagataagaaaaatcaattaaaacaatgtggtttaagaaattatcctcctaatgtagggggtgggaaacagatattacatttt

SEQ ID NO: 7189 - DNA, 581 bp, Homo sapiens
  unsure (539): n=A,T,C or G
cctgtccagtctttgaaaacatcaagagatacttcaccctcaagtggttcagcagtttcttcatcaaaggtgttagacaaacccagtaggctaactgaaaaggaacttgctgaggctgcaagcaagtgggctgctgaaaagctagagaaatcagatgaaagtaacttgcctgaaatttctgagtatgaggcgggatccacagcaccattgtttactgaccaaccagaggaacctgagtcaaacacaacacatgggatagaattatttgaagatagtcagctaaccactcgctctaaagcaatagcatcaaaaaccaaagagattgaacaggtttaccgacaagactgtgaaactttcgggatggtggtgaaaatgctgattgaaaaagatccttcattagaaaagtctatacagtttgcattgaggcagaatttacatgaaataggtgagcggtgtgttgaagaactcaagcatttcattgcagagtatgatacttccactcaagattttggagagcctttttagatttttctgctcangctaaaaaaaaaaaaaaaaaacagtttctaaaaatttttttt

SEQ ID NO: 7190 - DNA, 410 bp, Homo sapiens
  unsure (13): n=A,T,C or G
  unsure (284): n=A,T,C or G
  unsure (285): n=A,T,C or G
aaaaactatttgnaatgtaattttaatgcattttttacaggcccagtaatggttaaatacgtcagcttactgaataattttaactatttattcttctaaggatacagcttgtctctggattttccagtcttaattttatattttattaatctattttaatgcttgcttttcccatttatagacgttgtagcagtaattgcaagaagttcttgagctgaattcctgttgtgacaacttcctataattacagtagataactttttcttttagtcgtatataacttnnctataacttgtgatggacaagagatatgcttatccaataaaataagcttaaatattagatgctcttgggtcaaaatgtccttttaccaaattgacctttttatgagttctttgggtaaatacttt

SEQ ID NO: 7191 - DNA, 181 bp, Homo sapiens
  unsure (13): n=A,T,C or G
aaaaatgtccccnaaaattgcaattcctacaaataaatgtcatagtgcaaataaatgtcaggatttagagaaggagcctaaactgaatttgtgttatttcagtaaaagttatggagttatgggtctagacgtgttaataagttagacagaactttggcactttagaacaaatgcatgagtg

SEQ ID NO: 7192 - DNA, 562 bp, Homo sapiens
  unsure (457): n=A,T,C or G
  unsure (492): n=A,T,C or G
  unsure (529): n=A,T,C or G
aaaagattgtagatgacattggaatctaatttccgtatttgggtgctttcctagtattgtaagaatatgcttaattaatgagtcgcaatgaataatctgtttgtcttgatttgctttctgaaaggtgatgagggttttgggaaatggactttgttcaggcttttgccctttgtggctgtgacatattaagatgttggcagtaaaattgagagccaccagaagatgttaactgtgtatatgggcgctgccagataggaaatccaaatgagtagactatagtgttattgttagctactatggggtgagacgtagacagataaccatatgtaaggcagctccctaaatgctgaaacaaagaaccgtctcttgacttactcctgatgttctcatggtacatggtagctgccccaaaagcttgcaattaattgaaacttctcatttgttaggtggcaggtangtaggttttgaacttggtagtgatattcagacgangagcaagattccactggcagttctgtgatgctaagtnaatgatgtgatcatatccgtgctttagaaagat

SEQ ID NO: 7193 - DNA, 501 bp, Homo sapiens
aaattattatcttcttaacagtttagtcccacctcttacttcctgcctcagtctgctttctctactgtctggattaattaggcagcctgctataaagttaaagtcacacatttctattttgcaaacactgtgattactctttgctttgtagtttgctttgctttgtagggttctgcttttaagtttttctctttttcagacaaattactgataaaaatgatattgctctatatgtaatatatcctgaaagcattattttttgttgaataggaaataaaattaatgaagacagaggctagaaagcatccattaattaatgagacacacttaactacttatctctaaaccatctatgcgaatatttgtaaaaataatgaatggactcatcttagttctgtatataaatatattttctttctagtttgtttagttaaggtgtgcagtgtttttcctgtgtattaaacctttccattttacgttttagaaaattttatgtatttt

SEQ ID NO: 7194 - DNA, 422 bp, Homo sapiens
cgcgagcgtctgggcgggtggtaggaacaatggcgctgtcttaagtggcacagtggagcagctctgaagatgcaaagatacacgaaaaaacttccagaacatctgggagaatatttaatggaaaatcgcttggttaaaacctgacacttttaacagtgaacagcgttctgagtgtggacgagtagccagtgaagataatgaatgtcgaatgtgactgactagcagcttcattttgaatgagggtcgctgtctgcccattgatagaggccagattgtcttggaagttccaaagttgcaacgatttctggctagtgccacgaggtttacttgactgttgtgtgaaaagctgataagaaaaccatccagaaaaaagctcttcgttttacaaacatgaaaataaaacatgtaattttggaacaaaa

SEQ ID NO: 7195 - DNA, 460 bp, Homo sapiens
  unsure (16): n=A,T,C or G
  unsure (398): n=A,T,C or G
atgagttcttatctancgttgcaggccagcaaatacagaggtggtttaatcaaacagctctagtatgaagcaagagtaaagactaaggtttcgagagcattcctactcacataagtgaagaaatctgtcagataggaatctaaatatttatagtgagattgtgaaagcaaccttaaagttttgaagaagactgatgagactaggtgctttgcttcctttcatcaggtatctttctgtggcatttgagaacagaaaccaagaaacatggtaattactaaattatgaggctttgctttttgtttgcttttaagtagaaaaacatgttggcaacattgagttttggagttgattgagataatatgacttaactagttttgtcattccatttgttaaagatncagtcaccaagaatgttttgagttttttgaaagacccccaatttaagccttgccttattttt

SEQ ID NO: 7196 - DNA, 423 bp, Homo sapiens
aaatcatatttcattcattttctccctttagcaattttcattttatttctcataatttgaacagagacagttctcatacatgatcagatgctttttttttcttcttaccatcatttatgcatgacataggtaatgtgactaatttctccagttgattcaagaaactcattactttgcctcaaattatatgtaaaatatttgttttacttaggttacagttatcagaaaggtagtttttttcttctattaaaatataacattgtgaaagaaaataaaatttatgctattctttgctttgtttttataaatgaatttttcatagaatttacagtatattcaaaggaagaaagataaaattattggtcatcatttgtaccttagaagtacaagaatttaagtaaaagaaatgttcatttttgtttt

SEQ ID NO: 7197 - DNA, 585 bp, Homo sapiens
aaaaataaagaaaaaaataccacgactctttgctaatggcttttaagatttgcagacacagctaaatactcatctaacaaagtatccaggctatccaactatattgccatgaattcataagacagtaacacacatttataatataaaagtagtcaaaaaaataaaaagaaacagccacaggtaatttagggctaaaatgagtcctaataagggttacatgagaaataacatataagaccccaaataaattttagatacaaaattaaatgatgtggctttgttcaaacatacctaaaattcaaaatcaagttaaatacctaggctggcttttttatatcaccagctttcattagggctttaatcgctcttgccctcatctcaagttctagcagctccagttgctgtgcagaaggttgaacatcttctggtggaggaacagccagggtggctgctttgggttcgtttgggctagactctgccagtcctagaatctcattcacacttttctcaatgtctttctccaggtcatctatctgaccagcttcactttggactgtattttctggtgcctcgggagcagacctc

SEQ ID NO: 7198 - DNA, 146 bp, Homo sapiens
  unsure (12): n=A,T,C or G
  unsure (13): n=A,T,C or G
aaaaaaattaannccctattaatttactaaatatttaggagataacagtgcattaagggttttttttttatataatacatacatatcacccctttgcagtgatagcatagaagagtaagtatggccttaggtacaacacgtttttt

SEQ ID NO: 7199 - DNA, 603 bp, Homo sapiens
  unsure (457): n=A,T,C or G
aatgtttctaggataggatattaaaaatgattgaaacccatgcatggtgttagacaatttttctaattattccattgagtcagttttttgtgattagtgattatcagagcaaacatcatgtagatagcacaagtatttggagaaacgttgtttgttttgttaccaaaatgttggaaaaatttatttcaataccttttagatttcataaagtgcagtgtatataatgcctactgaaagactgtaaaatattgaaattttctttcaagcaaagtgtaaaaaaatatattgagcctgtaaattgctctgtgactagacttcattgtcgtcttaatatattcttgcatgtgcatatatatacacacatgtgtatatatatgtgtgtgattatgtgacctatgcaatacaaattatgggaatgggcagctttggagtatatatcccataattcttttttcangaatagttgcagtatttacacagcagcatttcttctcaggcttttattgggtgctgttgcttgctatgtatgaagagaaatgtgtcagacaagttttagtgtgttctgaagaagggtgtgaacaacagtgttcatgggcttttaga

SEQ ID NO: 7200 - DNA, 399 bp, Homo sapiens
cctgtccctgcagacatgagagacagcaggtctcatgggggtgacaagctttttttttttttcttaaagaattttcaaaatcaaattccagaatgattttacggagatatcccaggaaaattaaggcttctcttaaacgctaaaaaggcatgtaattgcttgttagcaaaatggatatgacacatctctgatacttttttcattattggttgggctgagcagtcagaagacctggtcgtcgtcttgactttggcaaatgagccggagccccttgggcaggtcacacaacctgtcccagcgagggacaccgagtggcccttcatgtacatccatggtgtgctggcttaaaatgtaattaatcttgtaaatatactcctagtaatttaagattttgttttt

SEQ ID NO: 7201 - DNA, 402 bp, Homo sapiens
cctgtccctgcagacatgagagacagcaggtctcatgggggtgacaagcttttttttttttttttcttaaagaattttcaaaatcaaattccagaatgattttacggagatatcctaggaaaattaaggcttctcttaaacactaaaaaggcatgtaattgcttgttagcaaaatggatatgacacatctctgatacttttttcattattggttgggctgagcagtcagaagacctggtcgtcgtcttgactttggcaaatgagccggagccccttgggcaggtcacacaacctgtcccagcgagggacactgagtggcccttcatgtacatccatggtgtgctggcttaaaatgtaattaatcttgtaaatatactcctagtaatttaagattttgttttt

SEQ ID NO: 7202 - DNA, 417 bp, Homo sapiens
  unsure (143): n=A,T,C or G
  unsure (144): n=A,T,C or G
  unsure (171): n=A,T,C or G
  unsure (191): n=A,T,C or G
ccattacatcctctttttaatttacataatacagatacttgagaaagttgttgtggtgttgtatgccaagaaaattctttttattggtgcctatattgtaacaattatttttaatgcattgtattttgaagtaacggttcagnnaaatttttcacctgctgagtaactganacacaattacagtttataancatctgtagaagtctggagataattttgcaactcatgttatgggttaaatgaatatttttgtaaaagtaaaagcaacaaatttataaattgattatttgaaactttacaacacaattgcatcccaaatacaaattgtattgcttattcattatagctattcgtcctgtaatctgtttctaggtgaagcatactccagtgttttaggggttttgaaaataaatattt

SEQ ID NO: 7203 - DNA, 361 bp, Homo sapiens
ccacattgatgataatttctagaactagtttctgagattgtcagccctttgtctaaaataatggcagtattaatgattgacttctgtcactgccatagttacctggattgtcagccttggtagcctttgtctaaagtcctaaagagttccaaaaaaaatgtgttgaaatttaattgctaaatagtggttggtgattctttacagtaggaattgtaataattttcttgcaaataagttatttactgctattgatattgaataatttgtcttttattcagatatatttcaaaaagcatgaatatatgattattcataaattgtatactttaccagtaagttttcagaggaaataaagactttt

SEQ ID NO: 7204 - DNA, 582 bp, Homo sapiens
aaataaactagttacttgcactttacctgctggcttttccatttggtagataacattctgaactccagcagagttttataatccccacgtgcttaaatatactaaatgttctttttccattaaggttaatgttcgtgaagaaattgaagagttttttccaagaatgtggaagataaatcaagataaaagaaggctaatgaaaagtattaaagatcagaaaattaaaattgaatgggggaaaaaattgaacagaagattggtcagatagaagcacttgaatatttttttaaggctattttgaattgtttgaattggggaagaatacacgaagtatgaaaaatgaaaaactcaatgaagaatgaagagaagtagaaagcaagagtgaagtagaattaaaagaatctggaagaatgaatgggtcctaggttaagtaaatgtatggtttatgttccagtgtctgtatgatcaagttgtagatgaatttgcatgattacttagttaatagagaattggtgatctggttcaagtagggaattattgaggacagttagcagtattaacagtgggttattattgagctga

SEQ ID NO: 7205 - DNA, 385 bp, Homo sapiens
ccattttaattttgcttttgtaataataccaagcccagtttctttcaacttgagagatgagctatttattcttttacttaatgaagatgtaagaaatgatcttctgttctaaaaaaaaaaaatttctctaatgtctcttgaccctgtagaaacacattcagtttctacactgcaaaacagagggatatctgtatggcttccctctttccatctttcctttcctcagggaaagccaggaaaaagaaatcttttctatcacagcagacacaccaaatctccctaagttgtaccgccttaattcctcagaatgcaattgtgtatgataccaagctacaacttgataagaaattgtgattttcttcttttattttcattctccaatttt

SEQ ID NO: 7206 - DNA, 537 bp, Homo sapiens
  unsure (38): n=A,T,C or G
  unsure (197): n=A,T,C or G
  unsure (298): n=A,T,C or G
  unsure (361): n=A,T,C or G
  unsure (373): n=A,T,C or G
  unsure (483): n=A,T,C or G
caagctttttttttttttttttttttttttttttttgntcaatttcctttaatgagtacttgttacagtaaaagaggtataaagtcctgttcccaagtccaaaccactttttaacttaaatcttgagtttttctgaattactcaatttgaagtaattctctttatatctgaaaaatggttttattgaaacgtttganattaaaaaatatgcattgcaagaagcatatgacaaacattctgagagtacaaaattagttgtaaaaaataacataatttaccagtaaacccactcatatanaaatgtgcaaagccttttgatataaaaagttttgtacaccaagcacctatttttataacttancttcccatgganagataatggcttgcgtgcattttatgtatccataacatacatacaaggctcggtcttttcaatgggataacagttcacaactcttcgatttgaattgtaatgaatctggngacaaggatttttctctaatggattccaaagttagccagaacttttaatgtcaa

SEQ ID NO: 7207 - DNA, 251 bp, Homo sapiens; identical to SEQ ID NO: 4543

SEQ ID NO: 7208 - DNA, 564 bp, Homo sapiens
ctgcaacggagagactcaagatgattccctttttacccatgttttctctactattgctgcttattgttaaccctataaacgccaacaatcattatgacaagatcttggctcatagtcgtatcaggggtcgggaccaaggcccaaatgtctgtgcccttcaacagattttgggcaccaaaaagaaatacttcagcacttgtaagaactggtataaaaagtccatctgtggacagaaaacgactgtgttatatgaatgttgccctggttatatgagaatggaaggaatgaaaggctgcccagcagttttgcccattgaccatgtttatggcactctgggcatcgtgggagccaccacaacgcagcgctattctgacgcctcaaaactgagggaggagatcgagggaaagggatccttcacttactttgcaccgagtaatgaggcttgggacaacttggattctgatatccgtagaggtttggagagcaacgtgaatgttgaattactgaatgctttacatagtcacatgattaataagagaatgttgaccaaggacttaaaaaatg

SEQ ID NO: 7209 - DNA, 556 bp, Homo sapiens
  unsure (529): n=A,T,C or G
ctgaccatagtgctcatgccaagtcctgagcagggcatcttgaatggtggttccctcatgactacacacaccgttagggaatgtttcgttaagaggaaatcaagatgttctaacctgtgaaggtagaatagattccaggctacacaaacacatgaagtgtgccttatattgattactaaagaggttgctgccaagactgcttccaaagggcagaagatagccctaaaaaatgtttgcagtgtggaaatgcatttttaataagtcatattctagtaacaagttgcatttggtaagacacaaagaaacaatgttggtatgcagagtagaaatctctggaagatgatattgtcatatcagagatattgtcagtatcagagatactgaaatctctggaagatgatttttgtctcacatatggcattcacaagtaaaatgccaaactgcaaaattcatattatgtagtacacataggaagatatctaaatatccctgtaggctctgggatgttatttcttattcttaacctccntactagattcacttgtacaatgaaata

SEQ ID NO: 7210 - DNA, 525 bp, Homo sapiens
  unsure (15): n=A,T,C or G
gtcacattccccagngcagataatgggctgctgctggctctgtggtgtctgtctgcagaagatttgctcagtcaaggaaattcaagtggtgagacctttccgccatgggtggtaagagaaacctgccttcaccaaaatctctgaaggggaaggaagtggagagaaaggtttgcttcacttcggggactgcagtttgagaaataaaagggatacagagatatctgcactttgtagaaagggcaagattatttgcttatatctgaagggaggtgggtggttttgctggatgtttggtctgaaagagttacttttgataaagttaatctaattgtagttatattttctgtgtgcttttttttaattactaagaaaaaaattggtgagttcagtagctttggtattatgagtgcaaatcataatagctccaatgtgaaaaaaaaaatcaaaagtataacttgtcacttaatgttagaaaattgcctaaaatgcagtgtaataaataatctctgtaccaaatagtaattt

SEQ ID NO: 7211 - DNA, 321 bp, Homo sapiens
ctgtacgtcagccccttggccttctctgtaggttcttggcagcaatgagcagctttcactcagtgacacaagtaattactgagtcctaatttgatagccaccaactgtacctgggtaggcaaagtcagatttttgagaacctttttcctgatttgaagttttaattaccttattttcttttatgctttcctctgtcttgtaatcttttctcttcttaatatccttccctataatttcaattatttggattaattttagaataaacctatttatttctaaaattaatccaaataattgaaattatagggaaggatattaaga

SEQ ID NO: 7212 - DNA, 553 bp, Homo sapiens
aaaaacactttatttaataaaagttaaacatacaaaactgaaataatacacatcctaaaaattaccttcttccattaataggaagacccttttctatgcatgtatttggcttaaactcaactcaggataactgtgatgatgttcacttacaccaacaaatgcagacaacctgatctaattaacaaaaattacaaacagctaaatgaacataatatacagggaaattatcgtcagattaatgcacaagaaatacaagaaatttttaatgatgaaatattcagtattcttgttcattaatttagccttgtgtttttacaaaaatagtatctacactgtatacagggctatacatcagctttttgttctcccatataaacatcacacatccaaaacatggtaccactgccgtaaatggaaaaaacaaaaaacaggaaaaaagcaaacatacaaaaaacaaaaacaccttagaaaagggagctcatcctaaggtttcttacataaaactaagagtacataaaaataaaacagctagatcaattttagagatggccta

SEQ ID NO: 7213 - DNA, 451 bp, Homo sapiens; identical to SEQ ID NO: 3176

SEQ ID NO: 7214 - DNA, 422 bp, Homo sapiens
cgcgagcgtctgggcgggtggtaggaacaatggcgctgtcttaagtggcacagtggaacagctctgaagatgcaaagatacacgaaaaaacttccagaacatctgggagaatatttaatggaaaatcgcttggttaaaacctgacacttttaacagtgaacagcgttctgagtgtggacgagtagccagtgaagataatgaatgtcgaatgtgactgactagcagcttcattttgaatgagggtcgctgtctgcccattgatagaggccagattgtcttggaagttccaaagttgcaacgatttctggctagtgccacgaggtttacttgactgttgtgtgaaaagctgataagaaaaccatccagaaaaaagctcttcgttttacaaacatgaaaataaaacatgtaattttggaacaaaa

SEQ ID NO: 7215 - DNA, 443 bp, Homo sapiens
  unsure (233): n=A,T,C or G
  unsure (234): n=A,T,C or G
ccaaggctgtttgcatcccggggatccccgtctgctgaccagctaaacaccaatttcttcctgcttttctccacttggtttggaaaatcacacagttttcaggctccatctgtttggagaaaatacattctgaagcatccccaattcaccttctaaaaactcatgtgcaggtttgataaacaccagaacagaagacagtgatgctgtattattttagatttattacatagatnnggaattcacttttttcatgacctagaaaaaaacattccagtgttcaactgttttatattattaaagggcttttaatttgtgaacttctgaaggcatgagtgttttctctttctacttttgtatatgcgcatgttttgtttcctctgacttggtatatgctcatctgagtgacggatatgtgaaatttgtagaactggttagtcaaatgg

SEQ ID NO: 7216 - DNA, 429 bp, Homo sapiens
aaatgctatgtgttaatatttcacttgcttgtattagaaaggcaaaatgtaagactttggtatgtgtgacatatgctttatttggctttattttacaagtacagtatctgcaaaaaacaaagtaaccttttttcatacctgccagttttgaatttatatatgttattgaacaaatagtaatagacgattcgctgttgaaacaagttgtccaagcaatgttatattcatttttatacttattgggaaagtgtgagttaatattggacacattttatcctgatccacagtggagttttagtaattatattttgttgatttcttcattttgttttctggtataaaagtagagataatgtgtagtcacttctgatttagtgaaaccaattgtaataattgtggaaatgttttgtctttaagtgtaaatatttt

SEQ ID NO: 7217 - DNA, 590 bp, Homo sapiens
  unsure (68): n=A,T,C or G
  unsure (537): n=A,T,C or G
aaagtgaaggcatgactgaaactaaaatatttcataaggcttagctagaggcagagtaacgtgttttngttcattgggcttccttgtacttagttttttcatttaataattcaaaccaacacttttaaaaaaataattcagatgagactgagccatatctgcagtaagagaaatatttcttaatgttttggttacttatgatagagtacttttcttgatactgttaactttgtgctttttaaaaaaagtgattctctaacagacctcttaaattgtgacatgaaggtatgtaattagatttcagaaattggtttattagtgaggaatttttatcaataaatgtcatggggcgtgttcttcagaatatatagttattttcaacaaatgccaggctagattcctcacatgtggctatttcttatgtaagaagcttttaactgaagttggcatgtttcgtaaaacttgcgtgtcttttaaaaataataaaaggaagatgagtatttatgaagaatatgtgctgacaacagggcttatgangtctatgtaccttaatctcgtttctccttaccacaatcttaaatagatttcag

SEQ ID NO: 7218 - DNA, 508 bp, Homo sapiens
ctgtatacagacagcaaaagaagcaacattttgttacagcttagcacaaggcatccaacacaaacaggcatgagacaatgcatatttatgtagcattaaaaccagatgaataatatattgtggggcaggaggaggaaaggaggggaaaaaaaaatagaaatgaaagaccaatgtttctcaatgcttccaatatataatgctaaatttcccacctgattgatagcacatccaggtgcttcaaatgtcgtgcattacagtgagaatgttaagaatggaaaatcttatctgtgtacctgcctaatactaagtttggtcaaaacacattttcatagatcttctttcagtgataaatcgatttgaacatcttgtgaagttattgtttaataacttacttaacttaggctttatgctctctagatataaacaatgaattcttttccttttataaaaaaatatgctgcatgttttattaaaagaatatgcaatagttaccaatattaaaggtttt

SEQ ID NO: 7219 - DNA, 317 bp, Homo sapiens
  unsure (14): n=A,T,C or G
  unsure (15): n=A,T,C or G
aaagaaattcaacnntatcctaaaacttgacctggtcaaacttattccatattatattcagttgctctaatatacagcaggttgatactaaaataatgacagaatttggctggtctaaacatacaaatatattttcccccttttctttctttgggaaaataagaaaaaaaacattactctgtttactcagaaagcaaggagagcagcaccttctcctggactccgtgactgtcagccatcttgtcatcacaaaaaggtgaggggtgccaggatttcactatgctgctccttcactggaaagggaaggaaatgctcca

SEQ ID NO: 7220 - DNA, 634 bp, Homo sapiens
  unsure (13): n=A,T,C or G
  unsure (14): n=A,T,C or G
  unsure (15): n=A,T,C or G
aaaatgatgcctnnnatttattgaaagcttaaatgggtgggtgtttctgcacatacctctgcagtacctcaccagggagcattccagtatcatgcagggtcctgtgatctagccaggagcagccattaacctagtgattaatatgggagacattaccatatggaggatggatgcttcactttgtcaagcacctcagttacacattcgccttttctaggattgcatttcccaagtgctattgcaataacagttgatactcattttaggtaccaaaccttttgagttcaactgatcaaaccaaaggaaaagtgttgctagagaaaattggggaaaaggtgaaaaagaaaaaatggtagtaattgagcagaaaaaaattaatttatatatgtattgattggcaaccagatttatctaagtagaactgaattggctaggaaaaaagaaaaactgcatgttaatcattttcctaagctgtccttttgaggcttagtcagtttattgggaaaatgtttaggattattccttgctattagtactcattttatgtatgttacccttcagtaagttctccccattttagttttctaggactgaaaggattcttttctacattatacatgtgtgttgtcatatt

SEQ ID NO: 7221 - DNA, 495 bp, Homo sapiens
  unsure (278): n=A,T,C or G
  unsure (279): n=A,T,C or G
ctgctcccgaggcactagaaaatacagtccaaagtgaagctggtcagatagatgacctggagaaagacattgagaaaagtgtgaatgagattctaggactggcagagtctagcccaaacgaacccaaagcagccaccctggctgttcctccaccagaagatgttcaaccttctgcacagcaactggagctgctagaacttgagatgagggcaagagcgattaaagccctaatgaaagctggtgatataaaaaagccagcctaggtatttaacttgatnntgaattttaggtatgtttgaacaaagccacatcatttaattttgtatctaaaatttatttggggtcttatatgttatttctcatgtaacccttattaggactcattttagccctaaattacctgtggctgtttctttttatttttttgactacttttatattataaatgtgttgtttactgtcttatgaattcatggcaatatagttggatagcct

SEQ ID NO: 7222 - DNA, 410 bp, Homo sapiens; identical to SEQ ID NO: 4733

SEQ ID NO: 7223 - DNA, 195 bp, Homo sapiens
  unsure (184): n=A,T,C or G
attccccaaaaggtgtgtcaggactgagttaatcagtaagctaatagaaacaactgcaatagactagggatgagatttctcaaagcagtctgatataatatgcggcaactccttatgtactggagcgtatccaatacattctcaaaactcctaaattagctaaaatgcaaggtaaagagcagtngaaaaatgcag

SEQ ID NO: 7224 - DNA, 301 bp, Homo sapiens
  unsure (219): n=A,T,C or G
  unsure (244): n=A,T,C or G
  unsure (287): n=A,T,C or G
gtaacccaattatgataattagagagataattctatagtaaattaattcataaatattttctgaaaatagatgatttttcatcacagtaacatttttgaaagtataacaaaattccttcacagtctcctactagtgacaattaactcgttatgtaatgagcccatctaaaacaacaacaacagagaatatctgccatgaatcaaatctcagaaatttanaacctatccaaaaactgggaattgntgcatttctacttttataatcttaaactaccataaaaacgtancattcggtcacagg

SEQ ID NO: 7225 - DNA, 621 bp, Homo sapiens
  unsure (144): n=A,T,C or G
  unsure (145): n=A,T,C or G
  unsure (245): n=A,T,C or G
  unsure (474): n=A,T,C or G
  unsure (517): n=A,T,C or G
  unsure (576): n=A,T,C or G
  unsure (601): n=A,T,C or G
ctggcattccttccacttctctccagccgagcttcccagaacatcacatatcactgcaaaaatagcattgcatacatggatcaggccagtggaaatgtaaagaaggccctgaagctgatggggtcaaatgaaggtgaattcaannctgaaggaaatagcaaattcacctacacagttctggaggatggttgcacgaaacacactggggaatggagcaaaacagtctttgaatatcgaacacgcanggctgtgagactacctattgtagatattgcaccctatgacattggtggtcctgatcaagaatttggtgtggacgttggccctgtttgctttttataaaccaaactctatctgaaatcccaacaaaaaaaatttaactccatatgtgttcctcttgttctaatcttgtcaaccagtgcaagtgaccgacaaaattccagttatttatttccaaaatgtttggaaacagtntaatttgacaaagaaaaatgatacttctctttttttgctgttncaccaaatacaattcaaatgctttttgttttatttttttaccaattccaattttcaaantgtctcaatggtgctataataaatnaacttcaacactctttatga

SEQ ID NO: 7226 - DNA, 643 bp, Homo sapiens
  unsure (628): n=A,T,C or G
aaacagaagagacattcctttttccttgttacatccaaggggggcacaggggtgggtggaaaggaatgtctaaaaatgaaatcccttgatatagagggacctagacggacaggatatgctaaaataatttcaaattctagcacaattttagagtagaataagtcatttttttagactaataaaattaatggctgtcatgttcactctgaaaaaaatctaaatgactgaaatgtacagaaataaaaattagcaaacaattattctagggatattttcagattttacttcatttcttgaaatgcgtgtgccatatgcaattgcatttcttgtgccaagaaactaatagaacttatttcactttacctttttttacctgcccgggcggccgcccgggcaggtctgttctcatacagaaagtaaatcaagacgaaatatggaaaacatttatttcctttccttcaaaatttaacttacattccactttaatagctgttgaaggttaattaaaatgcagcaaagtataactacgttacacaagtgacttcagttattttaatgtgagaaaaatcagactatggtatcttacgagtcattatagaaatgttcatcattaaaaagcatttattangcactgaactgcatg

SEQ ID NO: 7227 - DNA, 332 bp, Homo sapiens; identical to SEQ ID NO: 4110

SEQ ID NO: 7228 - DNA, 506 bp, Homo sapiens
ttttttttttttttttttggccagaaaaagttattttaattttctattaaacattcttctcaaagcattattttatcctatatctcactgaattttaagaaataacattagtattagaaaaactaggaaaaaagataaatgcagataattaaacttacatgaaaaaggaaaattataacaaaggactgagaacgttataaattgaaatgagattataatttgaaaactgcatctgaaagcaaactttattgttcaattattcttaatgatggtgttttatgactaatacactgatttttcaataaggaaacccatgttaaaaatatttttattttaaaaataagcctgtgttcaagctctgatcatatttcttttattttgatttgggaagaaaatactgtttctgatagcatgaaatgcaaaatttttagatttttaatctcactaattttaagaactattgagaaattgattaatgacatgaagtgcacaacactaattactgg

SEQ ID NO: 7229 - DNA, 386 bp, Homo sapiens
  unsure (368): n=A,T,C or G
aaacttgtgataggcatatctatgaaacctttgtaaatttagtttattgctttaccattattttactaggtaaaattagagaacagattttgttctctaatttttaagccttatttacatatgcagaaacagcttaaatattttgactagattagacaaacagttaatagatccaccattaggaatcaatatattatgtcataataaacatcctttttctttcactgaaatttcttttagaaataaacttatttttgcttgttatgttttgaaacttgacataggatattttccctctggctacacattcacctacccttgttctctatttagattattcaaataaagttagtttgcttttatagcanaaaaaaaaaaaaaaaaaa

SEQ ID NO: 7230 - DNA, 654 bp, Homo sapiens
cctgcagcctgcaccaggaggtacaatgtgagactgaggaatgggaagaaggcattccatggagctctgagggcactgggtgcaagggccttgcacatgcaaagaccctgttgtgggttcaagccactgtgtgggagggacaggagagcctggcgtggctgcggccttgaaggaggggactgtgcacacagaattgcaagtgggggtctccgcggaagctcctggcagttttaagcaggattattagatgattcagtcaactttacaactcactttgctgaatggagggtggattaacgagggggtagttggaggctaccccttggagggcattctggacttatctaccaaaatttcaaatgcacataccctctgacccagcagttccacttaagtatttggtcctgaaatcttggtaaaagtgcccaaagatacagaacaaggatgttcactatagcatctcttagaatatggccccaaacaggaagcaaccccaacctctttcatgagggaggtcataaaattcctgcacatgcaacagtgccatcctctgcagcctgtcaaagaggcaggcagcactaactgctggactggatgttctccaagatataataaatgcatttgtttgaaagcagcttgcagcacagtgcgtca

SEQ ID NO: 7231 - DNA, 552 bp, Homo sapiens
ctgaatatactaaacattgctctattatctgttgaattgctgtatttcactttttcagcatttggggatcattatttaattgaatttgtagagatcgattttccagacaggtctctgttcttcaatgaacaaatgataagaaacaatttgactccttatatgacaatggaattaaataaattgacactcatctaggaataattctacaatcatctccatctctaagattacctactgcaaacaaagaattgatctttctttctcaaaaaccacatgggtaagatgatcattgtgactctgaatgcaagaataagtgagtggaagctacaaggggagattatctgccaacatagaaagaatctagaagaaaagattttattacaggtaacatgacatagcttggagccatctttttggtctcttgcatacattttctctgcatgtctaaggaagaattcacaaggtagcaagcaccaatactttctgctttggagtttcacaaattgaaaatttgtccctctcttgttaagtcaatcaaacatctaccaatgg

SEQ ID NO: 7232 - DNA, 481 bp, Homo sapiens
ctggtttcgtgctgacccttagggtgcgtctgttgggttttgttgggctagaaaaatgaaaattttcagatggcgttttcattcctctgactgatattgagctgctttggtgttaaaggtgtaatgtgtacagagttgtatttaacaataataaaagtaacttaagtttgctctatcagattttagttctgcacagaggttaagtgggaaaatgcagctgttgcaaaatgtatataaatagtatgttcatttttttcagtatattatctgatactgtgttagcagcaggtctgcttaaacctagtcttgttgttattgagtcatttcctctcctttgataactagaactgaaagcatttttaacattcttctcctggaagaaatgaattacttgaagcatgaaaagcacaccagggtggttgtttatttagcaattatgactgtagatttaaaaacaagcaaagaaacgacacctcagcag

SEQ ID NO: 7233 - DNA, 294 bp, Homo sapiens; identical to SEQ ID NO: 349

SEQ ID NO: 7234 - DNA, 365 bp, Homo sapiens
  unsure (111): n=A,T,C or G
  unsure (112): n=A,T,C or G
  unsure (210): n=A,T,C or G
  unsure (211): n=A,T,C or G
  unsure (230): n=A,T,C or G
  unsure (312): n=A,T,C or G
tggcctcttacagtatttaagatatagcaaggacatggctgatttttttttataaaaattggcactaataagtgggtttattggtcttttctaattgtataatttaatttnntacaaagtttgtaaaatatcagaggatatatatatattgtttctacgacatggtattgcatttatatctttttactacagtgatctgtgacagcagcnncttcatgttgtattttttntactgaaattgtaaaatatccatcttaaagacatcaactattctaaaaattgtgtacaggatattcctttagtggtggaatnaaaatgtacgaatacttgctttttcaaaaaaatgtattttctgttaaaagttt

SEQ ID NO: 7235 - DNA, 417 bp, Homo sapiens
cctaagatggcattaaagttaaaggattcagggctctctccaagcatagttcagttaatagagttgaaaaataaaagtataggcccttggttggggagatcctggtttccccttctcagcccatgaaggagctgttgcttacagtagaaccaagcttctggaaggaagagagcagtgtggcagagggtgtgtctgtgtgtataggcagtatgctaacaggagacttgagggtaagaaatctagaggctgactttggttctgtttttaggtctttttcatttaactttgacctaagttccttaatttaggaaatgatagctttccacttgacagtctttgaagtctcttccaattttaatatccagatttagagtatgaacatagcttttcttcctgattccagagtttcctgcagac

SEQ ID NO: 7236 - DNA, 495 bp, Homo sapiens
aaaattttttcaaaatctggcttttctatttgagaaaagccctacggtgctctctcggaacccccttttgaaggatgaaacctcaaacttgcttctttaatcagtgggaggctactagaaaaaaaatcttatgttgaggttgctgttcaattccatttttacccaataaaaagtacagaaactatttgatggtgtgcataaatattacactccatgaatagcaaaaatattttttatttataatttacagttgcacagtgaaaaatcgtacatttttacacatacaatttcatttcgttaaatttgcacacatctacagaactttcacacaacaagcacctgaaactctgcaggcagtaggaaatgcaaatactaaaatgtatttattaaccaaatgatagctgaaggccctgcctcagccagacaatttatatagatatgtctatatatacataaaaaaattcttcaccttctagatccaacagcagctttttt

SEQ ID NO: 7237 - DNA, 200 bp, Homo sapiens
aaatggttatgtaagcaaagctgaactgtaaatcttcaggaatatgtattaagattgtggaatgggtgtaagacaattggtagggggtgaaagtgggtttgattaaatggatcttttatggccctatgatctatcctttacttgaaagcttttgaaaagtggaaaggtcattttgttgcatttccccatttcttgttttt

SEQ ID NO: 7238 - DNA, 641 bp, Homo sapiens
  unsure (12): n=A,T,C or G
  unsure (13): n=A,T,C or G
  unsure (14): n=A,T,C or G
aaagtcaattgnnnaccagaagtactgttattttggtgattaaaatccaaaactttagctgtatttcagtaacaaaaacataccttactagactgtgatggctcacacctgtaatcccagtgctttgggaggctgaggtgggaagattctttgagcccaggagttcaaggctgcagtgaattctgatcgcaccactgaactccagcccgtatgacagagtgagaccctgtttctaaaaacaaaacaaacaaacaaacaaacaacgtatcttactgactaaactggaatggaaatcttataattagtgttgtatttttctgcaaaatagtgaattggtacttgggagacttctgttctttgttgaaaaaattgcctttgttttgaaattatatcacctgtgttctgaactaaaatgatgggagttcattttgtatttactttgcagtaagtatcatgtaaatatgcaaatgttgaatgtaatatagattgtgttcctcattgagtttttgggtgatacagtttataaaatataacaattatacaccctcatacatttcgttctgattttgagcttgtaagatgagaactgctttttacacatttaataaaaaaaggtctctgaattatccgaaaaaaaaaaa

SEQ ID NO: 7239 - DNA, 396 bp, Homo sapiens
aaaatagcctttgccatcactgccattaagggtgtgggccgaagatatgctcatgtggtgttgaggaaagcagacattgacctcaccaagagggcgggagaactcactgaggatgaggtggaacatgtgatcaccattatgcagaatccacactagtacaagatgccagcctggttcttgaacagacagaaggatgtaaaggatggaaaatatagccaggtcctagccaatggtctggacaacaagctctgtgaagacctggagcgactgaaaaagattcgggcccgtagagggctgcgtcacttctggggccttcgtgtccgaggccagcacaccaagaccacaggctgccgtggccgcatcgtgggcgtgtctaagaagaagtaagtctgtagg

SEQ ID NO: 7240 - DNA, 108 bp, Homo sapiens
ccttaaccaataggttggaagacaagaccaattgaagagttaggaaatgtgagtttttgttacttctgttattccagtcttggtttcattgtctcattctttattttt

SEQ ID NO: 7241 - DNA, 427 bp, Homo sapiens
  unsure (11): n=A,T,C or G
  unsure (12): n=A,T,C or G
aaagaattcgnntgaaaaaatagatccaatcagtttataccctagttagtgttttgcctcacctaataggctgggagactgaagactcagcccgggtggggctgcagaaaaatgattggccccagtccccttgtttgtcccttctacaggcatgaggaatctgggaggccctgagacagggattgtgcttcattccaatctattgcttcaccatggccttatgaggcaggtgggagatgtttgaatttttctcttccttttagtattcttagttgttcagttgccaaggatccctgatcccattttcctctgacgtccacctcctaccccataggagttagaagttagggtttaggcatcattttgagaatgctgacactttttcagggctgtgattgagtgagggcatgggtaaaaatatttcttt

SEQ ID NO: 7242 - DNA, 626 bp, Homo sapiens
ggagaacagacttgaaaagtttaggaaatcataatgtggcagaggtggtgggaagaagaaagttgagctttttccccttgagaaacttctgcatttagtttctatctttccaggcaaaacaaatgggtattcttttcatacaaccattttcaaatgaaccttagaaaagtcttaacatttaaggtattttatgcacagaatacacttagattgataggaaagaactcgtaatggagtttgagtaaagaaaatgactgatgtactaaacccagtaaaaattgttgaaaatgttaaaggtcagcatgttctaattgggaatctagatatagcttagatttcctattggcttagagtatttgctataacaaatgaagtgcaatgacaattatatattcctactcggtcatactggactggcttcgttctcttaatatactcagtaatgactcaagcctctggctattaacataccctagttgccgttttttaattgccatgagccaaatacttcttggtatacaattgatccatttattttaatggctgccttttcattttcatcttttcttgctgctacccatctatgtatgtattcattggggggaaaatgtagccacattttttat

SEQ ID NO: 7243 - DNA, 143 bp, Homo sapiens
  unsure (4): n=A,T,C or G
  unsure (14): n=A,T,C or G
  unsure (15): n=A,T,C or G
  unsure (46): n=A,T,C or G
  unsure (48): n=A,T,C or G
  unsure (53): n=A,T,C or G
  unsure (65): n=A,T,C or G
  unsure (84): n=A,T,C or G
  unsure (87): n=A,T,C or G
  unsure (94): n=A,T,C or G
  unsure (95): n=A,T,C or G
  unsure (120): n=A,T,C or G
  unsure (127): n=A,T,C or G
  unsure (128): n=A,T,C or G
  unsure (137): n=A,T,C or G
cagnggcaggaagnnataactccagctaagtactacagaaaaaagncncctanatcattactgcnctcagggagccctatgagnacntacacannataatgatacatggggagcagggcnccggggnncgttaaccnagaccg

SEQ ID NO: 7244 - DNA, 142 bp, Homo sapiens
  unsure (20): n=A,T,C or G
  unsure (31): n=A,T,C or G
  unsure (50): n=A,T,C or G
  unsure (54): n=A,T,C or G
  unsure (56): n=A,T,C or G
  unsure (67): n=A,T,C or G
  unsure (70): n=A,T,C or G
  unsure (79): n=A,T,C or G
  unsure (81): n=A,T,C or G
  unsure (86): n=A,T,C or G
  unsure (90): n=A,T,C or G
  unsure (100): n=A,T,C or G
  unsure (105): n=A,T,C or G
  unsure (109): n=A,T,C or G
  unsure (110): n=A,T,C or G
  unsure (116): n=A,T,C or G
  unsure (121): n=A,T,C or G
  unsure (131): n=A,T,C or G
aacgcactgctgccggcagntccgtccctgngtggtggtggtggctaccnattncngacaacttttncancacaacttnanccgtntctnaacttcatancaccnggtnnatcacncatanttttccctangccggacacat

SEQ ID NO: 7245 - DNA, 150 bp, Homo sapiens
  unsure (9): n=A,T,C or G
  unsure (10): n=A,T,C or G
  unsure (24): n=A,T,C or G
  unsure (25): n=A,T,C or G
  unsure (72): n=A,T,C or G
  unsure (73): n=A,T,C or G
  unsure (98): n=A,T,C or G
  unsure (99): n=A,T,C or G
  unsure (108): n=A,T,C or G
  unsure (118): n=A,T,C or G
  unsure (127): n=A,T,C or G
  unsure (134): n=A,T,C or G
  unsure (138): n=A,T,C or G
accgctatnnaggtgacgcgatannccactcaagctatgcatcaagcttggtaccgagctcggaaccattannttcggccgccagggggctggggggnntggaaaaancaggagaaantggcaccgntcctcgngcanggcggcaagctt

SEQ ID NO: 7246 - DNA, 201 bp, Homo sapiens
  unsure (19): n=A,T,C or G
  unsure (22): n=A,T,C or G
  unsure (34): n=A,T,C or G
  unsure (38): n=A,T,C or G
  unsure (50): n=A,T,C or G
  unsure (53): n=A,T,C or G
  unsure (69): n=A,T,C or G
  unsure (72): n=A,T,C or G
  unsure (105): n=A,T,C or G
  unsure (140): n=A,T,C or G
  unsure (145): n=A,T,C or G
  unsure (156): n=A,T,C or G
  unsure (165): n=A,T,C or G
  unsure (177): n=A,T,C or G
  unsure (181): n=A,T,C or G
accccccacagtttgcgcnacnccgccacgtgangganatctgcagaacncangcaagctcgccgtttnatncgaggagcaggggacaatgggagactgagaaanccctgaatgccagcacactggcggccggtactagnggganccgagctcggnaccaagctngaagcatagctngagnattctaacgcgccacctaaa

SEQ ID NO: 7247 - DNA, 185 bp, Homo sapiens
  unsure (21): n=A,T,C or G
  unsure (26): n=A,T,C or G
  unsure (28): n=A,T,C or G
  unsure (39): n=A,T,C or G
  unsure (48): n=A,T,C or G
  unsure (50): n=A,T,C or G
  unsure (64): n=A,T,C or G
  unsure (74): n=A,T,C or G
  unsure (109): n=A,T,C or G
  unsure (115): n=A,T,C or G
  unsure (143): n=A,T,C or G
ggggaaccccccacagtttgngcaancncccgccagcgngaaggacancngcagaaccacgaancccgccgttnctttaggctgcaacaagagacaggggaatttgaanccactnacagaggcacagcaggaagcacactggngagaaaccataccagcgcgactccaaggactgcgaacgaagg

SEQ ID NO: 7248 - DNA, 216 bp, Homo sapiens
  unsure (16): n=A,T,C or G
  unsure (46): n=A,T,C or G
  unsure (54): n=A,T,C or G
  unsure (88): n=A,T,C or G
  unsure (96): n=A,T,C or G
  unsure (123): n=A,T,C or G
  unsure (125): n=A,T,C or G
  unsure (131): n=A,T,C or G
  unsure (133): n=A,T,C or G
  unsure (137): n=A,T,C or G
  unsure (158): n=A,T,C or G
  unsure (161): n=A,T,C or G
  unsure (165): n=A,T,C or G
  unsure (178): n=A,T,C or G
  unsure (186): n=A,T,C or G
  unsure (187): n=A,T,C or G
  unsure (206): n=A,T,C or G
  unsure (209): n=A,T,C or G
  unsure (215): n=A,T,C or G
tccatccctccgtggngggggtggttgcgcactgccggttagcggngcagcacnttttggctccggttctggacttcgcaccgccggntgtatccngataccaggtccctgggggggcccggnancccccncngganccgccgccgccgccgccgcgncgnactnctttataaaacangaaccganntgggggggggcaaaacccnacnaaaaanc

SEQ ID NO: 7249 - DNA, 126 bp, Homo sapiens
  unsure (6): n=A,T,C or G
  unsure (10): n=A,T,C or G
  unsure (24): n=A,T,C or G
  unsure (25): n=A,T,C or G
  unsure (38): n=A,T,C or G
  unsure (46): n=A,T,C or G
  unsure (49): n=A,T,C or G
  unsure (54): n=A,T,C or G
  unsure (61): n=A,T,C or G
  unsure (68): n=A,T,C or G
  unsure (94): n=A,T,C or G
  unsure (99): n=A,T,C or G
  unsure (103): n=A,T,C or G
  unsure (105): n=A,T,C or G
  unsure (123): n=A,T,C or G
cgtggncgcngttcgacgtctgtnnagtgggcttatantctggggnacncgcangacaggnacagatncttttccttgaggcccaaggccacanccctnctcntnttactttcttctccttgnaca

SEQ ID NO: 7250 - DNA, 124 bp, Homo sapiens
  unsure (49): n=A,T,C or G
  unsure (77): n=A,T,C or G
  unsure (90): n=A,T,C or G
  unsure (95): n=A,T,C or G
  unsure (103): n=A,T,C or G
  unsure (109): n=A,T,C or G
  unsure (118): n=A,T,C or G
gggccgaattggggccctctgggatgccatgcctacggaccggctcgcncagtgtgcatgcgcatatacttgccagnaattcggggtctngagangcgggccnacgttnccacccatnaccatt

SEQ ID NO: 7251 - DNA, 165 bp, Homo sapiens
  unsure (1): n=A,T,C or G
  unsure (27): n=A,T,C or G
  unsure (40): n=A,T,C or G
  unsure (63): n=A,T,C or G
  unsure (73): n=A,T,C or G
  unsure (97): n=A,T,C or G
  unsure (106): n=A,T,C or G
  unsure (111): n=A,T,C or G
  unsure (118): n=A,T,C or G
  unsure (119): n=A,T,C or G
  unsure (126): n=A,T,C or G
  unsure (135): n=A,T,C or G
  unsure (138): n=A,T,C or G
  unsure (140): n=A,T,C or G
  unsure (146): n=A,T,C or G
naatgggccaattgggcccttcccgtnaggaccggggccnccggccccaagggatgggttggnaaatgggggnaaataaattcccttggcccaaggnaaaaatttncgccncgccccnnctaaacntcggggtcnggngncgcggnttttaatctttaagcttgg

SEQ ID NO: 7252 - DNA, 246 bp, Homo sapiens
  unsure (5): n=A,T,C or G
  unsure (21): n=A,T,C or G
  unsure (28): n=A,T,C or G
  unsure (37): n=A,T,C or G
  unsure (69): n=A,T,C or G
  unsure (74): n=A,T,C or G
  unsure (82): n=A,T,C or G
  unsure (84): n=A,T,C or G
  unsure (90): n=A,T,C or G
  unsure (99): n=A,T,C or G
  unsure (104): n=A,T,C or G
  unsure (110): n=A,T,C or G
  unsure (123): n=A,T,C or G
  unsure (129): n=A,T,C or G
  unsure (131): n=A,T,C or G
  unsure (140): n=A,T,C or G
  unsure (155): n=A,T,C or G
  unsure (159): n=A,T,C or G
  unsure (165): n=A,T,C or G
  unsure (178): n=A,T,C or G
  unsure (187): n=A,T,C or G
  unsure (212): n=A,T,C or G
  unsure (222): n=A,T,C or G
  unsure (228): n=A,T,C or G
ttggncccattgggcccttcntttaggnccggggccnccggcccccaggttgggttgggaaatgggggnaaatnaatacatngnccaagnaaaattttncgcangccccntctaacgtcgggncggggncnccgtttttntctttaagctggggnaatnccccgnagccgtgcggggntaacccaanagggcgtgtgggggcggttgatatncatgggggtncataangccttggtttcctggtgg

SEQ ID NO: 7253 - DNA, 108 bp, Homo sapiens
  unsure (12): n=A,T,C or G
  unsure (37): n=A,T,C or G
  unsure (46): n=A,T,C or G
  unsure (94): n=A,T,C or G
aatcgccatctngatgcatgctcgagcggccgccagngtgatgganatctgcagaattcgcccttagcggggtctgttgccgaggtcaaagccntcttccaggaacaa

SEQ ID NO: 7254 - DNA, 216 bp, Homo sapiens
  unsure (2): n=A,T,C or G
  unsure (36): n=A,T,C or G
  unsure (61): n=A,T,C or G
  unsure (71): n=A,T,C or G
  unsure (85): n=A,T,C or G
  unsure (87): n=A,T,C or G
  unsure (105): n=A,T,C or G
  unsure (108): n=A,T,C or G
  unsure (110): n=A,T,C or G
  unsure (120): n=A,T,C or G
  unsure (124): n=A,T,C or G
  unsure (128): n=A,T,C or G
  unsure (145): n=A,T,C or G
  unsure (151): n=A,T,C or G
  unsure (168): n=A,T,C or G
  unsure (174): n=A,T,C or G
  unsure (184): n=A,T,C or G
  unsure (186): n=A,T,C or G
  unsure (194): n=A,T,C or G
  unsure (198): n=A,T,C or G
  unsure (213): n=A,T,C or G
tnaaataaaccggaactttcaccttatttagggggnccggaaaaatttgggggggcgcccnttctttaganaatggaccaattgncnttccggaagaccgggacncgncnccaagatggntggnaatngggtattatttccttgnccaagnaaaaattttcccaaagnccaacnaactttgggncngggggggngggngttactttaacaaanaga

SEQ ID NO: 7255 - DNA, 182 bp, Homo sapiens
  unsure (9): n=A,T,C or G
  unsure (11): n=A,T,C or G
  unsure (13): n=A,T,C or G
  unsure (23): n=A,T,C or G
  unsure (30): n=A,T,C or G
  unsure (31): n=A,T,C or G
  unsure (37): n=A,T,C or G
  unsure (46): n=A,T,C or G
  unsure (52): n=A,T,C or G
  unsure (54): n=A,T,C or G
  unsure (57): n=A,T,C or G
  unsure (62): n=A,T,C or G
  unsure (68): n=A,T,C or G
  unsure (74): n=A,T,C or G
  unsure (77): n=A,T,C or G
  unsure (111): n=A,T,C or G
  unsure (114): n=A,T,C or G
  unsure (128): n=A,T,C or G
  unsure (131): n=A,T,C or G
  unsure (142): n=A,T,C or G
  unsure (151): n=A,T,C or G
  unsure (161): n=A,T,C or G
  unsure (167): n=A,T,C or G
  unsure (177): n=A,T,C or G
tagcgtggntngntacaagggcngctgatnnagacanaacggttgntggganangcntcatngaattngaccanggnaagagggtgctgcaggaggtcatgggagcctgantanacctgtacagacanaanggaccctgcancccccgganttcccacctnagacanacccaccccngccca

SEQ ID NO: 7256 - DNA, 207 bp, Homo sapiens
  unsure (3): n=A,T,C or G
  unsure (59): n=A,T,C or G
  unsure (103): n=A,T,C or G
  unsure (109): n=A,T,C or G
  unsure (157): n=A,T,C or G
  unsure (160): n=A,T,C or G
  unsure (166): n=A,T,C or G
  unsure (179): n=A,T,C or G
  unsure (180): n=A,T,C or G
  unsure (185): n=A,T,C or G
  unsure (189): n=A,T,C or G
  unsure (202): n=A,T,C or G
tgnaaatacgaactcactttttagggggacgaaaattggggggcccctcttaagaatgncaatggccttccgaagccggggcccggcccaagtggtggaattntttatnatccttggccaagaaaaatttccgcccccttttaaaccgggggggggnttntttttnttttcaaaaaacnnaaccnttcncatcgccccccanccatg

SEQ ID NO: 7257 - DNA, 117 bp, Homo sapiens
  unsure (29): n=A,T,C or G
  unsure (31): n=A,T,C or G
  unsure (39): n=A,T,C or G
  unsure (61): n=A,T,C or G
  unsure (63): n=A,T,C or G
  unsure (67): n=A,T,C or G
  unsure (90): n=A,T,C or G
  unsure (102): n=A,T,C or G
  unsure (104): n=A,T,C or G
  unsure (108): n=A,T,C or G
aaaaccacccacaatagggaaaacccggncngctagaancaagcccgagcggcccgccagngngatntattatccgcagaaacccccccncaaccggggggntnggtnaaaaggccc

SEQ ID NO: 7258 - DNA, 148 bp, Homo sapiens
  unsure (9): n=A,T,C or G
  unsure (12): n=A,T,C or G
  unsure (20): n=A,T,C or G
  unsure (22): n=A,T,C or G
  unsure (25): n=A,T,C or G
  unsure (33): n=A,T,C or G
  unsure (35): n=A,T,C or G
  unsure (47): n=A,T,C or G
  unsure (50): n=A,T,C or G
  unsure (54): n=A,T,C or G
  unsure (57): n=A,T,C or G
  unsure (69): n=A,T,C or G
  unsure (75): n=A,T,C or G
  unsure (81): n=A,T,C or G
  unsure (87): n=A,T,C or G
  unsure (93): n=A,T,C or G
  unsure (96): n=A,T,C or G
  unsure (97): n=A,T,C or G
  unsure (103): n=A,T,C or G
  unsure (109): n=A,T,C or G
  unsure (127): n=A,T,C or G
  unsure (134): n=A,T,C or G
  unsure (141): n=A,T,C or G
aaagttttnttntgaaaacncncanaatcaaangngttatccatgtnttngcancancaaaaaaacagngacagnggaccntccccntagggnacnnttatcntttggntaaactaattaaataagnggaagtnacccctnatcaatc

SEQ ID NO: 7259 - DNA, 718 bp, Homo sapiens
  unsure (21): n=A,T,C or G
  unsure (207): n=A,T,C or G
  unsure (218): n=A,T,C or G
  unsure (220): n=A,T,C or G
  unsure (234): n=A,T,C or G
  unsure (242): n=A,T,C or G
  unsure (253): n=A,T,C or G
  unsure (308): n=A,T,C or G
  unsure (359): n=A,T,C or G
  unsure (417): n=A,T,C or G
  unsure (433): n=A,T,C or G
  unsure (477): n=A,T,C or G
  unsure (529): n=A,T,C or G
  unsure (551): n=A,T,C or G
  unsure (553): n=A,T,C or G
  unsure (583): n=A,T,C or G
  unsure (602): n=A,T,C or G
  unsure (629): n=A,T,C or G
  unsure (641): n=A,T,C or G
  unsure (667): n=A,T,C or G
  unsure (674): n=A,T,C or G
  unsure (676): n=A,T,C or G
  unsure (685): n=A,T,C or G
  unsure (687): n=A,T,C or G
  unsure (697): n=A,T,C or G
  unsure (701): n=A,T,C or G
  unsure (704): n=A,T,C or G
  unsure (710): n=A,T,C or G
ggccatcgtttttatgtccgnttaagccacactgggcacttagtagaaatgggttgatgtcagttcaattaaagagtgagtaacctctgctgggcccttgctgctcatctgtccacaggatggccggctcctgccagagttcaacatggcggagcctcccttgatcttcgaatgcaaccacgcgtgctcctgctggaggaactgccnaaatcgcgtcntnccaaaatgggcctnagggcaangggtgcagctntaccggacccgggacatgggctggggcgtgcggtccctgcaggacatcccaccangcacctttgtctgcgagtatgtttgggggagcttgatttcagactcagaanccgacgttccagaggaagattcttacctctttgatctcgacaataaggacggggaggnttacttgcatcgaccncgcggttctacgggaacgtcagccggttcatcaaccaccactgngagcccaacctggtgcccgtgcgcgtgttcatggcccaccaggacctgcggnttccccccggatcgccttcttnancaccccccttgatccaaggccggcgaacancttcggggtttgactattngaaaaacgcttcttgggacatcaaaangcaaagcttttnagaactttgcccggggcggcgcttcnaaagggncnaattcccancncactcctggngcgntanctaatnggatcccg

SEQ ID NO: 7260 - DNA, 502 bp, Homo sapiens
  unsure (206): n=A,T,C or G
  unsure (215): n=A,T,C or G
  unsure (216): n=A,T,C or G
  unsure (227): n=A,T,C or G
  unsure (407): n=A,T,C or G
  unsure (408): n=A,T,C or G
  unsure (409): n=A,T,C or G
  unsure (410): n=A,T,C or G
  unsure (411): n=A,T,C or G
  unsure (412): n=A,T,C or G
  unsure (413): n=A,T,C or G
  unsure (414): n=A,T,C or G
  unsure (415): n=A,T,C or G
  unsure (416): n=A,T,C or G
  unsure (417): n=A,T,C or G
  unsure (418): n=A,T,C or G
  unsure (419): n=A,T,C or G
  unsure (420): n=A,T,C or G
  unsure (421): n=A,T,C or G
  unsure (422): n=A,T,C or G
  unsure (423): n=A,T,C or G
  unsure (424): n=A,T,C or G
  unsure (425): n=A,T,C or G
  unsure (426): n=A,T,C or G
  unsure (427): n=A,T,C or G
  unsure (428): n=A,T,C or G
  unsure (429): n=A,T,C or G
  unsure (430): n=A,T,C or G
  unsure (431): n=A,T,C or G
  unsure (432): n=A,T,C or G
  unsure (433): n=A,T,C or G
  unsure (434): n=A,T,C or G
  unsure (435): n=A,T,C or G
  unsure (436): n=A,T,C or G
  unsure (437): n=A,T,C or G
  unsure (438): n=A,T,C or G
  unsure (439): n=A,T,C or G
  unsure (440): n=A,T,C or G
  unsure (441): n=A,T,C or G
  unsure (442): n=A,T,C or G
  unsure (443): n=A,T,C or G
  unsure (444): n=A,T,C or G
  unsure (445): n=A,T,C or G
  unsure (446): n=A,T,C or G
  unsure (447): n=A,T,C or G
  unsure (448): n=A,T,C or G
  unsure (449): n=A,T,C or G
  unsure (450): n=A,T,C or G
  unsure (451): n=A,T,C or G
  unsure (452): n=A,T,C or G
  unsure (453): n=A,T,C or G
  unsure (454): n=A,T,C or G
  unsure (455): n=A,T,C or G
  unsure (456): n=A,T,C or G
  unsure (457): n=A,T,C or G
  unsure (458): n=A,T,C or G
  unsure (459): n=A,T,C or G
  unsure (460): n=A,T,C or G
  unsure (461): n=A,T,C or G
  unsure (462): n=A,T,C or G
  unsure (463): n=A,T,C or G
  unsure (464): n=A,T,C or G
  unsure (465): n=A,T,C or G
  unsure (466): n=A,T,C or G
  unsure (467): n=A,T,C or G
  unsure (468): n=A,T,C or G
  unsure (469): n=A,T,C or G
  unsure (470): n=A,T,C or G
  unsure (471): n=A,T,C or G
  unsure (472): n=A,T,C or G
  unsure (473): n=A,T,C or G
  unsure (474): n=A,T,C or G
  unsure (475): n=A,T,C or G
  unsure (476): n=A,T,C or G
  unsure (477): n=A,T,C or G
  unsure (478): n=A,T,C or G
  unsure (479): n=A,T,C or G
  unsure (480): n=A,T,C or G
  unsure (481): n=A,T,C or G
  unsure (482): n=A,T,C or G
  unsure (483): n=A,T,C or G
  unsure (484): n=A,T,C or G
  unsure (485): n=A,T,C or G
  unsure (486): n=A,T,C or G
  unsure (487): n=A,T,C or G
  unsure (488): n=A,T,C or G
  unsure (489): n=A,T,C or G
  unsure (490): n=A,T,C or G
  unsure (491): n=A,T,C or G
  unsure (492): n=A,T,C or G
  unsure (493): n=A,T,C or G
  unsure (494): n=A,T,C or G
  unsure (495): n=A,T,C or G
  unsure (496): n=A,T,C or G
  unsure (497): n=A,T,C or G
tgagcgaaggaacgagtgagccgagccagtcagcagcattagtgtgatacgtgttgcttttcaattaaagctctctgcctctcggttgagcaactctgagagccggggtccccacccttctgtccccctcatggtgggtcttgtacccaacagcttgccagagcagagagccatgaatagggtttggtttcaggaaagatgaccangagacttannccagagtaagnctgagttcaaatcctggcccacgcttctgcttgtcaccctggcatgtgattcagttcttggttcttgtacatttgggtggaaactgacaactgcctgccatggggagaaccagcttgctgccttctgcaccacggctggcactgatcattagcaggttaaaaaaaaagctttgcaatacnnnnnnnnnnnnnnnnnnnnnnnnnnnnnnnnnnnnnnnnnnnnnnnnnnnnnnnnnnnnnnnnnnnnnnnnnnnnnnnnnnnnnnnnnnnactcg

SEQ ID NO: 7261 - DNA, 142 bp, Homo sapiens
  unsure (121): n=A,T,C or G
  unsure (136): n=A,T,C or G
ccagggcgtgtaatgacttcagtattggcctcgtgttgttggtactcactatccgatccaggcagggaaatggtcagtgcgtgtgtgtcgggtggggtggggggatgagggtggagaggtnccatttcaagaggtntacaga

SEQ ID NO: 7262 - DNA, 116 bp, Homo sapiens
  unsure (29): n=A,T,C or G
  unsure (30): n=A,T,C or G
  unsure (50): n=A,T,C or G
  unsure (60): n=A,T,C or G
  unsure (71): n=A,T,C or G
  unsure (75): n=A,T,C or G
  unsure (85): n=A,T,C or G
  unsure (89): n=A,T,C or G
  unsure (93): n=A,T,C or G
  unsure (111): n=A,T,C or G
  unsure (113): n=A,T,C or G
aaataaaccgcaacctgcaaccttatttnnggggaccggaaaaatttggngggccgcccnttgcgttaganaatngacaaatggncctnccgnaagaccggggctccgacncnaag

SEQ ID NO: 7263 - DNA, 137 bp, Homo sapiens
  unsure (24): n=A,T,C or G
  unsure (25): n=A,T,C or G
  unsure (31): n=A,T,C or G
  unsure (36): n=A,T,C or G
  unsure (55): n=A,T,C or G
  unsure (72): n=A,T,C or G
  unsure (76): n=A,T,C or G
  unsure (83): n=A,T,C or G
  unsure (85): n=A,T,C or G
  unsure (99): n=A,T,C or G
  unsure (100): n=A,T,C or G
  unsure (109): n=A,T,C or G
  unsure (113): n=A,T,C or G
  unsure (116): n=A,T,C or G
  unsure (123): n=A,T,C or G
  unsure (125): n=A,T,C or G
  unsure (131): n=A,T,C or G
  unsure (133): n=A,T,C or G
gacaaggaaaaacgaaggtgaaanncagcanctatncaccatgacctaagagtanacagaggaaacagttanaaanggccagnanacggcagggcgtcnnacccacaantcancanaccctgngncccacnanaacc

SEQ ID NO: 7264 - DNA, 183 bp, Homo sapiens
  unsure (22): n=A,T,C or G
  unsure (31): n=A,T,C or G
  unsure (38): n=A,T,C or G
  unsure (43): n=A,T,C or G
  unsure (77): n=A,T,C or G
  unsure (96): n=A,T,C or G
  unsure (107): n=A,T,C or G
  unsure (108): n=A,T,C or G
  unsure (120): n=A,T,C or G
  unsure (138): n=A,T,C or G
  unsure (145): n=A,T,C or G
  unsure (161): n=A,T,C or G
  unsure (164): n=A,T,C or G
  unsure (168): n=A,T,C or G
  unsure (175): n=A,T,C or G
  unsure (177): n=A,T,C or G
tagccgtggggggtgcctaggnctggaagancaggctnacaanacaaataagcagcaagaaaccggccccaatgacnactgcaaataaaaatcttnttggttttganncccaaccttttnccttggccttccccaaanaactttngggtacctggggggtntangcanggtcctnancttgga

SEQ ID NO: 7265 - DNA, 215 bp, Homo sapiens
  unsure (5): n=A,T,C or G
  unsure (8): n=A,T,C or G
  unsure (12): n=A,T,C or G
  unsure (19): n=A,T,C or G
  unsure (20): n=A,T,C or G
  unsure (29): n=A,T,C or G
  unsure (30): n=A,T,C or G
  unsure (42): n=A,T,C or G
  unsure (45): n=A,T,C or G
  unsure (47): n=A,T,C or G
  unsure (60): n=A,T,C or G
  unsure (74): n=A,T,C or G
  unsure (97): n=A,T,C or G
  unsure (116): n=A,T,C or G
  unsure (156): n=A,T,C or G
  unsure (170): n=A,T,C or G
  unsure (174): n=A,T,C or G
cgtgntgnttgnatcgctnncggcgggcnngaaatggagctnttntnacgtacccctttnaccatcactggacnagtatcttggaaactccattccnatctgtcagatcaacttgnttgggatttgcagtgtgtacttgcttttcagacttgaaantggatcgtgaaatnatgnaaaaacggttcaacccaatctacatagtgtctgtagagaaa

SEQ ID NO: 7266 - DNA, 491 bp, Homo sapiens
  unsure (8): n=A,T,C or G
  unsure (10): n=A,T,C or G
  unsure (11): n=A,T,C or G
  unsure (20): n=A,T,C or G
  unsure (37): n=A,T,C or G
  unsure (84): n=A,T,C or G
  unsure (170): n=A,T,C or G
  unsure (216): n=A,T,C or G
  unsure (246): n=A,T,C or G
  unsure (257): n=A,T,C or G
  unsure (263): n=A,T,C or G
  unsure (271): n=A,T,C or G
  unsure (289): n=A,T,C or G
  unsure (325): n=A,T,C or G
  unsure (336): n=A,T,C or G
  unsure (360): n=A,T,C or G
  unsure (363): n=A,T,C or G
  unsure (367): n=A,T,C or G
  unsure (386): n=A,T,C or G
  unsure (397): n=A,T,C or G
  unsure (398): n=A,T,C or G
  unsure (411): n=A,T,C or G
  unsure (423): n=A,T,C or G
  unsure (426): n=A,T,C or G
  unsure (428): n=A,T,C or G
  unsure (451): n=A,T,C or G
  unsure (458): n=A,T,C or G
  unsure (462): n=A,T,C or G
  unsure (483): n=A,T,C or G
gcgcaggntnnttgaaatcncttcagggcggcgcggnaagagaagctaggatctacagatgctgtagttattctagaaactcanctgctctttactgggacttggcaagtgctaaattttggctcaatattggctaaatattcttggaataagaaatcccctactccagnatgtggaggataaagtttttcatgttctgatgacagggccagaagnattgtgtaggccatcaaggttttattggtnccccaaccccntgaaanaccagggnttagtcctgctaaccagnagagacaacaaccctacccagcttaaaggagcgggntgaggaaaagnattttaaactgatttggactaagnatnttgnactatagtatcacggctgntgctggaccgnngaccatcacgganactcgcggaccntangnaattcacacattgggcgtctagngatcgantcgnccacttgcgatatggataatnttttcttg

SEQ ID NO: 7267 - DNA, 451 bp, Homo sapiens
  unsure (7): n=A,T,C or G
  unsure (8): n=A,T,C or G
  unsure (16): n=A,T,C or G
  unsure (31): n=A,T,C or G
  unsure (76): n=A,T,C or G
  unsure (85): n=A,T,C or G
  unsure (112): n=A,T,C or G
  unsure (122): n=A,T,C or G
  unsure (133): n=A,T,C or G
  unsure (151): n=A,T,C or G
  unsure (157): n=A,T,C or G
  unsure (161): n=A,T,C or G
  unsure (174): n=A,T,C or G
  unsure (198): n=A,T,C or G
  unsure (211): n=A,T,C or G
  unsure (220): n=A,T,C or G
  unsure (228): n=A,T,C or G
  unsure (263): n=A,T,C or G
  unsure (339): n=A,T,C or G
  unsure (378): n=A,T,C or G
  unsure (386): n=A,T,C or G
  unsure (397): n=A,T,C or G
  unsure (399): n=A,T,C or G
  unsure (412): n=A,T,C or G
  unsure (431): n=A,T,C or G
  unsure (443): n=A,T,C or G
atcgctnnggcgggcntgaaattgaacagtngaactttatttgtttgaccaaacaggatcaatcctgattgacatntgggttttnctatatacattgcttctaaggtgtctnattgttctanaagggccaagntggggcatggtatgctgnatccancttnaaggcaggagcgntattaggcagagtaaaacagctgntactggaacccanttctaaaancaaaatanctggtgggtgggcctgtatcccgtctcggaggtgngaggaaatacttgacctggaggagaggtgagtgactgaattgtgcctgtctcagctgagaacagagtgagattctntcacacaaccaaaaagataataggttattactgcccggnggcgtcangggaattcagncncttgggcgtctangatccactcggccacttgngatatggcatantgttcccg

SEQ ID NO: 7268 - DNA, 295 bp, Homo sapiens
  unsure (9): n=A,T,C or G
  unsure (15): n=A,T,C or G
  unsure (30): n=A,T,C or G
  unsure (31): n=A,T,C or G
  unsure (36): n=A,T,C or G
  unsure (64): n=A,T,C or G
  unsure (122): n=A,T,C or G
  unsure (144): n=A,T,C or G
  unsure (173): n=A,T,C or G
  unsure (210): n=A,T,C or G
  unsure (216): n=A,T,C or G
  unsure (222): n=A,T,C or G
  unsure (227): n=A,T,C or G
  unsure (238): n=A,T,C or G
  unsure (260): n=A,T,C or G
  unsure (289): n=A,T,C or G
  unsure (292): n=A,T,C or G
aatggcttntatgcncgcgagggtggtttnnaatcncttcggcgggcaggctgactctggactncctgtaggataggtaaactgtgcggacttgtgtgttgttgaggggtggggctcatccncttacgggtgtttgcttcagcntgccggtccggaaagactataacaacaangggcttgtggttgactctaagacggggaaagataccnggggancttggntactnatctggctganctggtctggtccactctgtatnccaacatcatccccagccctgggcccctngcncgc

SEQ ID NO: 7269 - DNA, 149 bp, Homo sapiens
  unsure (1): n=A,T,C or G
  unsure (2): n=A,T,C or G
  unsure (9): n=A,T,C or G
  unsure (43): n=A,T,C or G
  unsure (58): n=A,T,C or G
  unsure (63): n=A,T,C or G
  unsure (69): n=A,T,C or G
  unsure (85): n=A,T,C or G
  unsure (93): n=A,T,C or G
  unsure (101): n=A,T,C or G
  unsure (125): n=A,T,C or G
  unsure (129): n=A,T,C or G
nnaaaattnacccccaacctttcaacctttatttaaggggggnccggaaaaatttggnccgcncgcccnttccttaagagattgnccaatggnccttccgnaagtccgggtctccgtcaccaagnttgnttggtaatagtgtttttatt

SEQ ID NO: 7270 - DNA, 119 bp, Homo sapiens
  unsure (1): n=A,T,C or G
  unsure (3): n=A,T,C or G
  unsure (4): n=A,T,C or G
  unsure (11): n=A,T,C or G
  unsure (14): n=A,T,C or G
  unsure (39): n=A,T,C or G
  unsure (41): n=A,T,C or G
  unsure (42): n=A,T,C or G
  unsure (51): n=A,T,C or G
  unsure (54): n=A,T,C or G
  unsure (78): n=A,T,C or G
  unsure (80): n=A,T,C or G
  unsure (86): n=A,T,C or G
  unsure (90): n=A,T,C or G
  unsure (94): n=A,T,C or G
  unsure (97): n=A,T,C or G
  unsure (105): n=A,T,C or G
ngnnaaaaatnccncaactttcaacttttttaggggganannaaaaatttngcncgccgcccttgctttagaaatggncnaattgncctnccgnagnccgggacnccgtctccagattg

SEQ ID NO: 7271 - DNA, 143 bp, Homo sapiens
  unsure (22): n=A,T,C or G
  unsure (24): n=A,T,C or G
  unsure (27): n=A,T,C or G
  unsure (33): n=A,T,C or G
  unsure (34): n=A,T,C or G
  unsure (43): n=A,T,C or G
  unsure (45): n=A,T,C or G
  unsure (51): n=A,T,C or G
  unsure (61): n=A,T,C or G
  unsure (63): n=A,T,C or G
  unsure (67): n=A,T,C or G
  unsure (75): n=A,T,C or G
  unsure (103): n=A,T,C or G
  unsure (113): n=A,T,C or G
  unsure (118): n=A,T,C or G
  unsure (129): n=A,T,C or G
ttcaagctgggcctgaacttcngnacntaaggnnatccacccncnttggcntcccaaaagngntggnattatagngaatagccaccatgcccggtgagactcngagattcaanaacanagatgtgattnaaagaaaggggaca

SEQ ID NO: 7272 - DNA, 132 bp, Homo sapiens
  unsure (22): n=A,T,C or G
  unsure (29): n=A,T,C or G
  unsure (42): n=A,T,C or G
  unsure (51): n=A,T,C or G
  unsure (55): n=A,T,C or G
  unsure (72): n=A,T,C or G
  unsure (73): n=A,T,C or G
  unsure (77): n=A,T,C or G
  unsure (84): n=A,T,C or G
  unsure (103): n=A,T,C or G
  unsure (107): n=A,T,C or G
  unsure (112): n=A,T,C or G
  unsure (117): n=A,T,C or G
  unsure (126): n=A,T,C or G
taaattgaatgcccatcaatangtgtctnaaataccactcgnatccttganctantactatatatttggctnntatnattaaantaaacaaagtaaattaccnaggntgacncaganggggctgtnaaacgg

SEQ ID NO: 7273 - DNA, 151 bp, Homo sapiens
  unsure (21): n=A,T,C or G
  unsure (33): n=A,T,C or G
  unsure (37): n=A,T,C or G
  unsure (47): n=A,T,C or G
  unsure (59): n=A,T,C or G
  unsure (69): n=A,T,C or G
  unsure (87): n=A,T,C or G
  unsure (94): n=A,T,C or G
  unsure (102): n=A,T,C or G
  unsure (106): n=A,T,C or G
  unsure (110): n=A,T,C or G
  unsure (122): n=A,T,C or G
  unsure (126): n=A,T,C or G
  unsure (128): n=A,T,C or G
  unsure (134): n=A,T,C or G
  unsure (138): n=A,T,C or G
  unsure (145): n=A,T,C or G
  unsure (149): n=A,T,C or G
ttaaaaatttaaccggcaacnttccaaaccttnattnaagggggggnccggaaaaaatntggggggggnccgccctttctttaaganaaatggnccattggncctncggnaagaccgggacnccgncnccaagntggntcgagantggngc

SEQ ID NO: 7274 - DNA, 775 bp, Homo sapiens
  unsure (494): n=A,T,C or G
  unsure (503): n=A,T,C or G
  unsure (509): n=A,T,C or G
  unsure (554): n=A,T,C or G
  unsure (572): n=A,T,C or G
  unsure (587): n=A,T,C or G
  unsure (600): n=A,T,C or G
  unsure (613): n=A,T,C or G
  unsure (657): n=A,T,C or G
  unsure (683): n=A,T,C or G
  unsure (691): n=A,T,C or G
  unsure (706): n=A,T,C or G
  unsure (726): n=A,T,C or G
  unsure (733): n=A,T,C or G
  unsure (754): n=A,T,C or G
agataaccttcctttggcatgttgctctaaggaacatgaatccaacaggataaagatttcctaaacaaaatgcatgttaagttaatagtgcacaggccctgtgctctgctaacttggaactaacgcataatcagcaaataatcaacaactgctacaatgaaatcaaggtagagaaagggtggaagaatgaaaagaagataataaccaattgcttttttgaaaaatatttttttctttctaaaggcatctcagtggagacttgtgagaaggtaaacaggtgaagcttagtctcacctgtatatagtaaaaagtgcattctgcagcctcagtcaattcatcatctgctgaacaaagacagcaggtcataccatttctcacgcattgctcttagtgcaatcaaaatacctatttttaatggcagcagaaaacattaaggtgatagcatgaagacaaatccaatactactgcagttggcacaattagaaatggcagangaattctgngggggntttatctgaattgttaaaattcatgaataatgctagcaaaagggngtcatcaccaaaactcanggaagtgaagttgtntctcactaccaangaaaaaattgccnttccaaatcctggtggcctttgggctggattttgggacaagttntaacagctttctgcctttttaaactnttgggggncttttccacaggccnttacaaaaataatctggganaaggggngaagaaaaagcctttataaanaggggttaaccttgagggtgg

SEQ ID NO: 7275 - DNA, 665 bp, Homo sapiens
  unsure (517): n=A,T,C or G
  unsure (534): n=A,T,C or G
  unsure (540): n=A,T,C or G
  unsure (580): n=A,T,C or G
  unsure (584): n=A,T,C or G
  unsure (619): n=A,T,C or G
  unsure (634): n=A,T,C or G
  unsure (645): n=A,T,C or G
  unsure (648): n=A,T,C or G
  unsure (662): n=A,T,C or G
ctgagcttccccaaaatcaagggagaatactaaatatctatttaatagaatcttggctttctctcggaggctgcccatccctggtgtgtcccttatcctccctgcagacatttctcatggataggagttccattgaccttgtcttttatgtctcccgggcaattaaacagtctcagtaccctgtacctggattgttcaatgactttcttcccttctcattgacttcactggagtagaaggctaaatataggcattcactctcatatctctcaggtctttccatgcagacagagttgttatcactagtagacggtgcttataagagagacatggaaaagtggaagaatggaaatagggatttggagtggtgctaaaaacaaagaaagaggcttctgaaagctttccatttaatatgatcaaacatagaagacaaaagatgtaacttaatgaccaaggatagggacatagccttgagaaaattacagaagtggaataaacgtcttggactccaaaaaanaaggaatggaaatgtantctgangcactaaagtcaataaaaccctctgatatatttactgtanaaanaaaggacatcttttaattcaaggtttgcaacttangtgactacaggggcnaagcatggaanggnaaagggtaaaaaantaa

SEQ ID NO: 7276 - DNA, 655 bp, Homo sapiens
  unsure (14): n=A,T,C or G
  unsure (26): n=A,T,C or G
  unsure (263): n=A,T,C or G
  unsure (338): n=A,T,C or G
  unsure (451): n=A,T,C or G
  unsure (479): n=A,T,C or G
  unsure (505): n=A,T,C or G
  unsure (547): n=A,T,C or G
  unsure (563): n=A,T,C or G
  unsure (594): n=A,T,C or G
  unsure (595): n=A,T,C or G
  unsure (622): n=A,T,C or G
gtgacttgaagcancttgttgatcanaaaatacagtctctggaagaccgtctggggagcgttctcctacagatgaccaataacactggtgcagagctcagtcccccaggggcagcagccctgccaggagtgtcagggtcaggagatgaacgggtcatgatggaattaaaccacctgaaggacaaagttcaagttgttgaagacatttgcctgctgaacatccagggaaagcctcatggggatggaaggtgccttgccaaacangggaagaccgcgcagtacgcgacagcctgcaccttttgaaatctctcaacgacacgatgcacaggaagtttcaanaaaccgaacaaaccatccagaaacttcaacaggattttagttttctttattctcaattaaaccacacagaaaatgatgtgacttcatcttcaaaaggaaatgagcaattgtanagcaggtgaaaacgcttggcatgggtanggttcacttaaggtgggtgaaccaanaaaggacagtggacaccctgccgtccccccacaccccgtggntcattgctgcagtcanacctcggccgcgaccacgctaaccgaattcnncacactggcggccgtactatggatccnacttcggaccaacttggcggaatatggcgtaaa

SEQ ID NO: 7277 - DNA, 602 bp, Homo sapiens
  unsure (276): n=A,T,C or G
  unsure (277): n=A,T,C or G
  unsure (278): n=A,T,C or G
  unsure (279): n=A,T,C or G
  unsure (280): n=A,T,C or G
  unsure (281): n=A,T,C or G
  unsure (282): n=A,T,C or G
  unsure (283): n=A,T,C or G
  unsure (284): n=A,T,C or G
  unsure (285): n=A,T,C or G
  unsure (286): n=A,T,C or G
  unsure (287): n=A,T,C or G
  unsure (288): n=A,T,C or G
  unsure (289): n=A,T,C or G
  unsure (290): n=A,T,C or G
  unsure (291): n=A,T,C or G
  unsure (292): n=A,T,C or G
  unsure (293): n=A,T,C or G
  unsure (294): n=A,T,C or G
  unsure (295): n=A,T,C or G
  unsure (296): n=A,T,C or G
  unsure (297): n=A,T,C or G
  unsure (298): n=A,T,C or G
  unsure (299): n=A,T,C or G
  unsure (300): n=A,T,C or G
  unsure (301): n=A,T,C or G
  unsure (302): n=A,T,C or G
  unsure (303): n=A,T,C or G
  unsure (304): n=A,T,C or G
  unsure (305): n=A,T,C or G
  unsure (306): n=A,T,C or G
  unsure (307): n=A,T,C or G
  unsure (308): n=A,T,C or G
  unsure (309): n=A,T,C or G
  unsure (310): n=A,T,C or G
  unsure (311): n=A,T,C or G
  unsure (312): n=A,T,C or G
  unsure (313): n=A,T,C or G
  unsure (314): n=A,T,C or G
  unsure (315): n=A,T,C or G
  unsure (316): n=A,T,C or G
  unsure (317): n=A,T,C or G
  unsure (318): n=A,T,C or G
  unsure (319): n=A,T,C or G
  unsure (320): n=A,T,C or G
  unsure (321): n=A,T,C or G
  unsure (322): n=A,T,C or G
  unsure (323): n=A,T,C or G
  unsure (324): n=A,T,C or G
  unsure (325): n=A,T,C or G
  unsure (326): n=A,T,C or G
  unsure (327): n=A,T,C or G
  unsure (328): n=A,T,C or G
  unsure (329): n=A,T,C or G
  unsure (330): n=A,T,C or G
  unsure (331): n=A,T,C or G
  unsure (332): n=A,T,C or G
  unsure (333): n=A,T,C or G
  unsure (334): n=A,T,C or G
  unsure (335): n=A,T,C or G
  unsure (336): n=A,T,C or G
  unsure (337): n=A,T,C or G
  unsure (338): n=A,T,C or G
  unsure (339): n=A,T,C or G
  unsure (340): n=A,T,C or G
  unsure (341): n=A,T,C or G
  unsure (342): n=A,T,C or G
  unsure (343): n=A,T,C or G
  unsure (344): n=A,T,C or G
  unsure (345): n=A,T,C or G
  unsure (346): n=A,T,C or G
  unsure (347): n=A,T,C or G
  unsure (348): n=A,T,C or G
  unsure (349): n=A,T,C or G
  unsure (350): n=A,T,C or G
  unsure (351): n=A,T,C or G
  unsure (352): n=A,T,C or G
  unsure (353): n=A,T,C or G
  unsure (354): n=A,T,C or G
  unsure (355): n=A,T,C or G
  unsure (356): n=A,T,C or G
  unsure (357): n=A,T,C or G
  unsure (358): n=A,T,C or G
  unsure (359): n=A,T,C or G
  unsure (360): n=A,T,C or G
  unsure (361): n=A,T,C or G
  unsure (362): n=A,T,C or G
  unsure (363): n=A,T,C or G
  unsure (364): n=A,T,C or G
  unsure (365): n=A,T,C or G
  unsure (366): n=A,T,C or G
  unsure (367): n=A,T,C or G
  unsure (368): n=A,T,C or G
  unsure (369): n=A,T,C or G
  unsure (370): n=A,T,C or G
  unsure (371): n=A,T,C or G
  unsure (372): n=A,T,C or G
  unsure (373): n=A,T,C or G
  unsure (374): n=A,T,C or G
  unsure (375): n=A,T,C or G
  unsure (376): n=A,T,C or G
  unsure (377): n=A,T,C or G
  unsure (378): n=A,T,C or G
  unsure (379): n=A,T,C or G
  unsure (380): n=A,T,C or G
  unsure (381): n=A,T,C or G
  unsure (382): n=A,T,C or G
  unsure (383): n=A,T,C or G
  unsure (384): n=A,T,C or G
  unsure (385): n=A,T,C or G
  unsure (386): n=A,T,C or G
  unsure (387): n=A,T,C or G
  unsure (388): n=A,T,C or G
  unsure (389): n=A,T,C or G
  unsure (390): n=A,T,C or G
  unsure (391): n=A,T,C or G
  unsure (392): n=A,T,C or G
  unsure (393): n=A,T,C or G
  unsure (394): n=A,T,C or G
  unsure (395): n=A,T,C or G
  unsure (396): n=A,T,C or G
  unsure (424): n=A,T,C or G
  unsure (524): n=A,T,C or G
  unsure (547): n=A,T,C or G
  unsure (549): n=A,T,C or G
  unsure (551): n=A,T,C or G
  unsure (567): n=A,T,C or G
  unsure (578): n=A,T,C or G
  unsure (582): n=A,T,C or G
  unsure (589): n=A,T,C or G
gtatatttggagaaggattaaagggaagaaaataataaaattgcaagaacgtcattaaatgcttaagaggaacatggcttgttcctcagtcttcaaagattgaacaataactgggcagaattttccaaactttgatactagtaacaattaacagcaacccttatggttgccaatataaaatcgagcaataaatcaatcaaatgcttgactcaatcaacttcttgttctttcttgtccataatatagtctagactagctttaatactgctttgaggnnnnnnnnnnnnnnnnnnnnnnnnnnnnnnnnnnnnnnnnnnnnnnnnnnnnnnnnnnnnnnnnnnnnnnnnnnnnnnnnnnnnnnnnnnnnnnnnnnnnnnnnnnnnnnnnnnnnnnnnntttttttttctaattagctgggtatggnggtgcacaccagttcttaagaggccgaggaggctgggcacagtggctcacgcctgtaatcccaatactttgggaggctgaacacctgcccgggcggccgntcgaaagccgaattccacccacntngngccgttctagtggatnccagctcggancaanctggcgnaatcatggcatag

SEQ ID NO: 7278 - DNA, 613 bp, Homo sapiens
  unsure (350): n=A,T,C or G
  unsure (422): n=A,T,C or G
  unsure (451): n=A,T,C or G
  unsure (481): n=A,T,C or G
  unsure (509): n=A,T,C or G
  unsure (530): n=A,T,C or G
  unsure (557): n=A,T,C or G
  unsure (580): n=A,T,C or G
ccttttctcattagtctctgggtcaggcttgggaagatatatgtgttggtgatgatatacttgtctttaatcatgatttatgaagatttaggattgtgtgtgatttgtcaaaggttctgggaaaaggctggtgcatatttcattacttaatctgagattgattttatgatgctaagagatatcacactattgttcaaatgtgtgggaagtacaggtagacacaacatcccagctttttactgcttatctttgcaactgtcaaacaatgctgtaaactttaactgcttgtagttaacaattcctgttttaattataggcagattttttattctgtccaaaggggagaagtntcaatggttatttagctaaaatgcatagcaagacattataactatgacctggtatgaaatcatggacaaagnttggtaaatttcatgggttgggtcatggngaaaatataaaatttcatgggcttgccaanaataatataaaattcccattaaaatggngcaaataccttcggccgcgancaccctaagccgaattccacacactgncgggccgtactaagtggatccanctcgggaccaagctggcgtaatcatgggcatac

SEQ ID NO: 7279 - DNA, 583 bp, Homo sapiens
  unsure (464): n=A,T,C or G
  unsure (466): n=A,T,C or G
  unsure (489): n=A,T,C or G
  unsure (511): n=A,T,C or G
  unsure (531): n=A,T,C or G
ctgatgagtagtagagattggattcacacccaggttttctctctctgaagccctggtcacctgtttggccctggggtgatggggagaaggttctggctgtgtcttggctatctcctgcctctccctctgtggggaatgtgttcgaggatcacagctacagcttttcggataccctttcctttgtgaagcatgtgagaaccaacattgcatctcggcaagaattaaaaaggaattgttgatgacctgctgaaggtattttcattttgttcctggaaatgattaatcttgaggctttgtgatggcctttgtcacaaatagccttccttaatccataattttctcactttcctttaaggtaatattttgcatttaagaaataaaaacaagcaaaataatcctgcttgtgaaggatatgaaatgcagtgtttgtgtgtgggggtgtgtgtgttgtgatgctgaccaangnctaaattccctgaaatgaataanaaaacccctttttaaaataagntcagtttgcctttttttgtnctctattggcaatctaacccctcctttataatatttttccttcttcctctta

SEQ ID NO: 7280 - DNA, 704 bp, Homo sapiens
  unsure (380): n=A,T,C or G
  unsure (612): n=A,T,C or G
  unsure (627): n=A,T,C or G
  unsure (636): n=A,T,C or G
  unsure (646): n=A,T,C or G
  unsure (649): n=A,T,C or G
  unsure (659): n=A,T,C or G
  unsure (665): n=A,T,C or G
  unsure (682): n=A,T,C or G
  unsure (696): n=A,T,C or G
acaaattatctttgaagtttaaacatgataatatatagaaaaagtggtctgaaagtatgaagcccgaagtgtgagtttgatgatgacttagttttgcacatacatgtgagactctgacataccattatatattatcttgatgacacataggcatcaataagattgaaacaatatttgtttaatgtgttttattcagcaccatgcatagtgctattcaaaggtaaatggttaaatggtgtatcattgtaatgagataaagatatagataatcagaccaatttttgaaacatttttacttttaagaacttaattctctcaggaatgagtaactgtttttgctttattttgaatggtctagatatcattctttttctagctgngttgtgaggtacatgttattttaaaaaccccacaggagatgaggaggtcccaagggagtgaggtctcgatgtcccctcaaacattaaccacacagctactcttttgctgtcaagatacaggggctctcaatacattttgtttgaagaaaggacctggatcttataataaccaatcagaaagtaattttctataataaaaagttctttaaaatctgtaagaacagaaatgtgngatttaaaaaatttntgagatatnttaaataacnttnctttaaaaantgatgntggctggcgcagggttncccttaatccaccnttggagcc

SEQ ID NO: 7281 - DNA, 450 bp, Homo sapiens
  unsure (29): n=A,T,C or G
  unsure (51): n=A,T,C or G
  unsure (89): n=A,T,C or G
  unsure (95): n=A,T,C or G
  unsure (254): n=A,T,C or G
  unsure (351): n=A,T,C or G
  unsure (360): n=A,T,C or G
  unsure (417): n=A,T,C or G
  unsure (418): n=A,T,C or G
  unsure (437): n=A,T,C or G
ccacttttggagagtccgactatcacggnaggcacagaactctgccatgtnactagctgaatgacctcggatgtcacttcaactctganccttanaacttgtcaactgcaaagtggggcacttcaccgagctacatcattgagctacttcactgagctacttcattgaattgggaaaattaaaggagcaaatatgggagaaggatttgcccatagtaaacactatgactgtccgcttctgccatctttcagtanacccagtgggaattatatgaaggttgataggcacttaaaccaagaatatatgaacatctattctgtgcaaggatgtgtgcattgaactcagtcccanggacttganggggacaggaaggaagcaaacttggaaatcattgtctttagagatcaaggagcccannagatgaaacaagcctgggntccctaggtgata

SEQ ID NO: 7282 - DNA, 712 bp, Homo sapiens
  unsure (206): n=A,T,C or G
  unsure (366): n=A,T,C or G
  unsure (465): n=A,T,C or G
  unsure (504): n=A,T,C or G
  unsure (508): n=A,T,C or G
  unsure (519): n=A,T,C or G
  unsure (541): n=A,T,C or G
  unsure (542): n=A,T,C or G
  unsure (549): n=A,T,C or G
  unsure (553): n=A,T,C or G
  unsure (554): n=A,T,C or G
  unsure (581): n=A,T,C or G
  unsure (596): n=A,T,C or G
  unsure (618): n=A,T,C or G
  unsure (631): n=A,T,C or G
  unsure (634): n=A,T,C or G
  unsure (639): n=A,T,C or G
  unsure (644): n=A,T,C or G
  unsure (656): n=A,T,C or G
  unsure (660): n=A,T,C or G
  unsure (670): n=A,T,C or G
  unsure (678): n=A,T,C or G
  unsure (697): n=A,T,C or G
  unsure (698): n=A,T,C or G
  unsure (705): n=A,T,C or G
  unsure (712): n=A,T,C or G
atttttgtcaaaatagtaggtgtaaaataatgtcttatggtttttatttgtatttacttgaatacaaataaatacaaggctgaggcttgagattgagattgagattgaggctgagcacctttctaatatttatggggcagttgtgtttccccttccatgaaatgtctgtacatgactttgcccattttaaaaaactgaggatttgnttttattaaaactttggtattatttatcctggatatttcctttataggttatatgtgtcccagtgtgtgacttatctttccctttttgtgatatgttgattaagcagtagttcttaatgaaattgaattagaatttttcttcattttatacttcttgggnctttctaaataaatctttcctaactcagggtataaagatatccctgctatgctttacctaaaagtttcctgaaatcttttgccttatcacccgttatgnaccttggacccatcttccagttgggtttttaatattatngggnatggggaaaangggaaataaatttgcccaatgnncctaacncctnnttttattgggaggaaaccatccctttnccccaggaaaccttnaccaaccgggcccttggggttnaaaataaattttncanaccanaaaantggttaacaaancttntccatttccngggggggnatttctgggtgcgggcccnnaaaaaanaataaan

SEQ ID NO: 7283 - DNA, 694 bp, Homo sapiens
  unsure (10): n=A,T,C or G
  unsure (15): n=A,T,C or G
  unsure (20): n=A,T,C or G
  unsure (37): n=A,T,C or G
  unsure (46): n=A,T,C or G
  unsure (99): n=A,T,C or G
  unsure (113): n=A,T,C or G
  unsure (114): n=A,T,C or G
  unsure (116): n=A,T,C or G
  unsure (124): n=A,T,C or G
  unsure (129): n=A,T,C or G
  unsure (140): n=A,T,C or G
  unsure (162): n=A,T,C or G
  unsure (189): n=A,T,C or G
  unsure (190): n=A,T,C or G
  unsure (201): n=A,T,C or G
  unsure (202): n=A,T,C or G
  unsure (212): n=A,T,C or G
  unsure (258): n=A,T,C or G
  unsure (273): n=A,T,C or G
  unsure (298): n=A,T,C or G
  unsure (304): n=A,T,C or G
  unsure (311): n=A,T,C or G
  unsure (329): n=A,T,C or G
  unsure (390): n=A,T,C or G
  unsure (399): n=A,T,C or G
  unsure (414): n=A,T,C or G
  unsure (416): n=A,T,C or G
  unsure (426): n=A,T,C or G
  unsure (438): n=A,T,C or G
  unsure (457): n=A,T,C or G
  unsure (478): n=A,T,C or G
  unsure (479): n=A,T,C or G
  unsure (497): n=A,T,C or G
  unsure (503): n=A,T,C or G
  unsure (521): n=A,T,C or G
  unsure (526): n=A,T,C or G
  unsure (572): n=A,T,C or G
  unsure (597): n=A,T,C or G
  unsure (602): n=A,T,C or G
  unsure (607): n=A,T,C or G
  unsure (622): n=A,T,C or G
  unsure (663): n=A,T,C or G
  unsure (674): n=A,T,C or G
  unsure (679): n=A,T,C or G
  unsure (683): n=A,T,C or G
  unsure (688): n=A,T,C or G
ctgtggctgnggggncgganaagcacatttttctgcngataattanaatggcttcccccatctctcacggactgtcccaagtctagaaaagaattgacntcctcttctattanncnaataaaanggaanagaatgtttgncttcctttcctttctgtagtgntaagaaaataaacgaacttaatggatnntaaattatcanngagcttaacnctgtactataaaccaaacattaccttttcaaaaagtcctttgaggngaaatattttgtatncgtaatacatagatgcacatataancccacncatatanaatctcaatattttaacncttctttgggtagttgcactaactcactaaccctgaggaaaaagttaacaaattgaaagtnttttcttcnaaagttgagatttancnataaaaggtnttactttgatanctaaaaggaactttattancctcttcctaaaataaacccnncctattctgaaaatggcncttgcnattaccaatttgccattntcaangctaccccttgaggtggacgccttttcttaaaccaaataccccttnttatttattggcagttccccccganagggnccccnaaccccatcttctancacaaccccctccatcaaattacccttccggtaaagctatngcctgctctanccccntttncaccncaatat

SEQ ID NO: 7284 - DNA, 481 bp, Homo sapiens
  unsure (19): n=A,T,C or G
  unsure (34): n=A,T,C or G
  unsure (50): n=A,T,C or G
  unsure (57): n=A,T,C or G
  unsure (73): n=A,T,C or G
  unsure (96): n=A,T,C or G
  unsure (111): n=A,T,C or G
  unsure (117): n=A,T,C or G
  unsure (150): n=A,T,C or G
  unsure (173): n=A,T,C or G
  unsure (188): n=A,T,C or G
  unsure (190): n=A,T,C or G
  unsure (204): n=A,T,C or G
  unsure (221): n=A,T,C or G
  unsure (234): n=A,T,C or G
  unsure (256): n=A,T,C or G
  unsure (265): n=A,T,C or G
  unsure (304): n=A,T,C or G
  unsure (305): n=A,T,C or G
  unsure (329): n=A,T,C or G
  unsure (340): n=A,T,C or G
  unsure (354): n=A,T,C or G
  unsure (364): n=A,T,C or G
  unsure (371): n=A,T,C or G
  unsure (377): n=A,T,C or G
  unsure (379): n=A,T,C or G
  unsure (384): n=A,T,C or G
  unsure (392): n=A,T,C or G
  unsure (398): n=A,T,C or G
  unsure (399): n=A,T,C or G
  unsure (406): n=A,T,C or G
  unsure (415): n=A,T,C or G
  unsure (419): n=A,T,C or G
  unsure (420): n=A,T,C or G
  unsure (430): n=A,T,C or G
  unsure (433): n=A,T,C or G
  unsure (442): n=A,T,C or G
  unsure (446): n=A,T,C or G
  unsure (455): n=A,T,C or G
tctgttggagggggccctncccaaagggtcctgnacccctcacaggggangaactgnacttgccgctcattcngacaaaggggggtgtggacgcanccctggaatatgccnacaccnggacccgctatgccaaggaactgcttgcctggnctgaaaacagagccacctatganctggagtttgctaanancaccatgaagatcnctgaagctggcaaggtntccattcaacagnagagccccatgcctcctgcagnacatctacnccctgtttctggagcaccatctcaccctgggaaccctgnncctccggcccacaccacccctaancccaattccancacactggcgcccntccctatccnatcccancctcgntnccccntctcgccncactcnncgccatngcctcgttncccnnccgacccccnccnctccccccntctnctacgcgcncctacccccaccgcccgccccccccc

SEQ ID NO: 7285 - DNA, 442 bp, Homo sapiens
  unsure (8): n=A,T,C or G
  unsure (10): n=A,T,C or G
  unsure (11): n=A,T,C or G
  unsure (26): n=A,T,C or G
  unsure (207): n=A,T,C or G
  unsure (212): n=A,T,C or G
  unsure (231): n=A,T,C or G
  unsure (237): n=A,T,C or G
  unsure (247): n=A,T,C or G
  unsure (254): n=A,T,C or G
  unsure (286): n=A,T,C or G
  unsure (312): n=A,T,C or G
  unsure (329): n=A,T,C or G
  unsure (332): n=A,T,C or G
  unsure (335): n=A,T,C or G
  unsure (342): n=A,T,C or G
  unsure (360): n=A,T,C or G
  unsure (365): n=A,T,C or G
  unsure (369): n=A,T,C or G
  unsure (370): n=A,T,C or G
  unsure (380): n=A,T,C or G
  unsure (394): n=A,T,C or G
  unsure (399): n=A,T,C or G
  unsure (415): n=A,T,C or G
  unsure (419): n=A,T,C or G
  unsure (421): n=A,T,C or G
  unsure (432): n=A,T,C or G
cctcctcnannggggcagggaacttnaatctgtataagtatctgcagttgctggaataatttgaagaccccatggagctaaggagattaagtggaggattttcattgtttcagaggggcaaggggcaaatccattgctaattctttaatgatgaaaaatggtaagaagttgttaaactcctttggggattttaaaaagtgatacctnaacanaacagagagagagagaganaaatcncactagtgangctaacnaaaataatgataaaaaggttagaacaacccangatacttactggatgcctacacaacntaaaaatatatttatanaanganccactgnaatttgaatataaaaggntatcngaannttaatgtgtngcatctgaaattcnaactntttccttttggctacnccancnaaacacttttnataaccccct

SEQ ID NO: 7286 - DNA, 125 bp, Homo sapiens
  unsure (11): n=A,T,C or G
  unsure (15): n=A,T,C or G
  unsure (47): n=A,T,C or G
  unsure (75): n=A,T,C or G
  unsure (86): n=A,T,C or G
  unsure (98): n=A,T,C or G
  unsure (107): n=A,T,C or G
  unsure (109): n=A,T,C or G
  unsure (121): n=A,T,C or G
ccttttgatangggnttttttaaaaaacaaaattatagaagtttaanaatttaattcaaatttggaggggttttnaggaaattttnacaaaatggctngttggtttnanctgtttcctacntttg

SEQ ID NO: 7287 - DNA, 518 bp, Homo sapiens
  unsure (8): n=A,T,C or G
  unsure (13): n=A,T,C or G
  unsure (21): n=A,T,C or G
  unsure (23): n=A,T,C or G
  unsure (25): n=A,T,C or G
  unsure (167): n=A,T,C or G
  unsure (176): n=A,T,C or G
  unsure (286): n=A,T,C or G
  unsure (352): n=A,T,C or G
  unsure (357): n=A,T,C or G
  unsure (360): n=A,T,C or G
  unsure (377): n=A,T,C or G
  unsure (423): n=A,T,C or G
  unsure (431): n=A,T,C or G
  unsure (456): n=A,T,C or G
  unsure (461): n=A,T,C or G
  unsure (463): n=A,T,C or G
  unsure (499): n=A,T,C or G
  unsure (511): n=A,T,C or G
tctaagancgggngtgttttncntntattttcctaactccatctcctaaaaaattccacctcattctgctcaacccaccacggcattcttgctgttcttgaacatgccaagcaggcccagggcctttgcattcactgtttattttgcttggaatgctctccccccanacaccttcntggcctcccttaccaacctcacatctctgctcccaagtcaccttctagataaagccaacactcatcacactaatgacaactacaacaatccctactgatactcactctanctttttacctgtcacatttgctgtcttctaacatactgcataatttacttatttattctctctccnttatnaanagttctaaaagagaagngacttctatctgttttgttcaaataccccaaggctcccttgttacnttgtcagncagtcaataattatttctcaaatgntaccngntttaagaaatgtgagctgcttttttacgaaaaccancaaatgttcctnccctata

SEQ ID NO: 7288 - DNA, 659 bp, Homo sapiens
  unsure (538): n=A,T,C or G
  unsure (572): n=A,T,C or G
  unsure (584): n=A,T,C or G
  unsure (605): n=A,T,C or G
  unsure (606): n=A,T,C or G
  unsure (608): n=A,T,C or G
  unsure (616): n=A,T,C or G
  unsure (617): n=A,T,C or G
  unsure (624): n=A,T,C or G
  unsure (632): n=A,T,C or G
  unsure (652): n=A,T,C or G
cctatgtcacgggggagagaagctcctgaaccaaccatttgtcaggtctggggacaagactggaagtattgactcatttgcaaggaaactaagtgggtcaacaatgaaagaaggtaataggacctcatctgcaatcctccaatttatctgcaggataaattaaatgcctaaaaaagaaacttattttttaaagtatctgctaccatcaggaaaccaaataaatagtcagtctattaatttcgttcttaaataattccgatcctttacctaatttcttgagccatttaatcatctcaactctaccttagaaccctcccaatgttttccaaatctgtcttactgggaaacaaagattaaaattcctaataaggattattttgtggatcttaatttctagattcccattttaaaattttaattccattaatttcttaataatagcattctattactgattgaatcatctctaataagccatcataatttccagaccatttctaagaacacgagctgatattgaaatgtttactaatgaccngccccgggcggcccgctcaaaacccaattccacncccttggcgccngttctaactgggatcccaacnncngaccccanncttgggnggaaaacnatgggccctaacccctggtnccccggg

SEQ ID NO: 7289 - DNA, 675 bp, Homo sapiens
  unsure (11): n=A,T,C or G
  unsure (13): n=A,T,C or G
  unsure (143): n=A,T,C or G
  unsure (402): n=A,T,C or G
  unsure (464): n=A,T,C or G
  unsure (488): n=A,T,C or G
  unsure (526): n=A,T,C or G
  unsure (538): n=A,T,C or G
  unsure (547): n=A,T,C or G
  unsure (550): n=A,T,C or G
  unsure (557): n=A,T,C or G
  unsure (570): n=A,T,C or G
  unsure (574): n=A,T,C or G
  unsure (581): n=A,T,C or G
  unsure (583): n=A,T,C or G
  unsure (585): n=A,T,C or G
  unsure (594): n=A,T,C or G
  unsure (613): n=A,T,C or G
  unsure (618): n=A,T,C or G
  unsure (647): n=A,T,C or G
  unsure (653): n=A,T,C or G
  unsure (660): n=A,T,C or G
  unsure (663): n=A,T,C or G
  unsure (664): n=A,T,C or G
ccagagcagangngaatggttctgacttaaataggttgttgagcaaggagatctcacattttaaagaatattttcagagggagaatttgagaaggggggagaaaaaaacaaacaggaatgaacataaaagtataaaattctanacaacccactaaaccagttagcaaaaagaggagctcttaattgaaatagagaatttccccaaaaaaaggtctgaatttatttttaaaacattagatttggaaaatacctaatttgaaagtttaattttcatatatacgtcaaacctgcttttagggtagtttagtcaaagctgaaacaaaacaaataaaattctggcttatatatctgatacttgaataaggactctgaaaaaaaatgttcccgttttttttctcgtcngcctaagatatatttttgacattacataaatttcagtgatatgatctggctcctatttaacntttatgccctttctcttccaatgntaacttttaattttctcctcttcttctagctgggatcnttaaaaaaaacngaaaactcngtnctccccnagggtcatggggnaacnttttcancncntttccgggnccctttctattcctttaanaaccnctccccctccctttcctttttaccccccnattggncctttgnccnnaaaccgggggg

SEQ ID NO: 7290 - DNA, 474 bp, Homo sapiens
  unsure (263): n=A,T,C or G
  unsure (466): n=A,T,C or G
ccacctggagacgttgattttgggcctattgaagacacctgctcagtatgacgcttctgagctaaaagcttccatgaaggggctgggaaccgacgaggactctctcattgagatcatctgctccagaaccaaccaggagctgcaggaaattaacagagtctacaaggaaatgtacaagactgatctggagaaggacattatttcggacacatctggtgacttccgcaagctgatggttgccctggcaaagggtagaagagcanaaggatggctctgtcattgattatgaactgattgaccaagatgcttgggatctctatgacgctggagtgaagaggaaaggaactgatgttcccaagtggatcagcatcatgaccgagcggagcgtgccccacctccagaaagtatttgataggtacaagagttacagcccttatgacatgttggaaagcatcaggaaagaggntaaaggag

SEQ ID NO: 7291 - DNA, 208 bp, Homo sapiens
  unsure (4): n=A,T,C or G
  unsure (5): n=A,T,C or G
ccgnnagataaccttcctttggcatgttgctctaaggaacatgaatccaacaggataaagatttcctaaacaaaatgcatgttaagttaatagtgcacaggccctgtgctctgctaacttggaactaacgcataatcagcaaataatcaacaactgctacaatgaaatcaaggtagagaaagggtggaagaatgaaaagaagataata

SEQ ID NO: 7292 - DNA, 261 bp, Homo sapiens
  unsure (1): n=A,T,C or G
  unsure (79): n=A,T,C or G
  unsure (171): n=A,T,C or G
  unsure (178): n=A,T,C or G
  unsure (199): n=A,T,C or G
  unsure (200): n=A,T,C or G
  unsure (234): n=A,T,C or G
  unsure (261): n=A,T,C or G
ngatagactcttcctcagcagcctggcaggcaggaaacagacataggaccccagcccagatctgaatggcatgggaggngctgcccttaaccatgacaccattgtaagagctgtccacatttgtatgttgtgccctggaatcagcctggttgagctcaaatcccaacttanccacgtntggcctgtgtccttgggcagnncacactacctctctgattttggttccttatctgnaaaatggtgatcatcataatacaactn

SEQ ID NO: 7293 - DNA, 184 bp, Homo sapiens
ctgagcttccccaaaatcaagggagaatactaaatatctatttaatagaatcttggctttctctcggaggctgcccatccctggtgtgtcccttatcctccctgcagacatttctcatggataggagttccattgaccttgtcttttatgtctcccgggcaattaaacagtctcagtaccctgt

SEQ ID NO: 7294 - DNA, 204 bp, Homo sapiens
gtttatttagtgtaatgaagataatttgatataaaaatattttgtgtatatatatatatttttactttgttttctaaattgctgtttgcagtaacagtaagcgcaaagcaaaatatataagttatgactgtatgatcagatgaagtatgagttcttttggtttgcatccttaaatagttagagatctctgataaaaactttgga

SEQ ID NO: 7295 - DNA, 180 bp, Homo sapiens
ttattcttccgtggagttaagggctccgtggacatctcaggtcttcagggtcttccatctggaactatataaagttcagaaaacatgtctcgaagatatgactccaggaccactatattttctccagaaggtcgcttataccaagttgaatatgccatggaagctattggacatgcaggc

SEQ ID NO: 7296 - DNA, 308 bp, Homo sapiens
ctgaggggacctgctaggctttgatgaactgagctgcatcttggatttcgcttcctcttctttctcagccgaggttacggtgattagcaagggcagttgctaccactgaaaggatagaaggaaaaaggcaagggaaaatgatacgtactaagatgcacataggagcactcgatagtagtctatggaccgggccctgggtactgccattatagagggaaggggaagaggagtggtaagggagagagaacactggactaagcctcagcattcagatgttcccagttacaacaccctgaacgatctctagg

SEQ ID NO: 7297 - DNA, 242 bp, Homo sapiens; identical to SEQ ID NO: 265

SEQ ID NO: 7298 - DNA, 209 bp, Homo sapiens
ctggaatgccttgatgatgcagaaaaaaaattaaacttggcccagaaatgctttaaaaattgttacggagaaaatcatcagagactggtccacataaaaggaaattgtgggaaagagaaggtactgtttctaagactctacttacttcaagggatccgaaactatcacagtggaaatgatgtagaggcttatgagtatcttaacaaggc

SEQ ID NO: 7299 - DNA, 200 bp, Homo sapiens
ctggttatccgagaagttccgaggattctccttggatttcttagggaaccagttgggatccccagagaagagcccatcatctcgggctactgccagcccacccagattcatcagcgtccgctgcacacaggccatgttctttccttcccagaggtccacagtttggaagatgtcagtggtgttaatgccatagcgctcag

SEQ ID NO: 7300 - DNA, 383 bp, Homo sapiens
tggttatcgaagtggtttactgtaaggctgagaaccatgcattaggcagcattcggcagctatgctgttgtctcttattttttctaacgtggaaatctgttttgtaacttgtagtaataaggtagaaattaaaaagaaaaagtattttcctgtacttgcttggctgcaaggtcaggaacacatagttccttagcggatccttggtaacgctatctgaaaaaccacatcgctgagaaatgagttctggagactctcttaacagtctgttgtccctaggaaggataagagcaagaaacagcaaatgcttttattaccttctcttttccctttaccatttctcactattcaagttttgttaagttcttgatttcccttcagtgcag

SEQ ID NO: 7301 - DNA, 427 bp, Homo sapiens
ccaagcgcttccagcccgacctctccctcccaaccaacgttcaggtggaggtcatcactatcgagagcaccaaaagtggtctgaagtcagagaagttggtggaacagctcactgaatacagcacagacaaggacgagcctccaaaggacgtctttgatgaattatttaagctggctccggagaaagtgaacgcagtgaaagaggccatcgtgaactttgtcaaccagaagctggaccgcctgggcctgtctgtgcagaatctggacacccagtttgcagatggggtcatcttactcttgctgattggacaacttgaaggcttcttcctgcacttaaaggaattctacctcactccgaactctcctgcagaaatgctgcacaacgtcaccctggcgctggagctgctgaaggacgagggcctgctcag

SEQ ID NO: 7302 - DNA, 540 bp, Homo sapiens
  unsure (502): n=A,T,C or G
ccatggcgcttcacgttcccaaggctccgggctttgcccagatgctcaaggagggagcgaaacacttttcaggattagaagaggctgtgtatagaaacatacaagcttgcaaggagcttgcccaaaccattcgtacagcatatggaccaaatggaatgaacaaaatggttatcaaccacttggagaagttgtttgtgacaaacgatgcagcaactattttaagagaactagaagtacagcatcctgctgcaaaaatgattgtaatggcttctcatatgcaagagcaagaagttggagatggcacaaactttgttctggtatttgctggagctctcctggaattagctgaagaacttctgaggattggcctgtcagtttcagaggtcatagaaggttatgaaatagcctgcagaaaagctcatgagattcttcctaatttggtatgttggtctgcaaaaaaccttcgagatattgatgaagtctcatctctacttcgtacctncataatgagtaaacaatatggtaatgaagtatttctgg

SEQ ID NO: 7303 - DNA, 217 bp, Homo sapiens
  unsure (6): n=A,T,C or G
  unsure (187): n=A,T,C or G
ctgtgngttttgccacatgccccacgatgacaatgaccttccctttgaagttctggagcatagcagtgtaagggccctgggtaagctccccttctgcagtgaaggcagcactgaatggaatgttgatgcttcctgaaatgtgaccacgaataaagtcttcactattccggatgtcaaccgccagganctttggtttactggactttgttttcttgct

SEQ ID NO: 7304 - DNA, 316 bp, Homo sapiens
  unsure (244): n=A,T,C or G
tctcagctctcggcgcacggcccagcttccttcaaaatgtctactgttcacgaaatcctgtgcaagctcagcttggagggtgatcactctacacccccaagtgcatatgggtctgtcaaagcctatactaactttgatgctgagcgggatgctttgaacattgaaacagccatcaagaccaaaggtgtggatgaggtcaccattgtcaacattttgaccaacccgcagcaatgcacagagacanggatattgccttcgcctaccagagaaggaccaaaaaggaacttgcatcagcactgaagtcagccttatctgg

SEQ ID NO: 7305 - DNA, 127 bp, Homo sapiens
ataaatttacttgtgtcagaacaaataaaagaaagttggaaatacaaatctatcacttcaaatttaatctgacatgcaattattctgtctattccagaattgtatggcaatttaactgattaagtca

SEQ ID NO: 7306 - DNA, 235 bp, Homo sapiens
ccatgtaaataagatgatttaatgttgattttaatcctgtatataaaataaaaagtcacaatgagtttgggcatatttaatgatgattatggagccttagaggtctttaatcattggttcggctgcttttatgtagtttaggctggaaatggtttcacttgctctttgactgtcagcaagactgaagatggcttttcctggacagctagaaaacacaaaatcttgtaggtcattg

SEQ ID NO: 7307 - DNA, 470 bp, Homo sapiens
  unsure (234): n=A,T,C or G
ctgcgttacatgtaacaaaagatgcaaacaaaatagattcaagttgttttgcagacagcacaatgatacaatattaggactacagaatctcagagtaaaccacaatgatttaaaggtaagatacacagaaataaaatgattttaacagaaaaatatgacattcctgaccttaggtctgggcacatgatgtctgacccctatagaggcaccttggctaaaatgggaatgacctantgccatggctgacctcacttgtgcgttgctgagcccatatgtgaacaaatccccttgatacagcaccatggtaggcatgagaggagaagtgttttaactattctcttatgaattgtaaccaacccttattatctactgatggatggacagggggtggggtgatcatacaggatgggcagacattccaagtactcttcccccagtggtggacggaacagaatctggctacacggtgg

SEQ ID NO: 7308 - DNA, 241 bp, Homo sapiens
ctgagcagcactgaacagtgtccgaacgaaccggtaaatctgcttctgctctgggttgtgtttgtcataatctggtggcacttcggatttcgaaagagggtgaagattttcatcaaaaatatctaagagcatccttccatctgggtccctgtttttgatgtgataatatattgcaagagcgacacatttaattgtatacttgaggtttggttgactgactgtgctatcatctaggaaaatg

SEQ ID NO: 7309 - DNA, 166 bp, Homo sapiens
ggagtggcttcctaacggaaatggaacaggattaccaactagtagacgaaagtgatgctttccatgacaaccttaggtctcttgacaggaatctgccctcagacagccaggacttgggtcaacatggattagaagaggattttatgttataaaagaggattttccc

SEQ ID NO: 7310 - DNA, 483 bp, Homo sapiens
ctgagggctccatgccgaatccatacacaaggtttgtggttctcagaagagttttcagacaggaactgtttccaacttaaaatctttcaacagacaaatggaggtggaagggggatggtttacacaaagtattttcaaatgtaatcaggaaatggaagtgtaaattaaaaccgttttcaacatgtatctcctctttagaaatatcactgcttggagaatgttgtgacaagcaaccaaatactcaaaagaccttatccccagaatactggcaggactcacattactttgcatgtcataattaagaaaaatatccaaatttgatgccatttatagtgtgtcagtcaaaaatgtgtatgctgattttgatgagcaggagaaaggactgggtggtgaggaaacatgactatgcacacatgagacactgtgctgctcacgaaaccgacctccctatggagtgtccaactgaaacctctgatacacacc

SEQ ID NO: 7311 - DNA, 386 bp, Homo sapiens
ccatctgataataaacggaaataatttgatcacatgaaactttggtttgtggtatttatacacagttaaagagaagatataactttttccattactggaaattgttccagcaagcaaacttgacagaatctctcttatttccaatgtaaaatcgtcccatcatgaatttatactttatcactaccaaatttctctgaaatttctcttcagaatttttcccaaggtggaattggctgtgccaggtattaatctgtgccaattgctgtcagcctcatttacttgtactttttctcattataccattaccttgggagcaaggccctctttataatgagtgctatacaaacatgactttgaccagacctttctatctgtccatcttccag

SEQ ID NO: 7312 - DNA, 212 bp, Homo sapiens
cccccaacaaggggacaggacggtcactgtgccaatcctgtcatcaccctcctgtggatgtacaggcagtgctcaataaatgcttcgaggctgatgaggctgctggctcagggtgcgtgggttcctcaaggtggggatttctgagttctaagaccaagtctccatctgagactcccaaattgctccccacctcccatccctgtttttttttg

SEQ ID NO: 7313 - DNA, 230 bp, Homo sapiens
tggtacgcctcctgacttcatcctcaaggtggtaatagacaaacatcctgtccggttttttgtacataagaggccccatgtggatttcttcctggaagtggtgagccagtggtacgagctggtggtgtttacagcaagcatggagatctatggctctgctgtggcagataaactggacaatagcagaagcattcttaagaggagatattacagacagcactgcacttttg

SEQ ID NO: 7314 - DNA, 353 bp, Homo sapiens
  unsure (279): n=A,T,C or G
ccatcggtgctgaaattgagcattttaaatagtacagtaggctggtatacattaggaaatggactgcactggaggcaaatagaaaactaaagaaattagataggctggaaatgcttactttctgctctcattttctttcattttgtctgctgtctttttgaatgccaatactttcatttaaaatgttttgggagcacggcaacccaaaatgactgaaccggtggtccaaaaatccaaacccactgataattacttctcgaggtgataggaaaggcacangaagttaggactttggctgaaatgatgaaaacacatgttcgccattttagggatcaagcgcctcgactcctgcc

SEQ ID NO: 7315 - DNA, 101 bp, Homo sapiens
gggaggaagccgactaggcgaattcacttactgaccggcctgggctgctctgagacatggaggaagccagtgaaggtggaggaaatgatcgtgtgcggaac

SEQ ID NO: 7316 - DNA, 199 bp, Homo sapiens
ctgtcaacctttctttaactgaggaaacatttgagggctctgctgatgttctggctagctacactcaggcaacacatgatgaatcaatgacttatgaagatagaagccaactagatcacatgggctttcacttcacaactgggatccctgctcctagcacagaaacagaattagacgttttacttcccacggcaacatc

SEQ ID NO: 7317 - DNA, 101 bp, Homo sapiens
  unsure (81): n=A,T,C or G
  unsure (99): n=A,T,C or G
  unsure (100): n=A,T,C or G
ggagctttaatttattaatgcagacagtacctaacaaacccacaggtcctaaactaccaaacctgcattaaaaatttcggntggggcgacctcggagcnna

SEQ ID NO: 7318 - DNA, 130 bp, Homo sapiens
ctggcagaccccccaaccacatcagaggagttttcatttcttcctgggctgcttatctgggaagccttcaaagaattcgttacacatcatggcgatgcaggacaggaagacacagtactcttggaagtcc

SEQ ID NO: 7319 - DNA, 101 bp, Homo sapiens
ccttcaaagcctattatttctaacctaagtaaaggccccagtgaaaaacatactggggaaataaaacctctgagaaaaggttcaagcaccttttccaaatt

SEQ ID NO: 7320 - DNA, 101 bp, Homo sapiens
tgatactgtggggattcagtttaggcgctggcccgaggatatcccagcggtggtacttcggagacacctgtctgcatctgactgagcagaacaaatcgtca

SEQ ID NO: 7321 - DNA, 401 bp, Homo sapiens
  unsure (150): n=A,T,C or G
  unsure (227): n=A,T,C or G
  unsure (260): n=A,T,C or G
  unsure (262): n=A,T,C or G
  unsure (278): n=A,T,C or G
  unsure (326): n=A,T,C or G
  unsure (355): n=A,T,C or G
  unsure (382): n=A,T,C or G
ttttttttcattataaaaggtacacttctgtttatatttaaacaacaaagaaaaaagcatctacacacttaaaaaattaattcaatattcctaaatctattttaactcattttaaaatactacatacagaagccagaatgcagagttaanaatggaataaggtggggagaagaaggggaccacgaagaaaaacacttagacaattacttgtctgttgtgggtaaaancaacaggaatcctgggagatacaagaaatcagnancaacctttgctcatanctgatatttttcccctcatgtttgttttttaataacgtccatatgggngctctctgtatgctcccttcctggcctancaggaggggctttcacgacggcctggncccattccagtcgtcctgg

SEQ ID NO: 7322 - DNA, 171 bp, Homo sapiens
  unsure (14): n=A,T,C or G
  unsure (26): n=A,T,C or G
gtgacttgaagcancttgttgatcanaaaatacagtctctggaagaccgtctggggagcgttctcctacagatgaccaataacactggtgcagagctcagtcccccaggggcagcagccctgccaggagtgtcagggtcaggagatgaacgggtcatgatggaattaaacc

SEQ ID NO: 7323 - DNA, 226 bp, Homo sapiens
ctgtgcgtgctcacgggctcctcctgctggaagagagagagatgtgcacgccactcctatggcatgtctagcaggtctgagcagtgttcatagaagaaaaatgttttaacagtctcagattttgggaggtagggggaaaaaaatcattgaaatctgggaaagacatttttaagctgctgacttcacctgcaaaatctaacaggttggattagtttttttttttttt

SEQ ID NO: 7324 - DNA, 228 bp, Homo sapiens
  unsure (222): n=A,T,C or G
  unsure (228): n=A,T,C or G
gagagacgcaggagcctacctgagggaggacgtgtggaaggacagacagcttcaggacaaagcaaaacgagcagaacacaaaaactgcaggggactgcgctgagaatccgggtgaggaaatcatcggcacactgaaccccctactcagaagtttacctatgaaacaatcttgcacatgtatgcttcaaaaacaaataacagttagggaagaaagagagaganagaaan

SEQ ID NO: 7325 - DNA, 111 bp, Homo sapiens
ccaacatggtgaaaccctgtctctactaaaaatacaaaaaagtagccggacatggtggtgggcacctgtaatcccagctactcaggaggctaaggcaggggaatcgcttga

SEQ ID NO: 7326 - DNA, 156 bp, Homo sapiens
gtatatttggagaaggattaaagggaagaaaataataaaattgcaagaacgtcattaaatgcttaagaggaacatggcttgttcctcagtcttcaaagattgaacaataactgggcagaattttccaaactttgatactagtaacaattaacagca

SEQ ID NO: 7327 - DNA, 120 bp, Homo sapiens
tcgacattctttttgttactgatacgtttaattgttttgtttgtaaggttccagaatatcttaaccatgtaagtaaacgcttagaggaagagggagacagagtaatcacttacttggacc

SEQ ID NO: 7328 - DNA, 186 bp, Homo sapiens
ctgagaagaaatggctttggaaagaatggcttcttgcagagccgcagttccagtctgttctccccttggagaagcacttgcaaagcagagtttgaggactcagacaccgaaaccagtagcagtgaaacatcagatgacgatgcctggaagtaggcatataaatgctcacagttaaatctgacccag

SEQ ID NO: 7329 - DNA, 123 bp, Homo sapiens
ccagggccatgacgggcaatgccggggagtggtgcctcatggaaagcgaccccggggtcttcaccgagctcattaaaggattcggttgccgaggagcccaagtagaagaaatatggagtttag

SEQ ID NO: 7330 - DNA, 231 bp, Homo sapiens
ctggtattttgcctaagatctatttaagataaccttttcttatattttttacttaatattgggcataatcgtatcattcaagattaagtctgggttatttctttgataagaactgaatgtggccgggcgcagtggctcacgcctgtaatcccagcactttgggaggccgaggtgggtggatcacaaggtcaggagatcgagaccatcctggctaacacggtgaaacccctg

SEQ ID NO: 7331 - DNA, 171 bp, Homo sapiens
cgcgtggagggaatatgtgttctggaagaatagagatcaaattccaaggacggtggggaacagtgtgtgatgataacttcaacatagatcatgcatctgtcatttgtagacaacttgaatgtggaagtgctgtcagtttctctggttcatctaattttggagaaggctctg

SEQ ID NO: 7332 - DNA, 472 bp, Homo sapiens
  unsure (232): n=A,T,C or G
  unsure (409): n=A,T,C or G
  unsure (425): n=A,T,C or G
  unsure (448): n=A,T,C or G
  unsure (468): n=A,T,C or G
ggagagggtgttttctcgtgtgaatgagggttttatgttgttaatgtggtgggtgagtgagccccattgtgttgtggtaaatatgtagagggagtatagggctgtgactagtatgttgagtcctgtaagtaggagagtgatatttgatcaggagaacgtggttactagcacagagagttctcccagtaggttaatagtggggggtaaggcgaggttagcgaggctttgctanaatcatcaaaaagctattagtgggagtagagtttgaagtccttgagagaggattatgatgcgactgtgagtgcgttccgtagtttgagtttgctaggcagaatagtaatgaggatgtaagcccgtggcgattatgagaatgactgcgcccggtgaagcttcagggggtttggatganaatggctgttactacnagggctatgtggctgattgaaantatgcaatgagcgattttangtct

SEQ ID NO: 7333 - DNA, 364 bp, Homo sapiens
ctgtgtccaagggagcaaagcaccccatattcttctgaacctaaaggggtttcctcctcaaagaagcatgttttcaatccctaaactttggggccagatacagctccaagtggcatttattgctctttggagagtcaaagccaagccaccatgagcacgaaagctgtctgagaccctcctcccctcctccccagcatggagagaataattgccatttcaccctccaaaatccgaaagaagtctcccccttccgtgggtttaagcatggacacaagccaagcaagcctcagatacccaggcctgtttgattgtagctatgttggtgtatctcgtgtacaagatggaaaagtgcttttgttgttct

SEQ ID NO: 7334 - DNA, 101 bp, Homo sapiens
ctgtacttgagattttggcagctcttggaaccggatttgcttgttccagtaaaaatgaaatggctttagtgcaagagttgggtgtacctccagaaaacatt

SEQ ID NO: 7335 - DNA, 380 bp, Homo sapiens
ccaacaacaccagtcaatagaagtcttagtggcacagctacagagagaaatattgactttgaacttgatatacgggttgaaattgatagtggaaaatgtgtactccacccaaccacccttctacaagaacatgatgatataagtttgagaaggagttatgatcgaagttccaggagcttagatcaagattcaccttcaaaaaagaagaagtttcaaactaattatgcttctaccacccatttaatgaccggcaagaaagtgccatcatctctacagacaaagcctagtgacttagaaacaacagtattttacattcccggagttgatgtaaagttgcattacaattccaagacgctaaagactgaatcacctaatgcctc

SEQ ID NO: 7336 - DNA, 221 bp, Homo sapiens
cctgtttgattgtagctatgttggtgtatctcgtgtacaagatggaaaagtgcttttgttgttctacctgatccagttgggggagcaggaatagggggtgcctgcctaacggcctctagcccatgtgcttatactgggatctgtcccgagggatctgcacctggttggcagtcattttgtggtggacgtggtaaatcgcgagtgttaccatgatgaccaag

SEQ ID NO: 7337 - DNA, 132 bp, Homo sapiens; identical to SEQ ID NO: 266

SEQ ID NO: 7338 - DNA, 384 bp, Homo sapiens
  unsure (246): n=A,T,C or G
ctgtttacagaaatatagttgcgagtatacaaatgttccaatagaagcaaaatatctttttaatatttaacaagttatcacagatagctaaaaacatagatgcaaatgaaattcccccagagaacaaactgaaaatatctggtatcagtgctctgaaatcccaactatgaaagccatatacacaaaaatgtaacccttatatcattgcaggacaatggaagaaaggcagttcagtggttgatcagnggctcaagcaaataaaattaaataaaaattaaaaatggcagaatggtagctaaaccacttgagaacaggttaatgaaattattggactatacttaaaacattaagtaaaagaagtgaatgaaactcatttaaagttgc

SEQ ID NO: 7339 - DNA, 190 bp, Homo sapiens
ccaggggaatgatgttccctgcaattaccatctcacctatacgtgcaagaaaggaacagttgcttgcggccagccccctgttgtagaaaatgccaagacctttggaaagatgaaacctcgttatgaaatcaactccctgattagataccactgcaaagatggtttcattcaacgtcaccttccaactatc

SEQ ID NO: 7340 - DNA, 215 bp, Homo sapiens
ctgactttcatatgagactcgggcttgatgtatgttagtgttctctttcttctaatagaatttctcattattggggtttaaatctttcctaaaatatttatagagtatggtttttagttttattatttttgtattcaaagacaaattaatcaaataggtttatattttacatgtgtacttcgtactcttatttgagatgggtaaaagtctgggtc

SEQ ID NO: 7341 - DNA, 130 bp, Homo sapiens
cttggaaagtggatctggaaaagtaacattccctaaaatgaagatccccaaatttaccttctctggccgtgagctggttggcagagaaatgggggtggatgttcacttccctaaagcagaggccagcatc

SEQ ID NO: 7342 - DNA, 268 bp, Homo sapiens
  unsure (4): n=A,T,C or G
  unsure (65): n=A,T,C or G
  unsure (68): n=A,T,C or G
  unsure (110): n=A,T,C or G
ccanaattcttggagtttacagaattggttataagaactctcagaacaacactgagaagaagttnganctccttgtcatggaaaatcttttctacgggagaaagatggcncaggtttttgatttgaagggctctcttaggaatcggaatgtaaaaactgacactggaaaagagagttgtgatgtggtcctgctagatgaaaatctcctaaagatggttcgagacaaccctctatatattcgttctcattccaaagctgtgctgagaac

SEQ ID NO: 7343 - DNA, 214 bp, Homo sapiens
gttttattttattataatgaattttgtttgttgatgtgaaacattatgccttaagtaatgttaattcttatttaagttattgatgttttaagtttatctttcatggtactagtgttttttagatacagagacttggggaaattgcttttcctcttgaaccacagttctacccctgggatgttttgagggtctttgcaagaatcattaatacaaa

SEQ ID NO: 7344 - DNA, 281 bp, Homo sapiens
ccaacttcttggcccagacagaggccctgatgaggggaaaatcgacggaggaggcccgaaaggagctccaggctgcgggcaagagtccagaggaccttgagaggctgctgccacataaggtctttgaaggaaatcgcccaaccaactctattgtgttcaccaagctcacaccattcatgcttggagccttggtcgccatgtatgagcacaagatcttcgttcagggcatcatctgggacatcaacagctttgaccagtggggagtggagctgggaaagcag

SEQ ID NO: 7345 - DNA, 408 bp, Homo sapiens
cctagaaggaaacctccagatgcctggaattaagtcctctggatgtgatgtgaacctgccaggcgtgaatgtgaaactcccaactgggcagatttctgggcctgaaatcaaaggtggtctgaaaggttcagaagtaggtttccatggggctgctcctgatatcagtgtgaaggggcctgcctttaatatggcatctcctgagtcagattttggcatcaacttgaagggcccaaaaatcaaaggaggtgcggatgtttcagggggtgtcagtgccccagacatcagccttggtgaagggcatttgagtgttaaaggttccggggggtgagtggaagggaccccaagtctcctctgctctcaacttggacacatctaagtttgctgggggcctttaacactcaaatgccc

SEQ ID NO: 7346 - DNA, 255 bp, Homo sapiens
acaaattcatgaaatttgcagacaacaacaacaacaaaacagctcctcaagtcaggtgacagtaatgcccctctcttgcaaagagaacaaactgtcattagtgtaacatgaagagctggctttccagtgaattttactaataaggaaacacaaaaggttacagacttgagtgaaactactcaaggaacataaaagctaaaagccaactgataagtatgtcttcacacatttctcaggtgaatggactctttgaca

SEQ ID NO: 7347 - DNA, 429 bp, Homo sapiens
  unsure (350): n=A,T,C or G
  unsure (422): n=A,T,C or G
ccttttctcattagtctctgggtcaggcttgggaagatatatgtgttggtgatgatatacttgtctttaatcatgatttatgaagatttaggattgtgtgtgatttgtcaaaggttctgggaaaaggctggtgcatatttcattacttaatctgagattgattttatgatgctaagagatatcacactattgttcaaatgtgtgggaagtacaggtagacacaacatcccagctttttactgcttatctttgcaactgtcaaacaatgctgtaaactttaactgcttgtagttaacaattcctgttttaattataggcagattttttattctgtccaaaggggagaagtntcaatggttatttagctaaaatgcatagcaagacattataactatgacctggtatgaaatcatggacaaagnttggtaa

SEQ ID NO: 7348 - DNA, 209 bp, Homo sapiens
ctgatgagtagtagagattggattcacacccaggttttctctctctgaagccctggtcacctgtttggccctggggtgatggggagaaggttctggctgtgtcttggctatctcctgcctctccctctgtggggaatgtgttcgaggatcacagctacagcttttcggataccctttcctttgtgaagcatgtgagaaccaacattgca

SEQ ID NO: 7349 - DNA, 372 bp, Homo sapiens
  unsure (9): n=A,T,C or G
cctgatctncaggtgccctggagggtccgactgctttcctcaggtactgactgtggacagcacatgagtacaggatgtagagtgcgcaggccagggcatagcctccccagttagaaacaccagcaatgacggcaaagtcagcctccacgtcgcaggcgatgacatccccgtgccgtatgtgcctcctcacagcctccttgactttacccatcccaagctcgttgcctccatcaccgactccagttgatgagattccaggaatcttcttcgcagcaagaaaaagatcgtcaatggggtcaaccaagtgcttgatgttcatcttccttgcattgtagtaattgccatcagcagctcttccggcacgctctatgg

SEQ ID NO: 7350 - DNA, 108 bp, Homo sapiens; identical to SEQ ID NO: 267

SEQ ID NO: 7351 - DNA, 393 bp, Homo sapiens
ccttaacccttgccctgggagcccccaaggataataacatccctttctggggcaacaaaactgggaccgagtgggtaactgatatttgacaggggaacctaaacagtctacggaagtgtcctgagatgggcgtaaagtcaaacagaccaagcacacaggtaacactgaaataggaaagagtaagagcttctgttcaggctggaggtgctcgtatggtgggacaggaaagggggaaaagagaaaggggcaacatggcagacataccacggttcctacagagattaggggcagccctggcccgggaagtacacagggcagagagctgactctcaggccaggaaggagtttagctctgacccatcctcagggaccacggctctcccccagcctcag

SEQ ID NO: 7352 - DNA, 208 bp, Homo sapiens
aaaaaactctggaacccatatccaggcttggtgaggttgctgccaacagtcctggcctcccccatccctaggctaaagagccatgagtcctggaggaggagaggacccctcccaaaggactggagacaaaaccctctgcttccttgggtccctccaagactccctggggcccaactgtgttgctccacccggacccatctctcccttc

SEQ ID NO: 7353 - DNA, 414 bp, Homo sapiens; identical to SEQ ID NO: 268

SEQ ID NO: 7354 - DNA, 461 bp, Homo sapiens; identical to SEQ ID NO: 269

SEQ ID NO: 7355 - DNA, 101 bp, Homo sapiens
ctcctcagcgcttcttctttcttggtttgatcctgactgctgtcatggcgtgccctctggagaaggccctggatgtgatggtgtccaccttccacaagtac

SEQ ID NO: 7356 - DNA, 125 bp, Homo sapiens
ccaagaacctcttccaccggaccatttctgagagtggcgtggccctcacttctgttctggtgaagaaaggtgatgtcaagcccttggctgagcaaattgctatcactgctgggtgcaaaaccacc

SEQ ID NO: 7357 - DNA, 238 bp, Homo sapiens
cctttggcgctcgttaggacagtggactattcagcaacaaaaaacccaagacgaaatgaaagaaaatatcatatttctgaaatgtcctgtgcctccaactcaagagcttctagatcaaaagaaacagtttgaaaaatgtggtttgcaggttctaaaggtggagaagatagacaatgaggtccttatggctgcctttcaaagaaagaagaaaatgatgggaagaaaaactgcacaggca

SEQ ID NO: 7358 - DNA, 153 bp, Homo sapiens
ctggagaatttctctacaaaaagctcttcagtcgtagagatccagaggaggatggaatgatgaaaagaagaggaagacaaggtccaaatgccaaccttgttaagacattggtttttttctttctagaaagtgagttacatgagcatgcagcat

SEQ ID NO: 7359 - DNA, 339 bp, Homo sapiens
ctgaatgtcagcaattgtttcagaggtgctcacaacttcaatgaggccagagcgatctcctgttgctaaacagccataaggcaacatccgaagatccaaaccagcttctttccagagtaaatccatcaagcgcaacatttggagtgtcaacatatcctgtcgtaaatcatcaccatttttaaaaatcactccaactgaatcctcaccaaataccttgttattgtataccagccacaaaggcttcattttggaatccatgtatttgcacttttcaacatagagttctgagaggataacacatgggttcaggggtgactgcaggtcagagagggcttcccg

SEQ ID NO: 7360 - DNA, 154 bp, Homo sapiens
cctggctcaacaaaagggctggggattggccctgaaaggagagagctgactgtcctggctgatggacaggagatcctcttagcactaccctaaggcaggcagttgggcattggtgtagacaacaggaaagtccaggctatagccgtactcaaaa

SEQ ID NO: 7361 - DNA, 125 bp, Homo sapiens
  unsure (1): n=A,T,C or G
  unsure (2): n=A,T,C or G
  unsure (14): n=A,T,C or G
  unsure (25): n=A,T,C or G
  unsure (35): n=A,T,C or G
  unsure (99): n=A,T,C or G
  unsure (102): n=A,T,C or G
  unsure (106): n=A,T,C or G
  unsure (113): n=A,T,C or G
nngcgacggcaccntcatccacctnaagtacccgntaaacctagccccaaacccactccaccttactaccagacaaccttagccaaaccatttacccanatnaagnataggcnatagaaattgaa

SEQ ID NO: 7362 - DNA, 101 bp, Homo sapiens
  unsure (13): n=A,T,C or G
  unsure (18): n=A,T,C or G
gaggtctgagggnaattntttaactaaacatcagtacacaaaaaataccaggatagatggaatcaaaagactctgaagccaaaaggaggctagggagagca

SEQ ID NO: 7363 - DNA, 101 bp, Homo sapiens
  unsure (8): n=A,T,C or G
  unsure (99): n=A,T,C or G
  unsure (100): n=A,T,C or G
ctgggggnggctacatgactctgaaccccagggcacctactgacgatgataaaaacatctacctgactcttcctcccaacgaccatgtcaacagtaatnnc

SEQ ID NO: 7364 - DNA, 174 bp, Homo sapiens
ctgacagataataggcaggacatgttagttataaagtagttacagcctaattcacaaaagttaccaactgtttctctttctagaaagaagcaagaagttaagaaattccttgaattagcgcctggtgtgtcaggtgggagtgcagaggagggctgttagagcagtgtcaaaagg

SEQ ID NO: 7365 - DNA, 167 bp, Homo sapiens
ccataccatagatttgggatgatgtagtctgtgctaaatattttgctgaagaagcagtttctcagacacaacatctcagaattttaatttttagaaattcatgggaaattggattttgtaataatcttttgatgttttaaacattggttccctagtcaccatagtta

SEQ ID NO: 7366 - DNA, 118 bp, Homo sapiens
  unsure (10): n=A,T,C or G
  unsure (27): n=A,T,C or G
ccatgctggncttgaactcctgacctnagatgatccgcctgcctcagcttcccaaagtgctgggatttgctaagtgtgagccactgtgcccggcctcttattcatttcttaacctatg

SEQ ID NO: 7367 - DNA, 376 bp, Homo sapiens
ccatcaactggaactatgtcattatttataaaacaggagcaatcacagggctgtggtgagaatcacatgaggtgacacatgtgaaatggtcctttcccctaagacatatataattgtgacaaggaacaaaatttacatagaaaataattacagaacaacgtaggaccatgtcttcatttctccctggagcggatgtaaaataaggtgattgatttgagcaacatgttatgaatatttagaaatgtcttctagggaagcaagctggcgctcaccgattttggtttgccaggcatatcagaaggcactttgtgacaggtgcagtagggacgcggagtgatctcttcacgtgtaggcaatgcccagcccgacacctagg

SEQ ID NO: 7368 - DNA, 128 bp, Homo sapiens
acaaattatctttgaagtttaaacatgataatatatagaaaaagtggtctgaaagtatgaagcccgaagtgtgagtttgatgatgacttagttttgcacatacatgtgagactctgacataccattat

SEQ ID NO: 7369 - DNA, 376 bp, Homo sapiens
  unsure (209): n=A,T,C or G
  unsure (374): n=A,T,C or G
cctggacttcccctgccccatgcaataaagcaagttttatatacactccccatatttttttctaacattttcttatataaatttaaatattttacaaaaaaaggcttttttcctccaaacatataaatctgagtgaaacatagattccccacccgagaacttgtttcttcactaaaatataaatgttgtctgatattaagggtaaatgncttttgacccactggagatcactgaagtctgaattgcaccgtggagaagcacttgtgttttctgaggtctccagcaagtataagccgaattccagcacactggcggccgttactagtggatccgagctcggtaccaagcttgggcgtaatcatggtcatagctgntt

SEQ ID NO: 7370 - DNA, 127 bp, Homo sapiens
ctgatcttaaactcctgacctcaagcagtctacccccgttggcctcccaaagtgctgggattacaggtgtgagccactgcacccagccaagtttatgtatttttattctttttcatgaatgtgattt

SEQ ID NO: 7371 - DNA, 212 bp, Homo sapiens
ctgtcgtatttgggccacatgctgccgcacagcctcctgcaaatgcagtatgctgctgcgttgctcctctggattgctagagatctcaagctggaacctgacccgttgcttcttctcactatgttccttccgcttaggttctacatggagcagcaggttgttgacaatgtccaggatcatggcatactgagctgggttggtggaaaatttcc

SEQ ID NO: 7372 - DNA, 202 bp, Homo sapiens
ccttgttataaataagctgcataatcaataaatagaacaagggactttttgttgatattccaaatactcaaagtttacgtaatgaaaattatagcgtgtgtgcaaactcttgagggttgattatgctgcaatttagcatgttggaacgtctagggagaaggttgactttttgcacttctgtatatagtcaaaagagagaaac

SEQ ID NO: 7373 - DNA, 206 bp, Homo sapiens
  unsure (6): n=A,T,C or G
gttagngcaagtacagtctctcaaggagaattgattttgtggcacaaaaagggaacatgttttactctttgcacgaaactttcattgttaatgtatattattcagaaacattgtattgtaccataaaacttgtattatcaaactgttggatgttcatgtgtttgaacttttgcgcaccggatagaccccttgtatataaagtggtg

SEQ ID NO: 7374 - DNA, 101 bp, Homo sapiens; identical to SEQ ID NO: 426
  unsure (85): n=A,T,C or G
  unsure (90): n=A,T,C or G

SEQ ID NO: 7375 - DNA, 101 bp, Homo sapiens
  unsure (4): n=A,T,C or G
  unsure (12): n=A,T,C or G
cctnctatgggngttaaattttttactctctctacaaggttttttcctagtgtccaaagagctgttcctctttggactaacagttaaatttacaaggggat

SEQ ID NO: 7376 - DNA, 181 bp, Homo sapiens
tttggctggttgattccaatgcagttgatgagctatccactctccgaagggcaactggaccagaagacagccatgtcactcctgtggaagtcctatccccttgtttgcattgctaaggaactgattccagaagccactgagaaatacttaggaggaacagacgacactgtcaaaaagaaag

SEQ ID NO: 7377 - DNA, 101 bp, Homo sapiens
gaagagcggagcgtgtgagcagtactgcggcctcctctcctctcctaacctcgctctcgcggcctacctttacccgcccgcctgctcggcgaccagaacac

SEQ ID NO: 7378 - DNA, 193 bp, Homo sapiens
  unsure (1): n=A,T,C or G
  unsure (91): n=A,T,C or G
  unsure (154): n=A,T,C or G
  unsure (192): n=A,T,C or G
ngtccaacattgcgaaaccctgtctctactaaaaaaaaaataaaaaatacaaaaattagctgggtatgatggcacatgcctctaatcccanctactgggaggctgaggcatgaaaatcgcttaaacctgggaggcgggtttgcagtgagccaanatagcaccactgcactccagcctgggtaacaaattgana

SEQ ID NO: 7379 - DNA, 116 bp, Homo sapiens
aaaagtcttgtgatttcctctcatcttttagagattcctgccaaaaattctaccaagcagagatggaggagcttgactttatcagcgccgtagagaagtccagaaaacacataaac

SEQ ID NO: 7380 - DNA, 351 bp, Homo sapiens
  unsure (20): n=A,T,C or G
  unsure (175): n=A,T,C or G
  unsure (183): n=A,T,C or G
  unsure (184): n=A,T,C or G
ccacatcaatgtcatacagnttcttcacagcctgtttaatctggtgcttgttggctttaacatccacaatgaacacaagtgtgttgttgtcttctatcttcttcatggcagactcagtggtcagcggaaacttgatgatagcatagtggtcaagcttgtttctcctgggagagcnctttccgnngatatttgggctgtctccggagtcgcagtgtcttcggccgccggaaggtgggtgacgtgcggatcttcttctttttgtggctgtggacacctttcaacactgccttcttggcctttaaagccttcgctttggcttcagctttaggaggggcaggagcttccttcttc

SEQ ID NO: 7381 - DNA, 327 bp, Homo sapiens
  unsure (6): n=A,T,C or G
  unsure (221): n=A,T,C or G
  unsure (225): n=A,T,C or G
  unsure (260): n=A,T,C or G
  unsure (320): n=A,T,C or G
ctgcanaggccacctggattgtgcctaatgtgtttgagcatcgcttaggagaagtcttctatttatttatttattcattagttttgaagattctatgttaatattttaggtgtaaaataattaagggtatgattaactctacctgcacactgtcctattatattcattctttttgaaatgtcaaccccaagttagttcaatctggattcatatttaatttngaangtagaatgttttcaaatgttctccagtcattatgntaatatttctgaaggagcctgcaacatgccagccactgtgatagaggctgcggatccaancaaatgg

SEQ ID NO: 7382 - DNA, 348 bp, Homo sapiens
  unsure (29): n=A,T,C or G
  unsure (51): n=A,T,C or G
  unsure (89): n=A,T,C or G
  unsure (95): n=A,T,C or G
  unsure (254): n=A,T,C or G
ccacttttggagagtccgactatcacggnaggcacagaactctgccatgtnactagctgaatgacctcggatgtcacttcaactctganccttanaacttgtcaactgcaaagtggggcacttcaccgagctacatcattgagctacttcactgagctacttcattgaattgggaaaattaaaggagcaaatatgggagaaggatttgcccatagtaaacactatgactgtccgcttctgccatctttcagtanacccagtgggaattatatgaaggttgataggcacttaaaccaagaatatatgaacatctattctgtgcaaggatgtgtgcattgaactcagtcc

SEQ ID NO: 7383 - DNA, 325 bp, Homo sapiens
ctgaggttgtcagtacaatgaaaccaaactggcgggatggaagcagattattctgccatttttccaggtctttgagttgcacgtcaaatctggggctgatcaccccacacttgtttagcctgcctgtgaggttcacaacaattttcccagctctgtggtcatcaatgatttcaaattcgccaatgtaaccatgcttcatcatcacagtgagaaacccggacgatgactttggagcacggcctaataagcacctggcgtttgcctctcttttcggcattgttgatactcttgagagcatctgccaggacattcatgcgcaccattg

SEQ ID NO: 7384 - DNA, 393 bp, Homo sapiens
ccttggatgcagatcaatgctccaataaagttcattatcagctcctcctgccttgtgacaggatgatttgattttacaaaagtccctttgaaaacaagagtaaacgcagacagcttctagagaaaagtctggtgaagcagcagttgataatagattttcttttagtgatgaaattaatcttgttttggtaatctacagcctgttagggataggtggagggatgaagtccttaaaactaaattgttcctctacgaatcttcgacctgagcctgtggagagagtagccccaaatccatctctctgctgaaaggtcgcctgttttggtaggtgtgaggacattccgaaacacggccatccacattcttgatacatcgcttcttctgcatctgccag

SEQ ID NO: 7385 - DNA, 231 bp, Homo sapiens
  unsure (1): n=A,T,C or G
  unsure (22): n=A,T,C or G
  unsure (60): n=A,T,C or G
  unsure (116): n=A,T,C or G
  unsure (137): n=A,T,C or G
  unsure (177): n=A,T,C or G
nggtcctttatcaacatttagntctttcaattaggaaatggagaatgaatgtttgagttnttaaggggaattaattgaatgatattttatcatttaagatgaaatcataacactanacacatagttgtatgttttangaggaaatttagcttttctatctgtgcttctcatgaatangagcacttcttgagactctggggtgatttaagccctttcccccactgagaccgc

SEQ ID NO: 7386 - DNA, 350 bp, Homo sapiens
  unsure (85): n=A,T,C or G
  unsure (90): n=A,T,C or G
  unsure (113): n=A,T,C or G
  unsure (151): n=A,T,C or G
  unsure (219): n=A,T,C or G
  unsure (262): n=A,T,C or G
  unsure (283): n=A,T,C or G
  unsure (324): n=A,T,C or G
tgtgatttttgctacaggccacagtcaggagcacatgatagtagcattggcacaggccacggtggaccgtttttcagtgtacagntccancaaaacctggtattctccctgangaatagtaaattcaggattattgacaggcccagcatantaaatctgctctcctttccttcttcccagaaagaaaacttgggcagagccgcctcacagatgggatangagaaattcaaaacagatgagccttgagacatgagagctaggncaagaaaaagctctttgatgncctctctcacaataattccaaatctaatggtgatatttgantttaattgcttggacacttttcaaca

SEQ ID NO: 7387 - DNA, 396 bp, Homo sapiens
  unsure (1): n=A,T,C or G
  unsure (207): n=A,T,C or G
  unsure (367): n=A,T,C or G
natttttgtcaaaatagtaggtgtaaaataatgtcttatggtttttatttgtatttacttgaatacaaataaatacaaggctgaggcttgagattgagattgagattgaggctgagcacctttctaatatttatggggcagttgtgtttccccttccatgaaatgtctgtacatgactttgcccattttaaaaaactgaggatttgnttttattaaaactttggtattatttatcctggatatttcctttataggttatatgtgtcccagtgtgtgacttatctttccctttttgtgatatgttgattaagcagtagttcttaatgaaattgaattagaatttttcttcattttatacttcttgggnctttctaaataaatctttcctaactcagg

SEQ ID NO: 7388 - DNA, 238 bp, Homo sapiens
ctggagagaagagagactgagtgccacccatgagaactggtggctcctctgggagggaacctggatacagtgaggagaaaagagcactgtgaattagagccagacgcttaagtccaggtgagacaggttatgccatcttccaaagtgtctaattgcctcaggcgtgaaaccaattcctatttacttacccagctccatggggtactgagatacatggggccgaaaaggggtaatatgg

SEQ ID NO: 7389 - DNA, 128 bp, Homo sapiens
  unsure (19): n=A,T,C or G
  unsure (24): n=A,T,C or G
  unsure (26): n=A,T,C or G
  unsure (46): n=A,T,C or G
  unsure (50): n=A,T,C or G
  unsure (60): n=A,T,C or G
  unsure (83): n=A,T,C or G
  unsure (110): n=A,T,C or G
  unsure (120): n=A,T,C or G
ttgaaaaaaaaggaccaangttcnanctacttccaggggaatccancaanatcccccgtntgaggactgacctttttccaaanacaaaaatccaggacttgaatcgtatnttcccctttntgaggact

SEQ ID NO: 7390 - DNA, 183 bp, Homo sapiens
ctgtgagggctccataaccactgttttcttatcttgttaagaggacatggcatgtggcagccaacaccttgacttcaaggtgaatgctaaaggaagagccttgtatttaaaatgaaatgaaagacaagcaacaagtcctgggcagtccagagattgtattctctacagatggcctgtttgcaa

SEQ ID NO: 7391 - DNA, 189 bp, Homo sapiens
ccatggacaagctgaggaagatgctggttccctgcccacagaccttccaggagaatgacctgagcaccttctttcccttcatctttgaagaagaacctatcttctttgacacatgggataacgaggcttatgtgcacgatgcacctgtacgatcactgaactgcacgctccgggactcacagcaaaaaa

SEQ ID NO: 7392 - DNA, 101 bp, Homo sapiens
  unsure (4): n=A,T,C or G
  unsure (12): n=A,T,C or G
  unsure (22): n=A,T,C or G
  unsure (26): n=A,T,C or G
  unsure (27): n=A,T,C or G
  unsure (90): n=A,T,C or G
gacntgctgtanaccctggttnccanngcacagggtgaccgtgtgatggtggtgctgggcccacagactggaagggtgggacatttgctnagccgggacag

SEQ ID NO: 7393 - DNA, 206 bp, Homo sapiens; identical to SEQ ID NO: 270

SEQ ID NO: 7394 - DNA, 182 bp, Homo sapiens
  unsure (1): n=A,T,C or G
  unsure (130): n=A,T,C or G
  unsure (161): n=A,T,C or G
nctgacatcccagagatcagtttcctttctgggagggactcctcattgaggggggtgcagaagacctgcagacctgcatcaaccctggtctttgaggcttcaactccagcacactggcggccgttactantggatccgagctcggtaccaagcttggcgtnatcatggtcatagctgtttcc

SEQ ID NO: 7395 - DNA, 284 bp, Homo sapiens
  unsure (1): n=A,T,C or G
  unsure (57): n=A,T,C or G
  unsure (91): n=A,T,C or G
  unsure (146): n=A,T,C or G
  unsure (166): n=A,T,C or G
  unsure (226): n=A,T,C or G
nctaaaacactctttacgccggcttctattgacttgggttaatcgtgtgaccgcggnggctggcacgaaattgaccaaccctggggttagnatagcttacttaaactttcgtttattgctaaaggttaatcactgctgtttcccgngggggtgtggctaggctaancgttttgagctgcattgctgcgtgcttgatgcttgtccttttgatcgtggtgatttaganggtgaactcactggaacggggatgcttgcatgtgtaaacttactaagactaatagaaa

SEQ ID NO: 7396 - DNA, 101 bp, Homo sapiens; identical to SEQ ID NO: 662
  unsure (7): n=A,T,C or G
  unsure (17): n=A,T,C or G
  unsure (19): n=A,T,C or G
  unsure (21): n=A,T,C or G
  unsure (24): n=A,T,C or G
  unsure (43): n=A,T,C or G
  unsure (55): n=A,T,C or G
  unsure (61): n=A,T,C or G
  unsure (65): n=A,T,C or G
  unsure (73): n=A,T,C or G
  unsure (76): n=A,T,C or G
  unsure (84): n=A,T,C or G
  unsure (93): n=A,T,C or G
  unsure (97): n=A,T,C or G

SEQ ID NO: 7397 - DNA, 373 bp, Homo sapiens
  unsure (1): n=A,T,C or G
  unsure (346): n=A,T,C or G
ncctacaggtgtgcactgaattattcccaaaaccattcacccttccccacaccgtctctgcaccaagcaccaaaaatttgataaaaactattacttattgaaaaccacttaaaattgcaatgaaaaaaattttaaatccttaccaaaacagagaaagaaaaaacaaaatgcttaccaagcccccaatatagctttcaagatatttagattaaactctaacctattgtatcttaagcacataataaggcacataataagaaattaagtaaatacacagtaattctgagtaagtattagagattataggtggtcaaaaaacccttgagattaatttttttctaaaagnaagaccttaccaaaaataactttttaa

SEQ ID NO: 7398 - DNA, 339 bp, Homo sapiens
ctgatataatacaatccagctttattcgaaagataagtattctaactcttgttcggtgtttattcaaacttgtgtttgcatgtatttgtttggactataaattttgagactatagtgagtatgtttttgactataatattttaaatggaagatgaaatttaaattaagtatttgcttgtttctttttacaataaaataggtagctttgcagtttggggagggctgttttccatgattgactgtagtatggttcaagtcagaggaaaggaagatccctggaactccatcacaagtgggccttaacgggagccatactggcagcaagaaatggaccagtgg

SEQ ID NO: 7399 - DNA, 467 bp, Homo sapiens
  unsure (1): n=A,T,C or G
  unsure (21): n=A,T,C or G
  unsure (50): n=A,T,C or G
  unsure (59): n=A,T,C or G
  unsure (92): n=A,T,C or G
  unsure (161): n=A,T,C or G
  unsure (190): n=A,T,C or G
  unsure (281): n=A,T,C or G
  unsure (343): n=A,T,C or G
  unsure (416): n=A,T,C or G
nttttgaataaatccctccgngtgccagctatcacattcaaatttgaatnctaggatgngaaggccataataaaagcagaaaacactttttnccaaaaaccacaataaataattttcaaaccagacattgtacaattttaaattatttttcaagtaaaatntacctacatggtaaatttcatttattcangtgaaattaagtctttgtttggtgagcctttagccacaataaagagaaacaagtaatacccaagtgtagtagggaatagagtaactttgtntcccctaatgccatgctcattagctggggtaagcctgacaatgtcttgccccttaccatggncaagcccccactcaggagccccccgccctgctccatcaagccatgggtcatgcccacaaggcatgtccaatgnctggaccccatactgggctgaaaaactgctatcctgtgaagaggaaggggt

SEQ ID NO: 7400 - DNA, 421 bp, Homo sapiens
  unsure (1): n=A,T,C or G
  unsure (65): n=A,T,C or G
  unsure (69): n=A,T,C or G
  unsure (76): n=A,T,C or G
  unsure (102): n=A,T,C or G
  unsure (164): n=A,T,C or G
  unsure (199): n=A,T,C or G
  unsure (289): n=A,T,C or G
  unsure (295): n=A,T,C or G
  unsure (297): n=A,T,C or G
  unsure (326): n=A,T,C or G
  unsure (329): n=A,T,C or G
  unsure (336): n=A,T,C or G
  unsure (384): n=A,T,C or G
  unsure (388): n=A,T,C or G
  unsure (414): n=A,T,C or G
nggttcgactttgccaatgtccaggagcaggcttcctgggtgtgccagtgtgatgacaacatggntcanagactanaaacagacttcaagatgactcttcancagcagagcaccctggagcagtgggctgcgtggcttgacaatgtgatgatgcaagcactganaccctatgaaggaagacccagttttcctaaaccgncaggcagtttctgctaaaatggtctttctacaggtatcatctaggtttttcctaggctttcttcttcatattctgcaaatatgtgtgtgnatgtgntngtatatgcttctgtgacaaaagaaaaganagnaataaanactttagtttgtggaaactccctgttacaactaccttcaacccaactnaggngattacccaccatggaaatgtaccangaaactt

SEQ ID NO: 7401 - DNA, 112 bp, Homo sapiens
ccaacatggtgaaaccccgtctctactaaaaatacaaaaaaattagctgggtgtagtggcaggcacctgtaatcccagctactcgggaggctaaggcaagagaatcacttga

SEQ ID NO: 7402 - DNA, 379 bp, Homo sapiens
  unsure (190): n=A,T,C or G
  unsure (348): n=A,T,C or G
cgaaaggcggcaaaaagggagccaagaagaaagtggttgatccattttctaagaaagattggtatgatgtgaaagcacctgctatgttcaatataagaaatattggaaagacgctcgtcaccaggacccaaggaaccaaaattgcatctgatggtctcaagggtcgtgtgtttgaagtgagtcttgctgnttttgcagaatgatgaagttgcatttaaaaaattcaacctgattactgaagatgttcagggtaaaaactgctgactaacttccatggcatgggatcttacccgtgacaaaatgtgttccattggtcaaaaaatggcagacaatgattgaagctcacgntgatgtcaagactacccgatggttcttgctt

SEQ ID NO: 7403 - DNA, 288 bp, Homo sapiens
  unsure (1): n=A,T,C or G
  unsure (83): n=A,T,C or G
nccaggttccataggatcccatcagagcagattcaggtttggcttgagttatcgatattagggtcctactaggattctctaantttatatcaaagttcagcctctcttcaaactctcctgattccttttgcctcaagaaagaaagaactccaggatccttgggctgcaggacaaatatgccatactccttgtgggtggacaatatcataggattttctgtatagctgctccagatttcagatggagcatcccctggcttcatgcaaagtaacttcaaatctgctttgg

SEQ ID NO: 7404 - DNA, 152 bp, Homo sapiens
  unsure (1): n=A,T,C or G
  unsure (14): n=A,T,C or G
  unsure (15): n=A,T,C or G
  unsure (145): n=A,T,C or G
  unsure (150): n=A,T,C or G
nccaggctggtttnnaacttctgacctcaggtgatccatcctcctcggcctcccaaactgctgggattacaggcgtcaactaccacgcccggcactccagcctgggtgacagagtgacactctatcaaggaggaaaaaaaaaaangaaanga

SEQ ID NO: 7405 - DNA, 391 bp, Homo sapiens
cctggcccccaagaacacagtgataggattcagcatttggtgtttctaattatacaatgactacatatatatcatagacttgctctcatccattctccaccataaagtttcaatttcctcttaaaatatggcagtcaagtttagtctcattcaaaatcttatctggtcctacagcatattacagacttagactcactcttctgttttaattgatgttactgtgtagcccgaagattttaaaaaaagatttatagatatacacttgaaattctgcagtcttgaaatactacaataaatttttcttacttatgaaaagccaacaacaacaaaaaaggccaggccaggcataagacagaggggaagggaagatgaggagggaggtttgagagtc

SEQ ID NO: 7406 - DNA, 341 bp, Homo sapiens
cgagcttacattttaggagttaagttctagaggccaatgatcctttgtttggggtattgaatattatctagtatatccagtacaggtttaagagtagttgctattttataaatgttcaacatggaccagaaaagcatcagtctataaatggattccttgggcccagagctctgacagaagaaaagtttgagtgtttgggggtagtggggtggtgactgcattactatattactgcagcatttctggtttatgtacagtagcactcaataaatatatgtttactttaattgagtaggcataaatagcattcaccagaaatcctttgctggcagccagacctc

SEQ ID NO: 7407 - DNA, 219 bp, Homo sapiens
  unsure (2): n=A,T,C or G
  unsure (140): n=A,T,C or G
gncttgcttcttacctctatgggttcacgtcattgtatcgcctccctttggatctctcccttattttgggtggaggagcttctttggctggagcctatgctgatgggaccaacgttagagctttgatgcagagaaaaatntaaattctgcaggtacatactgttcttccttcccttctttgccatctttgtagaacctgggccttttattgcagaaggg

SEQ ID NO: 7408 - DNA, 355 bp, Homo sapiens
  unsure (202): n=A,T,C or G
  unsure (252): n=A,T,C or G
  unsure (284): n=A,T,C or G
ccactgcactgaaaaaattgaaaagtcttggtttaattcatgctgatctcaagccagagaatattatgttggtggatcctgttcggcagccttacagggttaaagtaatagactttgggtcggccagtcatgtatcaaagactgtttgttcaacatatctacaatctcggtactacagagctccagagattatattggggtngccattttgtgaagccatagacatgtggtcattgggatgtgtgattgcanaattatttcttggatgggcccgctctacccangagccttggagtatgatcagattcgatacatttctcagactcaagggttgccagggagaacaagttgttaa

SEQ ID NO: 7409 - DNA, 168 bp, Homo sapiens
  unsure (1): n=A,T,C or G
nccactgtcacggtgtccccagccccccaggtggctgcgcactgcatcctcagtgtccagtggaaagatcgtccagtccgtgaggatattggaactgagagtcaggttagaaaccaaacccttaaaatcgttgatatatgcaccatagttcacacgtcccatgttctc

SEQ ID NO: 7410 - DNA, 440 bp, Homo sapiens
  unsure (1): n=A,T,C or G
nctgactatgtcactcttatgagttctgctcaggaacaagcataaaactgaataatatgacatcacagtccaagacctggtaagagttggtttctttttatttggaaataactatggtcaactttcattaatgtggaagttgactgataatgttaagagtcaaagtgaaaaagaaagcccgatcccatattcaacagtgctttcagttacaacattttttgaatttccttctctaaaacattcacagcagaggtgtccatttcacttgcctgtttcacctctagataccaccacagttgctggggtcatgtgaggtaaaggaatatatccaattgactgttagcccaacatgactatctgcaattctgatagaaaagctactttcagccatgtcttacaaagtgcttaaaagctggacagaagactttaaataaagctta

SEQ ID NO: 7411 - DNA, 319 bp, Homo sapiens
  unsure (1): n=A,T,C or G
nctgccggctcagcattgttcaagattcttttaaaggactggggggattttaatatccagaaaatgttaaagcagcaaaagaaaaaataaattaaaaagtcattgcaattggagatattaccaaggatgtgcttactataaagtcttcttgacatgttaattataaaatcttccaacctttggtattaaaaaaaatcatgtgaatagttgtcctatattgccttgtcatctataatttataacatagaagaaatttgctgatttttttaaaaagatggcaaacatgaatcatgactcattcaaataaaatacaaccagc

SEQ ID NO: 7412 - DNA, 121 bp, Homo sapiens
  unsure (10): n=A,T,C or G
  unsure (16): n=A,T,C or G
  unsure (105): n=A,T,C or G
tttttttttnttcagngaagtttatttcaaaaccattgaacagtatgatatttgctcatttataaatattcccatttaaataatctgagcttatatattttcagngttaattaaaggactt

SEQ ID NO: 7413 - DNA, 304 bp, Homo sapiens
ctgctgtacgtgctgctcacagactgctatgtctacctgctccggaaaggggccacagagaagccatacctggtggaagaggccgtttcttacaatgaacttgactatgtgtcggttggccttgaccagcagacggtgaagctggtgtgcaccaaccgcaggaagcagtttctgctggacacggctgatgtggcgctggctgagttctttttggcttctttgaagtcagccatgatcaaaggctgtcgagaacctccctaccccagcatcctgacggatgccaccatggagaagctggcactgg

SEQ ID NO: 7414 - DNA, 434 bp, Homo sapiens
  unsure (197): n=A,T,C or G
  unsure (286): n=A,T,C or G
  unsure (375): n=A,T,C or G
  unsure (406): n=A,T,C or G
  unsure (418): n=A,T,C or G
ctttgccgttgaagctgctaactaccaagacactattggccgcctgcaggatgagattcagaatatgaaggaggaaatggctcgtcaccttcgtgaataccaagacctgctcaatgttaagatggcccttgacattgagattgccacctacaggaagctgctggaaggcgaggagagcaggatttttctgcctcttncaaacttttcctccctgaacctgagggaaactaatctggattcactccctctggttgatacccactcaaaaaggacacttctgattaanacgggtgaaactagagatggacaggttatcaacgaaacttctcagcatcacgatgaccttgaataaaaattgcacacactcagtgcagncaatatattacccagcaagaataaaaaaganatcctatcttanagaaacagctttcaag

SEQ ID NO: 7415 - DNA, 363 bp, Homo sapiens
  unsure (1): n=A,T,C or G
  unsure (333): n=A,T,C or G
ngttgatgtcgaaaggatggaagaagccaaaactgaacttcacaaaataactaggatatcagaaaatcagggagtccctgtacttatagttactaacaaacaagatttgaggaactcattgtcactttcagaaattgagaaattgttagcaatgggtgaactgagctcatcaactccttggcattgcagcctacctgtgcaatcataggagatggcctaaaggaaggacttgagaaactacatgatatgatcattaaaagaagaaaaatgttgcggcaacagaaaaagaaaagatgaatatcaatacctattatatctgtgtgggagtaaggntttctctggtctgattttgacaaataagaa

SEQ ID NO: 7416 - DNA, 143 bp, Homo sapiens
ctggatatgttttggatcatctaacactactctacatcctgttagaacttccattattacaattccaaagctgtagacatctgttttaatggaaagtttcccctgtctgatgtactcttctggcatgtaccacagatgtttac

SEQ ID NO: 7417 - DNA, 459 bp, Homo sapiens
ctgaatttctgaaagtgtttccttacaatggtggtacctggctcagggatgggcaggggtagccaaaccctccccgtgctgcccagttcgctgagggtgggagtaggaacaaaagtttaaggctgaggccactgccatgccctggatgtaacaaccaggaaaatcatgttaatcaaggaaacaaaaattcctctagactctgcaatactgcactcttaacaaaaatcaaatgaaaacaagacgtgtctgccacaggtctcaggataacagatgccctgtccactgagagcggcagttctgcagtcagagttctttgatcagccctggacccatttatcacatgggggaggaagggagggtgccctctcgcctggtcccatgatcctggcatggtgcaggttccagcgatgtcccaggcagggtggcaaagggacacccggtaggatgaggcactcagtg

SEQ ID NO: 7418 - DNA, 469 bp, Homo sapiens
  unsure (174): n=A,T,C or G
taaatatgcatgtgaacattcagactgggaaatgggaacctgatccaacaggcaccaagagctgctttgaaacaaaagaagaagttcttcagtactgtcaggagatgtatccagagctacagatcacaaatgtgatggaggcaaaccagcgggttagtattgacaactggtgcncggggggacaaaaagcaatgcaagagtcgctttgttacacctttcaagtgtctcgtgggtgaatttgtaagtgatgtcctgctagttccagaaaagtgccagtttttccacaaagagcggatggaggtgtgtgagaatcaccagcactggcacacggtagtcaaagaggcatgtctgactcagggaatgaccttatatagctacggcatgctgctcccatgtggggtagaccagttccatggcacttgaatatgtgtgctgccctcagacaaagattattggatcttgtgtccaa

SEQ ID NO: 7419 - DNA, 486 bp, Homo sapiens
agcgctggagctttccttattagagaaagtgaaacattaaaaggaagcttctctctgtctgtcagagactttgaccctgtgcatggtgatgttattaagcactacaaaattagaagtctggataatgggggctattacatctctccacgaatcacttttccctgtatcagcgacatgattaaacattaccaaaagcaggcagatggcttgtgcagaagattggagaaggcttgtattagtcccaagccacagaagccatgggataaagatgcctgggagatcccccgggagtccatcaagttggtgaaaaggcttggcgctgggcagtttggggaagtctggatgggttactataacaacagtaccaaggtggctgtgaaaaccctgaagccaggaactatgtctgtgcaagccttcctggaagaagccaacctcatgaagaccctgcagcatgacaagctcgtgaggctctacgcttggggtcac

SEQ ID NO: 7420 - DNA, 452 bp, Homo sapiens
  unsure (1): n=A,T,C or G
nccactaatgtgccatcttgagttggaaaacaaaccccctccccccaaaaaaaaccctgccgctttggtgtcctatttatatatttttaaaaacattcattaaaaaaatcaaatctataataaaaatgtccctgtttgttttaaaaaagcattagtaggcatcccttatctactaaaaccatttgtttttcctaagatgcctggaagcagaaaagcgagtgagattaactcactgcgcaattaattaaaattagaattctttcctctaaacaacttccagagcaccagaaagaagaaggggccccatcaaagggagaaataaagcccttctgactcacaggagatgaaatgttcagccagagttctaacacattctggctgcatcaaaagtctttattggattactcagaaaataactcaaggctattttaaaaatgaaagatacaggcagc

SEQ ID NO: 7421 - DNA, 396 bp, Homo sapiens
ctgccaggggggacctagagcaacttactagtttgttgcaaaataatgtaaacgtcaatgcacaaaatggatttggaaggactgcgctgcaggttatgaaacttggaaatcccgagattgccaggagactgctacttagaggtgctaatcccgatttgaaagaccgaactgggtttcgcttgtcattcatgatgcggccagagcaggtttcctggacactttacagactttgctggagtttcaagctgatgttaacatcgaggataatgaagggaacctgcccttgcacttggctgccaaagaaggtcacctccgggtggtggagttcctggtgaagcacacggccagcaatgcggggcatcggaaccataagggggacacccgcctgtgatttgg

SEQ ID NO: 7422 - DNA, 294 bp, Homo sapiens
  unsure (190): n=A,T,C or G
gggggggggagataaattttaaaaggtaagaaacaaaaatcctctatccaaataaattacaatctagagacacgaaacttacatacataggaaaaacttataactcaccaatgctgaacagcgatgaaaccatactgtaactagagagatgggagccaaaagagtatctacatggggtcatgttaacggnctgagtttctgtctccctgctatagaatctaaaagtaaatgaactggctggctgatgatatgccatcaaagcaggaaaaaacttgtttactgagctccttgagg

SEQ ID NO: 7423 - DNA, 414 bp, Homo sapiens
ctgtctctctctctaaataaaaacagtattttaaaaatatttatttggcttgttccatgtgtaattttttaaattgcaagatgctttaaaaaatgcatatatcaaagtcctatttccacataggaaatcaagaatggtgatgattaccaaacactactcactttatttataacactttcccctcttggtgttgtcacttttatttctgatgacaaaattctcctcagggagagatcccactgattttatttgagccattccatcttacgcttttaaaggagtaaaataaagcagattaaactgccaaggacacatccaggataagggcagggaaaagaaaagctggtactcaaggtatctaagttatttcatgtgtaaagggttttacgatgagtttaacttttggtagttaat

SEQ ID NO: 7424 - DNA, 158 bp, Homo sapiens
ctgaaccctcgtggagccattcatacaggtccctaattaaggaacaagtgattatgctacctttgcacggttagggtaccgcggccgttaaacatgtgtcactgggcaggcggtgcctctaatactggtgatgctagaggtgatgtttttggtaaaca

SEQ ID NO: 7425 - DNA, 187 bp, Homo sapiens
  unsure (1): n=A,T,C or G
  unsure (3): n=A,T,C or G
  unsure (20): n=A,T,C or G
ncnagacttcagttttcttnggggaagaagaggtttggtattttagggtagatataccctcagggctggaggctctacagcttctcagtaatttgtactgagagtgaaaattaatcttcactcactcactcatgtgtttaaatagcttttctttagtcccctcctatgtgtaacaaaatcatccaag

SEQ ID NO: 7426 - DNA, 423 bp, Homo sapiens
  unsure (12): n=A,T,C or G
  unsure (381): n=A,T,C or G
  unsure (382): n=A,T,C or G
  unsure (409): n=A,T,C or G
gggggggctgangcaggagggtcgcttgagcccaggaaagttcgagtccaagctgggcaacagagcaaaaccttgtctcttaaaaaagaaaaaaaatagagttcagaatagataaaagagttgttattctaagaaaatagactactgaagggagaaaggctttaataatattaaaaatagggcaaggtaatgcttttcatagtatagtaagatttgcctaataccatcttatttctttgattaaaagttacttagcttcagcatgcgtgtacattcaaaatacaaaattaaagcatgagttgtcattaatttgcagaattctatgattgaagcctctaaatgaattgtgcaggaaagggagtttgtaaacaactgactacnnacattcccattgggtcatctttaaaanctggactctgcttt

SEQ ID NO: 7427 - DNA, 278 bp, Homo sapiens
  unsure (16): n=A,T,C or G
  unsure (18): n=A,T,C or G
  unsure (19): n=A,T,C or G
ccagtcattttaattngnngttctatttacattcccaaggtaaccacgttcagtaactctctagaggctaagctgttaaaatttccatttttatacaaatagcaaagatatttctttctctttctttctttctttctttctttctttctttcttttctttctctctttccttccttccttccctccttccttccttcctttctttctttttgtttgagacagagtttcgctcttgaccccgaggctggagtgcagtggcctgatcttggctcactgca

SEQ ID NO: 7428 - DNA, 166 bp, Homo sapiens
  unsure (98): n=A,T,C or G
  unsure (151): n=A,T,C or G
  unsure (166): n=A,T,C or G
ggagagaacgcggtctgagtggtatagtgatgccagcagctaggactgggagagataggagaagtaggactgctgtgattaggacggatcagacgaanaggggcgtttggtattgggctatggcagggggttttatattgataattgttgngatgaaattgatggn

SEQ ID NO: 7429 - DNA, 364 bp, Homo sapiens
  unsure (10): n=A,T,C or G
  unsure (15): n=A,T,C or G
  unsure (20): n=A,T,C or G
  unsure (37): n=A,T,C or G
  unsure (46): n=A,T,C or G
  unsure (99): n=A,T,C or G
  unsure (113): n=A,T,C or G
  unsure (114): n=A,T,C or G
  unsure (116): n=A,T,C or G
  unsure (124): n=A,T,C or G
  unsure (129): n=A,T,C or G
  unsure (140): n=A,T,C or G
  unsure (162): n=A,T,C or G
  unsure (189): n=A,T,C or G
  unsure (190): n=A,T,C or G
  unsure (201): n=A,T,C or G
  unsure (202): n=A,T,C or G
  unsure (212): n=A,T,C or G
  unsure (258): n=A,T,C or G
  unsure (273): n=A,T,C or G
  unsure (298): n=A,T,C or G
  unsure (304): n=A,T,C or G
  unsure (311): n=A,T,C or G
  unsure (329): n=A,T,C or G
ctgtggctgnggggncgganaagcacatttttctgcngataattanaatggcttcccccatctctcacggactgtcccaagtctagaaaagaattgacntcctcttctattanncnaataaaanggaanagaatgtttgncttcctttcctttctgtagtgntaagaaaataaacgaacttaatggatnntaaattatcanngagcttaacnctgtactataaaccaaacattaccttttcaaaaagtcctttgaggngaaatattttgtatncgtaatacatagatgcacatataancccacncatatanaatctcaatattttaacncttctttgggtagttgcactaactcactaaccctg

SEQ ID NO: 7430 - DNA, 299 bp, Homo sapiens
  unsure (32): n=A,T,C or G
  unsure (108): n=A,T,C or G
  unsure (157): n=A,T,C or G
  unsure (223): n=A,T,C or G
  unsure (276): n=A,T,C or G
  unsure (298): n=A,T,C or G
gaatattgtgaacctgctgggggccgtgcacnctgtcaggaccaatttacttgatttttgaatactgttgctatggtgatcttctcaactatctaagaagtaaaaganaaaaatttcacaggacttggacagagattttcaaggaacacaatttcantttttaccccactttccaatcacatccaaattccagcatgcctggttcaagagaagttcagatacncccggactcggatcaaatctcagggcttcatgggaattcatttcactctgaanatgaaattgaatatgaaaaccna

SEQ ID NO: 7431 - DNA, 282 bp, Homo sapiens
agagttgcatacagaccaatttctgcatcagtgttatctcgaccagaggctagtaggactggagagggctctacggtatttaatggggcccagaatggtgtgtctcagctaatccaaagggagtttcagaccagtgcaatcagcagagacattgatactgctgccaaatttattggtgcaggtgctgcaacagtaggagtggctggttctggtgctggtattggaacagtctttggcagccttatcattggttatgccagaaacccttcgctgaagcagcag

SEQ ID NO: 7432 - DNA, 233 bp, Homo sapiens
  unsure (20): n=A,T,C or G
  unsure (36): n=A,T,C or G
  unsure (118): n=A,T,C or G
  unsure (152): n=A,T,C or G
  unsure (176): n=A,T,C or G
ctaagttggtaatgatgcanaagctactcaaatgcngtcggcttgtcctggctcttgccctcatcctggttctggaatcctcagttcaaggttatcctacgcagagagccaggtaccnatgggtgcgctgcaatccagacagtaattctgcnaactgccttgaagaaaaaggaccnatgttccaactacttccaggtgaatccaacaagatcccccgtctgaggactgacctt

SEQ ID NO: 7433 - DNA, 112 bp, Homo sapiens
  unsure (18): n=A,T,C or G
  unsure (33): n=A,T,C or G
  unsure (49): n=A,T,C or G
  unsure (56): n=A,T,C or G
  unsure (72): n=A,T,C or G
  unsure (95): n=A,T,C or G
  unsure (110): n=A,T,C or G
ctgttggagggggccctncccaaagggtcctgnacccctcacaggggangaactgnacttgccgctcattcngacaaaggggggtgtggacgcanccctggaatatgccnac

SEQ ID NO: 7434 - DNA, 269 bp, Homo sapiens
  unsure (240): n=A,T,C or G
  unsure (263): n=A,T,C or G
gtacttgtagaagcaaggccagtccagcatcagaaggcagaggcagcatcagtgactcccagccatggaatgaacggaggacacagagctcagagacagaacaggccagggggaagaaggagagacagaataggccagggcatggcggtgagggactgaggcccctaaattttggtcccaggggaaaggaagaggccagttggtccagttttgatggctatggggaagggaatgtattantaagcatgggggagaggatgccngcaggc

SEQ ID NO: 7435 - DNA, 264 bp, Homo sapiens
gggctccttaaccccactggtgagcctaagttgggaagcaattggctaataactggcctctcataattggattgtaatctatccctccaacagagactgacgtaagtctcctctttctcatgaaatattctgtaacttcctgcctttcttgattccttctttttctgacctcacctaccattcacaatctgtcacaccatacacctactgtgtaactatatgtttagtatgacaactgtatttgattgtgttaatgttagctgg

SEQ ID NO: 7436 - DNA, 262 bp, Homo sapiens
  unsure (16): n=A,T,C or G
  unsure (156): n=A,T,C or G
  unsure (241): n=A,T,C or G
attcttaaaacttaancatggtaaaatgttaagctgttttcatccactgatattattctactataaaaagcccttcttgagcagatttgatgataaaaaggagaacatttctaaggtataattagagaagctgttgcatgagaaatcatgtctccntctccattttgctatgcgttatctgaggattgtttctgaaagagatctatttaggcagtgtatgtatgtgtcagcatgtaaaaantaaagaactgaaaatagacaa

SEQ ID NO: 7437 - DNA, 300 bp, Homo sapiens
  unsure (231): n=A,T,C or G
agtggtataccaggaaattctgttctactcgtcacaaatctcaatcctgatcttatcacaccacatgggctttttatcctatttggagtctatggtgatgtacatcgagtgaagattatgtttaataagaaagaaaatgccttggttcagatggcggatgcaaatcaagctcagctagcaatgaaccatctaagtggtcagagactttatgggaaagtgcttcgtgctacnctgtccaaacatcaagcagtacagcttcctcgagagggacaagaagaccaaggtctgactaaggatttc

SEQ ID NO: 7438 - DNA, 322 bp, Homo sapiens; identical to SEQ ID NO: 596
  unsure (18): n=A,T,C or G
  unsure (52): n=A,T,C or G
  unsure (86): n=A,T,C or G
  unsure (164): n=A,T,C or G
  unsure (167): n=A,T,C or G
  unsure (183): n=A,T,C or G
  unsure (191): n=A,T,C or G
  unsure (254): n=A,T,C or G
  unsure (270): n=A,T,C or G
  unsure (297): n=A,T,C or G
  unsure (311): n=A,T,C or G

SEQ ID NO: 7439 - DNA, 376 bp, Homo sapiens
  unsure (293): n=A,T,C or G
  unsure (327): n=A,T,C or G
  unsure (330): n=A,T,C or G
aggtgattatcctgaaccatccaggccaaataagcgccggctatgcccctgtattggattgccacacggctcacattgcatgcaagtttgctgagctgaaggaaaagattgatcgccgttctggtaaaaagctggaagatggccctaaattcttgaagtctggtgatgctgccattgttgatatggttcctggcaagcccatgtgtgttgagagcttctcagactatccacctttgggtccctttgctgttcctgatatgagacagacagttgcggtgggtgtcatcaaagcngtggacaagaaggctgctggagctggcaaggtcnccnagtctgcccagaaagctcagaaggctaaatgaatattatccctaat

SEQ ID NO: 7440 - DNA, 357 bp, Homo sapiens
tcctactcacttaaagcccgcctgacagaaaccacggccacatttggttctaagaaaccctctgtcattcgctcccacattctgatgagcaaccgcttccctatttatttatttatttgtttgtttgttttattcattggtctaatttattcaaagggggcaagaagtagcagtgtctgtaaaagagcctagtttttaatagctatggaatcaattcaatttggactggtgtgctctctttaaatcaagtcctttaattaacactgaaaatatataagctcagattatttaaatgggaatatttataaatgagcaaatatcatactgttcaatggttctgaaataaacttccccccc

SEQ ID NO: 7441 - DNA, 285 bp, Homo sapiens
  unsure (181): n=A,T,C or G
  unsure (186): n=A,T,C or G
  unsure (205): n=A,T,C or G
  unsure (211): n=A,T,C or G
  unsure (221): n=A,T,C or G
  unsure (228): n=A,T,C or G
  unsure (260): n=A,T,C or G
aatctgtataagtatctgcagttgctggaataatttgaagaccccatggagctaaggagattaagtggaggattttcattgtttcagaggggcaaggggcaaatccattgctaattctttaatgatgaaaaatggtaagaagttgttaaactcctttggggattttaaaaagtgatacctnaacanaacagagagagagagaganaaatcncactagtgangctaacnaaaataatgataaaaaggttagaacaacccangatacttactggatgcctacacaac

SEQ ID NO: 7442 - DNA, 219 bp, Homo sapiens
  unsure (10): n=A,T,C or G
  unsure (11): n=A,T,C or G
  unsure (14): n=A,T,C or G
  unsure (43): n=A,T,C or G
  unsure (74): n=A,T,C or G
  unsure (161): n=A,T,C or G
atttcaagannggngaagaatggaaagtgggcattaactgaancagacacctcttgaggtaagatttgtggaanaagaggttaaagtgtgccagaaatttgggttaccctcctctagaaagaaattccagtaatggatctgtttaagtgttaagggagcanaagagaagacggtgaatgtacttcaatattttgaacatttttagaaataggaattctt

SEQ ID NO: 7443 - DNA, 121 bp, Homo sapiens
cctctctgccggggaaaggagggagctgcggctctttgacattaaaccagagcagcagagatacagccttttcctccctctccatgaactctggaaacagtacatcagggacctgtgcagt

SEQ ID NO: 7444 - DNA, 316 bp, Homo sapiens
  unsure (15): n=A,T,C or G
  unsure (36): n=A,T,C or G
  unsure (99): n=A,T,C or G
  unsure (125): n=A,T,C or G
  unsure (153): n=A,T,C or G
  unsure (160): n=A,T,C or G
  unsure (192): n=A,T,C or G
  unsure (203): n=A,T,C or G
  unsure (204): n=A,T,C or G
  unsure (247): n=A,T,C or G
  unsure (259): n=A,T,C or G
  unsure (281): n=A,T,C or G
ccagtcatgtattcntttcagcttatttccaactcngctatccttggctctgaaaagctgtcatcactggcatcactgtatctatcactacattaaaanaggaactaatttagcaaggtataaanaaaaacctggacaattattcaatttgcnatttcanacacattccatattaaccccttagtatgaganaaaatactaannaatattcttttaccactttctagtcaccacaggaagaggtcantccaatcacatncaatggcctctttctttggccncagaaactgatcacttattttcatccgtaaactgg

SEQ ID NO: 7445 - DNA, 332 bp, Homo sapiens
  unsure (9): n=A,T,C or G
  unsure (13): n=A,T,C or G
  unsure (14): n=A,T,C or G
  unsure (16): n=A,T,C or G
  unsure (305): n=A,T,C or G
  unsure (311): n=A,T,C or G
  unsure (332): n=A,T,C or G
ggaatcctngggnnanggttatcctacgcagagagccaggtaccaatgggtgcgctgcaatccagacagtaattctgcaaactgccttgaagaaaaaggaccaatgttcgaactacttccaggtgaatccaacaagatcccccgtctgaggactgacctttttccaaagacgagaatccaggacttgaatcgtatcttcccactttctgaggactactctggatcaggcttcggctccggctccggctctggatcaggatctgggagtggcttcctaacggaaatggaacaggattaccaactantagacnaaagtgatgctttccatgacn

SEQ ID NO: 7446 - DNA, 339 bp, Homo sapiens
  unsure (94): n=A,T,C or G
  unsure (139): n=A,T,C or G
  unsure (159): n=A,T,C or G
  unsure (175): n=A,T,C or G
  unsure (235): n=A,T,C or G
  unsure (237): n=A,T,C or G
  unsure (278): n=A,T,C or G
  unsure (298): n=A,T,C or G
  unsure (301): n=A,T,C or G
  unsure (318): n=A,T,C or G
catcgataagtccaagccctggctactgctgctggagaggcaaaggaacaatcttgcctttcagcgccgtcggaaagctcgagatattctccangcattgggttcctcatagcggttgtacaagggttcaagacgctgntgcttcttctgtttgcttancttagttgggtctganaccttgaagaaggctggggcaaactccacaagccaccgagggtcgatggtggtaacttcncncatgtattccttggtggtgagcaccagctcatggtacaccncccattctggctgtctgttnaanagggcactggaaggatngatatagaccacctgctggtc

SEQ ID NO: 7447 - DNA, 375 bp, Homo sapiens
gctcgcgaaccatcatgtcatatgcatcgggcttgggtttttcctttttgtctctgttctctgacttgggagttttgtgggacaggagagtctgaatttctttccagtcttggtctagcttctccgtgagctcgagggcatcttctcgttgagcttgtctctccctcttctcttgttttgacttggcaatgagctcttcaatcagctctttccgggacttcggtttctcccgctcctcgccttcctgttgagtcttcttgtgaaggagcccaccgcctcctccaaagtgggcagcagtcagctcagcagacaacgttcctcgatcctcagcatcgctgtcactgtccacaatgtcattatgcttctcgatgtctg

SEQ ID NO: 7448 - DNA, 262 bp, Homo sapiens
  unsure (22): n=A,T,C or G
  unsure (68): n=A,T,C or G
  unsure (82): n=A,T,C or G
  unsure (87): n=A,T,C or G
  unsure (112): n=A,T,C or G
  unsure (132): n=A,T,C or G
  unsure (160): n=A,T,C or G
  unsure (183): n=A,T,C or G
  unsure (192): n=A,T,C or G
  unsure (216): n=A,T,C or G
  unsure (239): n=A,T,C or G
catccccccaccaagcacggtntcagattaggttattacaaagggcgagggggaggagggcatcccangagtctaacatccnacccnacctatgcagaatgacgggtgaccncgccctgacccagccacacncttgaaccctgggacttcagtgaggtangtggtatcacccccatttcacangtgggcaanctgaggcacaatgaaatgcaatanctcgtttttaataacaacatacnaaagtgtggagaaagcccccaaa

SEQ ID NO: 7449 - DNA, 361 bp, Homo sapiens
ctgtttcataggggttgttggtttcttcaagttgtctctttctgatggcaatcatttgacgtccaggtggctcaaattgggcagccttcacaggatcagtggaattggctgaaatccgctttttcctgcagtagatcaaggccactacagcagcaacaatggctgctacagcagtcgcaatgaccacagccacaatgatccccatcggtgaagagctgcccatgctgggcacttggacagtgatggtcacaggcttggatgagaacagcgtgtagcctatgtttcctgtgcagtggtaatcaccactgtgactgtggtttgcttgtgggatggagaaggtgggatccaaatgggagaattt

SEQ ID NO: 7450 - DNA, 101 bp, Homo sapiens
  unsure (14): n=A,T,C or G
  unsure (88): n=A,T,C or G
ccatttaagggggngtagtaaaagactggttaatgataacaatgcatcgtaaaaccttcagaaggaaaggagaatgttttgtggaccnctttggttttctt

SEQ ID NO: 7451 - DNA, 326 bp, Homo sapiens
gttgtttcagaggtgctcacaacttcaatgaggccagagcgatctcctgttgctaaacagccataaggcaacatccgaagatccaaaccagcttctttccagagtaaatccatcaagcgcaacatttggagtgtcaacatatcctgtcgtaaatcatcaccatttttaaaaatcactccaactgaatcctcaccaaataccttgttattgtataccagccacaaaggcttcattttggaatccatgtatttgcacttttcaacatagagttctgagaggataacacatgggttcaggggtgactgcaggtcagagagggcttcccg

SEQ ID NO: 7452 - DNA, 160 bp, Homo sapiens
tacctcccacaaggattaccccttccatgaagagttttgaagctgtggttgcctgctcgtccccaagtgacctatacctgtgtttcttgcctcatttttttccttgcaaatgtagtatggcctgtgtcactcagcagtgggacagcaacctgtagagtgg

SEQ ID NO: 7453 - DNA, 347 bp, Homo sapiens
  unsure (20): n=A,T,C or G
  unsure (35): n=A,T,C or G
  unsure (36): n=A,T,C or G
  unsure (323): n=A,T,C or G
caaagcaccccatattcttntgaacctaaaggggnntcctcctcaaagaagcatgttttcaatccctaaactttggggccagatacagctccaagtggcatttattgctctttggagagtcaaagccaagccaccatgagcacgaaagctgtctgagaccctcctcccctcctccccagcatggagagaataattgccatttcaccctacaaatccgaaagagtctcccccttccgtgggtttaagcatggacacaagccaagcaagcctcagatacccaggcctgtttgattgtagctatgttggtgtatctcgtgtacaanatggaaaagtgcttttgttgttct

SEQ ID NO: 7454 - DNA, 101 bp, Homo sapiens
  unsure (1): n=A,T,C or G
  unsure (4): n=A,T,C or G
  unsure (6): n=A,T,C or G
  unsure (12): n=A,T,C or G
  unsure (30): n=A,T,C or G
  unsure (50): n=A,T,C or G
  unsure (53): n=A,T,C or G
  unsure (80): n=A,T,C or G
  unsure (90): n=A,T,C or G
  unsure (92): n=A,T,C or G
  unsure (94): n=A,T,C or G
  unsure (97): n=A,T,C or G
ngantngggggnttttaaaaaattagaggnaattaaatagtgatttattntanctataagtaaaggtttaaaaagagganagatgatttnananaangaat

SEQ ID NO: 7455 - DNA, 353 bp, Homo sapiens; identical to SEQ ID NO: 427

SEQ ID NO: 7456 - DNA, 376 bp, Homo sapiens
cagcactttgggaggctgaggcaggcagatcacttgaggtcaggagttcgagaccaacctggccaaactactttcatcgaagttgctggaagcctttctctggttttggcccctgtaggaagttaatctcatattcccttagcaataatataaggtcactgtttcagtcctacacacttttatattcaatgggcttcttagtttatcacataaggactggcacttttttcaaaagaatattgctaacagggttaaatgagtgctaatggctgaacgtttgccaaatgcttacttctgcgatagtataaatatggattattaaagttgtctactcaagtataaaatatatgcaaaactctcataggcaaaatgttca

SEQ ID NO: 7457 - DNA, 245 bp, Homo sapiens
  unsure (13): n=A,T,C or G
  unsure (23): n=A,T,C or G
  unsure (32): n=A,T,C or G
  unsure (34): n=A,T,C or G
  unsure (37): n=A,T,C or G
  unsure (42): n=A,T,C or G
  unsure (110): n=A,T,C or G
  unsure (125): n=A,T,C or G
  unsure (139): n=A,T,C or G
ctgacagcggggncttgcatttntttacccgngnatntacanatatcatttcttgtgtatgccatgacttgaaaaagtttgggaagctctttagcaatatcagctaaaangatatgaaatcacangtgatagcagttgncattcagtaatttcctacaagcagcaccccaaaggaaatatagtcctaatctttactatccacttctaaatttaatgtgaatttcatacatgttattagttgtttt

SEQ ID NO: 7458 - DNA, 316 bp, Homo sapiens
  unsure (25): n=A,T,C or G
  unsure (86): n=A,T,C or G
  unsure (315): n=A,T,C or G
tttagaattaggggtaaaaaggcanaattagtatagagtacattcattaaacatttttgtcaggattatttcccgtaaaaacgtantgagcacttttcatatactaatttagttgtacatttaactttgtataatacagaaatctaaatatatttaatgaattcaagcaatatatcacttgaccaagaaattggaatttcaaaatgttcgtgcgggtatataccagatgagtacagtgagtagttttatgtatcaccagactgggttattgccaagttatatatcaccaaaagctgtatgactggatgttctggnt

SEQ ID NO: 7459 - DNA, 305 bp, Homo sapiens
  unsure (11): n=A,T,C or G
  unsure (15): n=A,T,C or G
  unsure (47): n=A,T,C or G
  unsure (75): n=A,T,C or G
  unsure (86): n=A,T,C or G
  unsure (98): n=A,T,C or G
  unsure (107): n=A,T,C or G
  unsure (109): n=A,T,C or G
  unsure (121): n=A,T,C or G
  unsure (126): n=A,T,C or G
  unsure (128): n=A,T,C or G
  unsure (132): n=A,T,C or G
  unsure (135): n=A,T,C or G
  unsure (143): n=A,T,C or G
  unsure (149): n=A,T,C or G
  unsure (153): n=A,T,C or G
  unsure (166): n=A,T,C or G
  unsure (168): n=A,T,C or G
  unsure (176): n=A,T,C or G
  unsure (210): n=A,T,C or G
  unsure (220): n=A,T,C or G
  unsure (258): n=A,T,C or G
  unsure (259): n=A,T,C or G
  unsure (268): n=A,T,C or G
  unsure (288): n=A,T,C or G
  unsure (300): n=A,T,C or G
ccttttgatangggnttttttaaaaaacaaaattatagaagtttaanaatttaattcaaatttggaggggttttnaggaaattttnacaaaatggctngttggtttnanctgtttcctacntttgntnttgnagnaaatgggnacaggnttgnagtcaaaacactngnaattttgnatcttgatgtctttgttaaaactgctgaaaaatnattttttttnttttataataaggaataaacccccacctttattccttnntttcatctnccattttctggtcttggggntggctgtggcangcccc

SEQ ID NO: 7460 - DNA, 178 bp, Homo sapiens
aggcacactcagtattgcacttcattaaaatttcaggctcaaacttaacctagaagtttaaatgaaattgcatttgtaatttagtaattcttatacaggacaaacattgatatgtttatatacagtgtgatacttattacatttatatgctgtcctaacacaatgttttttttttttt

SEQ ID NO: 7461 - DNA, 144 bp, Homo sapiens
  unsure (142): n=A,T,C or G
tattttcctaactccatctcctaaaaaattccacctcattctgctcaacccaccacggcattcttgctgttcttgaacatgccaagcaggcccagggcctttgcattcactgtttattttgcttggaatgctctccccccanac

SEQ ID NO: 7462 - DNA, 116 bp, Homo sapiens
  unsure (21): n=A,T,C or G
  unsure (76): n=A,T,C or G
aaataggaactacaaatttanatgactctcttttgggttttatcaattttcatctgctgttacattagtattatgngcactgaattaaggtattgaaattcaatcacttcattgat

SEQ ID NO: 7463 - DNA, 355 bp, Homo sapiens
  unsure (14): n=A,T,C or G
ccagtgatgctggngctgtgacttttgcagatcagatatttggaatatttaactggataattccactgtcagttgcattatcctgttttggtggcctcaatgcctccattgtggctgcttctaggcttttctttgtgggctcaagagaaggccatctccctgatgccatctgcatgatccatgttgagcggttcacaccagtgccttctctgctcttcaatggtatcatggcattgatctacttgtgcgtggaagacatcttccagctcattaactactacagcttcagctactggttctttgtggggctttctattgtgggtcagctttatctgcgctggaaggagcctgatcg

SEQ ID NO: 7464 - DNA, 528 bp, Homo sapiens
  unsure (523): n=A,T,C or G
gtgcttctgccacctatggggtcgaggcaggtgtggtgccttggctaagtccacagacttctgagaggcccacgctttcttcttctccagaaataaaccctgaaactcaagcagctttaatcagagggcaggattccacgatagcagcatcagaacagcaagtggcagcgagaattcttgattccaatgatcaggcaacagtaaaccctgtggaatttaatactgaggttgcaacaccaccattttcccttctggagacttctaatgaaacagatttcctgattggcattaatgaagagtcagtggaaggcacggcaatctatttaccaggacctgatcgctgcaaaatgaacccgtgccttaacggaggcacctgttatcctactgaaacttcctacgtatgcacctgtgtgccaggatacagcggagaccagtgtgaacttgattttgatgaatgtcactctaatccctgtcgtaatggagcccttgtgttgatggttttaacacattcaggtgcctctgncttcc

SEQ ID NO: 7465 - DNA, 486 bp, Homo sapiens
  unsure (175): n=A,T,C or G
  unsure (271): n=A,T,C or G
  unsure (394): n=A,T,C or G
  unsure (395): n=A,T,C or G
  unsure (415): n=A,T,C or G
  unsure (436): n=A,T,C or G
  unsure (446): n=A,T,C or G
gttgtgtgtctgcaaacaatatgtgagccgaacatcaccaatgcctcctgaaaatgggctctgactcacttcctttttttgccaagataggttttgctttgttgtttttttctaaattgtttttgcaaacagggcataacaggtaaaaaaatactttgtaagaatattattttanaaaacccaacacaaaactgcaaatacagctccggaagcccttctcttcaactgtggttagtttgtttttgtaccttttaccccaaaggaaaaaagntggcatcttgttacttatttttatccattacattcagcacctcatccaaaagtgagggcccaagatcaagctgcagggagaggagggaacctgtaaggtcagagagggactcctctgacttannctttcccttgatgagctccnatggggtgggatggtcaaacntgtcctcggntggacctgccgggccgggccgctcgaaagcccaattcccc

SEQ ID NO: 7466 - DNA, 384 bp, Homo sapiens
  unsure (20): n=A,T,C or G
  unsure (116): n=A,T,C or G
  unsure (161): n=A,T,C or G
  unsure (179): n=A,T,C or G
  unsure (184): n=A,T,C or G
  unsure (185): n=A,T,C or G
  unsure (203): n=A,T,C or G
  unsure (218): n=A,T,C or G
  unsure (232): n=A,T,C or G
  unsure (253): n=A,T,C or G
  unsure (256): n=A,T,C or G
  unsure (290): n=A,T,C or G
  unsure (307): n=A,T,C or G
  unsure (311): n=A,T,C or G
  unsure (318): n=A,T,C or G
  unsure (348): n=A,T,C or G
  unsure (367): n=A,T,C or G
tatacaactatagaggatgnaatttttgacctattttaaatattgtcattctaaaataagcatgtaatatcactttcaggatatattcagtggaatctaaatatcatagtggtttnacctcttacatcattcttttaaaagtagtcttttattaagagtcnaaaattttatatttttgntttcnntggactaattctaaaatntaacttcctcttacngaatgttatcaaanattatatagctatatgcttanaantcttctattgattaagccctccaacttaagtacntcaaaatttgtactttnaagnttaaatncttttttccttgtgaacataatcctataanctaaaattttcctggaccnagctatttttgtagctc

SEQ ID NO: 7467 - DNA, 436 bp, Homo sapiens
atcccaaaaattacccaaagaagaagatggaaaagcgatttgtcttcaacaagatagaaatcaataacaagctggaatttgagtctgcccagttccccaactggtacatcagcacctctcaagcagaaaacatgcccgtcttcctgggagggaccaaaggcggccaggatataactgacttcaccatgcaatttgtgtcttcctaaagagagctgtacccagagagtcctgtgctgaatgtggactcaatccctagggctggcagaaagggaacagaaaggtttttgagtacggctatagcctggactttcctgttgtctacaccaatgcccaactgcctgccttagggtagtgctaagaggatctcctgtccatcagccaggacagtcagctctctcctttcagggccaatccccagcccttttgttgagccagg

SEQ ID NO: 7468 - DNA, 453 bp, Homo sapiens
  unsure (146): n=A,T,C or G
  unsure (226): n=A,T,C or G
  unsure (252): n=A,T,C or G
  unsure (257): n=A,T,C or G
  unsure (263): n=A,T,C or G
  unsure (319): n=A,T,C or G
  unsure (349): n=A,T,C or G
  unsure (365): n=A,T,C or G
  unsure (378): n=A,T,C or G
  unsure (391): n=A,T,C or G
  unsure (417): n=A,T,C or G
  unsure (422): n=A,T,C or G
  unsure (426): n=A,T,C or G
  unsure (447): n=A,T,C or G
aggggacttccacacctcctgcctttaggccatgggtggaaagtgctcagtgaagtacacctgtgtggcccagttctgaaagctttatacagttgaattttaagtggggttgataacaccttggactgttagtgttaaaaatctantgggttgacctttaaatgcaacagtttttaaaatatattgctgcattttatagaatagtaaaggtaccattatacttganattttcctccatttttatttcttccngaacntagagnttggggccgaaaatgtttttaaagtatgtgtttgagttaaatataaagttggttcncttcaaagctaaaaaattgttaaacttgcngcttggtattgcaganaagattttataanaattttgctttanagaatgccctttggctgaactaccantgtangccnccattataatttataaatacngcatac

SEQ ID NO: 7469 - DNA, 219 bp, Homo sapiens
agggaggctctaagctaggggcactgcatggtgggacaggatggccccttgaggactgaaccctggggagaagacaaacagtaataataaaaacaaataacaagtactttaagaatggattgtatgacctatagtgacagatgacatcactaatactgaaagcttcttatattaataattttggcaaaatgtcattttgtaatatagtatatgctttcc

SEQ ID NO: 7470 - DNA, 273 bp, Homo sapiens
  unsure (230): n=A,T,C or G
tggataattctctaccctcaccccacagagccatctctctccagaccaaaagctggaaggagagttgctttgagagcttgtttttacaactgcatgtttattatgatactttctctccaaaggaaacttttaaatcaatgggaacaattagcaacagaaagagcacagtccctgcttttgactgggttcctattttaagcacaaatgagagctctggagccagaatgccngggttctaacttcagcattcacttactagctgtatgatcttgg

SEQ ID NO: 7471 - DNA, 553 bp, Homo sapiens
  unsure (524): n=A,T,C or G
gagagaagctcctgaaccaaccatttgtcaggtctggggacaagactggaagtattgactcatttgcaaggaaactaagtgggtcaacaatgaaagaaggtaataggacctcatctgcaatcctccaatttatctgcaggataaattaaatgcctaaaaaagaaacttattttttaaagtatctgctaccatcaggaaaccaaataaatagtcagtctattaatttcgttcttaaataattccgatcctttacctaatttcttgagccatttaatcatctcaactctaccttagaaccctcccaatgttttccaaatctgtcttactgggaaacaaagattaaaattcctaataaggattattttgtggatcttaatttctagattcccattttaaaattttaattccattaatttcttaataatagcattctattactgattgaatcatctctaataagccatcataatttccagaccatttctaagaacacgagctgatattgaaatgtttactaatgaccngccccgggcggcccgctcaaaacccaatt

SEQ ID NO: 7472 - DNA, 465 bp, Homo sapiens
  unsure (396): n=A,T,C or G
  unsure (414): n=A,T,C or G
ggcactacagttactaagcagcctttggattctttgtttttgaagttagatcttttcagctattagtggaaaatgtgcctcactctactccaggattaccaatagaaatgaaaggacagaaatggcattagtgtttagagaagattatgtatatatggctgtgtgaacactgaaaattatgagggtcaacataaaatcagcattacaggtactaaaacataaatcctgatggctttcaccgttttcttaagagcaaaattgcaaaaagtgatattaacagtcatcctagacgaatatgagcaaatgatttgtttttccttaaaagagcctccaagtgtattgtgatcattttcacactgatcaaagagagcacccttctgtcaacaggtatctgcngttttcaggacctggcanaaattcttctatgttctgcctttaaaggtcaggtaccaaaagcagagacag

SEQ ID NO: 7473 - DNA, 500 bp, Homo sapiens; identical to SEQ ID NO: 271
  unsure (172): n=A,T,C or G
  unsure (264): n=A,T,C or G
  unsure (309): n=A,T,C or G
  unsure (427): n=A,T,C or G
  unsure (434): n=A,T,C or G
  unsure (498): n=A,T,C or G
  unsure (500): n=A,T,C or G

SEQ ID NO: 7474 - DNA, 531 bp, Homo sapiens
  unsure (129): n=A,T,C or G
  unsure (388): n=A,T,C or G
  unsure (450): n=A,T,C or G
  unsure (474): n=A,T,C or G
  unsure (512): n=A,T,C or G
  unsure (524): n=A,T,C or G
aatggttctgacttaaataggttgttgagcaaggagatctcacattttaaagaatattttcagagggagaatttgagaaggggggagaaaaaaacaaacaggaatgaacataaaagtataaaattctanacaacccactaaaccagttagcaaaaagaggagctcttaattgaaatagagaatttccccaaaaaaaggtctgaatttatttttaaaacattagatttggaaaatacctaatttgaaagtttaattttcatatatacgtcaaacctgcttttagggtagtttagtcaaagctgaaacaaaacaaataaaattctggcttatatatctgatacttgaataaggactctgaaaaaaaatgttcccgttttttttctcgtcngcctaagatatatttttgacattacataaatttcagtgatatgatctggctcctatttaacntttatgccctttctcttccaatgntaacttttaattttctcctcttcttctagctgggatcnttaaaaaaaacngaaaact

SEQ ID NO: 7475 - DNA, 251 bp, Homo sapiens
  unsure (228): n=A,T,C or G
tcaccatggagtggtgagggtccgaggctgagacgtgtgcagatggaggagaatgggcagaggagcctgtgggttttctctgactctaggtccccactccagcaagacagcgccgctgcagcttggcccagcaagttcctccttgcagtttgggggtcaaagccacagttcatatgaaacaaaatgttcctctgcctggtctggtcctctctttgtgtattttcctanaggacctcacagtgggtgagtgg

SEQ ID NO: 7476 - DNA, 450 bp, Homo sapiens
  unsure (216): n=A,T,C or G
  unsure (340): n=A,T,C or G
  unsure (377): n=A,T,C or G
tgaatagcgtttccagccgaaccaaacaccgaacaaaattatcaaaatcgatgatgagctggtcatctgcaaaccgagcaacgatgacttggtggagttgacagggcatcttgaaacctgcttcttctaatgccttccgcatttcataggaattcatggtaccagacctgtcaacgtcgatttctcggtaaattttttggtatttttgaatcttcntccagagaatgtagaactccttcagccccagcttgccactcccgtccgaatctagcatgtcaaccataattttgcatgtctcgatgctgaagccatctgacttgatatcttggcgctttgctanaacccttctcaggatggtctgcagctcaaaggcaganatctccgcatcctctcctgccaactgggcaaacagtctcctgaatccatcatcaatgtcatccctcgcttgat

SEQ ID NO: 7477 - DNA, 477 bp, Homo sapiens
  unsure (442): n=A,T,C or G
gaagacagcatctaagctgtgttcagccctgactctttctggtcttgtggaagtgaaagagctgcagcgggagcccctaacccctgaggaagtacagtctgttcgagaacaccttggtcatgaaagtgacaacctgctgtttgttcagatcacaggcaaaaaaccaaactttgaagtgggttcttctaggcagcttaagctttccatcaccaagaagtcttctccttcaggtaaggctggcctagggacattcttctgtttgaatgggcttagagggacatgttagaaattgagccagcaataaatgagatggtgatatttttagaggattagtcctttgatttctgccatttccacaaagaagaatacttaatgtattattatcatgggcatattaggatccaaaactgaaataatacataggtattatctagttcagctncttcttctgcaccagaagatacccgaggacctcgc

SEQ ID NO: 7478 - DNA, 420 bp, Homo sapiens
gcacccaaaatggcaccacccaaaaaaacacaacctatgtcgggttcggatttttaagaagttatttcagttaagcagacactaaagtacaattatacttggcttcttgtggcataaatgatcttgaattttaagatcatttggcttttacctatttagaacaaaacagtctatattttcctgtacttagaagttggaaatgaaataatttttaaagcccacaggagattaatttgtactaagtcattactatgtatcaggcattgtgcttggtgctttctagtcactgaaggagtattaaatatgtgaaatgcctgtcacagtgacttgcatgtggcaatcactcaaagatccccttctttaaccaatgtggtgaggttgtagtattattataaatttttaattatataacaactgagg

SEQ ID NO: 7479 - DNA, 389 bp, Homo sapiens
  unsure (165): n=A,T,C or G
  unsure (173): n=A,T,C or G
  unsure (258): n=A,T,C or G
  unsure (337): n=A,T,C or G
  unsure (357): n=A,T,C or G
  unsure (366): n=A,T,C or G
  unsure (370): n=A,T,C or G
tgtaacccacctcagggtgggaattctttgcatgggatcgttcaaagttctgagaaaagcccaatgtaggtcagacacgactgctccttggactggggaagactttccttggttgtcagtccatagtgggcaggcggtcggctgcacagcggaatcccagattcnaagcacanctatcaggtgtgttctggctccgagcagcacagcgatacctgtaacaataagacctatggcacatgtaggatccacctttcttcnctcggtctttcccagaagggggaccttttgggttaagcgtttcttcaacagaatgatgaacagtccaccagtctgaagnccattcccatgcgttccccnctatgttgnatangccataaccattgggaggg

SEQ ID NO: 7480 - DNA, 511 bp, Homo sapiens; identical to SEQ ID NO: 272
  unsure (268): n=A,T,C or G
  unsure (358): n=A,T,C or G
  unsure (437): n=A,T,C or G
  unsure (480): n=A,T,C or G
  unsure (501): n=A,T,C or G
  unsure (504): n=A,T,C or G

SEQ ID NO: 7481 - DNA, 101 bp, Homo sapiens
  unsure (56): n=A,T,C or G
  unsure (60): n=A,T,C or G
  unsure (63): n=A,T,C or G
  unsure (68): n=A,T,C or G
  unsure (80): n=A,T,C or G
  unsure (92): n=A,T,C or G
  unsure (100): n=A,T,C or G
atgtgatggtgtccaccttccacaagtactcgggcaaagagggtgacaagttcaanctcnacnagtcntaactaaagganctgctgaccccnggagctgnc

SEQ ID NO: 7482 - DNA, 117 bp, Homo sapiens
  unsure (12): n=A,T,C or G
  unsure (36): n=A,T,C or G
  unsure (45): n=A,T,C or G
  unsure (60): n=A,T,C or G
  unsure (74): n=A,T,C or G
ataggtggaggnatcccatattctccacatttttanctctgtcangctgctccctttccnccagtcctatccantgatactgcagacaaagggtgaggcaacaggagacatcatacc

SEQ ID NO: 7483 - DNA, 101 bp, Homo sapiens; identical to SEQ ID NO: 273
  unsure (4): n=A,T,C or G
  unsure (10): n=A,T,C or G
  unsure (16): n=A,T,C or G
  unsure (26): n=A,T,C or G
  unsure (37): n=A,T,C or G
  unsure (38): n=A,T,C or G
  unsure (71): n=A,T,C or G
  unsure (98): n=A,T,C or G

SEQ ID NO: 7484 - DNA, 415 bp, Homo sapiens
  unsure (131): n=A,T,C or G
  unsure (173): n=A,T,C or G
  unsure (198): n=A,T,C or G
  unsure (249): n=A,T,C or G
  unsure (286): n=A,T,C or G
  unsure (337): n=A,T,C or G
  unsure (386): n=A,T,C or G
  unsure (387): n=A,T,C or G
aatactctaatgggagaaggaatttgttcacttgttgaacttttcgttcagttggcaagggacttaaaattggggccttatgtagatcattactatagagactacccaacgcttgtcagaactactggacnagtgtgcacaattgatccaggtcaaacaggatttatgcatcntccatcattttttacctctgagccnccaagtatttatcagtgggtgagttcttgtctgaagggtgaaggaatgccnccttatccttacctccctggaatctgtgaaagaagcngacttgtagtcttgagtattgcactgtacatacttggtgatgagagcttgntttctgatgaatcctcacagtatttaaccccaataactatacccccccnnaagttgccagtagaacaagaggaaaaca

SEQ ID NO: 7485 - DNA, 176 bp, Homo sapiens
  unsure (14): n=A,T,C or G
  unsure (27): n=A,T,C or G
  unsure (49): n=A,T,C or G
  unsure (65): n=A,T,C or G
  unsure (77): n=A,T,C or G
  unsure (79): n=A,T,C or G
  unsure (90): n=A,T,C or G
  unsure (125): n=A,T,C or G
  unsure (138): n=A,T,C or G
  unsure (147): n=A,T,C or G
  unsure (157): n=A,T,C or G
gctatgacctggantttgctaacagcnccatgaagatccctgaagctgncaaggtgtcccattcnacagcacagccncntgcctctgcantacatctaccccctgtttctggagcacgatctcancctgggaaccctngacctccgncgcgaccacnctaaccccaattccagcac

SEQ ID NO: 7486 - DNA, 180 bp, Homo sapiens
  unsure (120): n=A,T,C or G
  unsure (147): n=A,T,C or G
  unsure (169): n=A,T,C or G
gtacctccttatactgagtgtgaccaccctcagcctcttgctcgccccggtgctgtggagagctgcaatcaccgaggtgtgtgcccagaccggagagacggtccagcctctgatggctcngagatgatggaccgtggaagggaagcntctgtggggagtgagcgcttanatggccagcag

SEQ ID NO: 7487 - DNA, 224 bp, Homo sapiens
  unsure (31): n=A,T,C or G
  unsure (51): n=A,T,C or G
  unsure (59): n=A,T,C or G
  unsure (71): n=A,T,C or G
  unsure (141): n=A,T,C or G
  unsure (162): n=A,T,C or G
  unsure (179): n=A,T,C or G
  unsure (188): n=A,T,C or G
  unsure (209): n=A,T,C or G
agccacatgctgggccctctaggtctctccngcccactctaaggacccaanaaatgcanccccagtccatntctcttttttctctccttccgggggaccaaggtaccttctggggcatacaacatggcagcagggccctcnggaagaggggtaggaggaccnagcaccattctctgtanaggaagacnggaaaggagaccctcttggcncacatttatggaggg

SEQ ID NO: 7488 - DNA, 176 bp, Homo sapiens
  unsure (74): n=A,T,C or G
  unsure (90): n=A,T,C or G
tcccagggcacacactgttcttgcccttttctccattggggttggatttaaagatcacataggtggctgctcanaggagctgaggagaanctccatcctccccatgcaccttcaccaggtggcctaaagagcttccctgaaccccacactcagtagcaagatgaggcttcattctt

SEQ ID NO: 7489 - DNA, 352 bp, Homo sapiens
  unsure (59): n=A,T,C or G
  unsure (63): n=A,T,C or G
  unsure (82): n=A,T,C or G
  unsure (135): n=A,T,C or G
  unsure (145): n=A,T,C or G
  unsure (158): n=A,T,C or G
  unsure (179): n=A,T,C or G
  unsure (221): n=A,T,C or G
  unsure (229): n=A,T,C or G
  unsure (262): n=A,T,C or G
  unsure (286): n=A,T,C or G
  unsure (346): n=A,T,C or G
cctgagactggatctgttcaaacagcaaacgcccacagatggcccagaggtggtggtantcanggtgtgtgggtgtttttanggttctttactgttgtttctttcacccaggggtggtggtcccacccagtttgntgctgacggngacaggaaattanaatctgtttgcaaattgtccnacccacccccctcaacatgaggggcttccattttctgtgttntgtaaggnaactgtttccttcatgcccccatgttcctgatnttacttctgatttctttttaaccnatgttatcatgattaacaaaatttccccccctttaatgacctccgccgcgaccccctaancccaat

SEQ ID NO: 7490 - DNA, 382 bp, Homo sapiens
  unsure (57): n=A,T,C or G
  unsure (104): n=A,T,C or G
  unsure (105): n=A,T,C or G
  unsure (155): n=A,T,C or G
  unsure (159): n=A,T,C or G
  unsure (161): n=A,T,C or G
  unsure (194): n=A,T,C or G
  unsure (229): n=A,T,C or G
  unsure (235): n=A,T,C or G
  unsure (240): n=A,T,C or G
  unsure (277): n=A,T,C or G
  unsure (295): n=A,T,C or G
  unsure (314): n=A,T,C or G
  unsure (318): n=A,T,C or G
  unsure (340): n=A,T,C or G
cctgcaataaccatctcacctataccctgcaagaaaggaacagttgcttgcggccanccccctgttgtagaaaatgccaagacctttggaaagatgaaacctcnntatgaaatcaactccctgattagataccactgcaaagatggtttcattcnacgncnccttccaactatccggtgcttacgaaatggaanatgggctatacctaaaattacctgcatgaaccccntctgcntaccnaaggacttattctatgaaatactttaaaaattcctcntcaccaaaggacaattcnataaatacctcccaacctnatcntccttggagcccgaggtggcangagtccacgccctgatccctaaaatggccaacatgtgttttc

SEQ ID NO: 7491 - DNA, 117 bp, Homo sapiens
  unsure (13): n=A,T,C or G
  unsure (28): n=A,T,C or G
  unsure (80): n=A,T,C or G
  unsure (92): n=A,T,C or G
aaaataaaaatcntcaataattttatcncccaccaaacaatcacttttaatgtgctggtacaggttagtctattttaacntttctgaaatcntatacatttacatgattgttctcac

SEQ ID NO: 7492 - DNA, 101 bp, Homo sapiens
  unsure (6): n=A,T,C or G
  unsure (15): n=A,T,C or G
  unsure (38): n=A,T,C or G
  unsure (79): n=A,T,C or G
  unsure (82): n=A,T,C or G
  unsure (84): n=A,T,C or G
  unsure (85): n=A,T,C or G
catgancaccctgcnataattagagtttccccaataantttacccaactatcaacctttattactacttatggcttatngtntnntttaatgtctttttta

SEQ ID NO: 7493 - DNA, 160 bp, Homo sapiens
  unsure (27): n=A,T,C or G
  unsure (69): n=A,T,C or G
  unsure (85): n=A,T,C or G
  unsure (126): n=A,T,C or G
gtaagactaaatatttccatgtgaaantcttccgacatcaacttgaaagagaaatttgtaaggaagaangtcattaccatatctnattactctgaatgtaaaggagtaatggaaataaaggaaccntcatctgtgtctgactttaatcaaaattttgagg

SEQ ID NO: 7494 - DNA, 184 bp, Homo sapiens
  unsure (56): n=A,T,C or G
  unsure (120): n=A,T,C or G
  unsure (135): n=A,T,C or G
  unsure (146): n=A,T,C or G
ttcagcgagggaccatcaactgcaactttgcgggggttgccttgggtgattcctgnatctcccctgttgattccgtgctctcctggggaccttacctgtacagcatgtctcttctccaanacaaaggtctggcanaggtgtctaangttgcacaccaagtactgaatgccctaaataacgggct

SEQ ID NO: 7495 - DNA, 297 bp, Homo sapiens
  unsure (29): n=A,T,C or G
  unsure (67): n=A,T,C or G
  unsure (109): n=A,T,C or G
  unsure (178): n=A,T,C or G
  unsure (182): n=A,T,C or G
  unsure (251): n=A,T,C or G
  unsure (262): n=A,T,C or G
  unsure (280): n=A,T,C or G
  unsure (284): n=A,T,C or G
aaaacccaaactaggctgatactcctgtnttgacctgaggtcattctgtgcctgtcaaaccaaatancacattcaatcttttgtatattttgaagactcacaaacccanaaatttttacaacctctttctcactctaattaaaacctactgctctgtcaatgggaaagaatgagtccnaacnttctgaaaaccgtacaaatgtgtttacattttagtgggggcttcctgcatctttaacctctttaaattnacatacgtaanatcttgtgtaataacccntttncaaatatgcagat

SEQ ID NO: 7496 - DNA, 111 bp, Homo sapiens
gtagtaaaaaaaaaactcaggctgtctttctggaactttcatgctacatggaattaactgttccaactgggtagcaaatgctatggtcactgacataataaaggactcacc

SEQ ID NO: 7497 - DNA, 134 bp, Homo sapiens
  unsure (58): n=A,T,C or G
  unsure (111): n=A,T,C or G
atggtctccgatctcctgacctcatgatcccgccaccttggcctcccaaaatgctggnattacaggccgtgagcgaccgcccccggccaattcaaactatctttttaaagntatatgagtgatggaatgctaac

SEQ ID NO: 7498 - DNA, 101 bp, Homo sapiens
  unsure (7): n=A,T,C or G
  unsure (20): n=A,T,C or G
  unsure (25): n=A,T,C or G
  unsure (85): n=A,T,C or G
  unsure (98): n=A,T,C or G
tgtaatngtgggttctgatnatacncatagcccctaattgacagcctttagtacttgttaccttctgttctaagagttttatgtntattaactcaccnaag

SEQ ID NO: 7499 - DNA, 392 bp, Homo sapiens
  unsure (18): n=A,T,C or G
  unsure (46): n=A,T,C or G
  unsure (88): n=A,T,C or G
  unsure (100): n=A,T,C or G
  unsure (163): n=A,T,C or G
  unsure (170): n=A,T,C or G
  unsure (207): n=A,T,C or G
  unsure (216): n=A,T,C or G
  unsure (243): n=A,T,C or G
  unsure (245): n=A,T,C or G
  unsure (252): n=A,T,C or G
  unsure (268): n=A,T,C or G
  unsure (271): n=A,T,C or G
  unsure (273): n=A,T,C or G
  unsure (292): n=A,T,C or G
  unsure (298): n=A,T,C or G
  unsure (302): n=A,T,C or G
  unsure (331): n=A,T,C or G
  unsure (332): n=A,T,C or G
  unsure (354): n=A,T,C or G
  unsure (355): n=A,T,C or G
  unsure (378): n=A,T,C or G
  unsure (379): n=A,T,C or G
atggaagagccgggaacngagaagtgtggggaagagataggaaccngcaggatggcaggggcaaagggctcaagggtgaggaggccantgggaccccacngagttggggagataaaggaacattggttgctttggtggcacctaagctccttgtctgtctccngcacccngaatctcattaaagcttatttattgtacctccaccgnctgtgtgcnatggggtcttttgtggaaatcaaggancncacaggnttcatgtgtactgtcnccncntgggatggaacccgaggcntggaancaanaccctaaatgaagagggcctaacggctgnnattccccgcccccttacgaacnncttgtctttttttttcctctccnnaaaaaatgtttaa

SEQ ID NO: 7500 - DNA, 350 bp, Homo sapiens
  unsure (27): n=A,T,C or G
  unsure (30): n=A,T,C or G
  unsure (33): n=A,T,C or G
  unsure (76): n=A,T,C or G
  unsure (139): n=A,T,C or G
  unsure (165): n=A,T,C or G
  unsure (180): n=A,T,C or G
  unsure (183): n=A,T,C or G
  unsure (202): n=A,T,C or G
  unsure (219): n=A,T,C or G
  unsure (230): n=A,T,C or G
  unsure (232): n=A,T,C or G
  unsure (242): n=A,T,C or G
  unsure (271): n=A,T,C or G
  unsure (272): n=A,T,C or G
  unsure (288): n=A,T,C or G
  unsure (296): n=A,T,C or G
  unsure (298): n=A,T,C or G
  unsure (316): n=A,T,C or G
gggacatctatttggggatcaacatcnccnacngcgaggaagtggcagtgaagctagaatctcagaaggccaggcntcccccagttgctgtaccagagcaagctctataagattcttcaaggtggggttggcatccccncatacggtggtatggtcaggaaaaanactaccatgtactantcntggatcttctgggacctancctccaagacctcttcnatttctgttcnanaaggttcacnatgaaaactgtacttatgttagctgaccnnatgatccgtagaattnaatatgtncntaccaacaattttatacnccgagaccttaaacccgataacttcctaatgggt

SEQ ID NO: 7501 - DNA, 104 bp, Homo sapiens; identical to SEQ ID NO: 428
  unsure (31): n=A,T,C or G
  unsure (58): n=A,T,C or G
  unsure (72): n=A,T,C or G
  unsure (96): n=A,T,C or G

SEQ ID NO: 7502 - DNA, 117 bp, Homo sapiens
  unsure (46): n=A,T,C or G
  unsure (76): n=A,T,C or G
aagcgtgcatggcagaagtggagagtaagtaacacccaacaagtcngggtgggcactggatcaattttggggaccngatggaccccagtgggaatgctggctctgccactgcaatgc

SEQ ID NO: 7503 - DNA, 373 bp, Homo sapiens
  unsure (51): n=A,T,C or G
  unsure (76): n=A,T,C or G
  unsure (130): n=A,T,C or G
  unsure (146): n=A,T,C or G
  unsure (179): n=A,T,C or G
  unsure (197): n=A,T,C or G
  unsure (233): n=A,T,C or G
  unsure (242): n=A,T,C or G
  unsure (246): n=A,T,C or G
  unsure (277): n=A,T,C or G
  unsure (299): n=A,T,C or G
  unsure (358): n=A,T,C or G
  unsure (371): n=A,T,C or G
  unsure (373): n=A,T,C or G
gtcaagtatacggtatgctctcaaaaaaatgttagctgtggtttttattgncttattataattagtaattctttcnaattaataatataagcttttacacacatatcataaaagttattaaaattattanagatattttgagtagngacgctgaagaaagtaaaagtggaattcctaantcatacttgaaagtatcnattatatttatagaagatcagtcctactttcaaccnccaagcccngcangaattgaaaacccactggtcaacatatgtcnatgcacatggaaaaaggatacnactgtctttaaattccctaaagaaagctgagtggagagccttctggtcactgcagtccnacctatcattacncn

SEQ ID NO: 7504 - DNA, 409 bp, Homo sapiens
  unsure (66): n=A,T,C or G
  unsure (100): n=A,T,C or G
  unsure (197): n=A,T,C or G
  unsure (212): n=A,T,C or G
  unsure (238): n=A,T,C or G
  unsure (282): n=A,T,C or G
  unsure (294): n=A,T,C or G
  unsure (336): n=A,T,C or G
  unsure (337): n=A,T,C or G
  unsure (393): n=A,T,C or G
  unsure (397): n=A,T,C or G
ttaggtggttttagctcttatctggggtatgaaagcaatttagctcatctcacagaaacaaaagcnggtgctgaatcatgaaaacctcaattatttttancatgcctcttaatttttctttcccctggtttcttgtcgtctgtgcttgattcttgaacaggtaaccacttgagaggatgccggcgatagatgggccntggaggaagtgtcancaaacatgaaaaagcaaatccggccntaactatatagacagtccaccccaactgttcagccacgtacccntagataaatccnactattgcagaaaaaagaataattccctgaaacatctgttcnnctagcttctggcccttgtaatccatctgctgggcagcgagctcagatgctccagcntggntggctgaggagg

SEQ ID NO: 7505 - DNA, 321 bp, Homo sapiens
  unsure (60): n=A,T,C or G
  unsure (87): n=A,T,C or G
  unsure (105): n=A,T,C or G
  unsure (112): n=A,T,C or G
  unsure (149): n=A,T,C or G
  unsure (165): n=A,T,C or G
  unsure (224): n=A,T,C or G
  unsure (234): n=A,T,C or G
  unsure (290): n=A,T,C or G
  unsure (292): n=A,T,C or G
  unsure (296): n=A,T,C or G
  unsure (313): n=A,T,C or G
  unsure (314): n=A,T,C or G
ctttaagaatgagagcctgggcatggcctttctgcacctctgtcacctccctctccgccntggcatcccccctggaggaggtggccntatgtgtaacctgtaccnaattaanctgttttaaatttacagactacaagcaactgaacccnaatgtctaaatgtacnttcttttctgtactacatttcacctaatattgcagaactaatgacaattttaaaagttnctattacccnattctgtctactgtagcaagataccttaagttacaaccaaatcttacctgccccgncngccnctccaagccccaattcnncacccct

SEQ ID NO: 7506 - DNA, 191 bp, Homo sapiens
  unsure (101): n=A,T,C or G
  unsure (117): n=A,T,C or G
  unsure (165): n=A,T,C or G
gagtgaacagccccgcttggctgtggcatctcagtcctatttttgagtttttttgtgggggtacaggagggggccttcaagctgtactgtgagcagacgcnttggtattatcattcnaagcagtctcctcttatttgtaagtttacatttttaccggaaactacnaaattattttgggtgggttcagccca

SEQ ID NO: 7507 - DNA, 441 bp, Homo sapiens
  unsure (36): n=A,T,C or G
  unsure (417): n=A,T,C or G
tcaggtgattatcctgaaccatccaggccaaataancgccggctatgcccctgtattggattgccacacggctcacattgcatgcaagtttgctgagctgaaggaaaagattgatcgccgttctggtaaaaagctggaagatggccctaaattcttgaagtctggtgatgctgccattgttgatatggttcctggcaagcccatgtgtgttgagagcttctcagactatccacctttgggtcgctttgctgttcgtgatatgagacagacagttgcggtgggtgtcatcaaagcagtggacaagaaggctgctggagctggcaaggtcaccaagtctgcccagaaagctcagaaggctaaatgaatattatccctaatacctgccaccccactcttaatcagtggtggaagaacggnctcagaactgtttgtttcaattgg

SEQ ID NO: 7508 - DNA, 548 bp, Homo sapiens
  unsure (28): n=A,T,C or G
  unsure (57): n=A,T,C or G
  unsure (226): n=A,T,C or G
  unsure (273): n=A,T,C or G
  unsure (328): n=A,T,C or G
  unsure (334): n=A,T,C or G
  unsure (346): n=A,T,C or G
  unsure (361): n=A,T,C or G
  unsure (380): n=A,T,C or G
  unsure (399): n=A,T,C or G
  unsure (467): n=A,T,C or G
  unsure (471): n=A,T,C or G
  unsure (492): n=A,T,C or G
  unsure (520): n=A,T,C or G
  unsure (540): n=A,T,C or G
gacaatatcctggttaatgaatccaaanctattttaaagctttgcgattttgggtcngcttcacatgttgcggataatgacacaacaccttatcttgtcagtagattttatcgtgctcctgaaatcattataggtaaaagctatgactatggtatagatatgtggtctgtaggttgcaccttatacgaactctatactggaaaaattttattccctggcaaaaccnataaccatatgctgaagcttgcaatggatctcaaaggaaagatgccnaataagatgattccaaaaggtgtgttcaaagatcagcattttgatcaaaatctcnacttcntgtacatagaanttgataaagtaacanagagggagaaagttactgntatgagcaccattaatccnactaacgacctgttggctgacttgattgggtgcccgagacttcctgaagacccacgtaagaaagtacnccanctaaaggacttgttgggaccncattctgatgttggacccccctaaaccnaattagccatcaacccaggncccctacc

SEQ ID NO: 7509 - DNA, 476 bp, Homo sapiens
ccttattaaagagcaacttctatttccagtcgggggagtaacactaaagctacaagaaatatgtaataatgataggtaataatgtgttccaaagctttttcaaactagaataaggaggcaaatagaagaatgagatactgatgtccacagttcattggcagaatctaaccccttctgttatcttttttaatactatttttgtttagatagaagtttcaaagaagataaaaatgcttgaagagcctgagagtaaaaagattatgctgcaaagctatgatataaactgctcttgcagtccaaagggatacctgattaaagaagtttcttatttaaacatctcagacgcaaaaattacattaaatttttgtatatttcaacaacattttaaatgtattttgttatgtttgtattatataggataaagcaaatgtcaagttaaaatgtattgtgttgtttgtaaagtaagaagttactgg

SEQ ID NO: 7510 - DNA, 476 bp, Homo sapiens; identical to SEQ ID NO: 7509

SEQ ID NO: 7511 - DNA, 642 bp, Homo sapiens
  unsure (535): n=A,T,C or G
gagggtcaatagtgcagtcagtggtgacatttttctttattttgcaaaatgcttttaaaaccaaaggctgctctagttgatggacagtatcagtcttgatctaaattgtaggacactttttcatgtaacataacatttggggattgggtttatttagtgtaatgaagataatttgatataaaaatattttgtgtatatatatatatttttactttgttttctaaattgctgtttgcagtaacagtaagcgcaaagcaaaatatataagttatgactgtatgatcagatgaagtatgagttcttttggtttgcatccttaaatagttagagatctctgataaaaactttggaatctttgcaaaacaatacaaaaatgccaaaatgtgagcatgtcaatgaaaactaaagacaaatacttcactctttttcatactattataagttattctggtattaaatatgttaataaaagtgtttttgtttttacatatttcagttaaatgaatgaatgctggttgtattttatttgaatgangtcatgattcatgtttgccatctttttaaaaaaatcagcaaattcttctatgttataaaattatagatgacaaggcaatataggacaactattcacatgattttttt

SEQ ID NO: 7512 - DNA, 251 bp, Homo sapiens
tcggggtcagctagtgtcctctctgctcggccgcgggctcccggaggactgcaggcaggatgacgcaaaacacggtgattgtgaatggagttgctatggcctctaggccatcccagcccacccacgtcaacgtccacatccaccaggagtcagctttgacacaactgctgaaagctggaggttctctgaagaagtttctttttcaccctggggacactgtgccttccacagccaggattggttatgagcag

SEQ ID NO: 7513 - DNA, 636 bp, Homo sapiens
ccatcttaagttaaagaccctttatcataaaatatatggttttaaattttactcaaattgaatttataatccctatgacttccctacatatacataacaaaagagtgtagtaaaattagcaaatactaaactatattgataatttatcattcttagtttgtggtttttagaaacagtacacgcacctaatatatgtcgattccttggcttattagttgcagtgtacaatgcaacaaaatacaaaatacatgcttggtgaacattcgttcatatctacaagacggcagctagagattaggtttcaatactgaccatttactatcctacaagcaattagcattacatcataatatgccatcaaggcaactttttttatactgaaaaaatcaaaataaaaaccgttatttgtaaacttttatacgaaatgtaactcttcaagtggaaataaaaaataaaatttgtctatttactattgaatacacataggatttcaattttcattataccgagaaaaaagctcttttgtgttgggaaaataatgcttcaaaaaataattagtagaaaaacccctagtataatgttttgtcctttcaatgccagcacagatttgggaacatactggaggatgaagttata

SEQ ID NO: 7514 - DNA, 640 bp, Homo sapiens
ccaactctagtcatacttggacctcgtggaaacatgttgttttctttgattggagagggacacaaagataaattatttttatatacttcaattgctttaaagtattacaaagacagggagcagatcagagataataaaattggaataaaactctataaagattctttgccaccttcaccattgctatttcctggcaaagtaacagtagaccaagttactgatagattggtaatagcagacactggacatcatagaattttggtcgtttggaagaatggacaaattcaatatagcattggaggacccaaccctggaagaaaagatggaatattttcagaatcaacttttaattctccacagggtgtagccataatgaataatatcatatatgtggcagacactgaaaaccaccttataagaaagattgacctagaagctgagaaggtgagcactatagctggtattggaattcaaggtacagataaagaaggtggagcaaaaggagaacaacaacccattagttccccttgggatgtagtttttggaacatcaggttcagaggtccaaagaggtgacattttatggatagccatggcagggactcatcagatatgggcacttctgctggactctggcaaac

SEQ ID NO: 7515 - DNA, 383 bp, Homo sapiens
ctgtagagtgggcttatcatctttcaacacgcaggacaggtacagattcttttccttgaggcccaaggccacaggtattttgtcattactttcttctccttgtacaaaggacatggagaacaccacttgttgctccatatcctgtccctggaggtggagagctttcagttcatatggaccagacatcaccaagcttttttgctgtgagtcccggagcgtgcagttcagtgatcgtacaggtgcatcgtgcacataagcctcgttatcccatgtgtcaaagaagataggttcttcttcaaagatgaagggaaagaaggtgctcaggtcattctcctggaaggtctgtgggcagggaaccagcatcttcctcagcttgtccatgg

SEQ ID NO: 7516 - DNA, 301 bp, Homo sapiens
ccagtcggggtactgttcggacaggctggaggagtggctgtctctgccttggctggactgagatgcagaaccgctggagccccacgaggtgtctccctggtggactgtcccattctccaacagactgcttttctcctgagctttttcctccatgacgggctcgcagctaagcctgggcagctttgctggcccgaaggactcctgtttggaattaaatgtcactggtgacaataagggcaacatgagagcttgggatcctccaatggtcgggagggagatggcatttttgagcaccggggag

SEQ ID NO: 7517 - DNA, 582 bp, Homo sapiens
  unsure (4): n=A,T,C or G
ctgntgtcatttacatggtggacccgttcacgtatgctgcagaggaggactccacttctgggaacttttggctgttgagcttgatgcgctgctacacagaaatgctggataatttacctgagcatatgagaaattctttcattctccagattgtgccttgccagtacatgctgcagacaatgaaggatgagcaagttttctacattcaatacttgaagtccatggcattttcagtgtactgccagtgcaggcgaccactgcctacacagatccacattaaatccctcacgggatttgggcctgcagccagcattgagatgaccctcaagaaccctgagcggcccagcccaatccagctttactcccctccctttatattggccccaatcaaagacaagcagacagagctgggagagacgtttggtgaggcgagccagaaatacaatgtgctcttcgtgggctattgtctgtctcacgaccagcgctggcttttggcttcctgcactgacctccatggggaattattagagacctgcgttgtaaatattgctttaccaaacaggtcacggaggagtaaagtat

SEQ ID NO: 7518 - DNA, 306 bp, Homo sapiens
ccaatgagatcattgtgaaggcaggggaatgtatgtgcacatctgttttgtaactgtttagatgaatgtcagttgttatttattgaaatgatttcacagtgtgtggtcaacatttctcatgttgaaactttaagaactaaaatgttctaaatatcccttggacattttatgtctttcttgtaaggcatactgccttgtttaatggtagttttacagtgtttctggcttagaacaaaggggcttaattattgatgttttcatagagaatataaaaataaagcacttataaaaaaaaaaaaaaaaacc

SEQ ID NO: 7519 - DNA, 191 bp, Homo sapiens
ctgcaagataatgaggcacactcagtattgcacttcattaaaatttcaggctcaaacttaacctagaagtttaaatgaaattgcatttgtaatttagtaattcttatacaggacaaacattgatatgtttatatacagtgtgatacttattacatttatatgctgtcctaacacaatgttttttttttttt

SEQ ID NO: 7520 - DNA, 565 bp, Homo sapiens
  unsure (545): n=A,T,C or G
ccacatttaagtcttaaaaatttttaaattttgttgttgatgtttgtagacagccctgttgttgaaatcatggctttattcattttatttattttttaaacttgcctgaatttgttctaaaggaatatttaagagacataattttcttctctttaccataacattacacaaaactttttcctaaaacacggttgtgaggtactgatgaggtgtaagtggagctgttaaaaacagcagtgctgtattgcagttatgtatattcgtgtacagtatgtttagatcccaggtaaacatattcttttctgagaggataaatacctgcattcagatattccaggtaaatataattgagtcagggagtagtaaatctgatggagaattcactttggggaggggaaaaagaatagtatgcaagacccttattggcttttaattatacctgaaaccaaaatggatatttttagtctctctgcatgtgagatttggtgtaacaagatagaactataatatatacagtatatggaaggatagatatagtgctttgntcattttaattgcaaagctg

SEQ ID NO: 7521 - DNA, 403 bp, Homo sapiens
ccacagaacagtccctttttgagtaaagcagcaaggttgcttaatgacatgctatgtggttaacaagattcaactgccacatcaaggactttaaataatttcaagattttaaatgtatttatgaaatgaactcattacagcagctaatcaatgcaaactttgtcctttttctttgtctttctaagagaaactgaatttaatttaaatttaaattacagtgtctaaaacttggtaaaatattttaaatttgaataagaggaaaaaaaaaacatgaatttatttatgatggagcttcatacccaggacagtagcttcttaaatgttagtaaaataattatgttaagcattaaaacaattttgaatatgtaattaagcatttatgttaaaaaacatgtttcttacg

SEQ ID NO: 7522 - DNA, 350 bp, Homo sapiens
  unsure (344): n=A,T,C or G
tggagtaagtctggcagtatgttcaaggttgtggagtgtaactccagaattttccttcttcagctcattttgtctctctcacattaagggagtaggaattaagtgaaaggtcacactaccattatttccccttcaaacaaataatatttttacagaagcaggagcaaaatatggcctttcttctaagagatataatgttcactaatgtggttattttatattaagcctacaacatttttcagtttgcaaatagaactaatactggtgaaaatttacctaaaaccttggttatcaaatacatctccagtacattccgttcttttttttttttttttttttttttnaaaaaa

SEQ ID NO: 7523 - DNA, 281 bp, Homo sapiens
ccaattgatttgatggtaagggagggatcgttgacctcgtctgttatgtaaaggatgcgtagggatgggagggcgatgaggattaggatgatggcgggcaggatagttcagacggtttctatttcctgagcgtctgagatgttagtattagttagttttgttgtgagtgttaggaaaagggcatacaggactaggaagcagataaggaaaatgattatgagggcgtgatcatgaaaggtgataagctcttctatgataggggaagtagcgtcttgtagacc

SEQ ID NO: 7524 - DNA, 500 bp, Homo sapiens
  unsure (452): n=A,T,C or G
cctgtttgattgtagctatgttggtgtatctcgtgtacaagatggaaaagtgcttttgttgttctacctgatccagttgggggagcaggaatagggggtgcctgcctaacggcctctagcccatgtgcttatactgggatctgtcccgagggatctgcacctggttggcagtcattttgtggtggacgtggtaaatcgcgagtgttaccatgatgacgaggcccaagatgagccccaaaatcaggggcaaggtttcttccagttgctcccgctcatccactgggcatttatgctcttcactgaagacaaaatctgagataatgtcaaaaggttggatgtggaccgcagacaggatcatggtgaccgtcttctgcggatcactagaggccagtgaaatggtttgttgagcttgacactcataggacttcccagcgggggtgaccaaggcaganaggtggtgcgagttggctgtgtgcttccaacactgactgcgtctttga

SEQ ID NO: 7525 - DNA, 304 bp, Homo sapiens
ctgttaaagagtggaggacacccttgaccctaacaaggaaaacaaattaagcctttatgtacaagcaaatttagagctcttttaagtgtccaaagctattaattagtttaattaaggcattaaactaattctgaattaacatttttataaccaagaactaaaatgttcaaattttttctagtacaaaaaaattaaatttgctttagttataaaagagctctgtcaatatacacaaactatatacttcagacattcacaaaaatgtgagcagaaggcttatcaaaagacatttaatacaattagt

SEQ ID NO: 7526 - DNA, 436 bp, Homo sapiens
  unsure (214): n=A,T,C or G
  unsure (391): n=A,T,C or G
  unsure (436): n=A,T,C or G
ccacgtacatcctcccccagaaataggataaataaagagtattaatgagaattaactgccttgagacatttctattatttcttgttgagagaaccattcctaaagtcttcttgatcactattagcatatggacattataaaataaataacctgacaacttgacctgcagttcctggaggatgagtaaacaaaactgatgttaacccactgagtncactcttgtaagagtaatactgtagtgatgagagtactcccacatacacaaacatcacagtaaaaggtgcctatgattttcaacttcattgttcaaataaagggttcgctaagtgatcacaagacagcaggcttggttgcttccacatattgacttcctagagattacatatgaagnttaatctggtctggctgtacactatatgtgtataacggtgagtan

SEQ ID NO: 7527 - DNA, 534 bp, Homo sapiens
ctgggatcatgcaagaggcagtaccttcctctctaagtcatagcagtgaataggaagacaagaaaaactgtctttcgagcaccctatatccaagtcagaattctgaaggttttttccagtagatccaatgctataatggttaggttcccaggctagcctaaaaaattccacttacccaaaataatccttttcattttgcagaaataaattttgtgagatagtttagaaacctaccatcatttagtccttcattttttaagaataattctaaatatgtactaccaattaacaataaatgtagggagttagggactaaatgtaaggtaaataaacacagccaaatcttttctctacctattctcccagaagctccattaatactaatctgtatcttttctcgtaggttcaccatcaaaacttatcaaatgagtgtgaagacacacacatggacacaaacacacacacaaacgcatgtgcacgaagcttcatttctgaagtgaatctgtagttgagtttttaaggatgtccctggca

SEQ ID NO: 7528 - DNA, 562 bp, Homo sapiens
ctggcaatgacaagactgggagtatcaaactaggattgttagttcaattaaaatttcagataaacaataatgtacttatactaaaaaattatttgttgtttatctgaaatgaaaatttaactgggtacccaattgtttgtttgtttaatctaaaaaccctgattgaaatttatctaataaaacatcatttaatatctaaaataaaataaatttactataacatctttataactattcaatcaatgattcatcttctatttttccaaattcttgcacaaatatttgatgcttaaataaatacataaataataaataggttaataagttacacttgaaaataatttatgttatgatgaaaaaacttaaagtgcttccacatgtcctcacaacatcactgtgaggtaagatggtggctaatactttttccacttagaaataaaggagaaaccaaggcacagtggaacaaggacttgtggatcctggctagcagactaggggttgccagatttaacagaaaaaaatccaggatttccagctaaatttgactttatggcaaaattta

SEQ ID NO: 7529 - DNA, 616 bp, Homo sapiens
  unsure (561): n=A,T,C or G
ccaagatggttggggcataccttggttttatacattttagggagacataagacattaatcaatatatgtaagaagaacattggttcagtggggagggagcttccaggtcacagataggtgagacacaaacagttgcattcttttgagtttctgattagcctttccaaaggaggcaatcagatatgtatctatctcagtgagcagagagataactttgaatagagtgggaggtgggtttgccctaagaagtttccctaagcttgagttttccttagtgattctggggccccaagatattttcctgtcacagttgacatccccaacacagtgtttagggctcagaaaaagataccctaaaatagggtgctttggcatgctgaatgctttgaataaaggaggctgaagggcctcagaaataagagaacaaaggtctgtctctgacccactgctgcccacctcccttcccttccaaagcacagggagggattttctttgaagttctcttatttgattaagggaagtttcttccagaaggaaggtaattgtcctggacaccccttnctgggaatctacatcgatcagagaagaataactcatattgcaggacgggagaata

SEQ ID NO: 7530 - DNA, 554 bp, Homo sapiens
ccaagtaaatttgagaaatgaattaaaattaagaccattcattgcaggactcttcaatgtccttaatgtgtgttgtgatctctaagggtggttatgggggtatgatatgaagtatttcccaaacttactttaccctggaacccttcagtggaccacctctggggattaatgttcaatgggaacacattttgggaaaggctgtccaagcatacacttttgtgttagatacaattaaaaatgacatctaaggttaagaaatgacaaaacatggcaagaatatgttttagaaatggtaatgttcacttaaaaatactaatcttctaaaactataatatttaaccagcactgagtcagtttgtaacttgatatggaaagagtaagcaagcccaaatggcccattttacccgaacaaaaagtgagagaagactttatattaacatattagtctgaaaaaaaatttgtgcttaagtgtgccaaggaggtaaaggataagaaaggcaagacagttttctggctgccgtgtgatggctcacacctgtaatcccagcactttg

SEQ ID NO: 7531 - DNA, 445 bp, Homo sapiens
  unsure (18): n=A,T,C or G
  unsure (40): n=A,T,C or G
  unsure (46): n=A,T,C or G
  unsure (52): n=A,T,C or G
  unsure (70): n=A,T,C or G
  unsure (74): n=A,T,C or G
  unsure (92): n=A,T,C or G
  unsure (96): n=A,T,C or G
  unsure (99): n=A,T,C or G
  unsure (161): n=A,T,C or G
  unsure (167): n=A,T,C or G
  unsure (196): n=A,T,C or G
  unsure (221): n=A,T,C or G
  unsure (271): n=A,T,C or G
  unsure (343): n=A,T,C or G
  unsure (427): n=A,T,C or G
  unsure (430): n=A,T,C or G
ttctctggtaaatgcttngattgctaaatagtgatggtanatgaanacaaantaatagggggccaagctnttgngaaacaaaggtataggtntggnttncattgctctggaaattttactctcattcctgaaaagcataagcagggatgaaaaatagcttntaaaantttactttccttccagaaataaaggatcnattcctacctgtccaaaactttcanatggagtagtaggttccggtaaaaatttctatcttgacttcagttcccanagaggtttgctcttaagaagcgtatgaggtgactttggaacaaggaatatgcatgaccaacatctggtgtanacagagtctgggtcctgaaaatgtcagcaaatgagatttacaatattagagcttggaaataacctcagaaaacatctagaccangcncattacatcacagat

SEQ ID NO: 7532 - DNA, 663 bp, Homo sapiens
ccataatcctagatgcacgcttctaattcatgtacctgcacatgtgacctttgtgaacagaaatttgcatgtataatttgtgtttacttgtaactttctggttatatactgcttatatctgtggattcaagttactgaagtgaataccaataaaaagaaaaccctaggccatgttaattggttatacatgtttggaatattaaccaacgtatttgtcagttgtggtttttattcgctcttaaactttgtgcatgctttaacaatttattacttttaaatctagagtgaattctaaagactgccgctaaagatctgagttttaaaaatgttgttgctggtggatttcttgttcctgttacataactaaaagtgaggccatttgtggtttttaaaaaccttatgaattaaaaatgctacaggtgaacaaacagaagcttatgtttagagatattgatgacttaacagtacaattggaagtaatacggatgagcaagaattagttctgcagcttttcaaaataattacgtagagactcttggtatattggattatctgttgtaaacaattttttttcttccctgacacagggtctcactctgtccccagactggagtgcagggcacagtctctgcacctcacctttgggctcaaatgaccctccta

SEQ ID NO: 7533 - DNA, 608 bp, Homo sapiens
ctgggaaatactttatttaagatattttatatggttttctcccttttacagaatgaaacagtgattcagagtgcatataaaagcctcatacaacacttggaagaaataagggttttagtattagcaactcattttgaacatttgaaatggaatgatatgatggaagaggtattaaaatttttatttctttaaataaaagtttgatagaatttggtaaatgagaatgaacttgtgattagttcagtccttagaccagactaaagggtgccatatacctccttagtacatgtatactatctgaatcttagaatgtcatgctctcagagtaccttgaattcatcggatggcatatgtaattttatatgcatttccggaagccatattttaaaacagactctgggaaactagaaaattgtagtacttaatgcaacagtaatgtttattttccagtattcaaattgaggagggctctaagatatcatttgccatataaacggtcaaaatgtggaattaattataccttaagtctaattttctgattatcttctcaagctatgctttatactactatttatcatgatggattactaagaacctctttctttttt

SEQ ID NO: 7534 - DNA, 417 bp, Homo sapiens
ctgaaccctcgtggagccattcatacaggtccctatttaaggaacaagtgattatgctacctttgcacggttagggtaccgcggccgttaaacatgtgtcactgggcaggcggtgcctctaatactggtgatgctagaggtgatgtttttggtaaacaggcggggtaagatttgccgagttccttttactttttttaacctttccttatgagcatgcctgtgttgggttgacagtgagggtaataatgacttgttggttgattgtagatattgggctgttaattgtcagttcagtgttttaatctgacgcaggcttatgcggaggagaatgttttcatgttacttatactaacattagttcttctatagggtgatagattggtccaattgggtgtgaggagttcagttatatgtttg

SEQ ID NO: 7535 - DNA, 414 bp, Homo sapiens; identical to SEQ ID NO: 600

SEQ ID NO: 7536 - DNA, 620 bp, Homo sapiens
  unsure (618): n=A,T,C or G
cctatgtcacaggggagagaagctcctgaaccaaccatttgtcaggtctggggacaagactggaagtattgactcatttgcaaggaaactaagtgggtcaacaatgaaagaaggtaataggacctcatctgcaatcctccaatttatctgcaggataaattaaatgcctaaaaaagaaacttattttttaaagtatctgctaccatcaggaaaccaaataaatagtcagtctattaatttcgttcttaaataattccgatcctttacctaatttcttgagccatttaatcatctcaactctaccttaaaaccctcccaatgttttccaaatctgtcttactgggaaacaaagattaaaattcctaataaggattattttgtggatcttaatttctagattcccattttaaaattttaattccattaatttcttagtaatagaatgctattattaagaaattaatggaattaatttcttaataatagcattctattactgattgaatcatctctaataagccatcataatttccagaccatttctaagaacacgagctgatattgaaatgtttactagtgaatatagctaatgtaattactctttaaaacttaataggnta

SEQ ID NO: 7537 - DNA, 612 bp, Homo sapiens
  unsure (526): n=A,T,C or G
gttagtaataaatgtagccattacctattctactggttattagtacaaaaaaacccagccttttcagccattcatttccaaacactgatggtttccactgccagactatacacaagtttctaatggtccacagtaaattgagaatgagaacaatgcagtaaattattaataaaactacattcttttcttttttaaaaaaaatactatttgtcttatggtttaattataaacataattttacttaaaaaataaaaagcaaccttatttgaaaattggctggtaccaattttattttaataactttattgatctgaaatcttagtacgtttaggttaagttataaacacctacttcacttaggcactgggccaggaaaagaacataatggcatataagaactttccactggagtgcttcttcattcacttagataattactaacatccaccatactagacccctaaagtgatgaaacacacaataaatagcaatataggctattcagtaattacacctaggtaattcncgtcattttataataaaattatgattttagggaagtactccatgttctccatgagccttactctgatattcacttaccacacccta

SEQ ID NO: 7538 - DNA, 645 bp, Homo sapiens
ctgggaagccacgagaatattgtgaacctgctgggggcgtgcacactgtcaggaccaatttacttgatttttgaatactgttgctatggtgatcttctcaactatctaagaagtaaaagagaaaaatttcacaggacttggacagagattttcaaggaacacaatttcagtttttaccccactttccaatcacatccaaattccagcatgcctggttcaagagaagttcagatacacccggactcggatcaaatctcagggcttcatgggaattcatttcactctgaagatgaaattgaatatgaaaaccaaaaaaggctggaagaagaggaggacttgaatgtgcttacatttgaagatcttctttgctttgcatatcaagttgccaaaggaatggaatttctggaatttaagtcgtgtgttcacagagacctggccgccaggaacgtgcttgtcacccacgggaaagtggtgaagatatgtgactttggattggctcgagatatcatgagtgattccaactatgttgtcaggggcaatgcccgtctgcctgtaaaatggatggcccccgaaagcctgttttgaaggcatctacaccattaagagtgatgtctggtcatatggaatattactgtgggaaatctt

SEQ ID NO: 7539 - DNA, 481 bp, Homo sapiens
  unsure (377): n=A,T,C or G
ctgtgacagggcttttgtgtcccgccagactttgtacatagcataacctgtttaaatcccatatgatgcaggttccgtctctgctcacacttatcagtatactgtatggtttgcaaacaaataagctggttatctcttctgtgtgaccatagagatgtatttgagtctccatttctatttctgatggctgaaattttaaaattaagtatgagataaaaaccacaacaaaaagtactctagtatagtatctcaaaaataaaacaaccaaagtgactcaaatggtcttctcaaacatatcattcttcaatcctattcagagtaaaacaaagaaagaaattaaaaaatttttaattcctcataatttccagttatctggntttcatttttgtctattcttgtccaatctttgttcaaatatacatgtatttttatagttgtaatattgccacataaaaatttcctattttatattttacatatt

SEQ ID NO: 7540 - DNA, 561 bp, Homo sapiens
ccgaactttaatttcaggaattgaatgggtttgctagaatgtgatatttgaagcatcacataaaaatgatgggacaataaattttgccataaagtcaaatttagctggaaatcctggatttttttctgttaaatctggcaaccctagtctgctagccaggatccacaagtccttgttccactgtgccttggtttctcctttatttctaagtggaaaaagtattagccaccatcttacctcacagtgatgttgtgaggacatgtggaagcactttaagttttttcatcataacataaattattttcaagtgtaacttattaacctatttattatttatgtatttatttaagcatcaaatatttgtgcaagaatttggaaaaatagaagatgaatcattgattgaatagttataaagatgttatagtaaatttattttattttagatattaaatgatgttttattagataaatttcaatcagggtttttagattaaacaaacaaacaattgggtacccagttaaatttcatttcagataaacacaaataatttttagtataag

SEQ ID NO: 7541 - DNA, 411 bp, Homo sapiens
  unsure (1): n=A,T,C or G
  unsure (4): n=A,T,C or G
nggncgaggtccaaattgctcactttctaatgatagcctaatagttgtaaagttgttctggaagaaagcaggggaagagagcagactttaagactcaactcactcaatcaactaacaatggaataatacaacatggactcacgatcaaaatgatagcatttcaactactactgcattcttgtacatttagtactaggagactgtcaacagtaccaaatatttatttctgtaggttattaaaagaatcttttgtgtgtttcccacattcattcttagcttactatcaattaccaagatcttagttgttgcaattactcaggttttagggtacactccttgtttcctgtcacaaatctcattttgaaatatggcagagtaggaccacataagctattacttatatgaattcag

SEQ ID NO: 7542 - DNA, 423 bp, Homo sapiens
  unsure (1): n=A,T,C or G
  unsure (175): n=A,T,C or G
  unsure (203): n=A,T,C or G
ncgaggtctggcctaggtgaggagaggcaaggggtgcagtcgtgttagtaaagttctgggggaaaaggcgtagttgttcaagttaaggcatggaaaatcatgcgacgaaaaggattcttgaagtagaatcctattctgatcttatctagaatgggtgataaggctggaaagttanaatgacataaggtaagttgttgatccanatattagaattctgattgctaagtgactaaaagtttagggcatgggcaaaagatacataaaattatgtatctgagccctttcctatttccaaggccacccaaaagtagaagaagccacatggtaagaaaggtagtggaactctggaaagagcagagtctggtctggaagtcaggagacctccttagacctcagctctgtgattcaccagtggtggggtct

SEQ ID NO: 7543 - DNA, 306 bp, Homo sapiens
  unsure (204): n=A,T,C or G
ccaatatggggatgtggaatttttatacaagttataagtgtttggcatagtacttttggtacattgtggcttcaaaagggccagtgtaaaactgcttccatgtctaagcaaagaaaactgcctacatactggtttgtcctggcggggaataaaagggatcattggttccagtcacaggtgtagtaattgtgggtactttaaggnttggagcacttacaaggctgtggtagaatcataccccatggataccacatattaaaccatgtatatctgtggaatactcaatgtgtacacctttgactacag

SEQ ID NO: 7544 - DNA, 385 bp, Homo sapiens
gtctgtaatattcctaaaaggaatatctacatactatagcctatcaaatataatctgcattttgcaaatcaatacaaaaatctatccatcatttatacattttatatttatatactttttaaaaattagattttattgctagggtgaatttggaattcaaattaaatttggaaacttaataatgctcttctcataaccttctccccattctttttttaatttttaaacactggaagcaaatgattatcaaaatgagactgcaacttaaggcattttaaaagaaaaaataattaggtgccatatagcattttatttcaaaagtatattttgtcccacttttctcactagcaagagtaaaacacaaaccttttttcataaatatgac

SEQ ID NO: 7545 - DNA, 369 bp, Homo sapiens
ctggaaatccacagaggctggctactactgcaggtctccagcagagtcttcacggaaggagaacctctggccttgaggtgtcatgcgtggaaggataagctggtgtacaatgtgctttactatcgaaatggcaaagcctttaagtttttccactggaattctaacctcaccattctgaaaaccaacataagtcacaatggcacctaccattgctcaggcatgggaaagcatcgctacacatcagcaggaatatctgtcactgtgaaagagctatttccagctccagtgctgaatgcatctgtgacatccccactcctggaggggaatctggtcaccctgagctgtgaaacaaagttgctcttgcagagg

SEQ ID NO: 7546 - DNA, 292 bp, Homo sapiens
ctggtgaaagaatgatgctcgagttgctgcaactgaagctctgccccaggggtgcttggagatctcgaagggatgcattctgagccgagaatgtccactgtgctgcgtgggggaaggacacattgtactccacccgccatgtagctcaggtagacaaccttctgctggaggtcctgcatgaatccaaagctgaggtgtccataggggaatgagagaagcaggtggggatgggcaccctcacagcttccctggaccttggttttgttggggttcagtacagagatgccccagg

SEQ ID NO: 7547 - DNA, 442 bp, Homo sapiens; identical to SEQ ID NO: 663

SEQ ID NO: 7548 - DNA, 476 bp, Homo sapiens
ctgaccggaccggtcatgcccgtccggaacgtctataagaaggagaaagctcgagtcatcactgaggaagagaagaatttcaaagccttcgctagtctccgtatggcccgtgccaacgcccggctcttcggcatacgggcaaaaagagccaaggaagccgcagaacaggatgttgaaaagaaaaaataaagccctcctggggacttggaatcagtcggcagtcatgctgggtctccacgtggtgtgtttcgtgggaacaactgggcctgggatggggcttcactgctgtgacttcctcctgccaggggatttggggctttcttgaaagacagtccaagccctggataatgctttactttctgtgttgaagcactgttggttgtttggttagtgactgatgtaaaacggttttcttgtggggaggttacagaggctgacttcagagtggacttgtgttttttctttttaaaaagtaa

SEQ ID NO: 7549 - DNA, 567 bp, Homo sapiens
  unsure (459): n=A,T,C or G
  unsure (547): n=A,T,C or G
  unsure (567): n=A,T,C or G
ctggcattggtctagagctttataaggccattcagcgagggaccatcaagtgcaactttgcgggggttgccttgggtgattcctggatctcccctgttgattcggtgctctcctggggaccttacctgtacagcatgtctcttctcgaagacaaaggtctggcagaggtgtctaaggttgcagagcaagtactgaatgccgtaaataaggggctctacagagaggccacagagctgtgggggaaagcagaaatgatcattgaacagaacacagatggggtgaacttctataacatcttaactaaaagcactcccacgtctacaatggagtcgagtctagaattcacacagagccacctagtttgtctttgtcagcgccacgtgagacacctacaacgagatgccttaagccagctcatgaatggccccatcaagaaagaagctcaaaattattcctgangatcaatcctggggaaggccaggctaccaacgtctttgtgaacatgggaggaggacttcatgaagcccagtcattaacattgtggacnagttgctggaggcagggatn

SEQ ID NO: 7550 - DNA, 566 bp, Homo sapiens
  unsure (561): n=A,T,C or G
cctttcaaacaagttttaacattgaaaacacccatccttcaaagagcttgaagccccaagtgtccatcttccaggatgcacaagactccccaagccttcatcctcccattactatttaatatccacactacattgttcggcacttggtttccctccagtatgcaccgtggcagccagtaagacacccccagggagcacaaccgcagctcactatttttctccccatgctcaataagttcagtaagtgcttgatgattgactagcatcaggaataaactaggagcattttacattcacactatctagttaaacattccaaatgacagatttccagaaaaatgttgcaacaaatgtaagtatttatagacatgcctggtaaggtatgtagcatttggagaaataataactagaacagagtactgtacaaaagaaaatggtacacttttgtatgagtctaagatatattggacaaatgggtattcctattggtaaacatggacatcttaataaaaatacaaaattactacataaagaagcattacatccttcaactcattgggnggacc

SEQ ID NO: 7551 - DNA, 490 bp, Homo sapiens
  unsure (478): n=A,T,C or G
atttgatataaaattgaaaatgttaaaaaatcattttttttcctcagagttaaaattatttccctcatactaatgcttaatggcaatgattactccagagttttttaatttttacactggggcaatagactaggaggtctctgatttcttcttggtctaaagtgttttgattttatttctacataatagctttggtattcatgtatatacatgcatttaattgtgattttatcacctttcccatttctttccccacaagctggcatttcagtagttgcttttgaataatggttttggttacctgggaaggcaggcccagaacccatttccttgacttgcagttccgggctgtgttcacatgactgctgtctagctgatgcatttttcacatttgtcaactctggttagaaacaggtcctcaggagtattctctaacctgatattttctaaaaagatatgttgattcaactttgtttancatcctactttc

SEQ ID NO: 7552 - DNA, 558 bp, Homo sapiens
  unsure (508): n=A,T,C or G
  unsure (533): n=A,T,C or G
  unsure (543): n=A,T,C or G
cctgacagccgtttgggtcgctcgaaatcggtttgctgtcctagatcggatgcattcgcttctgatcaagaatctgaagaatgagatcaccaaaaaggtacaggtgcccaactgtgatgagatcttctatgctggcacaggcaatctcctgcttcgagatgcggactctatcacactctttgacgtacagcagaagcggactctggcatctgtgaagatttctaaagtgaaatacgttatctggtcagcagacatgtcacatgtagcactactagccaaacacgccattgtgatctgtaaccgcaaactggatgctttatgtaacattcatgagaacattcgtgtcaagagtggggcctgggatgagagtggggtatttatctataccacaagcaaccacatcaaatatgctgtcaccactggggaccacgggatcattcgaactctggatttacccatctatgtcacacgggtgaagggcaacaatgtatactgcctaaacagggantgtctccccgggtactcccattgancccctgagtnaaattcagctggccc

SEQ ID NO: 7553 - DNA, 565 bp, Homo sapiens
  unsure (52): n=A,T,C or G
  unsure (447): n=A,T,C or G
  unsure (502): n=A,T,C or G
  unsure (510): n=A,T,C or G
  unsure (521): n=A,T,C or G
  unsure (538): n=A,T,C or G
  unsure (540): n=A,T,C or G
  unsure (549): n=A,T,C or G
  unsure (563): n=A,T,C or G
cctagaatcaggcattcctccaaggaactggttcttttaagtaggttgctgncacctttttgtttttttagctctgaaacatttgtctaattttaaaaatattctcaaccatttttcattgggttttttctctctcctgaaattcttattatttgtatttaggcatgcttttctctcttctctacattatttaactttaatattttctactttttaatttccttcttgtctcctgggaagttctacaaccagctctcataattaatatgtaaattcttctgtaatttgattttaataaacctactactcttctcttttaaatattctctagcagtgtttgaaagagagttaatggcctatgctggttctccatcttgtcctgtttattatctttttcaaaagcatatatttgtaagtgtgcttcatgttttaaaatgtaaaaatacnagtcttattaaaaaaacttcagctttaattttcatttattttcattataaaaagntaaaggtnatatatgggangaaataaaatcaactananataactacntaatcacaggagtngg

SEQ ID NO: 7554 - DNA, 564 bp, Homo sapiens
  unsure (387): n=A,T,C or G
  unsure (515): n=A,T,C or G
  unsure (516): n=A,T,C or G
cctgcacgagcagacacattccgaatactaaaattccttaggaaaattagtcattgcccatgtgtgatagctgttttccattttgaattttaaccattttgggaaaaggaagagaatgggaaataccagtatagtccgaaaagcccttaaaaaatgagtgcgaaaagtggaagggtggagtggacataggaagatgatgaacttgtcattttttcctttccatagcttcattttattgtgtcaaagttgcagaaagcacttcactttcatcgaggctctttttaggcagggtacagccaagaaaacttttttatggctcagatgtaaatcctagaaaacgtagtagaaatgatggcaggatctctaactgtaaaataacagtagtgntagtagtaagtgtcattataataacgttatagaactctgcacatcaaaaataccacattttatcatgatctctgcaagagatttctgttggtagtcattctaacttctaataaataataccttgagtnnggaaaggttctgtgaggatccaataataatgaaaatgacagtggtgat

SEQ ID NO: 7555 - DNA, 564 bp, Homo sapiens
  unsure (564): n=A,T,C or G
ctgtagatcatttgcattcattggcatgtaatcataaagggccacaacctttttcagctcacttgtggagactggtgctgctgctggctcaggcggtagtggctttttcaagatctggtcctcctcaggcgttgggggaagaggcttttttgtcttccggtgagaactcccaggttttaagcttccattcctgttctccaaaatttggcagcccatagcatttttggctgtctgagagcagcagagatactgcccatcgatccagaagcaagggtgatatttctgaaccagatcactgttgtaccggattacgtttttgagctggtgaatccaccgcttccttagttcttcagttggggagaagacgtagagaggcccttcatcatatacaacctggaagggataagggaacctttcaatgattgaaatttgctccatttcactggactcttcacctcttctcggaatctgtctttctggaggaggatttttttcaggaaccactgtttcaacacaagtgatcttctcaacatctattgaacccttcttactgctcttcttccn

SEQ ID NO: 7556 - DNA, 457 bp, Homo sapiens
  unsure (418): n=A,T,C or G
ccaccttatatataattatatattctaccataaatgctggccttcttcaaattatgattttggaaaatctaacccatacagagggataaaaaattgacatcccttggacaacttctccttgtttttttttgttttgttttgtttttaacattccaagctctctctggtcccctatccaaggagaaatgctagggcctcgaggatgtccgctatatatttttataactaaatgataaatttatattcaaattgtttgaatacgtttccaaaactttcagagtacaagtcattgttaagtttgcctttactttaaaaactaaaagaatacatttctatataaactagcagtcaggaatttgcctgttttctagcttcttcatctatctaaaatatatatttagctaccagaattatgggnctcctaataaaatcttaataaaatagcatataaaatcaa

SEQ ID NO: 7557 - DNA, 509 bp, Homo sapiens
  unsure (469): n=A,T,C or G
  unsure (509): n=A,T,C or G
gttgcttcctggtatctgatttagaaataacatttaaatgccaagtatctgggggattgaaggaagggtctatatgagcaggtgaattagcagtactgtttttgtttagtggatattgttagtgactttttgtgtgtgttttgctttgggacctttttattttggtgttgcaaaaagtaacatattttcatcattgcttcatacgacatggagttaggacagggaaaaatcattcaacactccttatgcattaaatgatcaaataaaccagtgtaggatattaagactatcaattggtgggattaggcttgacattttatttttataaatatatattttttctgaatgtgtctgagtccaagagtgggcaaaaaataattttctactttggactaatctatagaggtttttgaaagtctgcattactaacttgttgaattcatgatattctgcctatggccaaattgtnaacctttgtttttctaaaataaagtaattgaaaacctgcn

SEQ ID NO: 7558 - DNA, 536 bp, Homo sapiens
  unsure (487): n=A,T,C or G
ctggggtgggcttctcctactccgatgacaagttttatgcaactaatgacactgaggtcgcccagagcaattttgaggcccttcaagatttcttccgcctctttccggagtacaagaacaacaaacttttcctgaccggggagagctatgctggcatctacatccccaccctggccgtgctggtcatgcaggatcccagcatgaaccttcagggactggctgtgggcaatggactctcctcctatgagcagaatgacaactccctggtctactttgcctactaccatggccttctggggaacaggctttggtcttctctccagacccactgctgctctcaaaacaagtgtaacttctatgacaacaaagacctggaatgcgtgaccaatcttcaggaagtggcccgcatcgtgggcaactctggcctcaacatctacaatctctatgccccgtgtgctggaggggtgcccaccattttaggtatganaaggacactgttgtggtccaggatttggcaacatcttcctcgcctgcca

SEQ ID NO: 7559 - DNA, 329 bp, Homo sapiens
ctggaaatgaacctaaggaattttgctgaaattatcgaagctgatgaagtacttctttttgagagagctacttttctgaccaagtttagatgtgactgaacattttcactgagcggggtgaagtcaagcaagggggatttgttcttccactggtatagaaattatgttttgaaattttcacattgtctcatggaatttccctgagttttcttctggtgagtgactcagttttgcttcctactagacactctgcatctgtatattcagcctataggtaatacttgtgtggttttattaaaatctgaaaaagttagaaaaagtattttcag

SEQ ID NO: 7560 - DNA, 519 bp, Homo sapiens
  unsure (416): n=A,T,C or G
  unsure (474): n=A,T,C or G
tcttaaagtaggttgaggcttgaggctgggctttcgggtttttttgttttttgttttgttttgttttgttttgttttcttgtacttaaacctgcttgcttcctaccacagattctttattttcccaaacactacaaaaaaacttttaaaactttgccatttcatctgtttacactctttgccactgattagcagtatttaaatcttgcaagaatattttgtgctttctttagaaacacaagagtatagatttttctcactgaaaagtgagagttacgcattgcagccatgaagggatgctaggatcaattatggcagtaccttttttcccctcctgttcttgaccagttgtctcttttgttttgggtcccacttaggattaatggatgtaaggtattttcctgtgcctttattttntgtcttctattggaaggaggtgtaacggcagaatagcacccgtgttgggggttttccnttcaacactgcaagtgaatattgccaccatgtgaaccctcaaaat

SEQ ID NO: 7561 - DNA, 455 bp, Homo sapiens
tcgactcgcttaggcccttgtttattccctatctagtgcaaagccacgaattggcagcatgttttctgacctttggtttggttggtttaaaatggtgttctagattttaaaatcgtttaagtgaccagttagatactcattcagagcagactcgggcggatagatagggaatactgtatgggtatatctttgtgtctagactttttgagatcgccctgaaggactgtttttgttttgttttgtttgcttggcatagccccttcaaggaatttaatctctcggccatattcttgtctgattttacggaggttgatgtcgctactgtgttaaataaccagtactttggttttcattccgttactaagtactttaaggtcttatatgtcataattttattgctaacatcaaatatttattttattttttaaaaaaataactaaacatggggcaaagga

SEQ ID NO: 7562 - DNA, 446 bp, Homo sapiens
  unsure (13): n=A,T,C or G
  unsure (16): n=A,T,C or G
  unsure (259): n=A,T,C or G
  unsure (433): n=A,T,C or G
  unsure (439): n=A,T,C or G
  unsure (440): n=A,T,C or G
gttgaaatcatanaanatgcaaatgacctttcaaaatcaacacaatgtgttctgaaactttcgtgactaataccatgcatctgtgatcaatgaactatgtggttttgaatcggatgtagaccattagtactactacttgagctaaacttctgcatggttcataatttttaaagtgtgtagttaatatgcatgttatcgtcctttcttccattcttaccagtatgtgcccatttgcaaaacaaaaatgctaataatcagnaatagtcctataaaagatgttaactctgtttagtcattgactgattttgctctaaccttaaaattttgtgattattgacctctgttgcatttattctaaagccccccaaaaattatctagccgtttcgaatatcaacattaccctggtgtattcactgctgtatgcattattgntctttnntgctgt

SEQ ID NO: 7563 - DNA, 336 bp, Homo sapiens
ccaccaacaccccccacagcaccctgagcgtcaactggagcctcctgctatcccctgagcccgatgggggcctgatggtgctccctaaggacagcattcagttttcttctgcccttgtttttaccaggctgcttgagtttgacagcaccaacgtgtccgatacggcagcaaagcctttgggaagaccatatcctccatactccttggccgatttctcttggaacaacatcactgattcattggatcctgccaccctgagtgccacatttcaaggccaccccatgaacgaccctaccaggacttttgccaatggcagcctggccttcagggtccagg

SEQ ID NO: 7564 - DNA, 428 bp, Homo sapiens
  unsure (132): n=A,T,C or G
  unsure (155): n=A,T,C or G
  unsure (197): n=A,T,C or G
  unsure (233): n=A,T,C or G
  unsure (248): n=A,T,C or G
  unsure (272): n=A,T,C or G
  unsure (291): n=A,T,C or G
  unsure (320): n=A,T,C or G
  unsure (423): n=A,T,C or G
cgaggtccaatctaatttcttaagatggataataggtcactatttttgagtccttttttttcccctaaatatttatttaaggctataaaatcactacatctctcaagttttaatttggcatattcttattgnttcattcaaatatgctttaattnctcttgcgatttattttttaacccttgaattatttagaaggncactgtttaattttcaaacactgatttttttatggnttttaaaaattaggnttccattattgcattgggatcagnagaaaatatcctaaatggntttaatcctacaatgtcatctggcttcgngaccagtttgttgtcatttagtttaaatgttctgtgtgcacatgagcattttgtttaatgcattctgtacagggccttggatttgaatgattatgtaaatganggttt

SEQ ID NO: 7565 - DNA, 406 bp, Homo sapiens
cctttctggggcaaagtatcaacgcaagaagcaagaactcctaaggaaggcatctgtaagtctgtctggagcttaattcccagatggtctgacacagggcgtggccacagcgccagcctcagactggagggcaaggggttcccttgagggctgcagttctactcaggctggtggagaactctggcttttggaagcgagagtaaaaagctaatgacgaggaaccgaaaaatcgcgagtgtttcgcgggtaactggggttgagggccaaaatatttggaatgaaggactttggccctatttaaggcagattttacagagcgcacctcaaacgtacaagtcagtaggactccttatttggcgtgacccgacctggccgcggagcctgcatttcctcgcagcctctcagt

SEQ ID NO: 7566 - DNA, 555 bp, Homo sapiens
ggcaagtcaggcgtcctgtttctcggatggatacccattaccatcttggacctggaagaagtgttcagacaagtctcccaactgcacagaagagatcacagaaggagtctggaatagaaaggctaacagaaaagtgtttggacagtgggtgtcgagcagtactctaaacatgagtgaagccataaaagggttcctggtcaagtgctgtgcatacaattcccttggcacatcttgtgagacgatccttttaaactctccaggccccttccctttcatccaagacaacatctcattctatgcaacaattggtgtttgtctcctcttcattgtcgttttaaccctgctaatttgtcacaagtacaaaaaggtaaaagcaaaggtaaaaattcattattctttcctctatctgcagaaactgcctattcctaactgactcatcatttcatctctgaagcaatttaggtatgaaagccagctacagatggtacaggtgacccggctcctcaaataatgagtaccttctaccgttgatttcagagaatatgaatatgatct

SEQ ID NO: 7567 - DNA, 392 bp, Homo sapiens
ctggcagatgcagaagaagcgatgtatcagaatgtggatggccgtgtttcggaatgtcctcacacctaccaaaacaggcgacctttcagcagagagatggatttggggctactctctccgcaggctcaggtcgaagattcgtagaggaacaatttagttttaaggacttcatccctccacctatccctaacaggctgtagattaccaaaacaagattaatttcatcactaaaagaaaatctattatcaactgctgcttcaccagacttttctctagaagctgtctgcgtttactcttgttttcaaagggacttttgtaaaatcaaatcatcctgtcacaaggcaggaggagctgataatgaactttattggagcattgatctgcatccaagg

SEQ ID NO: 7568 - DNA, 564 bp, Homo sapiens
  unsure (1): n=A,T,C or G
  unsure (462): n=A,T,C or G
ncgaggtttttgagggtaggtaaaatagctatattacttaaaagtcaaactttataaaaaggtaaagcggagatgtctgtctcccaatcccatctattcctccttcaccctgttccccatctatgagaaattatatttattagtgtcatggttattttttcagtgtttctatatgtaatactcattatatgttatacaaacacaaatatacatatacataatttccttccatttttatcaatttccttcctttctcactgtcctgctcctagctttaattttaccaattaataaaacatactaaagatttttttcatatcagtgcatgaagcttttcctcttttttctttcaactgcataatattccactatgtggaaatatcatggtttatttaaataaattcttatcagggaatatttgagttgttccagggttttctttctttctttcttttttgctgngaaaaacaatgttacagtgaataactaacatcatttctcatttcatatgtggacaaagtatctgtgggatagagttccagaactgaaattgctgcttgaagg

SEQ ID NO: 7569 - DNA, 534 bp, Homo sapiens
  unsure (493): n=A,T,C or G
ctgtatgagtttgatatcaaagttccactgttggttcgaggacctgggatcaaaccaaatcagacaagcaagatgctggttgccaacattgacttgggtcctactattttggacattgctggctacgacctaaataagacacagatggatgggatgtccttattgcccattttgagaggtgccagtaacttgacctggcgatcagatgtcctggtggaataccaaggagaaggccgtaacgtcactgacccaacatgcccttccctgagtcctggcgtatctcaatgcttcccagactgtgtatgtgaagatgcttataacaatacctatgcctgtgtgaggacaatgtcagcattgtggaatttgcagtattgcgagtttgatgaccaggaggtgtttgtagaagtctataatctgactgcagacccagaccagatcactaacattgctaaaaccatagacccagagcttttaggaaagatgaactatcggntaatgatgtacagtcctgttctgggccaacctgtcgcactt

SEQ ID NO: 7570 - DNA, 463 bp, Homo sapiens
  unsure (1): n=A,T,C or G
  unsure (4): n=A,T,C or G
nggncgaggtctggcttcactgctcaggtgattatcctgaaccatccaggccaaataagcgccggctatgcccctgtattggattgccacacggctcacattgcatgcaagtttgctgagctgaaggaaaagattgatcgccgttctggtaaaaagctggaagatggccctaaattcttgaagtctggtgatgctgccattgttgatatggttcctggcaagcccatgtgtgttgagagcttctcagactatccacctttgggtcgctttgctgttcgtgatatgagacagacagttgcggtgggtgtcatcaaagcagtggacaagaaggctgctggagctggcaaggtcaccaagtctgcccagaaagctcagaaggctaaatgaatattatccctaatacctgccaccccactcttaatcagtggtggaagaacggtctcaaaactgtttgttcaattgg

SEQ ID NO: 7571 - DNA, 187 bp, Homo sapiens
ctgtccaactgcagcggctacgtgtttccatggagacaaacttggtgtctcaagttcagggcttcgaaagtcccgaatatttgtttgtcccgagagaagagttttgactttgaagaggtccaggtgggactcgctgggggtggggtgctccgggattagttcagagggaggtgttctggaagactcc

SEQ ID NO: 7572 - DNA, 281 bp, Homo sapiens
  unsure (274): n=A,T,C or G
  unsure (276): n=A,T,C or G
ccattgatcttgaatttgccctctcctagtgctgcagtcccacttcaaagccattttctgaggaggatggtttaggtctggcaattgtccttgaaaaatcccacccatgttgtaccaccttggtgagtcatatgccactcatcagcttgggaatgatggctgccaactcccaatctcccaggaaggcagggggcagaatctttttttcacttggcctgctacctccattaaaaaaccattctcttacagtttaaaaaaaaaaaaaaaaaaaaangntttcc

SEQ ID NO: 7573 - DNA, 336 bp, Homo sapiens
ccacttcaccagaacctctgtgtcagaaaaatttctcttccttttaaaatgatgagggggaactttcagacagtgtctgattagggtgggtggagagaggggcttcctagaaagtcaggcagggcagggctgaagccctctgggttaactgagtgcttttgatatgaaggcaggtaagactggacaggtgggggtgttagtgaggggatggtgtagggtgtgctgaagaactccacttgagctctgcacaccagggaaaatgaccataaaacatcccatcttcactgctcagagaaggctagatctgctgtgagctagaaagccatgtgggggcag

SEQ ID NO: 7574 - DNA, 495 bp, Homo sapiens
ctgtgaagcatacataaataaatgaagtaagccatactgatttaatttattggatgttattttccctaagacctgaaaatgaacatagtatgctagttatttttcagtgttagccttttactttcctcacacaatttggaatcatataatataggtactttgtccctgattaaataatgtgacggatagaatgcatcaagtgtttattatgaaaagagtggaaaagtatatagcttttagcaaaaggtgtttgcccattctaagaaatgagcgaatatatagaaatagtgtgggcatttcttcctgttaggtggagtgtatgtgttgacatttctccccatctcttcccactctgttttctccccattatttgaataaagtgactgctgaagatgactttgaatccttatccacttaatttaatgtttaaagaaaaacctgtaatggaaagtgagactctttccctaatttcagtttagagcaacttgaagaaga

SEQ ID NO: 7575 - DNA, 526 bp, Homo sapiens
ccaactaggtagacaaagccttatgtttttccattgttctgtatgaaccaggaggatcacggctcgtattggttcctgctatgcacagcttgattaatgggtaaggtgtactccatatctacaaaccttcaggtagtttacagacattcttggtgcacccctaactatgccagatcattggctgggcactaaagatacaggtggagtaaaaaattaattgtcaaaataactggctaatttaaaatttacaattgcctagaagaccatctttgatgttaagaaggaacaattaagtaaatactaggatggcaaacaggttccataatttcattttgttgagacaacagttttgctcatgtcaccaggctgaagtgcaatgttgtgatctctgctcactgcaacctccacctcccaggttcaagcaattcttgcctcagcctcctgagtagctgggattataggcatgcaccaccatgcccaggtaatcttggtatttttagtacagatggggtttcactgtgttggg

SEQ ID NO: 7576 - DNA, 337 bp, Homo sapiens
ctgcagaggccacctggattgcgcctaatgtgtttgagcatcacttaggagaagtcttctatttatttatttatttatttatttatttgtttgttttagaagattctatgttaatattttatgtgtaaaataaggttatgattgaatctacttgcacactctcccattatatttattgtttattttaggtcaaacccaagttagttcaatcctgattcatatttaatttgaagatagaaggtttgcagatattctctagtcatttgttaatatttcttcgtgatgacatatcacatgtcagccactgtgatagaggctgaggaatccaagaaaatgg

SEQ ID NO: 7577 - DNA, 509 bp, Homo sapiens
  unsure (475): n=A,T,C or G
  unsure (509): n=A,T,C or G
ccaccctcagggttcaaagagactggcccaggggtacacaattgctggaatattctctgcgagtcatgcacacgtgcgggggtgaggtgcagttatatggtgacacacacagtgttactgtgagctctcagggtgcacagagggcaggtgacaagggcatcagctaatctgtcccacctggtccagcccatccagttcaggggcatcaagggggctgaggccccggtagccactgtagaccctgtgactatcactgacaccgtcactgggctccattgggcaaatgtagtccgtcgattcatcgaacttcttttttcttatgtttccgaagtgtgaaaatcctagtttccttggccggactttggctgtggtggtcagtgggtgtgtaagctggtgaggccattttctctcgcttttcctgttcagcctccggaccaatcaaggcattgaacttggtggtcaggtggcgcctgangagcgtcttttgtggggggatgttgagaacatan

SEQ ID NO: 7578 - DNA, 446 bp, Homo sapiens
ccacagctaacatcattgcagcacctttactccttcggctttttgccagcaccaacattggcctttgcagtccccctgactttcttcattctgttcttgcgttcctttcgttgctttcttgaggtctttttcttctcatacaggccatgtcttgcaagtctatgtttgggttcatttttctttgcataatccagggaatcataaatcatgccaaagccagttgtcttgccaccaccaaaatgagttctgaatccaaatacaaagatgacatccggtgtggtcttgtacattttggctagtttttcccgaatttctgtcttaggcactgtcgccttcccggggtgaaggacatcaatgaccatttgtttcctctgaagtagtcggttggtcatgaactttctagtgcggatagttacggtgtcgttcatgatggcgatctatcttca

SEQ ID NO: 7579 - DNA, 507 bp, Homo sapiens
  unsure (1): n=A,T,C or G
  unsure (79): n=A,T,C or G
  unsure (94): n=A,T,C or G
  unsure (105): n=A,T,C or G
  unsure (138): n=A,T,C or G
  unsure (145): n=A,T,C or G
  unsure (169): n=A,T,C or G
  unsure (399): n=A,T,C or G
ncgaggtaaaaagagtgttgcctccaaaaccgaagttaaaaaaacccgacgaccaagatctgtgctgaatactcagccntaacagaccaatgcnggggaggtggnctcctcactctcaagtactgaaattcggagacntagccanaggcggcacacaagtgcggaagangaatagccacccgcctgttaaaatagcctggaaaactgcggcagcaaggaaatccttaccagcttccattacgatgcacaaagggagcctggatttgcagaagtgtaacatgtctccagttgtgaaaattgaacaagtgtttgctcttcagaatgctacagggggatgggaaatttatcgatcaatttgtttattcaacaaagggaattggtaacaaaacagaaataaantgtcaggggggcaagacaggcttataatttctacaccaaaccagagaaatgaaaagccaacgcagagtgtatcatctcctgaagccaccttctggttctacagggctc

SEQ ID NO: 7580 - DNA, 561 bp, Homo sapiens
  unsure (490): n=A,T,C or G
  unsure (536): n=A,T,C or G
ccaccatgcacatttccaacacatgcacactcacagccctgaaaacagtgttaggtttcagttaatacatttattacagcaggtctttagtcattattgccattaaaaagttttcatgaaatttcacaaaatcttttaggctattagtattagctttctttttatggagtgacactttgttaatttatgaaatatttacagcatttacaaaaagtaagagaatgtctaataaaatttcttatacttacaaaattcatacattatactactgtatttgagatgtcttacttggtagaccaattaaactatgacataaaataatttacaaagatatatttaatctttcttaattcattgaaaacaaaaccatattagttataaatagtcctttacaaatcattgtaaaacacttcattgttttaactcgagccttagcttttacaaatatacttaataaatgaattagttcagatagcaaatagaactgtgnatttaaaatttcacttaatactataaaaacaaaacacctgaaaaancaaacggcctggtacttcaagtaaa

SEQ ID NO: 7581 - DNA, 473 bp, Homo sapiens
ctgctcatcgtgggcgtctcggctgccatctacagcaagggctacggccgccccagatactgctggttggactttgagcagggcttcctctggagcttcttgggacctgtgaccttcatcattttgtgcaatgctgtcattttcgtgactaccgtctggaagctcactcagaagttttctgaaatcaatccagacatgaagaaattaaagaaggcgagggcgctgaccatcacggccatcgcgcagctcttcctgttgggctgcacctgggtctttggcctgttcatcttcgacgatcggagcttggtgctgacctatgtgtttaccatcctcaactgcctgcagggcgccttcctctacctgctgcactgcctgctcaacaagaaggttcgggaagaataccggaagtgggcctgcctagttgctggggggagcaagtactcagaattcacctccaccacgtctggcactgg

SEQ ID NO: 7582 - DNA, 573 bp, Homo sapiens
  unsure (392): n=A,T,C or G
  unsure (538): n=A,T,C or G
ctgaaaaatcctcagtgcaagaaggcaatagaggtgatagattcagagtatatttaggaggtagaccagcctagcagatattgttaggaccccacatatgtccctcactgttcccatgccctttacagcttgcccctgcaagtatctctgagtctttacctgaagacactaaggtttggtttgtacaaagggtaagccaagaattaccagggagttagcatccctggcagtggtcctcaaccagtgtcagatggaagtcagtggataaataccccaggtttgcttgcccttcaaatgggacagttctgaggaatgctttaggcagaggactcagatggcagagtgccaaccgcccacagtggaaacctgctcattaacataccccatactanctctcttcccttcctggtttcatttccccattctcatatcggtatttcctggaatcatctcccatataaactgcttgcattcagatctttgtctcaaagtccactttgtgggaacccaacttgagacaaacagaaaaaacttttanacaagtagatgatgaaaaatgaagactcaaatatg

SEQ ID NO: 7583 - DNA, 320 bp, Homo sapiens
ctggctgtgcaagaccctggcagggccctcgcctcctgagaaaccgagagtcagaaccaaagccaggctgtcctggttggagactgagccagaaagggtggctcacctcacggtgaggctgtcgagtgacctgagaacctcagaccctcacgtcagccggatgtcgcaccagcctgctgttgccaccaaaatgccagaagagatggacaagccactgatcagcctccacctggtggacagcgatagtagccttgccaaggtccccgatgaggcccccaaagtgggcatcctgggtagcggggactttgcccgctccctgg

SEQ ID NO: 7584 - DNA, 252 bp, Homo sapiens
cctgactgaagtgcttcccacactccccacatgtatagggtttttctcctgtgtgcaccctctgatgcatgtcgaggttcaagctccacttgaagccctttccacactccccacatttgtatggcttttctccagtgtggactttttgatgggcttgaaggtgtgcactccgactgaagctcttcccacactcttcacatttaaatggtttttccccactgtgaactctctgatgggttagaagatgcgagg

SEQ ID NO: 7585 - DNA, 526 bp, Homo sapiens
catttcaaaaccataagctctagccagaaaatcagtagatgaggttgttgtttcgttaatttctgctgttgaagaattcttgttagagtcttgttcagttatggtttgtggtctactagtctggatttcttctgcccacctgacagtctgattttgaggatgtcccgatgtccgtggagaaagggagaggtgccaccgtgggtccttctgctccagtgtcacttaaaatttctattaatgttgtgctggttactgacccactaccttcaaagatgtctgtttgagatacgagtggtccaacttcttttgccacattttccattctgttatagtcttcaattttgtcacttgaggtactttccacttgagaagtgtggggatataatgtgttattgatttgttccacttcagtaaaattcactgactctgttggtagagtaggtaaaacttcttctcctgatcccagtccagagaataagactcagtatctgactcttgaattgttggcctcatgcctttcggaaaa

SEQ ID NO: 7586 - DNA, 391 bp, Homo sapiens
  unsure (382): n=A,T,C or G
ctgccgctgctcgttgttttttctgcaatgatatttgggactattacaaatcaagatctgcctgtgatcaagtgtgttttaatcaatcataagaacaatgattcatcagtggggaagtcatcatcatatcccatggtatcagaatccccggaagacctcgggtgtgcgttgagaccccagagctcagggacagtgtacgaagctgccgctgtggaagtggatgtatctgcttccatcacactgcaagtgctggtcgatgccccagggaacatttcctgtctctgggtctttaagcacagctccctgaattgccagccacattttgatttacaaaacagaggagttgtttccatggtcattttgaaaatgacagaaacccaanctggagaat

SEQ ID NO: 7587 - DNA, 452 bp, Homo sapiens
cggcaggaagcaggacatcggcgacatcctccaccagatcatgaccatcaccgaccagagcttggacgaggcgcaagcaaagaaacatgccctgaactgtcacagaatgaaaccagcgctcttcagcgtcctgtgtgagatcaaagagaaaacaggcatgtaatgaatttactacacatgtgatgaaccttctccgagaacagagtagaacacgtcccatttctccaaaagagattgaaagaatggtgggcatcatccatcgaaaatttagttccattcagatgcagctcaaacaaagcacttgtgaagcagttatgattttaagatcaaggttccttgatgccagacggaaaaggcgtaacttcagtaaacaggccacagaaatcttgaatgaatatttttactccacctcagcaacccctaccccagtgaagaagccaaagaggagctgg

SEQ ID NO: 7588 - DNA, 542 bp, Homo sapiens
  unsure (4): n=A,T,C or G
gggncgaggtccacaccataagtcaggggcaaactggaactgtgggaaggagctgcagcctgtacttccccttcagttagagcctgaagctggaggagcttctttagcaagtacctgagatcaggaaggaaaggagcagagaaatgaacttccgtattgtctcaattcagtattttactcaagtactgggaaaagccagaattatatacaaagattactatactcataaaagaaaggttcttattaggccctatgaatcataaagccctggaggataatcaatacttcaagaggccaaggataagaactgtagcttatctcttgcatctggacggttcctctaccttgatgttggacggtgttaggcttctgaaaggcacattatttacacatgtatatatacccattgtgctttgcacagaatagtacgtacagaataaatatttgtagaacgagaggcagttgcttttatcacttggcttttataattgggccataagattaaataatcttagtaagattatttattagatgtggcaaga

SEQ ID NO: 7589 - DNA, 545 bp, Homo sapiens
  unsure (1): n=A,T,C or G
ncgaggtggccctttaaatttgtaaattaaactttaatttcttcctaagttataatattgatgtaatcacagaccggacacactagttttagcattctaatccatctgttaaaattatgttgtttgtgcatcacctgaaattgccatgggtactgctggtagtgtgcttacccctcactgagaaatacttacctctgctttttgctatgtggagttgaatagtgctgaaggctgcattaactcgttcagatggcagttcttcccatataatgtataacatctttgttactctacttagcaccttagtgaatacagagatggctgtacagcctccagaaatgctaagttggttggttgtatatggaaatctctgttaatatttgggacaaaccctgggaataattgtgtgagcaaacttatttactaaagaactgcattgctaattatggacttgttgacaccagtggagcccaggggaagaagttgtggttttgggcaaggggttctttcttatcaacttcaaacttacagggtgaagttagcca

SEQ ID NO: 7590 - DNA, 287 bp, Homo sapiens
ctgttcttggaggtcctgcccctgggacttgtccggctcatccggagtgaggagggcctggagatgctcattcaatgagcgggaggcatctctcccttcccgtaacttctcctttaactgcgtcagctctcgttcctgagagtgaaccaggactttatattgcctgagctcctcagcttgcttgagctgctctgcaagcttctcctccttgaactgtcgctcattcctcagcataaattttatgaggtctttacactcttcatacttgtatttcttctgtcggttgg

SEQ ID NO: 7591 - DNA, 579 bp, Homo sapiens
  unsure (1): n=A,T,C or G
  unsure (4): n=A,T,C or G
  unsure (550): n=A,T,C or G
nggncgaggtgtctccagggccagtgtctgctgcgatcgagtcccaccttccaagtcctggcatctcaatgcatctgggaagctacctgcattaagtcaggactgaggtgaactccagaaagaagaagctatggccgcagtgattctggagagcatctttctgaagcgatcccaacagaaaaagaaaacatcacctctaaacttcaagaagcgcctgtttctcttgaccgtgcacaaactctcctactatgagtatgactttgaacgtgggagaagaggcagtaagaagggttcaatagatgttgagaagatcacttgtgttgaaacagtggttcctgaaaaaaatcctcctccagaaagacagattccgagaagaggtgaagagtccagtgaaatggagcaaatttcaatcattgaaaggttcccttatcccttccaggttgtatatgatgaagggcctctctacgtcttcttcccactgaagaactaaggaagcggtggattccccagctcaaaaacgtaatccggtacaacagtggatctggttcanaaatatcacccttgcttctggatcgatgg

SEQ ID NO: 7592 - DNA, 393 bp, Homo sapiens
ctgtgaagcatacataaataaatgaagtaagccatactgatttaatttattggatgttattttccctaagacctgaaaatgaacatagtatgctagttatttttcagtgttagccttttactttcctcacacaatttggaatcatataatataggtactttgtccctgattaaataatgtgacggatagaatgcatcaagtgtttattatgaaaagagtggaaaagtatatagcttttagcaaaaggtgtttgcccattctaagaaatgagcgaatatatagaaatagtgtgggcatttcttcctgttaggtggagtgtatgtgttgacatttctccccatctcttcccactctgttttctccccattatttgaataaaagtgactgctgaaa

SEQ ID NO: 7593 - DNA, 439 bp, Homo sapiens
gcaccggcatcggctgacactgctgcctccagctagttatttcgtcctcttccgttcttcacccctacaccttggaggtgaacttctcacctgagggctgtaaagactcgtttgaaaatggagagccaagaaccaacggaatcttctcagaatggcaaacagtatatcatttcagaggagttaatttcagaaggaaaatgggtcaagcttgaaaaaacaacgtacatggatcctactggtaaaactagaacttgggaatcagtgaaacgtacaaccaggaaagagcagactgcggatggtgtcgcggtcatccccgtgctgcagagaacacttcactatgagtgtatcgttctggtgaaacagttccgaccaccaatggggggctactgcatagagttccctgcaggtctcatagatgatggtgaaaccccagaagcag

SEQ ID NO: 7594 - DNA, 473 bp, Homo sapiens
cgaggtcctggacctgtgtaaaccttcaaacactcttttttacattaggtcatgaagttaaattttttactgtttctgtgctacagactcttcaaaggaaaatagttaagtcaatttcaaagaaaatgaccagcacatttttaaaacattagaaatgatttgactttgactatctactgccaaaaaaaggttaaggaatttgtaatgagaagctaaaaactttaaggaattttaaggaactcaaaacaaaaactcattaaatgtaattaaagtgaattctacaaataaagcctcttaatacatttctataatagtcacttaagacttaaattcaaacactagcaaaccacaaaatcagactgtatgactgacatccaaaagataaatataaatcaaaatccgaccccagcattagccaagggggtaggtgttcctcttgaggaaggcaggaattcctcttctgcccctgttgg

SEQ ID NO: 7595 - DNA, 336 bp, Homo sapiens
gcgtgccctctggagaaggccctggatgtgatggtgtccaccttccacaagtactcgggcaaagagggtgacaagttcaagctcaacaagtcagaactaaaggagctgctgacccgggagctgcccagcttcttggggaaaaggacagatgaagctgctttccagaagctgatgagcaacttggacagcaacagggacaacgaggtggacttccaagagtactgtgtcttcctgtcctgcatcgccatgatgtgtaacgaattctttgaaggcttcccagataagcagcccaggaagaaatgaaaactcctctgatgtggttggggggtctgccag

SEQ ID NO: 7596 - DNA, 366 bp, Homo sapiens
ccattttaccagataattatttcagtgaatttgaatttagtgtatttgtcacttaaggaagcttataggcttgggccatatacttcttttttggatatgttaaagaaaaaaaatgttttaggcttgttgtacccctgaagttggagcattgagaactttgtttatatttgtatattaaaattgttcccacccccaaattattaaattggtgattaccttttttccctctccaggaagtatttatccatgtagataatacgttttgaagggctttggatatcaggggctgtgtatgaatccctatcttgtcaaagaaattatttttttaaaactttattttgaatttttataattctagttattcag

SEQ ID NO: 7597 - DNA, 519 bp, Homo sapiens
  unsure (1): n=A,T,C or G
  unsure (4): n=A,T,C or G
  unsure (439): n=A,T,C or G
  unsure (499): n=A,T,C or G
nggncgaggtccaagaacctcttccaccgggccatttctgagagtggcgtggccctcacttctgttctggtgaagaaaggtgatgtcaagcccttggctgagcaaattgctatcactgctgggtgcaaaaccaccacctctgctgtcatggttcacttgcctgcgacagaagacggaagaggagctcttggagacgacattgaaaatgaaattcttatctctggacttacagggagaccccagagagagtcaaccccttctgggcactgtgattgatgggatgcttgctgctgaaaacacctgaagagcttcaagctgaaaggaatttccacactgtcccctacatggtcggaattaacaagcaggagtttggctggttgattccaatgcagttgatgagctatccactctccgaagggcaactgggaccagaagacanccatgtcactccttgtggaagtcctatccccttgtttgcatttgctaaggaacttgattncagaagcccctgagaaaata

SEQ ID NO: 7598 - DNA, 449 bp, Homo sapiens
  unsure (12): n=A,T,C or G
ctggagagtgtngatcccaaaaattacccaaagaagaagatggaaaagcgatttgtcttcaacaagatagaaatcaataacaagctggaatttgagtctgcccagttccccaactggtacatcagcacctctcaagcagaaaacatgcccgtcttcctgggagggaccaaaggcggccaggatataactgacttcaccatgcaatttgtgtcttcctaaagagagctgtacccagagagtcctgtgctgaatgtggactcaatccctagggctggcagaaagggaacagaaaggtttttgagtacggctatagcctggactttcctgttgtctacaccaatgcccaactgcctgccttagggtagtgctaagaggatctcctgtccatcagccaggacagtcagctctctcctttcagggccaatccccagcccttttgttgagccagg

SEQ ID NO: 7599 - DNA, 359 bp, Homo sapiens
ccaaagaatttgttacatcagcaccaaaaccatctgacttgtattatgaaccttctggagaaggatctggagaagtggatattgttgattcatttcacacttctgcaactactcaggcaaccagacaagaaagcagcaccacatttgtttctgatgggtccctggaaaaacatcctgaggtgccaagcgctaaagctgttactgctgatggattcccaacagtttcagtgatgctgcctcttcattcagagcagaacaaaagctcccctgatccaactagcacactgtcaaatacagtgtcatatgagaggtccacagacggtagtttccaagaccgtttcagggaattcgaggattcc

SEQ ID NO: 7600 - DNA, 250 bp, Homo sapiens
  unsure (10): n=A,T,C or G
  unsure (89): n=A,T,C or G
  unsure (100): n=A,T,C or G
  unsure (145): n=A,T,C or G
  unsure (179): n=A,T,C or G
  unsure (219): n=A,T,C or G
  unsure (237): n=A,T,C or G
  unsure (244): n=A,T,C or G
ccaagacggnctcaatctcctgacctcgtgatctgcctgcctcggcctcccaaagtgctgggattacaggtgtgagccactgcacacanccaaacattanactttcaaaccaaatttagatatagtgtttataagaactcgtggngtatctcttcaaaacctggcatcttgaaaccaanatctggtaaacagaaacatcagtatgggggcctttgatangggaatactgaattgcangcctacncagcga

SEQ ID NO: 7601 - DNA, 380 bp, Homo sapiens
ccaaagcacacatatcggcttttctcactatatatctaaaattgctattgaggaaagtaggccaaatttcaatgagagctatttgaagaagggagagagaaattactttcacctgactgaaagaagtggtagaggtgtacatagctttttattcttaattatctagtctggcaaaagacagtaatctcaaatacaacaatacactctaagaaaaggttcccctcccggctctcacaacgtctcccttcctaataaattttaaaagcataagggtcacagggccagttacatagtatgtattcaataagatttgttaaatgaatggcacttcaagttcttattaagaagctaggtctcttttttccccctatccttcccaa

SEQ ID NO: 7602 - DNA, 297 bp, Homo sapiens
cctttgtatcagggcaggtctcctgcagagtcttctctttgtcatgggagaagcttcattgtgcgttgaggctacttctgtgttattgaggagtctgggcttttttctgataccacgtttcttttctttcctgggccattgtagcaagacactaagggcgactaccagaaagcgctgctgtacctgtgtggtggagatgactgaagcccgacacggcctgagcgtccagaaatggtgctcaccatgcttccagctaacaggtctagaaaaccagcttgcgaataacagtccccgtgg

SEQ ID NO: 7603 - DNA, 248 bp, Homo sapiens
ccatcatctccaactctttaccccaacctggcaccttgtagggggctagaagggtgaggggaggtgtctttcacttatgcttaggtcactcttagaggactatcctcaaacttgaggtgacagggaactcttcacgggggcaggatttgatgttttgtttttagccatgtttgtcaatgacaatgtcaatttctagttccaatttgtacccttgtctcatttctacattaaaaacaaaaaacaatcat

SEQ ID NO: 7604 - DNA, 167 bp, Homo sapiens
  unsure (32): n=A,T,C or G
  unsure (34): n=A,T,C or G
  unsure (154): n=A,T,C or G
ccaagaacctcttccaccgggccatttctganantggcgtggccctcacttctgttctggtgaagaaaggtgatgtcaagcccttggctgagcaaatttctatcactgctgggtgcaaaaccaccacctctgctgtcatggttcactgcctgcnacagaagacggaa

SEQ ID NO: 7605 - DNA, 384 bp, Homo sapiens; identical to SEQ ID NO: 527

SEQ ID NO: 7606 - DNA, 333 bp, Homo sapiens
  unsure (287): n=A,T,C or G
  unsure (292): n=A,T,C or G
  unsure (296): n=A,T,C or G
  unsure (313): n=A,T,C or G
  unsure (322): n=A,T,C or G
  unsure (332): n=A,T,C or G
cgcgtggatggatacagagcggcttctacacggcgccatcaacattctctttatgaacgtgagtggattctccaggcaaactatgcactatttcatggtcggaaagaatcaaaggaagtttaaatgagggtggagttaaactgtgctaaattacagtagtgcttattagtaactagatttcaaaaggttacagaaaatttacattctctacacaaaaactgcatctcctgcacagacaacatcgacatcgacacaggaaggaaactgattgtccattctttgcccangaagnctcngtactttatagattcgnctttacctnttttttgttnc

SEQ ID NO: 7607 - DNA, 127 bp, Homo sapiens
  unsure (117): n=A,T,C or G
  unsure (124): n=A,T,C or G
ccatgcaggagttcatgatcctcccagtcggtgcagcaaacttcagggaagccatgcgcattggagcagaggtttaccacaacctgaagaatgtcatcaaggagaaatatgggaaanatgccancct

SEQ ID NO: 7608 - DNA, 207 bp, Homo sapiens
ccactgtgtagcaccttctaattcaatttcatcggcagttgtaataacagttccagcctcaggtgttttaatggtgggaaacatcttgattgcttctccagaaacttgaccataggttttgttttggaaatcttggagaatctcagttccttccacagcaataagttctgtgggagaagcttccatttcttctaataactcaggttt

SEQ ID NO: 7609 - DNA, 169 bp, Homo sapiens
  unsure (169): n=A,T,C or G
ctgtgctgccctgggtcctggataaaccaaaatgctttggattctggaaaacgtattgaagaggcatttataccactattaactaggaggtattttaggtgtggctaaggctctgaagtaatctcaattttcaaaatactgagattttcttccctctccggggtctatn

SEQ ID NO: 7610 - DNA, 212 bp, Homo sapiens
  unsure (140): n=A,T,C or G
  unsure (142): n=A,T,C or G
  unsure (162): n=A,T,C or G
  unsure (196): n=A,T,C or G
  unsure (204): n=A,T,C or G
  unsure (205): n=A,T,C or G
ccagtgtatggaatggtatacgatgagcacctgcccccctgaaaattgttcaggctactgtacctgtagtcattgcttggagcaaccaggctgtggctggtgtactgatcccagcaatactggcaaagggaaatgcatanangattcctataaaggaccagngaatatgccttcgcaagcccctacaggaaattantatccacnncccctgc

SEQ ID NO: 7611 - DNA, 312 bp, Homo sapiens
ccaaagctctgtgtcccagatggtgtatggcccataatccacccaacagcagcaaaggaccaggcaaaggagaacaggagcagaagcctcccagccactagccttttgggctcagtctctccaataatcctggagaggggcttcgttgggtctggacacctaccatgcattctgtgacctttccctagcttccaataaataactgtttgacgcccagagtacaggataccacaatgcactcttcctgcgtagagcacatgttcccatctgctcccattcctcaggaaccttgaattctactctgctggcctt

SEQ ID NO: 7612 - DNA, 313 bp, Homo sapiens
ctggggaaagggttgcagcagcaaggcatccgtggccgcattcagaggctggcccccctccttgcctttactctcgagtcttacttaacctaaaagacaaactgggtcaacttggtaaatgaacacagtcaaagacttagccataagaggtaagggaccagtcaatactcccaaggctggttaggcccttcaacatgtaggtggatgtgtatatgtatacatcgctacactaacatacagatctagccctatgggtatatatacgcatttatggctatatagaaaaactatgccaatactaaccacacagaac

SEQ ID NO: 7613 - DNA, 374 bp, Homo sapiens
  unsure (13): n=A,T,C or G
  unsure (50): n=A,T,C or G
  unsure (74): n=A,T,C or G
  unsure (78): n=A,T,C or G
  unsure (100): n=A,T,C or G
  unsure (101): n=A,T,C or G
  unsure (121): n=A,T,C or G
  unsure (140): n=A,T,C or G
  unsure (142): n=A,T,C or G
  unsure (150): n=A,T,C or G
  unsure (198): n=A,T,C or G
  unsure (207): n=A,T,C or G
  unsure (267): n=A,T,C or G
  unsure (282): n=A,T,C or G
  unsure (289): n=A,T,C or G
  unsure (366): n=A,T,C or G
ctgttggtgttancagtgctcttgccgcttggggcattgccattgtaaanacttgggaaatccctagaaatganccantatatgcgcttttacattttanntggagaaataaacatatgancatatatttcattacacananaaaaaganagctaggcttggccatgaacattcctttatcttcctacttaatgatanggaaatttnatggtcttctgatgggaaataccctcctgatttgcttcctgtcatcatagagatggaggngcttcatcctatggngagcggnatcagctcactcaaaggcggtaatacggttatccacagaatcaggggataacgcatgaaagaacatgtgagcaaaangccagcaa

SEQ ID NO: 7614 - DNA, 290 bp, Homo sapiens
ttttcacacttctagtaagcctctacctgcacgacaatacatgaagtgtgaaaacgtaggcttggattaaggcggcagcgatttctaggatagtcagtagaattagaattgtgaagatgataagtgtagagggaagggcttctatttcgaccgcgatgatgtggctctggaaggcgtgagccacttcttccgcgaactggccgaggagaagcgcgagggctacgagcgtctcctgaagatgcaaaaccagcgtggcggccgcgctctcttccaggacatcaagaagccag

SEQ ID NO: 7615 - DNA, 159 bp, Homo sapiens
ctgagggaccagctctacttccacctggagttgcacagtctcaggctgggggcctcaggagaggtcacagcccctcagtctcttctccttcccctgcctgcaacaggctgcctgccccgccttccccaacacctcgctccatatgatagagcgtggcag

SEQ ID NO: 7616 - DNA, 263 bp, Homo sapiens
  unsure (137): n=A,T,C or G
  unsure (166): n=A,T,C or G
  unsure (248): n=A,T,C or G
  unsure (260): n=A,T,C or G
ccacactctacttctgcttctgccacctatggggtcgaggcaggtgtggtgccttggctaagtccacagacttctgagaggcccacgctttcttcttctccagaaataaaccctgaaactcaagcagctttaatcanagggcaggattccacgatagcagcatcanaacagcaagtggcagcgagaattcttgattccaatgatcaggcaacagtaaaccctgtggaatttaatactgaggttgcaanaccaccattttncct

SEQ ID NO: 7617 - DNA, 252 bp, Homo sapiens
  unsure (226): n=A,T,C or G
  unsure (246): n=A,T,C or G
ctgatcaggtcgaggtaacccaagaggacatgcagccctggacgccacgagaaatcctgttgtctgtcagttgagtggatcaaaggtgcaccggcccagaaatggcctccagcaacaggtgcttagatgttctgttctaggggtgccagcgagatggtacagtcattgtttaccactgccttttcccatgaaaacaacgaacaactccatggggacaggaatttgncttttattctttgccatatncccagt

SEQ ID NO: 7618 - DNA, 317 bp, Homo sapiens; identical to SEQ ID NO: 664
  unsure (268): n=A,T,C or G
  unsure (278): n=A,T,C or G
  unsure (284): n=A,T,C or G
  unsure (310): n=A,T,C or G

SEQ ID NO: 7619 - DNA, 317 bp, Homo sapiens
  unsure (306): n=A,T,C or G
  unsure (313): n=A,T,C or G
ccattctgtctagctgtaaagttaggctgtgctatccaaaagagctttactttagagtcatgagaagcagcactgatctttgcaaaacttaccccaaaaaatggggagagagaaaaacaggaagaaaagtctctttcttaggctaccagtcagttaacaaagtatcttagattaagatttggaaaccaaagaatgcataattaggagtgtaccatatcatgcaaagtctatgaaatactaaataaggtaaaacagttaatcatttaaagcacgatgagcaaattctcttatcatacggctattctnatcccgnacga

SEQ ID NO: 7620 - DNA, 287 bp, Homo sapiens
  unsure (265): n=A,T,C or G
ccagaaaagatgaaatatttgaacttatccagcacacgaatacacagtgtaacaggctgcattcccaagacactggaaattttagatgttagcaacaacaatctcaatttattttctttgaatttgccgcaactcaaagaactttatatttccagaaataagttgatgactctaccagatgcctccctcttacccatgttactagtattgaaaatcagtaggaatgcaataactacgttttctaaggagcaacttgactcatttnacacactgaagactttggaagc

SEQ ID NO: 7621 - DNA, 196 bp, Homo sapiens
  unsure (44): n=A,T,C or G
  unsure (135): n=A,T,C or G
  unsure (151): n=A,T,C or G
  unsure (172): n=A,T,C or G
  unsure (173): n=A,T,C or G
ctgcatggctcccgctctccctccttcaagtctctgctcaatgncacttcattaaaggcaccttctataaactaccttgtataaaatattatttattttctctatcccggcattctaatttctcttatcctaatnaattgttctttagccnttattttgatgactattatgnntgaatacaggcagccctcacttt

SEQ ID NO: 7622 - DNA, 288 bp, Homo sapiens
ctgctcccaaatggcgaattttttttcaattacctttactggatctgccaagtttgttttgaacaatcctggttcaatgcatgagacgtgcacaccaaaagctttcatgtcccgtcttaagctgtcattgaaaccttccactgcatatttggatggagtatagccccctccaacgattgcaaggcgacctccaacactggagacattaataactctcccttgagctttcttgaccaaaggaagcatatttagtgtcacactgatgagtccaaacaggttcacttcaat

SEQ ID NO: 7623 - DNA, 272 bp, Homo sapiens
ccttgcttactgcctgcaaattttgagaaatttaaaaataagcattctaacacttttattcccacagaaaaattccaagtcaaattatcaaatcaaacacaaaaataagtcttacctcttgtataagcatgttgtactaaaaaaaaattttgaaacattttgtatattggagatctctctcatcttactgttctttgctttaaattcctggcacttctttttactgtctataagagaaaacctatcataagcccaattttttttttccactt

SEQ ID NO: 7624 - DNA, 224 bp, Homo sapiens
  unsure (186): n=A,T,C or G
  unsure (202): n=A,T,C or G
  unsure (217): n=A,T,C or G
cctgagccaccgtgccttgccacaaactatttttaatcattaaaaaagaaaaaggaaaataaggcaggccggcttctcacattacatgcttttagaaaaaggtctcatccttgaagcagctttgttatatgcagagcacagtactggcttcaaaaaatatataaaggttctgtgcactggcactgnttacatgtgaacaatngccatcaacttctgngaaaatt

SEQ ID NO: 7625 - DNA, 275 bp, Homo sapiens
  unsure (274): n=A,T,C or G
ctgctatgcaaagttctaaggcccgagtcaaatcctgggcatctccacagatgtgtggtagggcacgggctccagctcttgtgtaagaaagaacaggaatgagaacagctttattttgtagcgccaaggtctcactatgctcacacctgtaatcccagctttgagaagaggatctggcaccagaagggtctggtagaagaaagtgggaaaggtgaaggacaggaatcttttcctttctgctacaacctaaggacagaggcacatgactccagcna

SEQ ID NO: 7626 - DNA, 121 bp, Homo sapiens
ctgtagagtgggcttatcatctttcaacacgcaggacaggtacagattcttttccttgaggcccaaggccacaggtattttgtcattactttcttctccttgtacaaaggacatggagaac

SEQ ID NO: 7627 - DNA, 357 bp, Homo sapiens
ccacattggagatgtcaccttctgctctcacgcaaccacaattactgaagatgtttgtggtttcttttccagctacatgaatcacccgcaaaagatcaatcactctttccagcaagccagggaaaacctgcagatagccgagcagctcagtattcacagtcatttcgcacaggacgtcgagaagcctaattgtagccagtgcctcctcatcatcaggaggctcctcagaggccagcttgagcacagtcttgcactgatccacaaaggtgcttgcaatcaactcagcatgccgcaaaaacacagggatgtcatccttggtgagtggctcatcactcgttatcttggctatcataaggt

SEQ ID NO: 7628 - DNA, 185 bp, Homo sapiens
ccgggatgatgagaacaataacccagatatccaggatgtgcttgggaagcacgacttccatggggacttggctgactgcatccatgttgcttcactcccagatggcggcgagtctgcggaaagttcctgggtcagggatggctcggtgcttctcagggtccccaggactgcacgggatctggcag

SEQ ID NO: 7629 - DNA, 197 bp, Homo sapiens
  unsure (187): n=A,T,C or G
  unsure (196): n=A,T,C or G
cctatgatttatttgaaggtagcttttgtgtctggtgtgaggtaagggttgaggttctttgtgtgcgtatgaatctccaattgttctaggaccatctcctcaaaatcccagcaatagcttccctttcttttttggcgagctcactacgcttgaaatattttttattttccaccagcaggttcctgtnctccaccana

SEQ ID NO: 7630 - DNA, 246 bp, Homo sapiens
  unsure (238): n=A,T,C or G
ctgcaccatccccctggctgtcttcaatttattccagtttgatcccagtagggtttgagagcagaaatggaagatttcttcttcaaggatcagctcagaaagccgggatgggggcggtcactaaaggggtaggatagacggccagggccactatccctaccctctgtgtgttcctaaagtgcttatgagaggtggtggggaggggtgtcatcttcactatccccactttacggatgancagactga

SEQ ID NO: 7631 - DNA, 384 bp, Homo sapiens; identical to SEQ ID NO: 434
  unsure (361): n=A,T,C or G

SEQ ID NO: 7632 - DNA, 219 bp, Homo sapiens
  unsure (151): n=A,T,C or G
  unsure (187): n=A,T,C or G
  unsure (211): n=A,T,C or G
  unsure (216): n=A,T,C or G
ctggctgtgatttttgctacaggccacagtcaggagcacatgatagtagcattggcacaggccacggtggaccgtttttcagtgtacagttccagcaaaacctggtattctccctgaggaatagtaaattcaggattattgacaggcccancatagtaaatctcctttccttcttccacagaaaganaacttgggcagagccgcctcacanatggnata

SEQ ID NO: 7633 - DNA, 236 bp, Homo sapiens
  unsure (175): n=A,T,C or G
  unsure (234): n=A,T,C or G
ctgttgattactatactattctgtctcttcagtttaattttatgagatgatgccaaatctattttcagcatttttactttttttgccaatctgatatatgttaacagtagttcattattttaaaaattatatattttgtggtcatctttcttccacagtacttttaggcactaangaaaaatgcttctaagtatttctggtgattaccacgttttaagttttcaggaaatcatnta

SEQ ID NO: 7634 - DNA, 325 bp, Homo sapiens
  unsure (305): n=A,T,C or G
  unsure (307): n=A,T,C or G
  unsure (318): n=A,T,C or G
ctgtccattgagaacctggaccagtctctggctcactatggccggcccaagatcgacggggaactcaagatcacctcggtggaacggcgctccaagatggacaggtatgccttcctgctcgacaaagctctactcatctgtaagcgcaggggagactcctatgacctcaaggactttgtaaacctgcacagcttccaggttcgggatgactcttcaggagaccgagacaacaagaagtggagccacatgttcctcctgatcgaggaccaaggtgcccagggctatgagctgttcttcaagacaananaattgaagaanaagtgga

SEQ ID NO: 7635 - DNA, 153 bp, Homo sapiens
  unsure (112): n=A,T,C or G
  unsure (127): n=A,T,C or G
ctggcctgtcatataaaacatactgtcattgagcttaagctccgcttgttctgaggtttcacctccatgtgtttcattggtgcaaaagtggatctcttaactggtcacttanttctttctttttcanaaagatagtatgttcactggtatatt

SEQ ID NO: 7636 - DNA, 197 bp, Homo sapiens
  unsure (30): n=A,T,C or G
  unsure (31): n=A,T,C or G
  unsure (192): n=A,T,C or G
ccatcgtgcctctttgggcttccatgggcnnctacatcaccaggatggcgcagaagtaccatgagtactcccactacaaggagcaggatgggcaggggatgaagcagcggcctccgcggggctcccacgcgccctatctcctggtcttccaagccatcttctacagcttcttccatctgagcttcgcctgcncccag

SEQ ID NO: 7637 - DNA, 326 bp, Homo sapiens
  unsure (322): n=A,T,C or G
cctcctaatcctctgtggttttctgtggactcgtaaaggaaaactaaagattgaagacatcactgataagtacatttttatcactggatgtgactcgggctttggaaacttggcagccagaacttttgataaaaagggatttcatgtaatcgctgcctgtctgactgaatcaggatcaacagctttaaaggcagaaacctcagagagacttcgtactgtgcttctggatgtgaccgacccagagaatgtcaagaggactgcccagtgggtgaagaaccaagttggggagaaaggtctctggggtctgatcaataatgctggngttc

SEQ ID NO: 7638 - DNA, 111 bp, Homo sapiens
gctgccgtgaaggacacacagcctgaggacggggtggaaatggacactcggcagagcccacacgatgaagacccccaggcagtgacgtatgccaaggtgaaacactccaga

SEQ ID NO: 7639 - DNA, 278 bp, Homo sapiens
  unsure (221): n=A,T,C or G
ctgaaggtttttttattctttctttttttaaagtgagcccatgatttggtgtctttcccagattatcccctttgcgacaacacaagcaaaaatatttacaaaggtaaggcatagtcaaactacataaagagaaaaaatcatgaggaaaatacatgaaaaagactaaagacttcgccataacaaggtcttagtgataatagtgtccgtaaagatgtcatcanaattggtaaagtcaaccatgctgcaaatataccctttggattacaaaagagcacaat

SEQ ID NO: 7640 - DNA, 211 bp, Homo sapiens
ctggtattttgcctaagatctatttaagataaccttttcttatattttttacttaatattgggcataatcgtatcattcaagattaagtctgggttatttctttgataagaactgaatgtggccgggcgcagtggctcacgcctgtaatcccagcaccttgggaggccgaggtgggtggatcacaaggtcaggagatcgagaccatcctgg

SEQ ID NO: 7641 - DNA, 273 bp, Homo sapiens
  unsure (161): n=A,T,C or G
  unsure (206): n=A,T,C or G
  unsure (245): n=A,T,C or G
ccagccccactgaggagacacagcagttctaatgggtgactatgctggaggtctggtggtgccggctgtcagaggctaacagtgctgggggtcccctggctttggcttgcagaaggcagcacaagcattccactgatgtttgctgggctttcagcaagcanaaccaagctgtggagacttctatgaaactgactgaattgtttccnatagtttgcattattagtctgggcaatacctcacatctntttcttctccaaatcatattcctatctt

SEQ ID NO: 7642 - DNA, 276 bp, Homo sapiens
  unsure (236): n=A,T,C or G
  unsure (241): n=A,T,C or G
  unsure (255): n=A,T,C or G
  unsure (270): n=A,T,C or G
  unsure (271): n=A,T,C or G
ccactgacaagtttcaggcatagaatgaaaactattcttactgatatcaatgttagtcaagtttttcagagtgagcaaagtctctccggttttttccaatgatgccaaatgattttgccttaaaattaaagtttgtagagagggccaggcatcctcacaggctgaatttttcaagtattcttcaaccatcaaattttcactgagatccaagtattctaatgattttaaatgttgtnaaagnaaacaaggaaccanaaaaactttactgtnntctac

SEQ ID NO: 7643 - DNA, 127 bp, Homo sapiens
  unsure (23): n=A,T,C or G
  unsure (92): n=A,T,C or G
  unsure (104): n=A,T,C or G
ctgtcaaccgggaatactatcgncaacagatggaggaaaaggctccgcttcccaaatatgaagagagtaaccttgggctgttggagagcagngtgggggactcnaggctccccctggtcttgagaaa

SEQ ID NO: 7644 - DNA, 290 bp, Homo sapiens
  unsure (56): n=A,T,C or G
aggtctgactgagggatggctctaaatagcgggctgcccggtcttccaactcccancacagccgcccattctgttcaccccttcaactgtacaaatagccctggttgctttttttgtttttgtttaaaaaaaaagaagactcggtctttgtcattgagtccaggtattttaaaaacaccagcaaaggctataaccaggtcatgaaaatgttgaatattatcaaagacgatactaaaatattcacaaagatatttacaaaagcgattcttaaaataattgatttgcatact

SEQ ID NO: 7645 - DNA, 261 bp, Homo sapiens
  unsure (237): n=A,T,C or G
  unsure (261): n=A,T,C or G
ctgaacgcaaatcagccactttaattaagctaagcccttactagaccaatgggacttaaacccacaaacacttagttaacagctaagcaccctaatcaactggcttcaatctacttctcccgccgccgggaaaaaaggcgggagaagccccggcaggtttgaagctgcttcttcgaatttacaattcaatatgaaaatcacctcggagctggtaaaaagaggacctcggcgacctcngtcgtaccacgctaagtcgaattn

SEQ ID NO: 7646 - DNA, 349 bp, Homo sapiens
ccaagcagtccctgcaaatgggacttacgagtttggttatcagatgcactttatttgtaatgagggttattacttaattggtgaagaaattctatattgtgaacttaaaggatcagtagcaatttggagcggtaagcccccaatatgtgaaaaggttttgtgtacaccacctccaaaaataaaaaatggaaaacacacctttagtgaagtagaagtatttgagtatcttgatgcagtaacttatagttgtgatcctgcacctggaccagatccattttcacttattggagagagcacgatttattgtggtgacaattcagtgtggagtcgtgctgctccagagtgtaaa

SEQ ID NO: 7647 - DNA, 136 bp, Homo sapiens
  unsure (23): n=A,T,C or G
  unsure (59): n=A,T,C or G
  unsure (109): n=A,T,C or G
cgcagcgggattctcacacctanaccgtcgcgagcgggttctcaagttaggggagagtntcgagaatcagccgcgctgcgccttccacactgggcgctatgacttcaancctgcttctattgacacttcttctgaa

SEQ ID NO: 7648 - DNA, 217 bp, Homo sapiens
  unsure (197): n=A,T,C or G
gtttatttcttgaactttcagaaattcaagcttaaagcatcacacgtttttctaatattgtgtggcattttctgtcattttacttttttaacctttatatggaataacaaccatcagccttgtctttcagatgtgccatttgggggtgctaaagctggtgttaagatcaatcccaagaactatactgtaaatatganagtgatacttgttttttttt

SEQ ID NO: 7649 - DNA, 162 bp, Homo sapiens
ctgggggaggggcaggcacatgcattaagccccttccgtaggcagagccatggatggacagccccatgggggccttgaaggcagaggccctggaagcagcaaaaacggggctggataaagctactaatgggagggatggtagagcccagctccccagtcccc

SEQ ID NO: 7650 - DNA, 260 bp, Homo sapiens
  unsure (165): n=A,T,C or G
ctggcagcctgcttcctgcatgtattctctttatcaaccacctatttatgcagtcagcatgcctcacacctgagatgactgtgaaacaaaaaaggagactgttgctcttgccaatttttttccttaaccctgcatctcaaactcgaggcgtatacctaagtaganaaagtcccaccgcaccaaattaaccaaacgattttgttactgtgaaaagtcatctttatgtaacaaatgagaagaatagttatttataaataatg

SEQ ID NO: 7651 - DNA, 138 bp, Homo sapiens
  unsure (115): n=A,T,C or G
  unsure (125): n=A,T,C or G
ctgggggccctcaggtggagagagctgcgatccatccaggccaagaccacagctctgtgatccttccggtggagtgtcggacaagagagcttgccgacgatgccttcctgtgcanagcttgggcntatcctttacgcc

SEQ ID NO: 7652 - DNA, 264 bp, Homo sapiens
  unsure (264): n=A,T,C or G
ctgtgccataagagcattaggtggttttagctcttatctggggtatgaaagcaatttagctcatctcacagaaacaaaagcaggtgctgaatcatgaaaacctcaattatttttagcatgcctcttaatttttctttcccctggtttcttgtcgtctgtgcttgattcttgaacaggtaaccacttgagaggatgccggcgatagatgggccatggaggaagtgtcagcaaacatgaaaaagcaaatccggccataactatatn

SEQ ID NO: 7653 - DNA, 272 bp, Homo sapiens
cgggaaatgactgtctggttttattatggtttataaattaataaatgggctatttaattctgtatataaatttacagcaagtaccgtacactggaataaatgaggcaatcacgttacaccaaatcagcagatcaaaagacaaacacatatttctgagacttgaaggtccacatccccccgccccctgccaagatggagtcttgctttgttgctcaggctggagtgcagtggcgcagtctcagctcactacaacctccatcccccgggttcag

SEQ ID NO: 7654 - DNA, 130 bp, Homo sapiens; identical to SEQ ID NO: 7318

SEQ ID NO: 7655 - DNA, 251 bp, Homo sapiens
  unsure (161): n=A,T,C or G
  unsure (218): n=A,T,C or G
  unsure (235): n=A,T,C or G
gagccatttctaatctttctctggggggaacaggccacagaactgtgttagaggtgaaccatcttaattactagttctattacctaattcagcttccttgtttggtctgctgtggatctgccttattgcatatgccatgcatcacataatggatgcatcanataatggtgttagacaaagcttcattgtgaacaacctaatgcattttacagaaacantctcatcacattttttntagcctttcctacatt

SEQ ID NO: 7656 - DNA, 256 bp, Homo sapiens
  unsure (254): n=A,T,C or G
aacttatggaagcacattaaaagttacataaatattaccagagagcctgatgctctctgatagctgtgccataagtgcttgtgaggtatttgcaaagtgcatgatagtaatgctcggagtttttataattttaaatttcttttaaagcaagtgttttgtacatttcttttcaaaaagtgccaaatttgtcagtattgcatgtaaataattgtgttaattattttactgtagcatagattctatttacaaaatgntt

SEQ ID NO: 7657 - DNA, 345 bp, Homo sapiens
ctgatggaaaacatcagcgtgcatttgggttcctaaatcatttcaaaacattaatcaggaagactcacagcacccagtcctatctaagccatagattcctcatttagggaatgggatgatctcacattcacatgatctgtaagggctctatttatcccagcacagttcaattaggctgaattgcaggaggcataagaaatgataatcaggagagaaattatggcaaaggcagttcaactccctacaaaggggaaaaactacaagctccagaaaggccaagtgccagtccacattacacaatggtatttgccggaacaacaagcagattacagccctgcacggtac

SEQ ID NO: 7658 - DNA, 124 bp, Homo sapiens
cctagaagatgctggaaggtaccaccatctttgttgggaagggaatgcgatgacgagctggaaggttcctgttctcgtctgtaaaatgactgtttgaaggtgaaaaacatccatgttttcttca

SEQ ID NO: 7659 - DNA, 298 bp, Homo sapiens
  unsure (207): n=A,T,C or G
  unsure (259): n=A,T,C or G
  unsure (265): n=A,T,C or G
ggacacactgtgcagtgggtgattcacagcgtgggcccaccttagctgctgctctagagtactgctgttcccactcactaagtgattctttttttaatattctcaaattgatgatgctaagaacatcttcacggattgaaggaagtgcaaaataaggtcaaatcctgagttggcaagtacttctgttcttaagattgtttatactanctggtcttattgttgtaataagtaggaaaaggtccttttcaaatttcattcngcctancttttcctttatgtgataattctttgttcaaag

SEQ ID NO: 7660 - DNA, 188 bp, Homo sapiens
cctgagttcataccctggttctgcatttagcttctgttacctgtaaagacttgaaaaatttactcaacctttctaacctgttctctcataattgtgatgttaattgctagttgaaagaacagcatggtgtatgtgagacatatggaatagtccgtggcagataggagtactcacctatgtatattcca

SEQ ID NO: 7661 - DNA, 284 bp, Homo sapiens
  unsure (161): n=A,T,C or G
  unsure (225): n=A,T,C or G
  unsure (244): n=A,T,C or G
  unsure (249): n=A,T,C or G
  unsure (270): n=A,T,C or G
ccaccccggagatgacacgaggctcacatgactctagacacttggtggaaagtgaggcgagaaaaacaatgacttgggccaattacacgactgcaaagctagagctgccaacagggctccagggagcttggcttctgtagaagttctaaggaagcggtacnaactccacggcggtggggcgctaactagcagggacccctgcaagtgttggtcgggggcctcganctgcctgagctgacacgangggangggtctgcgtagccaacaggngaccgaagggcttg

SEQ ID NO: 7662 - DNA, 246 bp, Homo sapiens
ctgacaaggaaaagatcacatctcttccaacagtgacagtaactcaggaacaagttgatatgggtttagagtgtccagtatgcaaagaagattacacagttgaagaggaagtccggcagttaccttgcaatcacttctttcacagcagttgtattgtgccgtggctagaactgcatgacacatgtcctgtatgtaggaagagcttaaatggtgaggactctactcggcaaagccagagcactgagg

SEQ ID NO: 7663 - DNA, 416 bp, Homo sapiens
ctggaaggacaagcctctggtcaaggtcacattcttccagaatggaaaatcccagaaattctcccatttggatcccaccttctccatcccacaagcaaaccacagtcacagtggtgattaccactgcacaggaaacataggctacacgctgttctcatccaagcctgtgaccatcactgtccaagtgcccagcatgggcagctcttcaccgatggggatcattgtggctgtggtcattgcgactgctgtagcagccattgttgctgctgtagtggccttgatctactgcaggaaaaagcggatttcagccaattccactgatcctgtgaaggctgcccaatttgagccacctggacgtcaaatgattgtcatcagaaagagacaacttgaagaaaccaacaatgactatgaaacag

SEQ ID NO: 7664 - DNA, 208 bp, Homo sapiens; identical to SEQ ID NO: 278

SEQ ID NO: 7665 - DNA, 258 bp, Homo sapiens
  unsure (173): n=A,T,C or G
  unsure (197): n=A,T,C or G
  unsure (198): n=A,T,C or G
  unsure (216): n=A,T,C or G
ctgaaaaatatttagatctacttgctctaagaataaggtcaacattaaacattctcagatgaaaagcttgctggatgaaatagtgcaccatcagaataaagcatgcaatatatttacagtcagatgaaacaagtgtgtccataaatcaaccaaaagaccatctcctcctttangaaatacatgtattgcttagccannaccaataagttaacgtcntgtgaataattttgggtattctggccttcctgaatctcatac

SEQ ID NO: 7666 - DNA, 463 bp, Homo sapiens
ccactggctcaccagcttcccaccctagcattcattgctagcttaccaatcttaaggctaataattttatcgcacattcaacttcaaaacacaccagtgtttaccattaccactaatcactgaatgccatgaagccatggcactgaaccaggagctttcaccttttatgtgaatttaaaatggtactgtggaggctgaggcaattttcttcaggctaacccagattttctaaagcccaacttaaaaggtctacacctgccaaactaaaaaaaacgcagccacttgaaaataaaccagcagagcattgccatcactccgataaagctgcaggtttcatcacatgcaccagacaaatctacagggctagtttcagttctctccttttaaagaatttattaagcctgttataccacacagtatgttttatacactgacatacaactccctaataagataaagcaaa

SEQ ID NO: 7667 - DNA, 279 bp, Homo sapiens
ccacaacaactgacgcggcctgcctgaagcccttgctgtagtggtggtcggagattcgtagctggatgccgccatccagagggcagaggtccaggtcctggaaggagcacttcatctgtttagggccatcagcttcaaagaacaagtcatcctcattgccactgtaataagccatcatttcactggcgagctcaggtacttctgccatggctgcttcagacacttgagcaatgaagattggctgaagagaatcccagagcagcctgttgtgccttgtgc

SEQ ID NO: 7668 - DNA, 448 bp, Homo sapiens
  unsure (5): n=A,T,C or G
  unsure (36): n=A,T,C or G
  unsure (107): n=A,T,C or G
  unsure (136): n=A,T,C or G
  unsure (142): n=A,T,C or G
  unsure (221): n=A,T,C or G
  unsure (222): n=A,T,C or G
  unsure (238): n=A,T,C or G
  unsure (321): n=A,T,C or G
gtttnaataaatgttgtggacttccatttgtcaaanaccaaaacaaaggaaccccaaccttacatgtaatacaaacttaactcaaaatggatcatatatctaaatgnaaaatggaaagctataaaactgaaaacanactatntttacaacctatgcgtaggtatagtttttagacattacaccaaaagcacatgccgtaaaagaaaaaatagataaattgnnggatttcattaaaatnaaaaaactttttctctctgaaaaatcctgttaagctgggcgctgtggttcatgcctgtaatcccagcactttgggaggctganttgggaagaaattaatagcttgaggccaggagttcaagatcatcctgggcagcaaagtcatacactcttgagggaagagagagaccttctcatattgttttatattgttttatactcagtacctgtt

SEQ ID NO: 7669 - DNA, 297 bp, Homo sapiens
ctgtgttggtagtgctgtgttgaattacggaataatgagttagaactattaaaacagccaaaactccacagtcaatattagtaatttcttgctggttgaaacttgtttattatgtacaaatagattcttataatattatttaaatgactgcatttttaaatacaaggctttatatttttaactttaagatgtttttatgtgctctccaaattttttttactgtttctgattgtatggaaatataaaagtaaatatgaaacatttaaaatataatttgttgtcaaagtaaaaaaaaaa

SEQ ID NO: 7670 - DNA, 161 bp, Homo sapiens
  unsure (11): n=A,T,C or G
  unsure (34): n=A,T,C or G
  unsure (156): n=A,T,C or G
  unsure (158): n=A,T,C or G
ccactgcttgngaagctaaaggtggtgaaggcanacacaggcaatggggccaggagcatatgcctttcaattccttcctggcaaccttcctgtcttctcctccactgactcttccctctcatcaccctctctatggtgccaaaataggcttattgnantgc

SEQ ID NO: 7671 - DNA, 388 bp, Homo sapiens
  unsure (361): n=A,T,C or G
  unsure (380): n=A,T,C or G
attggctggaacattttaaaccttttcagcatcgatcctatttaaatactttgtagtacccttcatgagcaatgattaagactacaaaacaaaggaagaggtataataaggatggttcccatctgcctattttcttaatctatttgtctactctggcttccctagattgtgcctgctttctcagaatgaaaagaaaattaataagtgtttcaaaagtatgtactcaagagccagtttgccagagtacacgtcattcttgccattgcttagactggttccacattgtaaaaaaatgtagtgctaatcctgatcaaatgaatatgcctcccacatccatctcccttttacctgttacaattgnctaagactaattctcattnctttattt

SEQ ID NO: 7672 - DNA, 468 bp, Homo sapiens; identical to SEQ ID NO: 435
  unsure (398): n=A,T,C or G

SEQ ID NO: 7673 - DNA, 315 bp, Homo sapiens
  unsure (171): n=A,T,C or G
  unsure (191): n=A,T,C or G
  unsure (204): n=A,T,C or G
  unsure (276): n=A,T,C or G
  unsure (284): n=A,T,C or G
  unsure (297): n=A,T,C or G
  unsure (313): n=A,T,C or G
ccagaaaggaaactgacgagcaggtcacataatcaggagccagactcctgagttgtaactgggcccccaactttccgtgtgattattaaaagagcccttcttcttttctaaaacttagtgccaaatgctgaggagcataatgtaggtgagaatttttttttttgggggggngaaaattaagctaaagcttnttgaagtacctantttccaggggctttttattgtatttttccttatggccctaaaatgacatcaacttggaaatgaagcttttgntgaaaaanctggaggtgatantggtggtgattttggnag

SEQ ID NO: 7674 - DNA, 414 bp, Homo sapiens
cctctctccataccgagccttgctggactctctacagcttggtcctgattccctcacggtccatctgatccatgaggtcaccaaggtgttgctggtgctagagcttcaggggcttcaaaagaacatgactcggttcaggattgatgagctggagcctcggcgaccccgataccgtgtaccagatgttttggtggctgatccaccaatagcccggctttctgtctctggtcgtgatgagaacagtgtggagttaaccatggctgagggaccctacaagatcatcttgacagcacggccattccgccttgacctactagaggaccgaagtcttttgcttagtgtcaatgcccgaggactcttggagtttgagcatcagagggcccctagggtctctttctcggataaggttaatct

SEQ ID NO: 7675 - DNA, 266 bp, Homo sapiens
gaaaatcattcaaccaagagaagagtcaagtgaatatcgtttgtttatttgctagtgagtttctttgtaacgttgattttattaaatgataatatttggttagtatgtcctatgttaataaaaatgaacaaaattaattttgctatgttcaggtgtcttgataaaataacaatgctccagtgttgttgcttacatttagcactaaattttaacacagggtcagtgagtccaggttttaacttcttcatgcctggatgggataaaat

SEQ ID NO: 7676 - DNA, 376 bp, Homo sapiens
  unsure (15): n=A,T,C or G
  unsure (256): n=A,T,C or G
ccagtggaatgatgntccctgcaattaccatctcacctatacgtgcaagaaaggaacagttgcttgcggccagccccctgttgtagaaaatgccaagacctttggaaagatgaaacctcgttatgaaatcaactccctgattagataccactgcaaagatggtttcattcaacgtcaccttccaactatccggtgcttaggaaatggaagatgggctatacctaaaattacctgcatgaacccatctgcataccanaggacttattctatgaaatactttaaaaattcctcatcagcaaaggacaattcaataaatacatccaaacatgatcatcgttggagccggaggtggcacgagtcaaggcgctgatcccta

SEQ ID NO: 7677 - DNA, 227 bp, Homo sapiens
ctggctttctgtatgttgcaaaataatctattcacagtagcaataaaaactcaaaagtacttaataaatttaataaggaatatgcaatactttaataaaacattataaaaggacagataaagcctgaataaaaagagccacatcatattcttggatgggaagacccaatatggtagaaatgtccattttctcccaaattactccctacatttattctgatttattca

SEQ ID NO: 7678 - DNA, 101 bp, Homo sapiens
ctgggaagccacgagaatattgtgaacctgctgggggcgtgcacactgtcaggaccaatttacttgatttttgaatactgttgctatggtgatcttctcaa

SEQ ID NO: 7679 - DNA, 317 bp, Homo sapiens
  unsure (147): n=A,T,C or G
ctgggtgtggacatcatggataagggggtagagacgctcccctgtgtggaacaccttctaatggcttgtgcacggcctagctcacaccccagcatcccagggctcgtatggagtggagcactgaggacatctgggttcttctcccanaactgctccttctaggctatgacatttaacacttgatcttctaacatcaggtacttttaatgactgggcctggtattggtggtcagcccatctcagcaatgtgtccagggcccagccaggactgggtgccttaagtgggggcggaaaggatcgtcccatgaagaaagtga

SEQ ID NO: 7680 - DNA, 258 bp, Homo sapiens
  unsure (196): n=A,T,C or G
  unsure (209): n=A,T,C or G
  unsure (215): n=A,T,C or G
  unsure (240): n=A,T,C or G
  unsure (243): n=A,T,C or G
ccaactctagtcatacttggacctcgtggaaacatgttgttttctttgattggagagggacacaaagataaattatttttatatacttcaattgctttaaagtattacaaagacagggggcagatcacagataataaaattggaataaaactctataaagattctttgccaccttcaccattgctatttcctggcnaagtaacagtagnaccaanttactgatacgattggcaatagcanacncctggacatcataga

SEQ ID NO: 7681 - DNA, 396 bp, Homo sapiens
ctgcacctccacctccgtcttctcctctgccaagcaaatccacatcggctccacagatgtcgcccggatcttcagacaaccagtcctctagccctcagccggctcagcagaaactgaaacagcagaagaaaaaagcctccttgacttctaagattcctgctctggctgtggagatgcctggctcagcagatatctcagggctaaacctgcagtttggggcattgcagtttgggtcagagcctgtcctttctgattatgagtccacccccaccacgagcgcctcttcaagccaggctccaagtagcctgtataccagcacggccagtgaatcatcctctacaatttcatctaaccagagtcaggagtctggttatcagagcggcccaattcagtcga

SEQ ID NO: 7682 - DNA, 185 bp, Homo sapiens
  unsure (49): n=A,T,C or G
  unsure (88): n=A,T,C or G
  unsure (129): n=A,T,C or G
  unsure (159): n=A,T,C or G
  unsure (162): n=A,T,C or G
tggttaaagttcacgttctctttggggaattttacaatttaagtttaanagcttttaattaaacgtaaatgtacaccaatctactcancagagatatattaggatcacatttcttttttaaaatggatnttattttaatgtgtaacaaaaagattttgnttncctatttaaaaaatacaatacac

SEQ ID NO: 7683 - DNA, 271 bp, Homo sapiens
  unsure (30): n=A,T,C or G
  unsure (35): n=A,T,C or G
  unsure (66): n=A,T,C or G
  unsure (91): n=A,T,C or G
  unsure (247): n=A,T,C or G
cgaggtccttggatgcagatcaatgctccnataangttcattatcagctcctcctgccttgtgacnggatgatttgattttacaaaagtcnctttgaaaacaagagtaaacgcagacagcttctagagaaaagtctggtgaagcagcagttgataatagattttcttttagtgatgaaattaatcttgttttggtaatctacagcctgttagggataggtggagggatgaagtccttaaaactaaantgttcctctacgaatcttcgacct

SEQ ID NO: 7684 - DNA, 280 bp, Homo sapiens
  unsure (1): n=A,T,C or G
  unsure (3): n=A,T,C or G
  unsure (210): n=A,T,C or G
  unsure (272): n=A,T,C or G
  unsure (276): n=A,T,C or G
ncnggaccacagataaatcctagttaaattttatagttatcttaatattatgattttgataaaaacagaagattgatcattttgtttggtttgaagtgaactgtgacttttttgaatattgcagggttcagtctagattgtcattaaattgaagagtctacattcagaacataaaagcactaggtatacaagtttgaaatatgatttaancacagtatgatggtttaaatatttctctaatttttgaaaaatcgtgccaagcaataagattnatgnatat

SEQ ID NO: 7685 - DNA, 326 bp, Homo sapiens
gaattctggttgtttgtgcaataatcatagtgatttacattgcttttcttctttcagagcaataagaaagttatttggggtagtacttgaaataattcatatacacagtcatttaacatagatcgtttctagtcgagtatgagcatacattcatgggaacaatctgtttcattcttcaaagtatgtttgtactttggaatgaaggagaaattctagggaaaaattaattcagaaatcttttgaaataagacagttcaaacctaggaccaggtaaccacattgcattgcctcccagtgtgatatgactgtgcttccaagtatgcatc

SEQ ID NO: 7686 - DNA, 252 bp, Homo sapiens
  unsure (239): n=A,T,C or G
gtcctttgcttctaatgacaaaactgtgagagctagatgtcctatgggcaattaggtagtataataaaggtaaatgaaggtacaatttttaaaccattattttcaccctgttggggtaaatgttttaaagagtgagaaaacataaattgagaaagggtgataaagtaatagataacttttagtttaataataattattgttattatactactaataatagagcacttgtaagcactaanttatctttatcca

SEQ ID NO: 7687 - DNA, 388 bp, Homo sapiens
cagacatcgagaagcataatgacattgtggacagtgacagcgatgctgaggatcgaggaacgttgtctgctgagctgactgctgcccactttggaggaggcggtgggctccttcacaagaagactcaacaggaaggcgaggagcgggagaaaccgaagtcccggaaagagctgattgaagagctcattgccaagtcaaaacaagagaagagggagagacaagctcaacgagaagatgccctcgagctcacggagaagctagaccaagactggaaagaaattcagactctcctgtcccacaaaactcccaagtcagagaacagagacaaaaaggaaaaacccaagcccgatgcatatgacatgatggttcgcgagcttggctttgaaat

SEQ ID NO: 7688 - DNA, 369 bp, Homo sapiens; identical to SEQ ID NO: 7545

SEQ ID NO: 7689 - DNA, 124 bp, Homo sapiens; identical to SEQ ID NO: 436
  unsure (18): n=A,T,C or G
  unsure (19): n=A,T,C or G
  unsure (25): n=A,T,C or G
  unsure (107): n=A,T,C or G
  unsure (124): n=A,T,C or G

SEQ ID NO: 7690 - DNA, 210 bp, Homo sapiens
  unsure (174): n=A,T,C or G
  unsure (192): n=A,T,C or G
  unsure (207): n=A,T,C or G
ccaatatgcctttggagcacagcctatggtttatgtttcttttatgaccacctttaatatctgtcaaacgactagacatgctatagctttacccgaaggtaatttgattgactgtgctctgctagaagatggtgtatgggtccctctcgacgtaactgccaataaatgataagnggtatttgttttagatantgcctctacctcagncgg

SEQ ID NO: 7691 - DNA, 264 bp, Homo sapiens
tcgaccctgaataaggtggtacaactaaggcatattatggaaaactggcattattgcttaatgtaacatgagggattggaatttctttaaagtaattttaagatatgattatttagcagaaatattcactggagcattttacttttagaaattatcgtcacacaaggaagcctttataggaccgactacctaattgcagtcaaagatctcttgaatgaatgaacacacacacacagaagaacacacattttaagaatatagcgg

SEQ ID NO: 7692 - DNA, 314 bp, Homo sapiens
  unsure (175): n=A,T,C or G
ccatataaagggcgtcctgaaaacaaaagcttcctttatgagatagtatctaataaaagaaatggcattgatgtggacaaatgggattattttgccagggactgccatcatcttggaatccaaaataattttgattacaagcgctttattaagtttgcccgtgtctgtgaagtanacaatgagttgcgtatttgtgctagagataaggaagttggaaatctgtatgacatgttccacactcgcaactctttacaccgtagagcttatcaacacaaagttggcaacattattgatacaatgattacagatgcttt

SEQ ID NO: 7693 - DNA, 255 bp, Homo sapiens
  unsure (162): n=A,T,C or G
cccaatcaagggaagaaggaggaatgctggactggaggcccctggagccagatggcaagagggtgacagcttcctttcctgtgtgtactctgtccagttcctttagaaaaaatggatgcccagaggactcccaaccctggcttggggtcaagaaacagccancaagagttaggggccttagggcactgggctgttgttccattgaagccgactctggccctggcccttacttgcttctctagctctctaggacct

SEQ ID NO: 7694 - DNA, 186 bp, Homo sapiens
ccatgtggagaaatcagatcactgcttaatgaaaggaattgaccaccgtcagctcgaaaatccacccacagtctagaattgggtgtttatcaggcagaagttctctccaaagacatttttagcatgtatctagtcaacaaactataagagagaaaacccaaagcttaaaggagggtgtgtaagggg

SEQ ID NO: 7695 - DNA, 161 bp, Homo sapiens
cctttcttgtctggccccctaaagaggacccaagatcaggaaaactccccagtttaaaaaaatatctgtccatctgtatataaaatacctattattagctggagttgcacacatgcaggaccaggagagactgcctgaggttctgcctggaccgaaggagg

SEQ ID NO: 7696 - DNA, 217 bp, Homo sapiens
ccacatcttcttcctgagcctactattcatattgccttatattcacaaagcaatggtgccaaggaaagagaagttaaagaagatggaataatccatttccctgcaggtggcctgtgcgggactggtgcagaaactactcgtctcccttttcacagcactcctttgccccagagcagagaatggaaaagccagggaggtggaagatcgatgcttccag

SEQ ID NO: 7697 - DNA, 220 bp, Homo sapiens
  unsure (24): n=A,T,C or G
cgaggtttgcagtttaagtattgnaatttcacaaaagacataggacttaactggaaaatgaaaaaaaaaagaaaaagaaaaaactaaacaaaaaatccctctaggtagtttaggtgaaaaatgtcccttttattttggctttggttgtgatttcaaagcataatgctatgtttttttgtctttttactatgtttttcggatttttaagtccgtaagtgca

SEQ ID NO: 7698 - DNA, 224 bp, Homo sapiens
ctgggcaagaaatgcctcaggaggtttttatttttcctcttcagatagatgttgcttcctgccaattgcatcctgtacccactgttccttctggattccatgatttaccatccagcagggcttttctgagtcgtctccagaagatgtgccgccccaggacactgtcctcccactccaggtaagtgttcctgctgagaaggcggtacagctccacctgctgcctg

SEQ ID NO: 7699 - DNA, 232 bp, Homo sapiens
  unsure (222): n=A,T,C or G
cctgaacaaatgtttcatttggatccttctttgactcatacaatatttaatccagaagtatttcaaccacagatggcactgccaacagcagatggcccataccttcaaatattagagcaacctaaacagagaggatttcgtttccgttatgtatgtgaaggcccatcccatggtggactacctggtgcctctaccgaaaagaacaacaagtcttaccctcangtcaaaatct

SEQ ID NO: 7700 - DNA, 246 bp, Homo sapiens
  unsure (156): n=A,T,C or G
  unsure (195): n=A,T,C or G
  unsure (234): n=A,T,C or G
cctaatgaaaattgtacacttcaacacaaggtaattgaaaccttccttttgactgaaaccagtgtttgtagcactagtatattcctgcagacagacttgtagttacttgtagttattgtatagtctgtatagtctgttatttttttttttaagcanaaagtcaaaaaaattgttttatgtaaatatatataaaangtgaaggtacaggagggactatggcactgtgtgtgatgnaaaagggtattg

SEQ ID NO: 7701 - DNA, 152 bp, Homo sapiens
cgggattctgttatttgaggctcagcacagccagagaaacccccaagatgcagccgggaggtgaacagcggagaggacaatgcacccttcagcgtggtggagcctcagggacagatctgatgatcccagaaggctctggaggacaatctagg

SEQ ID NO: 7702 - DNA, 418 bp, Homo sapiens
  unsure (306): n=A,T,C or G
  unsure (397): n=A,T,C or G
cgcgtttcccgcaacccgataccatcggacaggatttctccgcctcagcccaacggggagatctctggaaacatggctacagaacatgttaatggaaatggtactgaagagcccatggatactacttctgcagttatccattcagaaaattttcagacattgcttgatgctggtttaccacagaaagttgctgaaaaactagatgaaatttacgttgcagggctagttgcacatagtgatttagatgaaagagctattgaagctttaaaagaattcaatgaagacggtgcattggcagttcttcancagtttaaagacagtgatctctctcatgttcagaacaaaagtgcctttttatgtggagtcatgaagacttacaggcagagagaaaaacaanggaccacagtagcagattcta

SEQ ID NO: 7703 - DNA, 176 bp, Homo sapiens
ccagataaaatagtaacaaaaaaagtaaagagatataaaacaaactgtacactattacaaagtagtggttctctgtatgtctatgtgtatatatgtatatataaaactatacagatacatgtgtgtatataaacatacatatgtatatatacacacatatacttaattctaaagtt

SEQ ID NO: 7704 - DNA, 458 bp, Homo sapiens
ccttggtcctagcacccactcgagaattggctcagcagatacagaaggtggtcatggcactaggagactacatgggcgcctcctgtcacgcctgtatcgggggcaccaacgtgcgtgctgaggtgcagaaactgcagatggaagctccccacatcatcgtgggtacccctggccgtgtgtttgatatgcttaaccggagatacctgtcccccaaatacatcaagatgtttgtactggatgaagctgacgaaatgttaagccgtggattcaaggaccagatctatgacatattccaaaagctcaacagcaacacccaggtagttttgctgtcagccacaatgccttctgatgtgcttgaggtgaccaagaagttcatgagggaccccattcggattcttgtcaagaaggaagagttgaccctggagggtatccgccagttctacatcaacgtggaacga

SEQ ID NO: 7705 - DNA, 253 bp, Homo sapiens
  unsure (232): n=A,T,C or G
cctactatgggtgttaaattttttactctctctacaaggttttttcctagtgtccaaagagctgttcctctttggactaacagttaaatttacaaggggatttagagggttctgtgggcaaatttaaagttgaactaagattctatcttggacaaccagctatcaccagactcggtaggtttgtcgcctctacctataaatcttcccactattttgctacatagacgggtgngctcttttagctgttcttacg

SEQ ID NO: 7706 - DNA, 275 bp, Homo sapiens
  unsure (133): n=A,T,C or G
  unsure (149): n=A,T,C or G
  unsure (167): n=A,T,C or G
  unsure (177): n=A,T,C or G
  unsure (195): n=A,T,C or G
  unsure (238): n=A,T,C or G
  unsure (247): n=A,T,C or G
  unsure (274): n=A,T,C or G
ctgtcatcctatggcataaattccacttttattccctaagtgctttgagggctctatttggcaaatattacaacagatgctgaaatacaggagttgtgagtactacaatttgtcatctataccacacaaccanaatctgtatataaganatctacaaatcaaaatgnacgaggccantttctcatgcttcaccanctacacaaagcagtaaagacagacaatatacaagatttattangtaaaacanaacagactgcatgatatgctattccant

SEQ ID NO: 7707 - DNA, 163 bp, Homo sapiens
caggtcctgtttgattgtagctatgttggtgtatctcgtgtacaagatggaaaagtgcttttgttgttctacctgatccagttgggggagcaggaatagggggtgcctgcctaacggcctctagcccatgtgcttatactgggatctgtcccgagggatctgc

SEQ ID NO: 7708 - DNA, 334 bp, Homo sapiens
ccaggaggagtcttagaggtgctaaatggctttcagacattccaatgacatctgagtcaagataattttccattttagaattagcctgtagatctgtaaagtcgcaggaaatgatacctgtatactgctaaatacaaatttaagaactttctagacatgtctgtacttgaaagggttctgtaatacattttaagtaatgtgtttactccaaaagctgctttccgtgaacatttaagtatctcataggtgaagttaaaaatcacagtcattcccacccttacccctgtacctatattatataagccatacctacccttacaaatgcctctctgga

SEQ ID NO: 7709 - DNA, 327 bp, Homo sapiens
  unsure (164): n=A,T,C or G
  unsure (269): n=A,T,C or G
  unsure (282): n=A,T,C or G
  unsure (302): n=A,T,C or G
  unsure (314): n=A,T,C or G
ccaggccgatctcgaacttctggcctctagcgatctgcccgcctcggcctcccaaagtgctgggatgaccagcatcagccccaatgtccagcctctttaacatcttctttcctatgccctctctgtggatccctactgctggtttctgccttctccatgctganaacaaaatcacctattcactgcttatgcagtcggaagctccagaagaacaaagagcccaattaccagaaccacattaagtctccattgttttgccttgcgatttnagaagagaattanagagggctgtattgattggngtgaagactganctatcccggggtc

SEQ ID NO: 7710 - DNA, 275 bp, Homo sapiens
ccttggtgaaggcagatcccgacgtgacgctagcgggacaggaagccatcttcattctggcacgagccgcggaactgtttgtggagaccattgcaaaagatgcctactgttgcgctcagcagggaaaaaggaaaacccttcagaggagagacttggataatgcaatagaagctgtggatgaatttgcttttctggaaggtactttagattgattgccgagcggggcagttttgtgagccttcatctaaagccttcagttcacccctctgcacagg

SEQ ID NO: 7711 - DNA, 281 bp, Homo sapiens
  unsure (160): n=A,T,C or G
  unsure (187): n=A,T,C or G
  unsure (256): n=A,T,C or G
ctgatcataaatagagcaagagaagatggggagcaatagagaaagatgttgaaagaaagacatcttcatcaagtgtaaggtgagaaggaaccaattggtggttcatgcacataataccaaaacagagaataaggacttcggcaggctttttaaagcacanactccatgtagtttctagctggctaancaaacaaaacaaatgtattataaggaggtgttaattacaaaagtgaccagttcttgccatgaattttanagcaccccaacagttctaacgtctc

SEQ ID NO: 7712 - DNA, 273 bp, Homo sapiens
caatgtggttggtcttcagcttgcagttagccaggttccataccttgaccagcttgtcccagccacaggagacgatgatagggttgctgctgttgggcgagaagcggacacaagacacccactctgagtggctctcatcctggacagtgtatttgcacacacccagggtattccatagcttgatggttttatctcgagatccagagacaatctgccggttgtcagaggaggaggccacactcagcacatccttggtatggcccacaaatcgcc

SEQ ID NO: 7713 - DNA, 351 bp, Homo sapiens
  unsure (304): n=A,T,C or G
cctttcatctgatgaagagcactgaattattcatactagggtttgaccaacaaagatgctagctgtctctgagatacctctctactcagcccagtcatattttgccaaaattgcccttatcatgttggctgcctgacttgtttatagggtccccttaattttagtttttagtaggaggttaaggagaaatcttttttttcctcagtatattgtaagagagtgaggaatacagtgatagtaatgagtgaggatttcttaaatgtacttttttttgttctaggaatgagggtaggataaatctcanaggtctgtgtgatttactcaagttgaagacaacctccaggccattcc

SEQ ID NO: 7714 - DNA, 282 bp, Homo sapiens
  unsure (247): n=A,T,C or G
  unsure (253): n=A,T,C or G
ctgaagatttggtatcacaggtttttaatgactattcacaattcaatagcaagtgggaagtgaggttaagaaaggggattaaactccacaactgcaatgagtatctgaaatccttggttttagatgcggggatgggggtgaacaaaaaggatgacagagcaaagtgctaccaggaggagaagtccagtctgcatgaagatttgtctttaataaataacttcataaactgtggccttcttatccccanagccantgacaatgtatttgtcgccacggagatgt

SEQ ID NO: 7715 - DNA, 250 bp, Homo sapiens
  unsure (226): n=A,T,C or G
  unsure (230): n=A,T,C or G
ccaatttcttcactctcctgacactttgaagtaaccactcaactccacagacttcttgttgagacttttttgcatggaaaacagatattttgggggggggcattatatgctaccgatattaggataaaatgtgtttacctagaggtttctaggagagagtactgttctcttctggtgagggaagagaggattgtgaaaatatttctccttgaagcatcagcatgtntcanatcaaaatcttgacccgagg

SEQ ID NO: 7716 - DNA, 218 bp, Homo sapiens
  unsure (78): n=A,T,C or G
  unsure (187): n=A,T,C or G
  unsure (188): n=A,T,C or G
  unsure (201): n=A,T,C or G
cctactgtaaagagatgatgcatggtaaaaggaaaatggcagctctatgttattaccagtagtgaaggtgaatgatanattgttacatacagagtaagacttaaatgttgtgaagtttcctacagtttgacaaccaaaacatctaaaaaattcaaataaattttaaggtaatcttgatcttggttgnnagttgcaccaganaggacaccttattttta

SEQ ID NO: 7717 - DNA, 451 bp, Homo sapiens
ctgtctgaccatggggaccttctgtctgaagaggagctggatgaatgagactctgggaatcatctacacaggaccaaacccaacaggcgccctggcaccggggaggcgggtagttgtactctgcttgtacagtccttgagcccagtttacagatctggagagcaggaggccaggacaaggacaaaggctggaggatggagtaggacccaggggctctgccatcctaggcatcattcaaggtcttttatgaagactttacagatgtcctctgtaagtagcatcgagagtggagttcagctcctttctctacttttttttggtctgatggcacatatttattgttctgtggtctaatcacagtgtttctaaatgtaaaaagtgcatatgttggtgtagctagtcccgcgacattgagctcctctgcatgaagacactgggctcctgcatccag

SEQ ID NO: 7718 - DNA, 101 bp, Homo sapiens
ccagtggggcagcccttccccattggggtttccattgcgagcaaagttggcccagaatttcatcaccatcttgctaagtctgatctcctcttctgaggcac

SEQ ID NO: 7719 - DNA, 139 bp, Homo sapiens
ccaagtcagtcccagccagaaggctgtgtctccagggagtggctgacctgatccttcttgcccattcttggggttctgggacttggaggaactcaagtcttcgctgtaagaaaatccctccaggacaacaaactgttaa

SEQ ID NO: 7720 - DNA, 390 bp, Homo sapiens
  unsure (367): n=A,T,C or G
cctcttggctctggagaaggcatccttagcatcctcttctgaagggtgatcataagccccaagttaattaaataggcccaatgtctgcctgctctttctgtattcccttcctgaatctagttcatgtcaacaaatgtgtactattattgtagaaaatcgaatgctctcatacttttaataggtttgcttcttggttaatatgcccaggtcaggaagtggcttatatttcaggagtgctctctaatacttattgcagatattcaagcatttattctctcacacacacgcacttaaaaaccgcacactacctcacactctgcaataatccgatagtatggtggtcatcatacccacatatatacatganaagatagaatgcattgcttaaat

SEQ ID NO: 7721 - DNA, 149 bp, Homo sapiens
ctggctagtggcttattacttgtgactggacctctggtcctcaatcgagttcctctacgaagaacacaccagaaatttgtcattgccacttcaaccaaaatcgatatcagcaatgtaaaaatcccaaaacatcttactgatgcttactt

SEQ ID NO: 7722 - DNA, 208 bp, Homo sapiens
  unsure (116): n=A,T,C or G
  unsure (170): n=A,T,C or G
  unsure (200): n=A,T,C or G
  unsure (201): n=A,T,C or G
cacaactgcttacagaatggatcatgtcccccttatgttgaggtgaccacttaattgctttcctgcctccttgaaagaaagaaagaaagaagactgtgtttttgccactgatttanccatgtgaaactcatctcattacccttttctgggtttgaagctgctgtctctanaagtgccatctcaattgtgctttgtatcanncagtgct

SEQ ID NO: 7723 - DNA, 331 bp, Homo sapiens
  unsure (10): n=A,T,C or G
  unsure (11): n=A,T,C or G
  unsure (12): n=A,T,C or G
  unsure (200): n=A,T,C or G
  unsure (288): n=A,T,C or G
ccttgggaannnagaaagacagaatccattgatgtaatggatgcggttggaagtaatattgtggttagcacaagaactggagaagtgatgaggattttgccacgtatgcatgaggacatcaatgaagagtggatctctgataaaaccagatttgcctatgatgggctaaaacgtcaaagacttaccgagccaatggtcanaaatgaaaaagggcttttaacctatacttcttgggaggatgcgctctctcgcagtagctggaatgtttgcagagttttcaaggcaaanatgtggcaccaattgcaggtggcttggtggatgctgaagccct

SEQ ID NO: 7724 - DNA, 232 bp, Homo sapiens
ctgctggttcttctttttggggctctccattactgggctcctgggactggctgtgtggttctgtgtttgtgtgtgtcgctcatgccgtccctctcctggtcccgtctggggagtccagaatcttctgtcggggttccaggtgcttctgggactcggatacccccaacagcaccccagcttcgcctgagcccctccactcctcggccctccttcctccctagttatggccgtg

SEQ ID NO: 7725 - DNA, 205 bp, Homo sapiens
aaaatgaaaaagcaatacattccttgatgcatttgcatgaaggttgttcaactttgtttgaggtagttgtccgtttgagtcatgggcaaatgaaggactttggtcattttggacacttaagtaatgtttggtgtctgtttcttaggagtgactgggggagggaagattattttagctatttatttgtaatattttaaccctttat

SEQ ID NO: 7726 - DNA, 434 bp, Homo sapiens
ctgtgatccatgagaacgcatctcagcccgaggtgctggtccccatccggctggacatggagatcgatgggcagaagctgcgagacgccttcacctggaacatgaatgagaagttgatgacgcctgagatgttttcagaaatcctctgtgacgatctggatttgaacccgctgacgtttgtgccagccatcgcctctgccatcagacagcagatcgagtcctaccccacggacagcatcctggaggaccagtcagaccagcgcgtcatcatcaagctgaacatccatgtgggaaacatttccctggtggaccagtttgagtgggacatgtcagagaaggagaactcaccagagaagtttgccctgaagctgtgctcggagctggggttgggcggggagtttgtcaccaccatcgcatacagcatccggggacag

SEQ ID NO: 7727 - DNA, 383 bp, Homo sapiens
ccacgaacactaccatgatgggaaaaacaaggcaaagaaaccactcgggatcttttagctccaatgaatttgaggaagaattagtgtctccatcgtcatcagaaactgaaggcaactttgtctatcgcacaggtaagtccgtgctttctgtagtaattcctgcgatacctgtttaaagcacaattaaaactgcatcagagggatttattttaacaggtataaagacatcagattattcacatattgcccataattcagttttaaagctttcgttttgtttagaattgccaatggatacatttgttagtagattatggtcttactgagaaattttcagttttcatattaaagacaggaagttttattctttttatattttttaa

SEQ ID NO: 7728 - DNA, 449 bp, Homo sapiens
  unsure (338): n=A,T,C or G
  unsure (339): n=A,T,C or G
  unsure (342): n=A,T,C or G
  unsure (437): n=A,T,C or G
  unsure (445): n=A,T,C or G
ctgctgaagttcaggttggtggtgctgctggtggtgatgttgcattaactgatacaaaaaggcttgatgttgttccttaggcaaaaaacatgtgagagaaaatgagttcccaagcacggaattcagcagtcagatgagctgccttatgttttctttcctttaatattagatatttgcaaagaaagaaaacaagtatctcatctagaaaaatatgctgcactagataataaccatctactataaaatgtcagtatcttcagcaaacagcttattttcaaaacaggacacacataggagagctctattaggttatccgtgatgatcaatcaggaagtgcnncancttaagagaaatcaaggtggacatttgaatgcatcatgcgtggtcaaaccctttcccaacttaaaacaaccttaaagttcccgtttctgcctgtnattagggngctt

SEQ ID NO: 7729 - DNA, 382 bp, Homo sapiens
  unsure (342): n=A,T,C or G
  unsure (376): n=A,T,C or G
catggggacatttgcggaaatttatggattgtatgttactactgtatcgatgttaaatttcttgagtattataccttgtttttaggagatgcatgctaaagaatttatgcataacgaatcccataatgagaatgcaaatgtggctagatgttaaagtttgtgatctagctgggtgcagtggctcatacctgtaatcccagcactttgggaggctggggcaggcagattgcttaaacccaggagtttgagaccagcccaggcaatatggtgaaactccatctctataaaacataaaaaaaattagcttggcatagtagcacgtgcctgtggtcccaccactgnggaggctgaggtgggagaaacgcttgagcttacnaagtcg

SEQ ID NO: 7730 - DNA, 294 bp, Homo sapiens
cctttgaacagcgccgtctggaagctatccaccaggacagtaatcaccaggttgaggaagatgaagtactggatgatgatgtaaattatgaggatgggaatgatgtaccaggcgccctgggcacggctgtccatgtagatgagggaccagtcatccagcgtgagcaaggtgaagagggtgaagatggtggtgaagatgttctggaagcgcttggggtcagatttgcggaacagtgcccggaggaccgcggagaagaggaagaggcaggtaaacatgaggatgaggatggctgcg

SEQ ID NO: 7731 - DNA, 241 bp, Homo sapiens
  unsure (236): n=A,T,C or G
ctgcatcacttcacaagaagaatttgaatcctcactagaaggggtaccatcctcttccagttcatacttcccatatccaacaacatgaacgctgagcattttacttcctggccctctatgggccttgaaccatgtgaccaagtctgattttgagaatgacttcagtgcttcaatctcctgggcaaggcggtcaaagaggtactgctgtgtaaccacttcattccagttcctatccncctcc

SEQ ID NO: 7732 - DNA, 338 bp, Homo sapiens
  unsure (99): n=A,T,C or G
  unsure (102): n=A,T,C or G
  unsure (109): n=A,T,C or G
  unsure (114): n=A,T,C or G
  unsure (117): n=A,T,C or G
  unsure (140): n=A,T,C or G
  unsure (141): n=A,T,C or G
  unsure (148): n=A,T,C or G
  unsure (156): n=A,T,C or G
  unsure (191): n=A,T,C or G
  unsure (193): n=A,T,C or G
  unsure (239): n=A,T,C or G
  unsure (334): n=A,T,C or G
gaaggcggcccgggtcatcatagaaaagtactacacgcgcctgggcaacgacttccacacgaacaagcgcgtgtgcgaggagatcgccattatccccancanaaagctncgcancangatagcaggttatgtcacgcatnngatgaancgaattcngagaggcccagtaagaggtatctccatcaagctgnangaggaggagagagaaaggagagacaattatgttcctgaggtctcanccttggatcaggagattattgaagtagatcctgacactaaggaaatgctgaagcttttggacttcggcagtctgtccaaccttcaggtcactcanccta

SEQ ID NO: 7733 - DNA, 433 bp, Homo sapiens
  unsure (20): n=A,T,C or G
  unsure (370): n=A,T,C or G
  unsure (388): n=A,T,C or G
cctggctcaacaaaagggcnggggattggccctgaaaggagagagctgactgtcctggctgatggacaggagatcctcttagcactaccctaaggcaggcagttgggcattggtgtagacaacaggaaagtccaggctatagccgtactcaaaaacctttctgttccctttctgccagccctagggattgagtccacattcagcacaggactctctgggtacagctctctttaggaagacacaaattgcatggtgaagtcagttatatcctggccgcctttggtccctcccaggaagacgggcatgttttctgcttgagaggtgctgatgtaccagttggggaactgggcagactcaaattccagcttgntattgatttctatcttgntgaagacaaatcgcttttccatcttcttctttgggtaatttttgg

SEQ ID NO: 7734 - DNA, 348 bp, Homo sapiens
  unsure (10): n=A,T,C or G
  unsure (20): n=A,T,C or G
ctgcataccnctgggtacangagagagttcctggaataccaccgccctccaggagctttgcatacctgcgggggcccgggggcattccacctcatcgtgcacctgaaggcgggagatgcagtcaacgtcgtggtgactgggggcaagctggctcacacagactttgatgaaatgtactccacatttagtggggttttcttatatcctttcctttcccacctctaaggtggctggggagatgtcaggggaaagatagatagttgtaaaaactctaaagctttaatatattcggtttgtatgtaatggaagcacggggctagagtttccacataggccccaacataaagg

SEQ ID NO: 7735 - DNA, 471 bp, Homo sapiens; identical to SEQ ID NO: 429
  unsure (9): n=A,T,C or G
  unsure (10): n=A,T,C or G
  unsure (19): n=A,T,C or G
  unsure (20): n=A,T,C or G
  unsure (21): n=A,T,C or G
  unsure (450): n=A,T,C or G
  unsure (458): n=A,T,C or G

SEQ ID NO: 7736 - DNA, 522 bp, Homo sapiens
  unsure (43): n=A,T,C or G
  unsure (103): n=A,T,C or G
  unsure (486): n=A,T,C or G
ccacactctacttctgcttctgccacctatggggtcgaggcangtgtggtgccttggctaagtccacagacttctgagaggcccacgctttcttcttctccanaaataaaccctgaaactcaagcagctttaatcagagggcaggattccacgatagcagcatcagaacagcaagtggcagcgagaattcttgattccaatgatcaggcaacagtaaaccctgtggaatttaatactgaggttgcaacaccaccattttcccttctggagacttctaatgaaacagatttcctgattggcattaatgaagagtcagtggaaggcacggcaatctatttaccaggacctgatcgctgcaaaatgaacccgtgccttaacggaggcacctgttatcctactgaaacttcctacgtatgcacctgtgtgccaggatacagcggagaccagtgtgaacttgattttgatgaatgtcactctaatccctgncgtaatggagccacttgtgttgatggttttaacaca

SEQ ID NO: 7737 - DNA, 450 bp, Homo sapiens
  unsure (18): n=A,T,C or G
  unsure (19): n=A,T,C or G
ccaccggcctgatggaanncgacggcaagcctcgtgccccgcaggcacccctgcactcggtggtacagcaactccatgggaagaacctggtttttagtgacggctacgtggtaaaggagacaattggtgtgggctcctactctgagtgcaagcgctgtgtccacaaggccaccaacatggagtatgctgtcaaggtcattgataagagcaagcgggatccttcagaagagattgagattcttctgcggtacggccagcaccccaacatcatcactctgaaagatgtgtatgatgatggcaaacacgtgtacctggtgacagagctgatgcggggtggggagctgctggacaagatcctgcggcagaagttcttctcagagcgggaggccagctttgtcctgcacaccattggcaaaactgtggagtatctgcactcacagggggttgtgc

SEQ ID NO: 7738 - DNA, 501 bp, Homo sapiens
ctggggtgggcttctcctactccgatgacaagttttatgcaactaatgacactgaggtcgcccagagcaattttgaggcccttcaagatttcttccgcctctttccggagtacaagaacaacaaacttttcctgaccggggagagctatgctggcatctacatccccaccctggccgtgctggtcatgcaggatcccagcatgaaccttcaggggctggctgtgggcaatggactctcctcctatgagcagaatgacaactccctggtctactttgcctactaccatggccttctggggaacaggctttggtcttctctccagacccactgctgctctcaaaacaagtgtaacttctatgacaacaaagacctggaatgcgtgaccaatcttcaggaagtggcccgcatcgtgggcaactctggcctcaacatctacaatctctatgccccgtgtgctggaggggtgcccagccattttaggtatgagaaggacactgttg

SEQ ID NO: 7739 - DNA, 488 bp, Homo sapiens
  unsure (473): n=A,T,C or G
ctgcatcccatgtgcgtcgatgggcaaagtatttgtagcactgcccttggaatttgtgccagccatagtcacatgtctcggtatcttgctcacaaagtgcaccaacataacttggaaggcagaggcacctgaatgtgttaaaaccatcaacacaagtggctccattacgacagggattagagtgacattcatcaaaatcaagttcacactggtctccgctgtatcctggcacacaggtgcatacgtaggaagtttcagtaggataacaggtgcctccgttaaggcacgggttcattttgcagcgatcaggtcctggtaaatagattgccgtgccttccactgactcttcattaatgccaatcaggaaatctgtttcattagaagtctccagaagggaaaatggtggtgttgcaacctcagtattaaattccacagggtttactgttgcctgatcattggaatcaagaattctngctgccacttgctgt

SEQ ID NO: 7740 - DNA, 451 bp, Homo sapiens
  unsure (20): n=A,T,C or G
  unsure (21): n=A,T,C or G
  unsure (29): n=A,T,C or G
  unsure (39): n=A,T,C or G
  unsure (46): n=A,T,C or G
  unsure (285): n=A,T,C or G
cctgtctgactactttgccnncttttgtngcatataggngatgttngctcttgtttttattaatttatatgtatatttttttaatttaacatgaacacccttagaaaatgtgtcctatctatcttccaaatgcaatttgattgactgcccattcaccaaaattatcctgaactcttctgcaaaaatggatattattagaaattagaaaaaaattactaattttacacattagattttattttactattggaatctgatatactgtgtgcttgttttataaaattntgcttttaattaaataaaagctggaagcaaagtataaccatatgatactatcatactactgaaacagatttcatacctcagaatgtaaaagaacttactgattattttcttcatccaacttatgtttttaaatgaggattattgatagtactcttggtttttatac

SEQ ID NO: 7741 - DNA, 490 bp, Homo sapiens
  unsure (20): n=A,T,C or G
  unsure (431): n=A,T,C or G
  unsure (451): n=A,T,C or G
cctgatagatctgggcatangagcttcaggaataaaatgcatgtgaatgcggtgtttcccagggagaattaaccgcattctcgccttcaaatctgaatacctgagagtcataaccagcccagtagggtagactatgaaatgtatagcaaaattttcaaaaccagctcctcctaccagacaagaaaattaacattttttagggcacagaactgaaagcatttttactgaaatctaatccaggatgaaacctaacagttaaacattcttttccttctctgcttctttggctctctatcccagcacaccttgtcccaggctaacttgagtaaacatacacatgtgaccacatgagggcgggaagaacaccaagtgggggtggtgaaattctgaatggaatgcagccccagctagttagggggccccgggctganacctctggcactggcagtanacttatacaggcaaagaagccaaaacaatgagctcatgg

SEQ ID NO: 7742 - DNA, 230 bp, Homo sapiens
gcgccgacaggatgggcaagtgtcgtggacttcgtactgctaggaagctccgtagtcaccgacgagaccagaagtggcatgataaacagtataagaaagctcatttgggcacagccctaaaggccaacccttttggaggtgcttctcatgcaaaaggaatcgtgctggaaaaagtaggagttgaagccaaacagccaaattctgccattaggaagtgtgtaagggtccag

SEQ ID NO: 7743 - DNA, 345 bp, Homo sapiens
  unsure (20): n=A,T,C or G
ctgtagagtgggcttatcanctttcaacacgcaggacaggtacagattcttttccttgaggcccaaggccacaggtattttgtcattactttcttctccttgtacaaaggacatggagaacaccacttgttgctccatatcctgtccctggaggtggagagctttcagttcatatggaccagacatcaccaagcttttttgctgtgagtcccggagcgtgcagttcagtgatcgtacaggtgcatcgtgcacataagcctcgttatcccatgtgtcgaagaagataggttcttcttcaaagatgaagggaaagaaggtgctcaggtcattctcctggaaggtctg

SEQ ID NO: 7744 - DNA, 413 bp, Homo sapiens
  unsure (10): n=A,T,C or G
  unsure (20): n=A,T,C or G
ccactgtggncttagggggngccctccccgaggcctggtgtggtggctcacgcctgtagccccagctattgcaccactgctctccaagctgggcaatggagtcagattctctttcttaaaaaaccacaaaaaagctggatttccagttctctaatattcttagtaccacaagatatgtcataggtatctttaaatgaaattcttagctggaaaagtgactaaaaagtttttctcctgctacctagtaataaacaaatcattgtttattactggtcacttagaaaattaaaagggatagggccaggcacagtggcttatgcctgtaattgcagcacttttagaggccgaggcaggcggatcacctgaggtcgggaagtggatcgcctgaggtcaggagttcgagaccagcctgg

SEQ ID NO: 7745 - DNA, 457 bp, Homo sapiens
  unsure (278): n=A,T,C or G
ctgggaattgctctattgtacaaatacagttttgtacaaaaaaatcacaaaatgttacaaaataaaaaaagtacaaactgcattacttaataaatatgactaaaagtagttaaagtggcaatgagattgattttaagttggaaacattgtttgacccagcaaaccatacaagctctgtttacagacatttctacatcaatacagggcaatcctattttgccttttgaaagaatgtaaagaaatattaagacagtgttctcctgctataactgccaagnttggctccagacatttatgccattagtttataaatctcttagctggattcaagaagttatataaagcaggaggcttatcttgtcacagagttttataccatgttaacattctcttacaacaacgtgacaaatgtaaataaaaacaactgagagcaccagacaatctactctacacatca

SEQ ID NO: 7746 - DNA, 240 bp, Homo sapiens
cctggatcttctttactggggcctgcccctcggggtacagtgcattaatgagcccacatagcaccgtgccatccttgagccagttctggaagttctcgcgtccaggctggggccggcccacatcctttcggcactgggtggtgatccactggatcaggatctgctccagatctgcatcatattgtttctcaatcttctgctgcacctcccggctcaggccatatgcaggtcccctgttgg

SEQ ID NO: 7747 - DNA, 294 bp, Homo sapiens
  unsure (17): n=A,T,C or G
cgagctggatccagagntgcatacagaccaatttctgcatcagtgttatctcgaccagaggctagtgggactggagagggctctacggtatttaatggggcccagaatggtgtgtctcagctaatccaaagggagtttcagaccagtgcaatcagcagagacattgatactgctgccaaatttattggtgcaggtgctgcaacagtaggagtggctggttctggtgctggtattggaacagtctttggcagccttatcattggttatgccagaaacccttcgctgaagcagcag

SEQ ID NO: 7748 - DNA, 607 bp, Homo sapiens
  unsure (586): n=A,T,C or G
tcgacatcagtgacagtgatatgatgctgaacatcatcaacagctctattactaccaaagccatcagtcggtggtcatctttggcttgcaacattgccctggatgctgtcaagatggtacagtttgaggagaatggtcggaaagagattgacataaaaaaatatgcaagagtggaaaagatacctggaggcatcattgaagactcctgtgtcttgcgtggagtcatgattaacaaggatgtgacccatccacgtatgcggcgctatatcaagaaccctcgcattgtgctgctggattcttctctggaatacaagaaaggagaaagccagactgacattgagattacacgagaggaggacttcacccgaattctccagatggaggaagagtacatccagcagctctgtgaggacattatccaactgaagcccgatgtggtcatcactgaaaagggcatctcagatttagctcagcactaccttatgcgggccaatatcacagccatccgcagagtccggaagacagacaataatcgcattgctagagcctgtggggcccggatagtcagccgaccagaggaactganagaagatgatgttggaacagg

SEQ ID NO: 7749 - DNA, 90 bp, Homo sapiens
  unsure (31): n=A,T,C or G
  unsure (79): n=A,T,C or G
ctcctttatttctaagtggaaaaagtattanccaccatcttacctcacagtgatgttgtgaggacatgtggaagcactntaagttttttc

SEQ ID NO: 7750 - DNA, 395 bp, Homo sapiens; identical to SEQ ID NO: 430
  unsure (8): n=A,T,C or G
  unsure (9): n=A,T,C or G
  unsure (18): n=A,T,C or G
  unsure (19): n=A,T,C or G

SEQ ID NO: 7751 - DNA, 382 bp, Homo sapiens
  unsure (9): n=A,T,C or G
  unsure (19): n=A,T,C or G
  unsure (297): n=A,T,C or G
  unsure (300): n=A,T,C or G
  unsure (311): n=A,T,C or G
ccaacaggnggcagaagangaattcctgccttcctcaagaggaacacctaccccttggctaatgctggggtcggattttgatttatatttatcttttggatgtcagtcatacagtctgattttgtggtttgctagtgtttgaatttaagtcttaagtgactattatagaaatgtattaagaggctttatttgtagaattcactttaattacatttaatgagtttttgttttgagttccttaaaattccttaaagtttttagcttctcattacaaattccttaacctttttttggcantanatagtcaaagncaaatcatttctaatgttttaaaaatgtgctggtcattttctttgaaattgacttaactattttcctttga

SEQ ID NO: 7752 - DNA, 406 bp, Homo sapiens
  unsure (24): n=A,T,C or G
  unsure (385): n=A,T,C or G
gtttcataagaattctgttgatangaaatacactgttatcttcacttttataagaaataggaaatattttaatgtttcttggggaatatgttagagaatttccttactcttgattgtgggatactatttaattatttcactttagaaagctgagtgtttcacaccttatctatgtagaatatatttccttattcagaatttctaaaagtttaagttctatgagggctaatatcttatcttcctataattttagacattctttatctttttagtatggcaaactgtcatcatttacttttaaactttgattttatatgctatttattaagtattttattaggagtaccataattctggtagctaaatatatatttttagatagatnaagaagctagaaaacaggcaa

SEQ ID NO: 7753 - DNA, 550 bp, Homo sapiens
gacggctctagctaggtgagcggctccggccagttcccttttagactatggcgacatacctggagttcatccagcagaatgaagaatgggatggtgtgcgttttagttggaacgtgtggccttccagccggctggaggctacaagaatggttgtacccctggcttgtctccttactcctttgaaagaacgtccagacctacctcctgtacaatatgaacctgtgctttgcagcaggccaacttgtaaagctgttctcaacccactttgtcaggttgattatcgagcaaaactttgggcctgtaatttctgttttcaaagaaatcagtttcctccagcttatggaggcatatctgaggtgaatcaacctgccgaattgatgccccagttttctacaattgagtacgtgatacagcgaggtgctcagtcccctctgatctttctctatgtggttgacacatgcctggaggaagacgaccttcaagcactcaaagagtccctgcagatgtccctgagtcttcttcctccagatgctctggtgggtctgatcac

SEQ ID NO: 7754 - DNA, 598 bp, Homo sapiens
  unsure (574): n=A,T,C or G
ggcttgcacagggtgaaagctttgcttctctgctgctgtaacagggactagcacagacacacggatgagtggggtcatttccagatattaggtcacagcagaagcagccaaaatggatccccagtgcactatgggactgagtaacattctctttgtgatggccttcctgctctctggtgctgctcctctgaagattcaagcttatttcaatgagactgcagacctgccatgccaatttgcaaactctcaaaaccaaagcctgagtgagctagtagtattttggcaggaccaggaaaacttggttctgaatgaggtatacttaggcaaagagaaatttgacagtgttcattccaagtatatgggccgcacaagttttgattcggacagttggaccctgagacttcacaatcttcagatcaaggacaagggcttgtatcaatgtatcatccatcacaaaaagcccacaggaatgattcgtatccaccagatgaattctgaactgtcagtgcttgctaacttcagtcaacctgaaatagtaccaatttctaatataacagaaaatgtgtacataaantttgacctgctcatctatacacgg

SEQ ID NO: 7755 - DNA, 387 bp, Homo sapiens
  unsure (19): n=A,T,C or G
ccactgtgtagcaccttcnaattcaatttcatcggcagttgtaataacagttccagcctcaggtgttttaatggtgggaaacatcttgattgcttctccagaaacttgaccatcggttttgttttggaaatcttggagaatctcagttccttccacagcaataagttctgtgggagaagcttccatttcttctaataactcaggtttaccatcatcttctgaaggttctaattttgtgtcaggagataaagagggaggctcagttatgtgaaggtattcctcacttgatggtttgaaagtcgcttcaatatttacatgaatttccttaaaagaatcctgtggggacattacagatgagccgacgtctattcctggcagagcactggg

SEQ ID NO: 7756 - DNA, 477 bp, Homo sapiens
  unsure (288): n=A,T,C or G
  unsure (291): n=A,T,C or G
  unsure (305): n=A,T,C or G
  unsure (328): n=A,T,C or G
  unsure (342): n=A,T,C or G
  unsure (369): n=A,T,C or G
  unsure (378): n=A,T,C or G
  unsure (381): n=A,T,C or G
  unsure (445): n=A,T,C or G
  unsure (455): n=A,T,C or G
  unsure (457): n=A,T,C or G
ccttttcctgtctgcctttcttctgcttgggctcttcaaggcactgggctgggctgctgtctacctgtccacctgcaaggattcaaagaagaaagcagagtgagggcactcactgccatcctgtggaagccaccatcatctctggcccaagcttctgtagtagctccctaaaataataccctatcatctgctcctaatccctccaatctctctccactgagtggctggaatgcttttttttttttctttcacttatataagggataatttttcttttttttttttttnganacggagtctcactnttccgcccaggctgcagtgcagnggcatgatcttggnttactgcaacctccgcctcctgggttnaagcaattntgnggcttcagcctccggagtagctgggattacaggcacatgccaccacacccagggaatttttgtntttttagtananacggggtttcaccatgttgg

SEQ ID NO: 7757 - DNA, 410 bp, Homo sapiens
cctactatgggtgttaaattttttactctctctacaaggttttttcctagtgtccaaagagctgttcctctttggactaacagttaaatttacaaggggatttagagggttctgtgggcaaatttaaagttgaactaagattctatcttggacaaccagctatcaccaggctcggtaggtttgtcgcctctacctataaatcttcccactattttgctacatagacgggtgtgctcttttagctgttcttaggtagctcgtctggtttcgggggtcttagctttggctctccttgcaaagttatttctagttaattcattatgcagaaggtataggggttagtccttgctatattatgcttggttataatttttcatctttcccttgcggtactatatctattgcgccag

SEQ ID NO: 7758 - DNA, 484 bp, Homo sapiens
ttataatgtacattctgacaataaactctccgagatgcttagcctctttgaaaagggactgaagaatgttaagaatgaatatgaacagttaaattatgcaaaacaactgaaagagagattggaggcttttacaagagattttcttcctcacatgaaagaggaagaggaggtttttcagcccatgttaatggaatattttacctatgaagagcttaaggatattaaaaagaaagtgattgcacaacactgctctcagaaggatactgcagaactccttagaggtcttagcctatggaatcatgctgaagagcgacagaagttttttaaatattccgtggatgaaaagtcagataaagaagcagaagtgtcagaacactccacaggtataacccatcttcctcctgaggtaatgctgtcaattttcagctatcttaatcctcaagagttatgtcgatgcagtcaagtaagcatgaaatggtctcag

SEQ ID NO: 7759 - DNA, 445 bp, Homo sapiens
  unsure (11): n=A,T,C or G
gaggagagaantcagactttgttttttgaaatcgattgggatcgaaagcctgaaataaatattcatactttccatagaactgagcacttggttgctatttattttaaaggcagggttatttccccccagggagtggggcaagcggggaagttgggatgagtgcgtgtgggagcaaagagttaaaaatcactatgctaagtttggttgatgctactggggggaaaaagttgaaactactggtgaccactgttgggagaggaaacatctgttttatagatttagcatggccttcccatcaaaaatacactcgtaccatgacgttttgtttttgttttttaagtagccacttttaattactcagtattaatcctaggtgcatgtgttaagatttcggttttcatcgagctgcttatactgatagtgaaaaacttggatgtgtgtgaga

SEQ ID NO: 7760 - DNA, 347 bp, Homo sapiens
  unsure (9): n=A,T,C or G
  unsure (19): n=A,T,C or G
  unsure (20): n=A,T,C or G
  unsure (115): n=A,T,C or G
  unsure (190): n=A,T,C or G
  unsure (220): n=A,T,C or G
  unsure (275): n=A,T,C or G
  unsure (300): n=A,T,C or G
  unsure (312): n=A,T,C or G
  unsure (313): n=A,T,C or G
  unsure (343): n=A,T,C or G
  unsure (346): n=A,T,C or G
ctgtcctcngttactcacnnacagttccaaaactaagcgattatataagcacatccatattttagggctactctaagttaaaaaccttttctcttgtttcagagttatttacatnaaattaagacatttacaaattgttcatagtatacaatagcccaaatatgattttcacctatgctgtgtaaagaanttaagcattcgtaagtttgtctaataaatncagtgcacttttttccataacacgagctattctaaatgttttacatttctttcantgcatatttccaaattcattaaacngaatgaaatcanngttattaaatggctatatcataatattcangcnt

SEQ ID NO: 7761 - DNA, 392 bp, Homo sapiens
  unsure (21): n=A,T,C or G
ctggcagatgcagaagaagcnatgtatcagaatgtggatggccgtgtttcggaatgtcctcacacctaccaaaacaggcgacctttcagcagagagatggatttggggctactctctccgcaggctcaggtcgaagattcgtagaggaacaatttagttttaaggacttcatccctccacctatccctaacaggctgtagattaccaaaacaagattaatttcatcactaaaagaaaatctattatcaactgctgcttcaccagacttttctctagaagctgtctgcgtttactcttgttttcaaagggacttttgtaaaatcaaatcatcctgtcacaaggcaggaggagctgataatgaactttattggagcattgatctgcatccaagg

SEQ ID NO: 7762 - DNA, 413 bp, Homo sapiens
  unsure (20): n=A,T,C or G
cccatacccacttcctgatnctttggttctctttcctgctcaggtcccttcatttgtactttggagtttttctcatgtaaatttgtataacagaaaatattgttcagtttggatagaaagcatggagaataaaaaaagatagctgaaattcagattgaagaaatttatttctgtgtaaagttatttaaaaactgtattatataaaaggcaaaaaaagttctatgtacttgatgtgaatatgcgaatactgctataataaagattgactgcatggagaagtcttcatcaagactatttttctaacacgattacattcagtaacaaaagtagtcagcagttttaacagtttttctagacaatggagagactgagaaatgtacattttgtttcatacataatgttggttactgctt

SEQ ID NO: 7763 - DNA, 544 bp, Homo sapiens
  unsure (488): n=A,T,C or G
  unsure (505): n=A,T,C or G
ctgcatcccatgtgcgtcgatgggcaaagtatttgtagcactgcccttggaatttgtgccagccatagtcacatgtctcggtatcttgctcacaaagtgcaccaacataacttggaaggcagaggcacctgaatgtgttaaaaccatcaacacaagtggctccattacgacagggattagagtgacattcatcaaaatcaagttcacactggtctccgctgtatcctggcacacaggtgcatacgtaggaagtttcagtaggataacaggtgcctccgttaaggcacgggttcattttgcagcgatcaggtcctggtaaatagattgccgtgccttccactgactcttcattaatgccaatcaggaaatctgtttcattagaagtctccagaagggaaaatggtggtgttgcaacctcagtattaaattccacagggtttactgttgcctgatcattggaatcaagaattctcgctgccacttgctgntctgatgctgctatcgnggaatcctgccctctgattaaagctgcttgagtttcagg

SEQ ID NO: 7764 - DNA, 449 bp, Homo sapiens
  unsure (9): n=A,T,C or G
  unsure (10): n=A,T,C or G
  unsure (20): n=A,T,C or G
  unsure (82): n=A,T,C or G
  unsure (114): n=A,T,C or G
  unsure (146): n=A,T,C or G
  unsure (178): n=A,T,C or G
cctggctcnncaaaagggcnggggattggccctgaaaggagagagctgactgtcctggctgatggacaggagatcctcttancactaccctaaggcaggcagttgggcattggngtagacaacaggaaagtccaggctatagccgnactcaaaaacctttctgttccctttctgccanccctagggattgagtccacattcagcacaggactctctgggtacagctctctttaggaagacacaaattgcatggtgaagtcagttatatcctggccgcctttggtccctcccaggaagacgggcatgttttctgcttgagaggtgctgatgtgccagttggggaactgggcagactcaaattccagcttgttattgatttctatcttgttgaagacaaatcgcttttccatcttcttctttgggtaatttttgggatctacactctccag

SEQ ID NO: 7765 - DNA, 592 bp, Homo sapiens
  unsure (568): n=A,T,C or G
ccagtggaatgatgttccctgcaattaccatctcacctatacgtgcaagaaaggaacagttgcttgcggccagccccctgttgtagaaaatgccaagacctttggaaagatgaaacctcgttatgaaatcaactccctgattagataccactgcaaagatggtttcattcaacgtcaccttccaactatccggtgcttaggaaatggaagatgggctatacctaaaattacctgcatgaacccatctgcataccaaaggacttattctatgaaatactttaaaaattcctcatcagcaaaggacaattcaataaatacatccaaacatgatcatcgttggagccggaggtggcaggagtcgaggcgctgatccctaaaatggcgaacatgtgttttcatcatttcagccaaagtcctaacttcctgtgcctttcctatcacctcgagaagtaattatcagttggtttggatttttggaccaccgttcagtcattttgggttgccgtgctcccaaaacattttaaatgaaagtattggcattcaaaaagacagcagacaaaatgaaagnaaaatgagagcagaaagtaagcat

SEQ ID NO: 7766 - DNA, 443 bp, Homo sapiens
  unsure (288): n=A,T,C or G
  unsure (311): n=A,T,C or G
  unsure (347): n=A,T,C or G
  unsure (349): n=A,T,C or G
  unsure (356): n=A,T,C or G
  unsure (397): n=A,T,C or G
  unsure (412): n=A,T,C or G
  unsure (424): n=A,T,C or G
  unsure (439): n=A,T,C or G
ctgggccgcttgacacctcgtagcagccgtctcattctctcgtcttgctgcgtcctgtctgtggagtcctcagtcactctgctgttggagagtgctggaggaaatgcacttttactgtgctgcactttttatagagctgcattgtcggtgattccaatttaaaaatccatattcaaaaataccctcacacatccctgcatcagtgattctaatgatcagctttgactggacctcagctcacacgaatctccaaggaaaaactctacagagcatcttttagagcaaganattcatacaggccaagtgatganagggggagtcaccaaggcttcagccccaagggcatntncagcctnaggccggcaggtcctatgtccttgacacaaacgcttcttgntgaaatcctccctantgatgctgcgantgctgttggtcccanttct

SEQ ID NO: 7767 - DNA, 451 bp, Homo sapiens; identical to SEQ ID NO: 274
  unsure (2): n=A,T,C or G
  unsure (11): n=A,T,C or G
  unsure (12): n=A,T,C or G
  unsure (13): n=A,T,C or G
  unsure (189): n=A,T,C or G
  unsure (199): n=A,T,C or G
  unsure (209): n=A,T,C or G
  unsure (215): n=A,T,C or G
  unsure (385): n=A,T,C or G
  unsure (419): n=A,T,C or G
  unsure (442): n=A,T,C or G

SEQ ID NO: 7768 - DNA, 478 bp, Homo sapiens
  unsure (19): n=A,T,C or G
ctgaaaaaccaagaacagnttttagtgactatttacatccacagtataaggcacctacagaaaaccatcataatagaggccctactatgcaaaatgatggaaggaaagaaaagccagttcactttaaagaattcagaaaaaatacaaattcaaagaaatgcagtcctgggcatgattgtagagaaaattctcattctttcagaaaggcttgttctggtgtatttgattgtgctcaacaagagtccatgagcctttttaacacagtggtgaatcctataaggatggatgaatttagacagataattcaaaggtacatgttaaaagaactggatactttttgtcactggaacgaacttgatcagttcatcaataagtttttcctaaacggtgtctttatacatgatcagaagctcttcactgactttgttaatgatgttaaagattatcttagaaacatgaaggaatatgaagtagataa

SEQ ID NO: 7769 - DNA, 341 bp, Homo sapiens
  unsure (10): n=A,T,C or G
gctgaaattnagcattttaaatagtacagtaggctggtatacattaggaaatggactgcactggaggcaaatagaaaactaaagaaattagataggctggaaatgcttactttctgctctcattttctttcattttgtctgctgtctttttgaatgccaatactttcatttaaaatgttttgggagcacggcaacccaaaatgactgaacggtggtccaaaaatccaaaccaactgataattacttctcgaggtgataggaaaggcacaggaagttaggactttggctgaaatgatgaaaacacatgttcgccattttagggatcagcgcctcgactcctg

SEQ ID NO: 7770 - DNA, 437 bp, Homo sapiens
cctgaagtcttctcctccatgaacatcatggactgagctgggggaagaagggatatctactgtggtctgggcaccacctctgtgggcactggtgggccattagatttggaggctacctcacctgggcagggatgatggcagagccaggctgttggaaaatccagaactcaaatgagccccttcatccgcctgtgggcgcatactacagtaactgtgactgatgactttatcctgagtcccttaatcttatggggccggaaggaatgtcagggccaggtgcagaccttgggggaagactttaaaccacctagttctccccgatggggcatcggtctaaagctttgggggagtgggcgcagtggctcacacctgtaatcccagcactttgggaggccgaggtgggcagatcatgggtcaagagatcgagaccatcctgg

SEQ ID NO: 7771 - DNA, 303 bp, Homo sapiens; identical to SEQ ID NO: 431
  unsure (152): n=A,T,C or G
  unsure (295): n=A,T,C or G

SEQ ID NO: 7772 - DNA, 513 bp, Homo sapiens
  unsure (19): n=A,T,C or G
  unsure (20): n=A,T,C or G
  unsure (216): n=A,T,C or G
ccaacatactgaaaccccnnccttactaaaagtacaaaaattagccaatgtggtgatgcatgcctgtaatcccacctactcgggacactgaggcaggagaatcgcttgaaccagggtggcggatgttgcaatgagccgagatcatgccactgcactccagcctgggcgacacagcaagactctgtctcaaaaaaaaaaaaaaaaaaaaaaaaattntgagacaaattaaacacccaacaattgagagaaaaaaatattctgttttttgaaaaaatttgtatagaacattgccttctattctataacaagtcctcagttgagcatttagagtatgtttaatgaaagcatgcagaggggaataaaacctgttcatcatctaaattaatcccctttatgtatccaatgtactttctatttgacacacaaaagtatgagtgattaggaaaatactaattgagctgaatgacataaattgtattaagtggatgatcacaaattcagatgctatatacg

SEQ ID NO: 7773 - DNA, 579 bp, Homo sapiens
  unsure (573): n=A,T,C or G
ctgataccacacattgaaaggtaaacattaatatttcaaatctgatgtctaactaaaaatgtacagaatgaaaactagaaaatttcaaccccagattatcttcaaccttgctccctccaccaatcatactttgacatttatctatttccttctccacttatggatgtaattggcttgctatagaaactacagttcagatgctttgaatgtatgaactacaatgaacaataaagtcctcttcttttgaagcatattttggcttcagctttaagataatcttatgacaagaagggtcacactgattcacttaataaattccattcttacctaacacaaggtttagttgataagcacttggacaaaaataatacttttcaaaaatgtaaagcaaactagtgaggacaaaggattttgtcctcatctcaacaatgatcagctattggaactgcatgaaactgaacaatttaaacctggagctggtaatgttcttaagaccaattcagaacaaaggcaggttgcccttaaaacaggtttgaccttttccttcactcttcctcctgtcccaccctctgngagtga

SEQ ID NO: 7774 - DNA, 458 bp, Homo sapiens
  unsure (10): n=A,T,C or G
  unsure (11): n=A,T,C or G
  unsure (170): n=A,T,C or G
  unsure (172): n=A,T,C or G
  unsure (183): n=A,T,C or G
  unsure (194): n=A,T,C or G
  unsure (230): n=A,T,C or G
ccttagtcanncttagctccctgtatcttctcactctgacccactgcgcgttccttcaagcagagagctgcctcccatggctacctcctcaatataaacttgctaactaatctcttagcaaacacttgaagaaaacctgaagagtggaaagagaggcagagggggaacananacccagcgtanataaagctcangacacattcaacgggacgctggaatctaaatttagnaccaaacttaagatttctttagataggcgagctgttgcctctggaacagggattttcataacaattattttgtttttaagtctcaatcttaattcttctgctatctcttaaatagggctcactttaacataaactcccttgatttttttttctctcagtggtgatgtgcctacccttataggtattcttataggctttcttttattactgaatatctctttaataatt

SEQ ID NO: 7775 - DNA, 422 bp, Homo sapiens
  unsure (9): n=A,T,C or G
  unsure (10): n=A,T,C or G
  unsure (11): n=A,T,C or G
gttggggcnnnccttggttttatacattttagggagacataagacattaatcaatatatgtaagaagaacattggttcagtggggagggagcttccaggtcacagataggtgagacacaaacagttgcattcttttgagtttctgattagcctttccaaaggaggcaatcagatatgtatctatctcagtgagcagagagataactttgaatagagtgggaggtgggtttgccctaagaagtttccctaagcttgagttttccttagtgattctggggccccaagatattttcctgtcacagttgacatccccaacacagtgtttagggctcagaaaaagataccctaaaatagggtgctttggcatgctgaatgctttgaataaaggaggctgaagggcctcagaaataagagaacaaagg

SEQ ID NO: 7776 - DNA, 554 bp, Homo sapiens
  unsure (550): n=A,T,C or G
cctaggggccgcaagacggctaatttattataatttctccttttttagtacatgcacagaaagcctgacagccaagtgtacatgaacatacacacacacacacacacacacacacagaggccaatttccagtgaggaacaggctccacagaagaagctgataggcaggggggatcaaacgctgctcccctgctcaccgatctacttctccaaatacaatatcttgggtacctatgatggcaacgacatctgccaacatgtgtcccttagacatcttgtccaaaccagccagatgggcaaaaccaggagccttgatcttgcatcgataagggcggctgctgccatcagacaccaggtacaccccaaactctcccttgggagcctcaatggcagtatatgtggctcctggaggaacttggtagccctcagtatacaacttaaagtgatgaatcagtgactccatggaagtcttcatctctgctcgcttaggtggagacactttggcatcatcaaccttgatctccccaggaggcatcttgtttagacactgngcga

SEQ ID NO: 7777 - DNA, 474 bp, Homo sapiens
  unsure (10): n=A,T,C or G
  unsure (19): n=A,T,C or G
  unsure (20): n=A,T,C or G
cctgctcacnggtgaatcnnttctctgggtccttctccatcaagtgccggatgaaatctttggcagagtcagagatgtcgtcccagtaaggagagtcaaactcgtactcggccttcaaaatctgttcaaagagtttggcatcattctcgtcatagaagggagggtaaccgcagagcaagatgtaggcgatgacacctatggaccagcaatccacagccttgctgtagggcttctgggccaggacttcaggggccacgtatcccggagttccacaggcggtggagagcacactgcccgggtcctccatcttggagaggccaaagtcggagatcatgattttggagtcttcatccaggctgtagtacagcagattctctggcttgagatcccggtgtacaatgcccaggtcatgcaggtatttcacagcatccagcacctggaagatgaggcggctggcgtcccgctccgtgtaga

SEQ ID NO: 7778 - DNA, 518 bp, Homo sapiens
  unsure (19): n=A,T,C or G
  unsure (488): n=A,T,C or G
  unsure (495): n=A,T,C or G
ccacttttttttttctgcnaacctcaaatgaaacagaatctcacagatgtggggtccccctcctaattgtaataaacgttagagaaatgctccagaaaggaacaaagggagaccctctcagatcagcctaaaaccagagtggaatagggctcctctgggcggtttaagggcacagaaaggaccctcagctactcctggcctccccgggtctctttcccagaagacacaactttccaggctgccaaaagtaatagaagtcaaaaccctcaaaaccaccactgctctcgggaagtttttgagtaggatgaggaagaaagaagagagccctccttcattttgttacacgatctcaaggccaagagcaagtagaagatgtctaaagagaacaaaagaggtttcttcctggtactgtactacagatcagcaacagtttcacagggaggcgttggctcaggttctggtacatttgaagataactgaaggccaangacttanccaaggaaggacaccagcagaac

SEQ ID NO: 7779 - DNA, 518 bp, Homo sapiens
  unsure (492): n=A,T,C or G
  unsure (502): n=A,T,C or G
ctggcctgtcctgtcgggtgaagcacagcagtctagagggccaggacatcgtcctctactggggtgggagctacacctccatgggcttgattgccttggcagtcctggcgtgcttgctgttcctcctcattgtgggctttacctcccggtttaagaggcaaacttcctatcagggcgtcctgtgactcgccttgccacatctgtgtctctggaacccaggacctctggacctcaggttcccaagacttcagtcctggtctgctcaggaattgaagatgtaaggaattgaagataggagagataccttgaaaaagtagagaacagtcatgaggcagctttcatcacacccttttaacatttatctaaaagaatttaaattctttttcaaaaattacactacaagtttataagcccaaatggctctgtgaaatcagaagtgcaaaggtgtgcaaacttgtatctgaagacctaccagggacaagcaggtaaganctgatgtgantgtgtgtgatgggatc

SEQ ID NO: 7780 - DNA, 564 bp, Homo sapiens
  unsure (555): n=A,T,C or G
cctcagaacagtcaagaaagttttgtcacttggactcgaccttaatagcagttttcatctgtcaggtgtgtcaatgatgccattttctttcaatgaatcaaagcaggcgattactcgtccattttcaacttggcagcttttcgaaggatgtgcaaatttacattccgtgtctggccgtgagcaagtccccctctggaactctctacatacttccagtgttagccattttgtgtcccgaattggtgtgacactaacagccatgtttagattttacaggtagttaaatgtttcagtgaaaccaacaaacccaacccccccaaaaaagagcaacaaccaaaaaaaaaaagctgaactgatgatgaaaatgtcccctcaaaatacttttccccactccctgctttaaaagtacatggaaaattgtgtcgtcaatatcaaggaaaagatctcccactagaaattcacagcatgaaactgttaattcaaagaggttttggtttttagagaaatactaggattgtaagtagatgaacgtttaaaagtagggcctggtatcanccttgtgct

SEQ ID NO: 7781 - DNA, 195 bp, Homo sapiens
  unsure (36): n=A,T,C or G
  unsure (96): n=A,T,C or G
  unsure (148): n=A,T,C or G
  unsure (152): n=A,T,C or G
  unsure (166): n=A,T,C or G
  unsure (169): n=A,T,C or G
  unsure (171): n=A,T,C or G
cggagtttcgctctgtggcccaggctggaatgcagnggcgcaatctcggctcactgcaagctccgcctcccgggttccacaccattctcctgcctnagcctcccgagtagctgggactacaggcgcccaccaccatgcccagctaatntttngtatttttttttancananatagggtttcaccgtgttagccag

SEQ ID NO: 7782 - DNA, 477 bp, Homo sapiens; identical to SEQ ID NO: 432
  unsure (8): n=A,T,C or G
  unsure (9): n=A,T,C or G
  unsure (18): n=A,T,C or G
  unsure (19): n=A,T,C or G
  unsure (25): n=A,T,C or G
  unsure (41): n=A,T,C or G
  unsure (47): n=A,T,C or G
  unsure (85): n=A,T,C or G
  unsure (208): n=A,T,C or G
  unsure (238): n=A,T,C or G
  unsure (286): n=A,T,C or G
  unsure (341): n=A,T,C or G
  unsure (367): n=A,T,C or G
  unsure (390): n=A,T,C or G
  unsure (406): n=A,T,C or G
  unsure (461): n=A,T,C or G
  unsure (465): n=A,T,C or G

SEQ ID NO: 7783 - DNA, 260 bp, Homo sapiens
  unsure (11): n=A,T,C or G
  unsure (12): n=A,T,C or G
gtaagactccnnctcaaaaccaaaccaaaccaaaccaaaaaaagaagtgagttggcactttcaacattctgcctggaaatctccttaccaaacctataagatcattaggtatattttctgcactttgtattgtgacaggtgacagtgttaccaaactttttaccaggacataatagggtctgcctttcttctagttgctaacaatttcccccaagtccatcttgcctgcactaacagtctcctttagacctctcctctcc

SEQ ID NO: 7784 - DNA, 467 bp, Homo sapiens
  unsure (221): n=A,T,C or G
cctggacctgtgtaaaccttcaaacactcttttttacattaggtcatgaagttaaattttttactgtttctgtgctacagactcttcaaaggaaaatagttaagtcaatttcaaagaaaatgaccagcacatttttaaaacattagaaatgatttgactttgactatctactgccaaaaaaaggttaaggaatttgtaatgagaagctaaaaactttaagnaattttaaggaactcaaaacaaaaactcattaaatgtaattaaagtgaattctacaaataaagcctcttaatacatttctataatagtcacttaagacttaaattcaaacactagcaaaccacaaaatcagactgtatgactgacatccaaaagataaatataaatcaaaatccgaccccagcattagccaaggggtaggtgttcctcttgaggaaggcaggaattcctcttctgccacctgttgg

SEQ ID NO: 7785 - DNA, 537 bp, Homo sapiens
  unsure (9): n=A,T,C or G
  unsure (480): n=A,T,C or G
  unsure (521): n=A,T,C or G
ctgctgcancctgctttgcctgcacacaggaaaaagtacacatttggggcagaccttaatgaggacgtataaatatctggcccctgatctgacatatctgaagtgtgatctccactattaccagagttcccctgagggactatgtccatgggactttgtttatctcacatccttacttgctgtccttccctgtgccatttcctcactcatgggaatgctttctagtacatcactgtctcatgaaaccttgtcttagcgtctgcttattgggacagtgatggcaacttaagtcatacgtaattgttaaacctaggattggcaaaactgagaatcactgggcaattttatataaacgcttttccagagaagagtgaaaagaaattcttctagttggtatctctggtagataccataaagtaataaagaaaagctaaaataaaccccagagtctaactcagcatgattctacactttctgtangcttctgtaggcttctagaaattccctggaaagggaattgncaaaatataaaaaaca

SEQ ID NO: 7786 - DNA, 529 bp, Homo sapiens
  unsure (18): n=A,T,C or G
ccacctggagacggtgantttgggcctattgaagacacctgctcagtatgacgcttctgagctaaaagcttccatgaaggggctgggaaccgacgaggactctctcattgagatcatctgctccagaaccaaccaggagctgcaggaaattaacagagtctacaaggaaatgtacaagactgatctggagaaggacattatttcggacacatctggtgacttccgcaagctgatggttgccctggcaaagggtagaagagcagaggatggctctgtcattgattatgaactgattgaccaagatgctcgggatctctatgacgctggagtgaagaggaaaggaactgatgttcccaagtggatcagcatcatgaccgagcggagcgtgccccacctccagaaagtatttgataggtacaagagttacagcccttatgacatgttggaaagcatcaggaaagaggttaaaggagacctggaaaatgctttcctgaacctggttcagtgcattcagaacaagcccctgtat

SEQ ID NO: 7787 - DNA, 368 bp, Homo sapiens
cctttcttgtaagtgaagaaaaaggaatgcagcaaagaagagttcgacattggagtccttagttccatcaggatcccattcgcagcctttagcatcatgtagaagcaaactgcacctatggctgagataggtgcaatgacctacaagattttgtgttttctagctgtccaggaaaagccatcttcagtcttgctgacagtcaaagagcaagtgaaaccatttccagcctaaactacataaaagcagccgaaccaatgattaaagacctctaaggctccataatcatcattaaatatgcccaaactcattgtgactttttattttatatacaggattaaaatcaacattaaatcatcttatttacatgg

SEQ ID NO: 7788 - DNA, 346 bp, Homo sapiens
  unsure (8): n=A,T,C or G
  unsure (17): n=A,T,C or G
  unsure (18): n=A,T,C or G
  unsure (246): n=A,T,C or G
  unsure (253): n=A,T,C or G
  unsure (254): n=A,T,C or G
  unsure (293): n=A,T,C or G
  unsure (319): n=A,T,C or G
ccaagaancagtggccnnattgcatcccaaaccacgcctcttgaccaggctgcctcccttgtggcagcaacggcacagctaattctactcacagtgcttttaagtgaaaatggtcgagaaagaggcaccaggaagccgtcctggcgcctggcagtccgtgggacgggatggttctggctgtttgagattctcaaaggagcgagcatgtcgtggacacacacagactatttttagattttcttttgncttttgnnaccaggaacagcaaatgcaaaaactctttgagagggtangagggtgggaaggaaacaaccatgtnatttcagaagttagtttgtatatatta

SEQ ID NO: 7789 - DNA, 362 bp, Homo sapiens
  unsure (19): n=A,T,C or G
ggcaacgctgaaagtacgngaccgcgtccggaccaagatggagagagacatcctggctgatgtaaatcacccattcgtggtgaagctgcactatgccttccagaccgagggcaagctctatctcattctggacttcctgcgtggtggggacctcttcacccggctctcaaaagaggtgatgttcacggaggaggatgtgaagttttacctggccgagctggctctgggcctggatcacctgcacagcctgggtatcatttacagagacctcaagcctgagaacatccttctggatgaggagggccacatcaaactcactgactttggcctgagcaaagaggccattgaccacgagaagaagg

SEQ ID NO: 7790 - DNA, 272 bp, Homo sapiens
ttgaattacggaataatgagttagaactattaaaacagccaaaactccacagtcaatattagtaatttcttgctggttgaaacttgtttattatgtacaaatagattcttataatattatttaaatgactgcatttttaaatacaaggctttatatttttaactttaagatgtttttatgtgctctccaaattttttttactgtttctgattgtatggaaatataaaagtaaatatgaaacatttaaaatataatttattgccaaaaaaaaa

SEQ ID NO: 7791 - DNA, 541 bp, Homo sapiens
  unsure (499): n=A,T,C or G
  unsure (507): n=A,T,C or G
  unsure (514): n=A,T,C or G
ccaccccaccctaatcttattatgcaaatgagctttggctgacactatgttgcctgctttttactgtacacatggctggcaaagagaagggaacttggagccgccattttggacatgcctagtctaggtagctttttcctattggcacagttgccagcattcacccgtggaagcttccagcttgcttgtctatgtctgcagctcgattttacaggctgttctttgttagaaaagaaaatgattttgggggctgcttttcattaaacagaaaacctcactgaggacttcctacccttgctatttgcctaaatgatttctccttaactcctatatcatcaccatgcttggctaatttttaatttttttttggggtagagatggttctcactctgttgcccacactggtctcaaactcctgggcttgagccatcctcctgcctcaccctcccaaagtgctaggattacagggcatgaactgtgccatacccatcttcgaggntttatggncatgtanaatttctgttcaaggaaagcagataac

SEQ ID NO: 7792 - DNA, 434 bp, Homo sapiens
  unsure (9): n=A,T,C or G
  unsure (18): n=A,T,C or G
  unsure (19): n=A,T,C or G
  unsure (401): n=A,T,C or G
ctggtcacntcatgctgnntagaatgacatctctttcgtctcctattttgttacccaactcttcctatttttgttaccaatcactgtgctctctgccgccccctggctccaggctaatttttctggaatgaattgagaaggtggcgtgctggcctgagctgatggaccacttggtgttttgcgttttggcccatgtttgctgcctctatctggtctgccttgcccgtttgcctgttcctattcagtgtcttttctattttttcctctctcgttcatgccttctgttttgctcttgtccctggagcatatctgcctaattaagatgttgccttttagttgaatgccactgaagagctgtgatagcatgtttcaaagctgaactctacagagcgagtgctganacagtatttagggtttctgggagtgaggctggt

SEQ ID NO: 7793 - DNA, 550 bp, Homo sapiens
cggaagaggagctcttggagacgacattgaaaatgaaattcttatctctggacttacagggagaccccagagagagtcaaccccttctgggcactgtgattgatgggatgctgctgctgaaaacacctgaagagcttcaagctgaaaggaatttccacactgtcccctacatggtcggaattaacaagcaggagtttggctggttgattccaatgcagttgattagctatccactctccgaagggcaactggaccagaagacagccatgtcactcctgtggaagtcctatccccttgtttgcattgctaaggaactgattccagaagccactgagaaatacttaggaggaacagacgacactgtcaaaaagaaagacctgttcctggacttgatagcagatgtgatgtttggtgtcccatctgtgattgtggcccggaaccacagagatgctggagcacccacctacatgtatgagtttcagtaccgtccaagcttctcatcagacatgaaacccaagacggtgataggagaccacggggatgagctctt

SEQ ID NO: 7794 - DNA, 367 bp, Homo sapiens
ccttacccccacaccaccccccagtctcaaagaattgctcatcaaggaggtgctggactaacccttgcctagatttaagccactgtgaggagaggggttgccccagaaggcaggggaaggacctgatgagaacagaatagctgggaggctgcagagggtgctgggagcccctagaagttccaaaagagaatgtgaagcagatcaaggaaacttctgttgagctaggctcagggtgagctttggctggggttgcccttgtgtagtacagggaagtctgacacagcctctccagcctataaacagccgggggactgtggcacaggttggggcaatgttcccttgttggtgggcccccaagctggcaagg

SEQ ID NO: 7795 - DNA, 385 bp, Homo sapiens
  unsure (9): n=A,T,C or G
  unsure (257): n=A,T,C or G
  unsure (260): n=A,T,C or G
  unsure (269): n=A,T,C or G
  unsure (272): n=A,T,C or G
  unsure (274): n=A,T,C or G
  unsure (357): n=A,T,C or G
  unsure (372): n=A,T,C or G
atgcagaanaagcgatgtatcagaatgtggatggccgtgtttcggaatgtcctcacacctaccaaaacaggcgacctttcagcagagagatggatttggggctactctctccgcaggctcaggtcgaagattcgtagaggaacaatttagttttaaggacttcatccctccacctatccctaacaggctgtagattaccaaaacaagattaatttcatcactaaaagaaaatctattatcaactgctgcttcaccanacntttctctanaancngtctgcgtttactcttgttttcaaagggacttttgtaaaatcaaatcatcctgtcacaaggtaggaggagctgataatgaacnttattggagcattgntctgcatccaagg

SEQ ID NO: 7796 - DNA, 564 bp, Homo sapiens
  unsure (514): n=A,T,C or G
  unsure (529): n=A,T,C or G
tggatattgccaatatctggattttatgtatctatcataaaatttgtcacataggagatggtagaagaccatagttaatgtggagtaacgttttatatagctaatctctacttaagaaacctttcattcagagtatgaagaaaatgatttaaaattttgtggaggtccccttatttctgttacagtaatagttttactgtattttgtgaaactctacagtctctttaaaaaaatgattatgttgtttatgataattgttttgatgtcatttttattttcatcaaaatcaatgtgaaatgtattagaaaaaggcatagaaattcataggcgtttcatttacttcctcaactctagatgtctttcagaatacctatattggtgagcatagaacgaatgcgtcggaatgattttcctctacttgaagcctaccttctttaaaaagagcctgacttgagggccaaaattcatactgaggagaggctgacagatcctttgttttgcaggggctccagancttgatatatttctnggaatttggaatatgctaaactagatttctgccct

SEQ ID NO: 7797 - DNA, 317 bp, Homo sapiens
ccagaagcaggtattcaaagcagagaacaatccctgggtgacccccattgcagaccagttccagcttggcgtgtcccatgtttttgagtatatccgttctgagacatacaaatacctctacggcagacacatgcaggccaacccagaaccaccgaagaagaataatgacaaatcgaaaaagatcagccggaaacccctggcagccaagaacagataaggaagggattggcatcggctggccttccagcaccttctctctccaacacttcattctctcttgccctgtctctcaaataaacccaatgctgcgtgtgagg

SEQ ID NO: 7798 - DNA, 472 bp, Homo sapiens
  unsure (19): n=A,T,C or G
  unsure (20): n=A,T,C or G
  unsure (62): n=A,T,C or G
  unsure (443): n=A,T,C or G
attacgggttggaacccannccaatgtaatttcaatcgtgttaagaaagtaatggtgacttnacatgttattgtagttagttacattatagaatattacttatttttcttgttaaaatgtagtttttcatttcctacatttattagattttcattttctattaacaattgaataccatttcagtttatagacttgttttattagattttaccaatgaatttttcaaaatacaaagaaaagtagtttttccttcataacatactcagttttgaattacatgtagtgtcacatgaatattcgtattgttaactaaatgatttatattttactgatttaatattacagtgtaagaatgtcagtcattgttagttcttgtctagttttcattaaaagaacaaagatcttttatatggatatcttataaatatataatcattgctaantaagaagttaagttgttgctatcgcaaca

SEQ ID NO: 7799 - DNA, 573 bp, Homo sapiens
tcgaccagcattatccttgcaggaaaccagaaaagcaaaatcttcatcaccaaaaaaacagaatgatgtccgagtcaaatttgaacatagaggagaaaaaagaatccttcagttccccagaccagttaaactggaagatctgagatctaaagctaaaattgcctttggacagtctatggatctacattataccaataacgagttggtaattccattaactactcaagatgacttggacaaagctgtggaactgctggatcgtagtattcatatgaagagcctcaagatattacttgtaataaatggaagtacacaggctactaatttagaaccattgccatcactagaagatttggataatacagtatttggagcagagaggaaaaaacggctatctataataggtcctactagtagagatagaagttctcctcccccaggttacattccagatgaattacaccaggttgcccggaatgggtcattcactagtatcaacagtgaaggagagttcattccagagagcatggaccaaatgctggatccattatctttaagcagccctgaaaattc

SEQ ID NO: 7800 - DNA, 558 bp, Homo sapiens
  unsure (9): n=A,T,C or G
  unsure (10): n=A,T,C or G
  unsure (19): n=A,T,C or G
  unsure (182): n=A,T,C or G
  unsure (305): n=A,T,C or G
  unsure (321): n=A,T,C or G
  unsure (412): n=A,T,C or G
  unsure (492): n=A,T,C or G
  unsure (541): n=A,T,C or G
  unsure (555): n=A,T,C or G
cctcacgcnnaaactagtncagttcatgaaaacccgagatactctgccagcttcttgaggaagcagtgttgtcacacttttctgagcttcagtgattcacacattttgataagacagcatgttctgtgggttaagtacatttaccttttcaaaatatactcccatgaagtatcatggttcanaattacacacttacaaagttaaatggcataaaactactttgtaaaaagtgcctacactctaaaaggtgatttaaaggtttatgacatcttaattcaagtgaatactgaatcagtaggattatngagcaggtgctctaanttagggaatctggagtcagtctctcctttgcttatgtgcaatgtggacccagggatttctcaatttctctgtcagaatttttaacatggtnaaatggctattattatatggaatgatatttcctaagctctgacacatactctttctccaaatcacagggtttatgaaacnaagatacacacacacacacacacaccacacacacacacacacacatatntgtatacacacatntat

SEQ ID NO: 7801 - DNA, 441 bp, Homo sapiens
caggcattgagctactgtgctcaacctgaggtcatgtatttttaattcataacttttacaaatatttactggatgactgccatgccaggcattttgaggaattcttggctactgtctgaccacctgaatccttggagccgaagaggagcgaggagcagtgttcactcttggaggaaatgggatatttcctccggccccttgattctgctctcccttttcttttcttttcttttctttctttttttttttgagacggagtttcgctcttgttgcccaggctggaatgcaatggtgcgatctcggctcaccacaacctccgcctcccaggttcaagcaattctcctgcctcagcctcccaaagtagctgggattaaagacatgcgccaccacactggctaattttttggtatttttagcagagatggggtttcactgtgttgg

SEQ ID NO: 7802 - DNA, 380 bp, Homo sapiens
  unsure (16): n=A,T,C or G
  unsure (17): n=A,T,C or G
ctgggggcggggtggnnagaagtgattcaacagagctacatgctttaaacttgcccaagttctacctccttcctttgaacatttcagattggagaaccaaggagttgattgcctgaacacctgaacatccgtttatgggggccagatagaatttgttttcaaataggcttaacaggcatcattaaaatttcattctgtgtgttttgtttaggcttgaggtgcttagaagatgggataaaatattctacttttttctaaattttaactttgtttcctatgtgatttttttaaatgtcctttctaaaatattctaaaattattgattcacaagtgccatgttcagaactatagaatattactgttacataatgtctgcacag

SEQ ID NO: 7803 - DNA, 546 bp, Homo sapiens
  unsure (17): n=A,T,C or G
  unsure (522): n=A,T,C or G
ctcaaggtgcactacangtacacggtagtcatgaagactcagcccgggctcccctacagccaggtccgggacatggtgtctaagaaactggagctccggctggaacacactaagctgagctatcggcctcgggacagcaatgagctggtgcccctttcagaagacagcatgaaggatgcctggggccaggtgaaaaactactgcctgactctgtggtgtgagaacacagtgggtgaccaaggctttccagatgaacccaaggaaagtgaaaaagctgatgctaataaccagacaacagaacctcagcttaagaaaggcagccaagtggaggcactcttcagttatgaggctacccaaccagaggacctggagtttcaggaaggggatataatcctggtgttatcaaaggtgaatgaagaatggctggaaggggagtgcaaagggaaggtgggcattttccccaaagtttttgttgaagactgcgcaactacagatttggaaagcactcggagagaagtctangatgtttcacaaactacaaagctg

SEQ ID NO: 7804 - DNA, 509 bp, Homo sapiens
ctggagggaccggagaacactggcgtctggcagccccgtttccactcctaccaagaaggctcaaagacgacggtcagctcaggcttttcttcttgaagtgtttctaacgcactttttgtctcataattgaaatacatttcagacaaccccaggttctgcaggaggcagctctgctgtttcagcacttcacagaacatcatgacccccaggtcgcccaggtcattgttgcccaggctcagctttcgcaggctctggctggaggtcagaagtgtggaaagatcccagcagcagtgtgacgtgaggttgcagttgtctaattccaacacctgaagcttgcagtcggggtgcaagagtccctcacagagtagtttgatccccttgtctccgagagtgttgcctcgcaggtaaaggtgcgtgagattctgattagtgctgagtaccgaggacaaagctgaacaacagactgacgtaaggccagaattcaccaaccccagtttctgcaggttaca

SEQ ID NO: 7805 - DNA, 518 bp, Homo sapiens
  unsure (311): n=A,T,C or G
  unsure (460): n=A,T,C or G
gaattttcattgttacataaatgtgtgaactagtttcaacagtgttctttcatatttactctgcaaatacaaaaaaccaaaacctgcagccagtggtcatttcaaaatctttttatgttcagatactgagccttcataagggttgactacctcagatttgctgcactcattgtggacttcatgtggatcacaacttctggataagaagattacaactattaagtgtcgatgtgaaccttgcaaccagctctactggattcttatcagaaatcctgcataaaaagtcagccatctgggttctgatctgctgnaaaagatgaagatttaagtgaccttaattaacctgtcctgtgccctacccttaaggaatactctctgtagtaggctgttgttatattagacttcctggaacacaccgctgaaaagaactgatgtgttcagatcatctgtgtagggctgngatttgtaatttaaactaattgtattctgaggtaaccacaaaataaattcaaccaaac

SEQ ID NO: 7806 - DNA, 283 bp, Homo sapiens
ccacaacaactgacgcggcctgcctgaagcccttgctgtagtggtggtcggagattcgtagctggatgccgccatccagagggcagaggtccaggtcctggaaggagcacttcatctgtttagggccatcagcttcaaagaacaagtcatcctcattgccactgtaataagccatcatttcactggcgagctcaggtacttctgccatggctgcttcagacacttgagcaatgaagattggctgaagagaatcccagagcagcctgttgtgccttgtgcctcg

SEQ ID NO: 7807 - DNA, 416 bp, Homo sapiens
  unsure (8): n=A,T,C or G
  unsure (19): n=A,T,C or G
  unsure (399): n=A,T,C or G
ccatcggngctgaaattgngcattttaaatagtacagtaggctggtatacattaggaaatggactgcactggaggcaaatagaaaactaaagaaattagataggctggaaatgcttactttctgctctcattttctttcattttgtctgctgtctttttgaatgccaatactttcatttaaaatgttttgggagcacggcaacccaaaatgactgaacggtggtccaaaaatccaaaccaactgataattacttctcgaggtgataggaaaggcacaggaagttaggactttggctgaaatgatgaaaacacatgttcgccattttagggatcagcgcctcgactcctgccacctccggctccaacgatgatcatgtttggatgtatttattgaattgncctttgctgatgaggaa

SEQ ID NO: 7808 - DNA, 598 bp, Homo sapiens
  unsure (9): n=A,T,C or G
  unsure (560): n=A,T,C or G
  unsure (589): n=A,T,C or G
ctgactctncaccttaaatgttcagagggacctacgtcagaggaccagaaagaaccagtttttctgacttgatcatcttgtaattcagataaaagctttgtaaatacaaaaaaacatgtcctcatgaattgcaagaaggaaaatagacccaaggagaggttcaaatggattaccttggagtgcagactagaaaggggtttatgggaatcacttgagaagtgaaacttgcccgaatagaatatatcctcaaattccgactttttctcttctggtgaaacaggaagaaggcactgtcagtattaaatagtaatttcctgtctgcaacaccacagtcattttttttttcctgatcagagaagtccctgaactacgagccttttggaggtcagtgtgagaagaagattgtttctgagcttgagaagcttctggaggattgaagagtatttgaagtctgtgtcaaacatccatatcataagtggaattttggagatattcaaagaatgctgtcagaagggtatctcagtggacttgagtactggaatgacatccactggagttgngcctcttataatgagcaggtggctggggnaaaaggaag

SEQ ID NO: 7809 - DNA, 450 bp, Homo sapiens
  unsure (76): n=A,T,C or G
ctgggggagacggggaagcaggtgtcggtgaggtctggcgttgttttaagaaaatgtctgcgttgagggtttgcanagaaagtttataaagactatcagtagagctgccaggtttgtgaactggaacggaatcccactccggtggaggagagtctttttcaccctctgagctactggtgttgcctaattcttgactattcgggaggaattttgctagggcaggtggtctgttatccactaacttacttgtaccttttgttttctgggcatttcgtgatttggatccacttgtcattgcagttggaagaggaatcttgcttgggagatttctacgttgcttactttccaaagggggagtatatggtagttctaatgaactgggtttcacatctgttgggatttctttcttaatatttaagagttttttgcttttttgcttcacttgagaca

SEQ ID NO: 7810 - DNA, 297 bp, Homo sapiens
  unsure (19): n=A,T,C or G
ccactgaactgcgctgccngtgcttgcagaccctgcagggaattcacctcaagaacatctaaagtgtgaaggtgaagtcccccggaccccactgcgcccaaaccgaagtcatagccacactcaagaatgggcagaaagcttgtctcaaccccgcatcgcccatggttaagaaaatcatcgaaaagatgctgaaaaatggcaaatccaactgaccagaaggaaggaggaagcttattggtggctgttcctgaaggaggccctgcccttacaggaacagaagaggaaagagagacacag

SEQ ID NO: 7811 - DNA, 506 bp, Homo sapiens
  unsure (351): n=A,T,C or G
ccagtggaatgatgttccctgcaattaccatctcacctatacgtgcaagaaaggaacagttgcttgcggccagccccctgttgtagaaaatgccaagacctttggaaagatgaaacctcgttatgaaatcaactccctgattagataccactgcaaagatggtttcattcaacgtcaccttccaactatccggtgcttaggaaatggaagatgggctatacctaaaattacctgcatgaaccgtaagtggtcctttagaaagaatggactaccgtgctataacaactactagacaccttcattttacggctgtggtatcggcagtttagggtatggagcaagtaatattgngtgttttctttttttctttctttccttccatgtagcatctgcataccaaaggacttattctatgaaatactttaaaaattcctcatcagcaaaggacaatttcaataaatacatccaaacatgatcatcgttggagccggaggtggcaggagtcg

SEQ ID NO: 7812 - DNA, 415 bp, Homo sapiens
  unsure (10): n=A,T,C or G
  unsure (409): n=A,T,C or G
ctggtggatncagcgcgcacacagaagacggcctaccagcggaatcgaatgagatttgcccagaggaacctccgcagagacaaagatcgtcggaacatgttgcagttcaacctgcagatcctgcctaagagtgccaaacagaaagagagagaacgcattcgactgcagaaaaagttccagaaacaatttggggttaggcagaaatgggatcagaaatcacagaaaccccgagactcttcagttgaagttcgtagtgattgggaagtgaaagaggaaatggattttcctcagttgatgaagatgcgctacttggaagtatcagagccacaggacattgagtgttgtggggccctagaatactacgacaaagcctttgaccgcatcaccacgaggagtgagaagccactgnggagca

SEQ ID NO: 7813 - DNA, 340 bp, Homo sapiens
  unsure (9): n=A,T,C or G
  unsure (10): n=A,T,C or G
ctgctgctnncttccttcagatatgacatttcagcctggcctctacagtaccatgaaacctaaattacttacttctctccagcttaatcctaggtggaggaattctagctgtggtttgtgaatgtacacaggtcagagaggtttagcaccttttgggaggaggaggtcagaatgcggtggtgaaacctctcccactgtgaccaacaaaccctcatacttaaaaagaagcatgcacctctggcttaaggatctggatgctactggaatttttgtctgtttcaattgtattcattagctttgaagaggagagagatggtggtggttaacttttttgttgcat

SEQ ID NO: 7814 - DNA, 544 bp, Homo sapiens
  unsure (9): n=A,T,C or G
ccatccagnctcctttgccaactgaggtgcagactgagttgtggaaggtgggtgttgatggaacccagcattacaatattgtgtagaactagtctcctaatatacctcactctgcaacttacggaagctgaggaagatcagaaaaagaccacactcctcactcagaatatttattatattctgccccatggggccttgcaggaaaagggacccaagctatacccctactccttttccaagctactttcctgaaccaagggacaggattctaagagaatcatgtatctcaaataagccagaatgtatctggggaagaatagccattaatttcctagacctgacactgggtttatttgtgtctgccaggaagacggggagtcagtgagaatcgtaaatggactagatgaggggaaataggatgggcccttctttatcacagcttgagctcaaaaaggttgggataaacaggtgtttaaaaaagagaggaggtaaaagggaggatgggcaggggatagaggaaggtcaggggttgggttcacccata

SEQ ID NO: 7815 - DNA, 270 bp, Homo sapiens
  unsure (9): n=A,T,C or G
  unsure (18): n=A,T,C or G
  unsure (19): n=A,T,C or G
  unsure (140): n=A,T,C or G
  unsure (151): n=A,T,C or G
  unsure (161): n=A,T,C or G
  unsure (170): n=A,T,C or G
  unsure (176): n=A,T,C or G
  unsure (185): n=A,T,C or G
gtaacttcnatgacaacnnagacctggaatgcgtgaccaatcttcaggaagtggcccgcatcgtgggcaactctggcctcaacatctacaatctctatgccccgtgtgctggaggggtgcccagccattttaggtatganaaggacactgntgtggtccangatttgggnaacatnttcactcgnctgccactcaagcggatgtggcatcaggcactgctgcgctcaggggataaagtgcgcatggaccccccctgcaccaacacaacag

SEQ ID NO: 7816 - DNA, 262 bp, Homo sapiens
  unsure (137): n=A,T,C or G
  unsure (144): n=A,T,C or G
  unsure (171): n=A,T,C or G
  unsure (172): n=A,T,C or G
  unsure (180): n=A,T,C or G
  unsure (188): n=A,T,C or G
tgactattttctactgtaggctgctttggaaataattcccatatccttgctttgtaagttggtaatatcactatgcatttctacacattttataaatttgatttatgcagattttgatacactgtatgtttctgtanaaattgnataaatattcaaaattttattaggatnnatttgagnaacttacntatatcttaattctgggttgcttgttttttaggtgacaaaaataaaatattgtattttaattcaaaaaaaaaaa

SEQ ID NO: 7817 - DNA, 551 bp, Homo sapiens
  unsure (526): n=A,T,C or G
  unsure (535): n=A,T,C or G
tgcttctctgctgctgtaacagggactagcacaggcacacggatgagtggggtcatttccagatattaggtcacagcagaagcagccaaaatggatccccagtgcactatgggactgagtaacattctctttgtgatggccttcctgctctctggtgctgctcctctgaagattcaagcttatttcaatgagactgcagacctgccacgccaatttgcaaactctcaaaaccaaagcctgagtgagctagtagtattttggcaggaccaggaaaacttggttctgaatgaggtatacttaggcaaagagaaatttgacagtgttcattccaagtatatgggccgcacaagttttgattcggacagttggaccctgagacttcacaatcttcagatcaaggacaagggcttgtatcaatgtatcatccatcacaaaaagcccacaggaatgattcgcatccaccagatgaattctgaactgtcagtgcttgctaacttcagtcaacctgaaatagtaccaatttctnatataacanaaaatgtgtacataaa

SEQ ID NO: 7818 - DNA, 470 bp, Homo sapiens
  unsure (8): n=A,T,C or G
  unsure (9): n=A,T,C or G
  unsure (18): n=A,T,C or G
  unsure (92): n=A,T,C or G
  unsure (102): n=A,T,C or G
  unsure (107): n=A,T,C or G
  unsure (118): n=A,T,C or G
  unsure (127): n=A,T,C or G
  unsure (141): n=A,T,C or G
  unsure (421): n=A,T,C or G
tgaaatannacagcaccnagaaaataatttagttttgcttgcttccattgatcagtcttttacttgaggcattaaatatctaattaaatcgngaaatggcantatantccatgatatntaaggagtnggcaagcttaacanaacccattttttataaatgtccatcctcctgcatttgttgataccactaacaaaatgctttgtaacagacttgcggttaattatgcaaatgatagtttgtgataattggtccagttttacgaacaacagatttctaaattagagaggttaacaagacagatgattactatgcctcatgtgctgtgtgctctttgaaaggaatgacagcagactacaaagcaaataagatatactgagcctcaacagattgcctgctcctcagagtctctcctatttttgnattacccagctttctttttaatacaaatgttatttatagtttacaatga

SEQ ID NO: 7819 - DNA, 338 bp, Homo sapiens
  unsure (154): n=A,T,C or G
  unsure (279): n=A,T,C or G
  unsure (293): n=A,T,C or G
  unsure (324): n=A,T,C or G
ctgtgacgcctgaataactgtctactttatcttcactgaaccactcactctgtgtaaaggccaacagatttttaatgtggttttcatatcaaaagatcatgttgggattaacttgcctttttccccaaaaaataaactctcaggcaagcatttntttaaagctattaagggagtatatacttgagtacttattgaaatggacagtaataagcaaatgttcttataatgctacctgatttctatgaaatgtgtttgacaagccaaaattctaggatgtanaaatctggaaagtncatttcctgggattcacttctccagggattntttaaagttaattt

SEQ ID NO: 7820 - DNA, 431 bp, Homo sapiens
  unsure (415): n=A,T,C or G
  unsure (423): n=A,T,C or G
  unsure (425): n=A,T,C or G
ctgtggctgtctgtcagagaagcacatttttctgcagataattagaatggcttcccccatctctcacggactgtcccaagtctagaaaagaattgagttcctcttctattagtcaaataaaagggaagagaatgtttgtcttcctttcctttctgtagtgttaagaaaataaacgaacttaatgattctaaattatcagtgagcttaacactgtactatagaccaaagattaccttttcaaaaagtcctttgaggtgaaatattttgtatacgtaatacatagatgcacatataaacacacacatatagaatctcaatattttaacacttctttgggtagttgtactaactcactaaccctgaggaaaaagttaagaaattgaaagtgttttcttcaaaagttgagatttaacantaaaaggngntacttt

SEQ ID NO: 7821 - DNA, 566 bp, Homo sapiens
  unsure (507): n=A,T,C or G
  unsure (508): n=A,T,C or G
  unsure (538): n=A,T,C or G
agtgacttgacttctttaagccttggtttctttttcagtgagatttacagcttagactagtttctgaatcttgaccctgtggacaatctagttggagaactgagatgacctgggcattgtaggatgtttagcaacattcctgcctctgtaaactagacacagcagcacatttacccaacctgctctgactgtgacaaccagaaatgtctccaggcattgccaaatgtcaactgagggcaaaattgcctaccctagccaccttaactgaaaactacaaacttcattgaaataatttctttatggctcccagcagtaacactgtgctattctagaccagttggttaaactactggatgcttcatcagaaagcacccactaagcatcactcaccatgaagttcgttgggtactctatacaatgaacaaaggagatatcacataatttttaaaaaacttaaaagattcacaggtgagaattttgtagtaacaattaagtattaactattannaaaaatttaagaagttttaacaaaatgatntaaaaatatattcactataagtaggatg

SEQ ID NO: 7822 - DNA, 569 bp, Homo sapiens
ctgagtctcacaaagatgccgtggaaagcagatactctagaacggaaggctcccttgatggaacttagacagcaaggccagatgcacatccctggaaggacatccatgttccgagaagaacagatgatccctgtatttcaagacctctgtgcacttatttatgaacctgccctgctcccacagaacacagcaattcctcaggctaagctgccggttcttaaatccatcctgctaagttaatgttgggtagaaagagatacagaggggctgttgaatttcccacataccctccttccaccaagttggaacatccttggaaattggaagagcacaagaggagatccagggcaaggccattgggatattctgaaacttgaatattttgttttgtgcagagataaagaccttttccatgcaccctcatacacagaaaccaattttcttttttatactcaatcatttctagcgcatggcctggttagaggctggttttttctcttttcctttggtccttcaaaggcttgtagttttgggtagtccttgttctttggaaatacacagtgctgacc

SEQ ID NO: 7823 - DNA, 277 bp, Homo sapiens
tgatctctttcagtgcaccgccacttatgttacctttttccttttatttctttgtgtttccagttgcaagaacagcaaggaaaaggaagccctctccagaaccagaaggtgaagtcgggccccctaagatcaacggagaggcccagccgtggctgtccacatccacagaggggctcaagatccccatgactcctacatcctcttttgtgtctccgccaccacccactgcctcacctcattccaaccggaccacaccgcctgaagcggcccagaatgg

SEQ ID NO: 7824 - DNA, 510 bp, Homo sapiens
ccagggtgccacaaacccaaagcaaagtttcaaaataatataaaatttaaaaagttttgtacataagctattcaagatttctccagcactgactgatacaaagcacaattgagatggcacttctagagacagcagcttcaaacccagaaaagggtaatgagatgagtttcacatggctaaatcagtggcaaaaacacagtcttctttctttctttctttcaaggaggcaggaaagcaattaagtggtcacctcaacataagggggacatgatccattctgtaagcagttgtgagggggtagagatgggacaaaattttggtctcagaggtcttaccatcttaatttggtaacttctaatgaaaaaaataaaaaatagaaataacattatccaaagatatcttaaagctgaaaacttgaacagcacattttttgtttttgttgttgtttggctaactcctcctggaatcacctttctggtttagctagtactttgtacagaacaatgaggt

SEQ ID NO: 7825 - DNA, 525 bp, Homo sapiens; identical to SEQ ID NO: 601
  unsure (513): n=A,T,C or G

SEQ ID NO: 7826 - DNA, 380 bp, Homo sapiens
  unsure (31): n=A,T,C or G
  unsure (39): n=A,T,C or G
  unsure (101): n=A,T,C or G
  unsure (107): n=A,T,C or G
  unsure (118): n=A,T,C or G
  unsure (135): n=A,T,C or G
  unsure (150): n=A,T,C or G
  unsure (158): n=A,T,C or G
  unsure (166): n=A,T,C or G
  unsure (205): n=A,T,C or G
  unsure (213): n=A,T,C or G
  unsure (231): n=A,T,C or G
  unsure (235): n=A,T,C or G
  unsure (246): n=A,T,C or G
  unsure (306): n=A,T,C or G
  unsure (328): n=A,T,C or G
  unsure (340): n=A,T,C or G
  unsure (352): n=A,T,C or G
  unsure (370): n=A,T,C or G
tacaagctttttttttttttttttttttttngacagttnatcttttattttctgcaaatttaggaacatatttactcgttttcacattgaatcttaagttnaagctnttcatttggtntttaggcaatatatganaaaaaaatttttttngttcattngtaatttnaacaagttgaacattttaccatgattgaacatgtttttnttacagtntttaacattcccccaaanaatnccctgcaaagngtaaacctttgtcccatactgggatattactgttctgctacaataaatgtcaaacctaancactttgcagttcactactttngggaaaatgttntagggaactgtntcacaggtgaaactgttncccataaagg

SEQ ID NO: 7827 - DNA, 566 bp, Homo sapiens; identical to SEQ ID NO: 433

SEQ ID NO: 7828 - DNA, 440 bp, Homo sapiens
  unsure (187): n=A,T,C or G
  unsure (370): n=A,T,C or G
  unsure (396): n=A,T,C or G
ccattggtgcgtgtttcattcagatcacctctggaatctctgtggttgtgaaggcaattccttatgagactcttgcctcctgtggcttacgtgatgaattgttaatatggcagtaattaattagtatctacttaaatttagtggtcagaaatgtatttgaagtgccttaaagatgatcatggttcanaatatcttcagagaaagcaaaatctttaatattgcagggagcctagcaatacaaatacacatttctgtggcttgatttcttgaatatgctgagacccaatttggactacatttggcagaaatcatggagtaaacagcaaggctttaaattaaattaatagttacaaggtaggttggctcttangtgaatttagccatgtcaactaatangcttttatatggtatgtaacaaatctgaattatgttatgctgtg

SEQ ID NO: 7829 - DNA, 508 bp, Homo sapiens
ctggggtgggcttctcctactccgatgacaagttttatgcaactaatgacactgaggtcgcccagagcaattttgaggcccttcaagatttcttccgcctctttccggagtacaagaacaacaaacttttcctgaccggggagagctatgctggcatctacatccccaccctggccgtgctggtcatgcaggatcccagcatgaaccttcaggggctggctgtgggcaatggactctcctcctatgggcagaatgacaactccctggtctactttgcctactaccatggccttctggggaacaggctttggtcttctctccagacccactgctgctctcaaaacaagtgtaacttctatgacaacaaagacctggaatgcgtgaccaatcttcaggaagtggcccgcatcgtgggcaactctggcctcaacatctacaatctctatgccccgtgtgctggaggggtgcccagccattttaggtatgagaaggacactgttgtggtcca

SEQ ID NO: 7830 - DNA, 126 bp, Homo sapiens
ccaaagtgttaactagttttactacaatgtttggtgtttgtgtggaaattatctgcctggtgtgtgcacacaagtcttacttggaataaatttactggtacaaattcttaaaaaaaaaagaaaaaa

SEQ ID NO: 7831 - DNA, 505 bp, Homo sapiens
  unsure (8): n=A,T,C or G
  unsure (11): n=A,T,C or G
  unsure (433): n=A,T,C or G
  unsure (495): n=A,T,C or G
caggactngantcgtatcttcccactttctgaggactactctggatcaggcttcggctccggctccggctctggatcaggatctgggagtggcttcctaacggaaatggaacaggattaccaactagtagacgaaagtgatgctttccatgacaaccttaggtctcttgacaggaatctgccctcagacagccaggacttgggtcaacatggattagaagaggattttatgttataaaagaggattttcccaccttgacaccaggcaatgtagttagcatattttatgtaccatggttatatgattaatcttgggacaaagaattttatagaaatttttaaacatctgaaaaagaagcttaagttttatcatccttttttttctcatgaattcttaaaggattatgctttaatgctgttatctatcttattgntcttgaaaatacctgcattttttggtatcatgttcaaccaacatcattatgaaattaattanattcccatgg

SEQ ID NO: 7832 - DNA, 491 bp, Homo sapiens
ccagtgaacacgaaatgtgcctgacatccctaataatcaaagaaatacaaattaaaacacaatcataccaattttcatctaacagattggcaaaaatgtaaaggatcatgtgtatattcattgcagtgttgcttgtaatagcatacagcttgagtgacctccagtagaggtgatgtttaaatatattttgctgcattcttaaaaggaaatgtagcataatgcagccatttggagagaatgagataactatatgcactctctttgaaagttttgtgactactatgtgccgggagttgcactgggctttctttaaggtattttcagcaaacctgtcttttaatgatttatattgtacctaataagagatatatgaatggaaaaacagtttttgctctcacatcatgacaatcaacacaaaagacttctgtgaccaaatgtgtggagttttcttccaccaacaagcaagcaatcaattctgcagcggacaccag

SEQ ID NO: 7833 - DNA, 343 bp, Homo sapiens
  unsure (8): n=A,T,C or G
ccacttgngtgggtcctcacaagcaaagagagcactaaacttgacattgggggtccaccactccaactttgctttctgaaggttttggtgtacattgagccccagaaggaaaggagagtatctgtgagtgggggcctcccttgaccccagtacgaagtctatgccctgaatccccagagtagcccttcctggtgcccaactggcctggggacaaacagcgtccactacatctaggactgccggctaagtggacacacttcttgacctcctaccaggaactttggtaaaagctagctttggggaaggggttgggtgtaaatatgagagggtggagggagaccag

SEQ ID NO: 7834 - DNA, 550 bp, Homo sapiens
  unsure (542): n=A,T,C or G
ctgtagaagtaggggtttggcttctggcccagatccacgcccttgtcctctgtcaaaaagagaggtggcagctcagcaccattctgttgggatcaggtaactcaggaaaggggctagatgctgtgggcctagagtaagtctccataaaggctggggaagcacacacctgtcatcacctggaaggcagccacactgacgtaatcctctgccactttctggaagagctcgtctggcaggaaaaatgatgatcagcgagggcccaatgccagtagccctgggatctcccagtgacccagccctctgtgccctattcagcttcctctggtgcccctgcatgttcctgctgtgaggctccagcacagcactcacccacactctggcctgtcttgctggatgtttcaaagagctgagctttgatatctgtaaagagaagtgactaaagcctcatacctgagaattagataaacagacaaaagggagggctagcagttcagggagtctcctggaccccacagttcaaggaggccaggaagacctcctanagcacctt

SEQ ID NO: 7835 - DNA, 314 bp, Homo sapiens
  unsure (264): n=A,T,C or G
  unsure (266): n=A,T,C or G
  unsure (279): n=A,T,C or G
  unsure (301): n=A,T,C or G
ccttatttctcttgtcctttcgtacagggaggaatttgaagtagatagaaaccgacctggattactccggtctgaactcagatcacgtaggactttaatcgttgaacaaacgaacctttaatagcggctgcaccatcgggatgtcctgatccaacatcgaggtcgtaaaccctattgttgatatggactctagaataggattgcgctgttatccctagggtaacttgttccgttggtcaagttattggatcaattgagtatagnanttcgctttgactngtgaagtcttagcatgtactgntcggaggttgggt

SEQ ID NO: 7836 - DNA, 539 bp, Homo sapiens
cctgactattctcaattctccccactgcagtgttcacgcaacttccctgaatatagggtctccttaaacacatctgagcactgacctggatgagtgcacttgggagacctggtgacaggcacaaaaagcatgatcagggctagcctcaatacagggagaaatcatggatatttaaaaatacttttttgattcagattccggtatgactgaagagcaacaccatgttgagaactggaggaagacagggttctggtgccagaagctcttctccaatctttaaagccaggcttgctcaccaaggtgctcagtaatgtctctcacccctgcccatatatagcattaaaaagtgaacaaaagacagataaagatagaattcaaaaaggaaaaaaagtaaggaagcagagggacagaaacttagaagagaaaaccaaggtcaacagtcaaaaaggatggtgggaaagaatgtttagatttcaaaatttaaaagccccgagctaggaagaacctgaaaactgagtactcctcagtgaaaggccatc

SEQ ID NO: 7837 - DNA, 397 bp, Homo sapiens
cctactatgggtgttaaattttttactctctctacaaggttttttcctagtgtccaaagagctgttcctctttggactaacagttaaatttacaaggggatttagagggttctgtgggcaaatttaaagttgaactaagattctatcttggacaaccagctatcaccaggctcggtaggtttgccgcctctacctataaatcttcccactattttgctacatagacgggtgtgctcttttagctgttcttaggtagctcgtctggtttcgggggtcttagctttggctctccttgcaaagttatttctagttaattcattatgcggaaggtataggggttagtccttgctatattatgcttggttataatttttcatctttcccttgcggtactata

SEQ ID NO: 7838 - DNA, 428 bp, Homo sapiens
cctgtccatacactaaagaacatctcattgactgtgacaatgggcgagatgaatgatgggttataaatatttctctcttccttaatagctaacaatcttctccaaggactgtggactcctgttccctgctcatcatgtcatgggcatctgccaggaaccatctttgatggtgtaaaaatcttgaatacataagagggaaattttagacttgttagaaagaagccaagcaattgagaccttagatagaacttagaattctcaccgagttttgttgggtaattgttacttcaaaaaaaaatgcaatttctgttccctctttcctccaaccatttatctgggaagcaagttattggcaacccagagctgattgttggagccggggaaaatggtgtgaaatgtgagaaaatgtaattgagataataaaaaca

SEQ ID NO: 7839 - DNA, 447 bp, Homo sapiens
tttggcttcagggtggggtttggaagcttctggaagtcgtgctggtctcccaggtgaggcaagccatggttgctgggctgtagggtgagtggcttgcttggtgggacctgacgagttggtggcatgggaaggatgtgggtctctagtgccttgccctggcttagctgcaggagaagatggctgctttcacttccccccattgagctctgctccctctgagcctggtcttttgtccttttttattttggtctccaagatgaatgctcatctttggagggtgccaggtagaagctagggaggggagtgtcttctctctccaggtttcaccttccagtgtgcagaagttagaagggtctggcgggggcagtgccttacacatgcttgattcccacgctaccccctgccttgggaggtgtgtggaataaattatttttgttaaggtaaaaa

SEQ ID NO: 7840 - DNA, 322 bp, Homo sapiens
  unsure (9): n=A,T,C or G
  unsure (14): n=A,T,C or G
  unsure (99): n=A,T,C or G
ctgatgaangcatntgatgccttcatctgttcagtcatctccaaaaacagtaaaaataaccactttttgttgggcaatatgaaatttttaaaggagtanaataccaaatgatagaaacagactgcctgaattgagaattttgattttttaaagtgtgtttctttctaaattgctgttccttaatttgattaatttaattcatgtattatgattaaatctgaggcagatgagcttacaagtattgaaataattactaattaatcacaaatgtgaagttatgcatgatgtaaaaaatacaaacattctaattaaaggctttgcg

SEQ ID NO: 7841 - DNA, 423 bp, Homo sapiens; identical to SEQ ID NO: 275

SEQ ID NO: 7842 - DNA, 530 bp, Homo sapiens
  unsure (516): n=A,T,C or G
atattttatgcatgggtgcatgcacacacacacacatttataagaaaagaattataaaaaataccaacataataattttctctaggaggtgggaataacagtgagttttctttccttttattttttaaaatctatatttttatggttaaaaaaatgtgataaggtaaataccaagtatatacatttgaatttcatgacatactttttaaatttatgcttgatactttcagaccatcagacctttattacaccttgttttaatgcttattttctctttgtttcattcccgtgaaaaatgaaaagtctttgtcattttctctctgaatctgtatctttgtctcccttttttcctcccgctctcctactttctcacactagacgtttcataggaattaaaagtattaaagggtggtcaattcttatttgcctttggaaacccagaatgtgcacagtatttagtaaactttcatctattatgtaaattcttaatgctttgaagaagcacaaatggactgnatttacctccattg

SEQ ID NO: 7843 - DNA, 478 bp, Homo sapiens
ctgttgtgttggtgcagggggggtccatgcgcactttatcccctgagcgcagcagtgcctgatgccacatccgcttgagtggcaggcgagtgaagatgttgcccaaatcctggaccacaacagtgtccttctcatacctaaaatggctgggcacccctccagcacacggggcatagagattgtagatgttgaggccagagttgcccacgatgcgggccacttcctgaagattggtcacgcattccaggtctttgttgtcatagaagttacacttgttttgagagcagcagtgggtctggagagaagaccaaagcctgttccccagaaggccatggtagtaggcaaagtagaccagggagttgtcattctgctcataggaggagagtccattgcccacagccagcccctgaaggttcatgctgggatcctgcatgaccagcacggccagggtggggatgtagatgccagcatagctctc

SEQ ID NO: 7844 - DNA, 559 bp, Homo sapiens
ccaagaacctcttccaccgggccatttctgagagtggcgtggccctcacttctgttctggtgaagaaaggtgatgtcaagcccttggctgagcaaatttctatcactgctgggtgcaaaaccaccacctctgttgtcatggttcactgcctgcgacagaagacggaagaggagctcttggagacgacattgaaaatgaaattcttatctctggacttacagggagaccccagagagagtcaaccccttctgggcactgtgattgatgggatgctgctgctgaaaacacctgaagagcttcaagctgaaaggaatttccacactgtcccctacatggtcggaattaacaagcaggagtttggctggttgattccaatgcagttgatgagctatccactctccgaagggcaactggaccagaagacagccatgtcactcctgtggaagtcctatccccttgtttgcattgctaaggaactgattccagaagccactgagaaatacttaggaggaacagacgacactgtcaaaaagaaagacctgttcctggacttgatagc

SEQ ID NO: 7845 - DNA, 422 bp, Homo sapiens
  unsure (10): n=A,T,C or G
  unsure (46): n=A,T,C or G
  unsure (52): n=A,T,C or G
  unsure (65): n=A,T,C or G
  unsure (171): n=A,T,C or G
  unsure (200): n=A,T,C or G
  unsure (228): n=A,T,C or G
  unsure (229): n=A,T,C or G
  unsure (235): n=A,T,C or G
  unsure (265): n=A,T,C or G
  unsure (275): n=A,T,C or G
  unsure (287): n=A,T,C or G
  unsure (307): n=A,T,C or G
  unsure (312): n=A,T,C or G
  unsure (365): n=A,T,C or G
  unsure (392): n=A,T,C or G
  unsure (400): n=A,T,C or G
  unsure (406): n=A,T,C or G
attttaatgnccctgtgtactaaatgactactcatcgagtatgcanaatttnacagaggaaatanaatgctgatatacatatgaaagaaaatatcctcagcatggtgatttattgtcttgtataataatagtagaacattttagaactagtacttttatgattgtattttnttcctgttcacattccaaacttttctgtnttattttcattctatatgtgatcttganncagctnattcctttctgcaactgatttaatctcatnttgacaaatntgacctagaagngttttgagtaatattaaatnttaancacatacatattattaatgaaccatctgtgatttatcttataagaggaaaacntgacaatcattaaaatgtttaccaaanaaaatatngctgangtgctaggtcaaaata

SEQ ID NO: 7846 - DNA, 467 bp, Homo sapiens
  unsure (394): n=A,T,C or G
ctgcccctggctaggtagttaaaactgtgtatgccttcccttgtacaatgtgggactttggtggaactgcctgggagaacttcataattactaccctgtatgtcatgccccttgcaggtaaaacagaagtggcagagcagaggtcaaaggcacagatcagcaaagggaatcctactggatcctgagactagcctggaaggggtgtcatttgtcactgggaatagaggtgcacggcctggtggaccctccgagagagcttaagattcatttttaaaacagaggatttaaaagacacaataggcattggaatcgggtagtaagaagagaaaaccagagccccaagtgaggaagtgggtgatctgtcctcacacagttggtgggggagctgggcctncccactgactggactctcaggtccttaagaggtgctctgtcctgcacaccccaaatgaccacctaaattcagg

SEQ ID NO: 7847 - DNA, 473 bp, Homo sapiens
ccacactctacttctgcttctgccacctatggggtcgaggcaggtgtggtgccttggctaagtccacagacttctgagaggcccacgctttcttcttctccagaaataaaccctgaaactcaagcagctttaatcagagggcaggattccacgatagcagcatcagaacagcaagtggcagcgagaattcttgattccaatgatcaggcaacagtaaaccctgtggaatttaatactgaggttgcaacaccaccattttcccttctggagacttctaatgaaacagatttcctgattggcattaatgaagagtcagtggaaggcacggcaatctatttaccaggacctgatcgctgcaaaatgaacccgtgccttaacggaggcacctgttatcctactgaaacttcctacgtatgcacctgtgtgccaggatacagcggagaccagtgtgaacttgattttgatgaatgtca

SEQ ID NO: 7848 - DNA, 499 bp, Homo sapiens
  unsure (348): n=A,T,C or G
ggcgaatcttgcgccggtttagacaaaggaggccgtgaggacctgcatgcttttctttctcaggcatgcttcggaaactggacatcaaaaacgaagacgatgtgaaatcgttgtctcgagtgatgatccatgttttcagcgacggcgtaacaaactggggcaggattgtgactctcatttcttttggtgcctttgtggctaaacacttgaagaccataaaccaagaaagctgcatcgaaccattagcagaaagtatcacagacgttctcgtaaggacaaaacgggactggctagttaaacaaagaggctgggatgggtttgtggagttcttccatgtagaggacctanaaggtggcatcaggaatgtgctgctggcttttgcaggtgttgctggagtaggagctggtttggcatatctaataagatagccttactgtaagtgcaatagttgacttttaaccaaccaccaccaccaccaaaaccagtttatgcagttgga

SEQ ID NO: 7849 - DNA, 513 bp, Homo sapiens
  unsure (10): n=A,T,C or G
  unsure (226): n=A,T,C or G
ctgtggaggnaaaaacatacccctggttcagttccttatttggtgcaggccatgcagtgtagatgtataaagagaaagctgatgcttggatattaactgccttgatgctacacacctagaatgtcttttacttacttccaggttcatccgtccctcttttccagggaacacgcctaaaaaaaagggcaactgtgcagagtacaatataaatccccaaataacccangtttccaattttgtttccattccctagtatcatcatctgtttctttaccccagtgtgaaaaagctgattaatttaatgagaccacaataacaaactgtatttatcaggtcacatccaaatcattccattctagaaataaaatttcttttaaacgaactactttaaatgttttactgattaatgagactactgataaaactttgctttttttgtaatctaaaaatacactgcaacaaactaaaaagaacacggaggatgttagtattccatgtgttttttaacacata

SEQ ID NO: 7850 - DNA, 616 bp, Homo sapiens
  unsure (546): n=A,T,C or G
  unsure (578): n=A,T,C or G
aaccgacgaggactctctcattgagatcatctgctccagaaccaaccaggagctgcaggaaattaacagagtctacaaggaaatgtacaagactgatctggagaaggacattatttcggacacatctggtgacttccgcaagctgatggttgccctggcaaagggtagaagagcagaggatggctctgtcattgattatgaactgattgaccaagatgctcgggatctctatgacgctggagtgaagaggaaaggaactgatgttcccaagtggatcagcatcatgaccgagcggagcgtgccccacctccagaaagtatttgataggtacaagagttacagcccttatgacatgttggaaagcatcaggaaagaggttaaaggagacctggaaaatgctttcctgaacctggttcagtgcattcagaacaagcccctgtattttgctgatcggctgtatgactccatgaagggcaaggggacgcgagataaggtcctgatcagaatcatggtctcccgcagtgaagtggacatgttgaaaattangtctgaattcaagagaaagtacggcaagtccntgtactattatatccagcaagacactaagggcgactac

SEQ ID NO: 7851 - DNA, 210 bp, Homo sapiens
  unsure (12): n=A,T,C or G
ctgacggcggcnacatgactctgaaccccagggcacctactgacgatgataaaaacatctacctgactcttcctcccaacgaccatgtcaacagtaataactaaagagtaacgttatgccatgtggtcacactctcagcttgctgagtggatgacaaaaagaggggaattgttaaaggaaaatttaaatggagactggaaaaattcctga

SEQ ID NO: 7852 - DNA, 485 bp, Homo sapiens
  unsure (477): n=A,T,C or G
cctgcttacaagctgccaactgtaaaaattgtggtagactatctcaagtaagtttccattctcatgaccacattaccaatgtaagtggcacaaaacagattattaatcaattaattaagcaaattgtgcatcactggcttatctttacttccaaaggcttatctttacttctaaagaaaaataagacagtgaagtcctccagttgccaaataaaatgcaaccaaattgtcagcagaatttcagaatcattatgattctaatagccatgttttattgaatgcttaagaatgtgctaaacattgttctaattgctttatgtgcattgtagcatatcatcctcaacaaacagaaaacaacaaaaatgttatttagatttttaaaaatatgcaaatgtctctaataaagttacgtaactgtagttacccaaattactttgaaaaaaatggactgctttggcaggtaattattctttgcaangacacata

SEQ ID NO: 7853 - DNA, 532 bp, Homo sapiens
  unsure (506): n=A,T,C or G
ccagtggaatgatgttccctgcaattaccatctcacctatacgtgcaagaaaggaacagtcgcttgcggccagccccctgttgtagaaaatgccaagacctttggaaagatgaaacctcgttatgaaatcaactccctgattagataccactgcaaagatggtttcattcaacgtcaccttccaactatccggtgcttaggaaatggaagatgggctatacctaaaattacctgcatgaacccatctgcataccaaaggacttattctatgaaatactttaaaaattcctcatcagcaaaggacaattcaataaatacatccaaacatgatcatcgttggagccggaggtggcaggagtcgaggcgctgatccctaaaatggcgaacatgtgttttcatcatttcagccaaagtcctaacttcctgtgcctttcctatcacctcgagaagtaattatcagttggtttggatttttggaccaccgttcagtcattttgggttgccgngctcccaaaacattttaaatgaaagt

SEQ ID NO: 7854 - DNA, 558 bp, Homo sapiens
ccaagtattattttgaaaaagtacttaggtcacttaaaatgtgaataatccaaccacaatgattaaaattcatcagctacccattactttataccttggaatagggtttcttgactttagtactactgacacactgttatgacaaccacaagtatctccagacactttccaatgtcccctttgggggcaaaatcatgccagttgagaaccactgcccaagaacaatgtctgcactttggcctatctttaaagtctttattttttcatgtttataattctagaatatccaactttcatttaacatcagtttaaatactttacatgttactacacaatgactgttttaatgcccacctatggagatgcattacagtattataaaaccacaattttcccatggctactagaaatctatattatttacaatatagctgttagaaaacatttgaaattacttccttaagacacatctatcaaattaaaaactcatgcactgggtcacttgactattttaatgattcaatcataattctaatacagagtgtcttccaaaatagc

SEQ ID NO: 7855 - DNA, 273 bp, Homo sapiens
ggcacaacaggctgctctgggattctcttcagccaatcttcattgctcaagtgtctgaagcagccatggcagaagtacctgagctcgccagtgaaatgatggcttattacagtggcaatgaggatgacttgttctttgaagctgatggccctaaacagatgaagtgctccttccaggacctggacctctgccctctggatggcggcatccagctacgaatctccgaccaccactacagcaagggcttcaggcaggccgcgtcagttgttgtgg

SEQ ID NO: 7856 - DNA, 510 bp, Homo sapiens; identical to SEQ ID NO: 603
  unsure (234): n=A,T,C or G
  unsure (495): n=A,T,C or G

SEQ ID NO: 7857 - DNA, 491 bp, Homo sapiens
  unsure (105): n=A,T,C or G
  unsure (335): n=A,T,C or G
  unsure (391): n=A,T,C or G
  unsure (460): n=A,T,C or G
  unsure (461): n=A,T,C or G
  unsure (476): n=A,T,C or G
cctactatgggtgttaaattttttactctctctacaaggttttttcctagtgtccaaagagctgttcctctttggactaacagttaaatttacaaggggatttanagggttctgtgggcaaatttaaagttgaactaagattctatcttggacaaccagctatcaccaggctcggtaggtttgtcgcctctacctataaatcttcccactattttgctacatagacgggtgtgctcttttagctgttcttaggtagctcgtctggtttcgggggtcttagctttggctctccttgcaaagttatttctagttaattcattatgcagaaggtatangggttagtccttgctatattatgcttggttataatttttcatctttcccttgcggnactatatctattgcgccaggtttcaatttctatcgcctatactttatttgggtaaatggtttggctaannttgtctggtaataangtggagtgggtttgg

SEQ ID NO: 7858 - DNA, 297 bp, Homo sapiens
ccactgaactgcgctgccagtgcttgcagaccctgcagggaattcaccccaagaacatccaaagtgtgaacgtgaagtcccccggaccccactgcgcccaaaccgaagtcatagccacactcaagaatgggcggaaagcttgcctcaatcctgcatcccccatagttaagaaaatcatcgaaaagatgctgaacagtgacaaatccaactgaccagaagggaggaggaagctcactggtggctgttcctgaaggaggccctgcccttataggaacagaagaggaaagagagacacag

SEQ ID NO: 7859 - DNA, 433 bp, Homo sapiens; identical to SEQ ID NO: 276
  unsure (3): n=A,T,C or G
  unsure (4): n=A,T,C or G
  unsure (14): n=A,T,C or G
  unsure (189): n=A,T,C or G
  unsure (231): n=A,T,C or G
  unsure (299): n=A,T,C or G
  unsure (302): n=A,T,C or G
  unsure (324): n=A,T,C or G
  unsure (373): n=A,T,C or G
  unsure (374): n=A,T,C or G

SEQ ID NO: 7860 - DNA, 529 bp, Homo sapiens
  unsure (496): n=A,T,C or G
cctagaaaacaaaagaacagccaagaggaactcaaaagccaaaggaaaaagtgattctgaagatggggagaaggaaaatgaaaaatctaaaacttcagattcttcaaatgacgaatctagttcaatagaagacagttcttccgattctgaatcagagtcagaacctgaaagtgaatctgaatccagaagagtcactaaggagaaagaaaagaaaacaaagcaagatagaactcctcttaccaaagatgtttcacttctagatctggatgattttaacccagtatccactccagttgcacttcccacaccagctctttctccaagtttgatggctgatcttgaaggtttacacttgtcaacttcctcttcagtcatcagtgtcagtactcctgcatttgtaccaacgaaaactcacgtgctgcttcatcgaatgagtggaaaaggactagctgcccattatttctttccaagacagccttgcatttttggtgataanatggtctctatacaaataacactgaataacact

SEQ ID NO: 7861 - DNA, 396 bp, Homo sapiens
ccatgggttataagccgaaggcatatttgagggattttatgtatgtgtctcaggatccaaaagatcaactattacttggaccaacatatgctactccaaaagttctagaaaaggcaggattgaccatgaatgatattgatgcttttgaatttcatgaagctttctcgggtcagattttggcaaattttaaagccatggattctgattggtttgcagaaaactacatgggtagaaaaaccaaggttggattgcctcctttggagaagtttaataactggggtggatctctgtccctgggacacccatttggagccactggctgcaggttggtcatggctgctgccaacagattacggaaagaaggaggccagtatggcttagtggctgcgtgtgcag

SEQ ID NO: 7862 - DNA, 565 bp, Homo sapiens
  unsure (179): n=A,T,C or G
  unsure (374): n=A,T,C or G
  unsure (451): n=A,T,C or G
ttttttttaaatggttctttattcataaacttgatgcaagtttacaaaatttactgtacattgccaaataaatctgcaattaaaaataaaatccattaaacaaagcatgccaaatgtgcagctatcagtctgcttgccatcaggatattaaagaattcaacaatgtattcaagatttanccttaggcttaaggaactttactgatttaaagaattctgccttgtcacttgttatctgagcaactggcaatcagaactttatacaaatgtaatcaagtgaacaagaataccagaaaatctatttactgctctcttaaccaaaatggaatcaaaagaaattaaacacacacaatgtagaaatgacaagtctctcanatgtggtttacaaagttaaaaactgaatctcaaagctaatgcacaagaaacacttttgaactttgtaacttgtttgngcagaaaaatgtgcttctggatttcttgttaaaagtgcttaagaactagaatttacttttaaatcaaacgtgggtgtataaaaaaatctattaccaaccaaaaaggactgattc

SEQ ID NO: 7863 - DNA, 477 bp, Homo sapiens
  unsure (38): n=A,T,C or G
  unsure (42): n=A,T,C or G
  unsure (75): n=A,T,C or G
  unsure (104): n=A,T,C or G
  unsure (109): n=A,T,C or G
  unsure (112): n=A,T,C or G
  unsure (121): n=A,T,C or G
  unsure (125): n=A,T,C or G
  unsure (127): n=A,T,C or G
  unsure (132): n=A,T,C or G
  unsure (144): n=A,T,C or G
  unsure (147): n=A,T,C or G
  unsure (154): n=A,T,C or G
  unsure (183): n=A,T,C or G
  unsure (191): n=A,T,C or G
  unsure (202): n=A,T,C or G
  unsure (234): n=A,T,C or G
  unsure (246): n=A,T,C or G
  unsure (254): n=A,T,C or G
  unsure (263): n=A,T,C or G
  unsure (273): n=A,T,C or G
  unsure (278): n=A,T,C or G
  unsure (286): n=A,T,C or G
  unsure (288): n=A,T,C or G
  unsure (295): n=A,T,C or G
  unsure (303): n=A,T,C or G
  unsure (305): n=A,T,C or G
  unsure (353): n=A,T,C or G
  unsure (356): n=A,T,C or G
  unsure (371): n=A,T,C or G
  unsure (390): n=A,T,C or G
  unsure (395): n=A,T,C or G
  unsure (417): n=A,T,C or G
  unsure (437): n=A,T,C or G
  unsure (439): n=A,T,C or G
  unsure (472): n=A,T,C or G
gtacaagcttttttttttttttttttttttttttgggnattnaaagttgtattttatttttaactatccaatatnttaaactttgattacatcaaatgaaatanattgngcncactcactntaananagctntgatatatgcanaancaaaggngcagggatcatgcaatagtttcgtaccanatttcaanataccaagtancaaggaaacacaatggaattgaaggctgaggngaagtacaggcntaaggcanggaaagcanaacattcaanatgtncctatatncnccagttnttaaaacncncaaatcatttccaataaggcactggctcatgtatttctgttgaggcanaantcaatcttaggatgnggtctgtacatatctgcanataanattcacaaaagctgaattcagngttattagtccttcattcanangcttcatttttgcattttcaattgctttcctgngatat

SEQ ID NO: 7864 - DNA, 498 bp, Homo sapiens
ctggtggttaacaagtggatcgtcatgttcagtagtttatacattatgtgagaagtaacgttctgattctttttcttacacagaattggcagagggggtcgatttgggaggaaaggtgtggctataaactttgttactgaagaagacaagaggattcttcgtgacattgagactttctacaatactacagtggaggagatgcccatgaatgtggctgaccttatttaattcctgggatgagagttttggatgcagtgctcgctgttgctgaataggcgatcacaacgtgcattgtgcttctttctttgggaatatttgaatcttgtctcaatgctcataacggatcagaaatacagattttgatagcaaagcgacgttagtcgtgagctcttgtgaggaaagtcattggctttatcctctttagagttagactgttggggtgggtataaaagatggggtctgtaaaatctttctttcttagaaatttatttcctagtt

SEQ ID NO: 7865 - DNA, 198 bp, Homo sapiens
ctgaggtggtcttgcttgtcatcgtcggtgaagaaggacttgttgtggtacgtgcctcgggccagcatgcccttgggagcctcctcaactggagtgaggaactcatactcctcaggccgaggtccatagctgccaaccataaatgttgctttatccactttcaccccagtcctgtaggtgtgctgaacgtatttcagg

SEQ ID NO: 7866 - DNA, 547 bp, Homo sapiens
  unsure (479): n=A,T,C or G
  unsure (504): n=A,T,C or G
tgcaaaaccaccacctctgctgtcatggttcactgcctgcgacagaagacggaagaggagctcttggagacgacattgaaaatgaaattcttatctctggacttacagggagaccccagagagagtcaaccccttctgggcactgtgattgatgggatgctgctgctgaaaacacctgaagagcttcaagctgaaaggaatttccacactgtcccctacatggtcggaattaacaagcaggagtttggctggttgattccaatgcagttgatgagctatccactctccgaagggcaactggaccagaagacagccatgtcactcctgtggaagtcctatccccttgtttgcattgctaaggaactgattccagaagccactgagaaatacttaggaggaacagacgacactgtcaaaaagaaagacctgttcctggacttgatagcagatgtgatgtttggtgtcccatctgtgattgnggcccggaaccacagagatgctggnagcacccacctacatgtatgagtttcagtaccgtccaagcttc

SEQ ID NO: 7867 - DNA, 507 bp, Homo sapiens
  unsure (373): n=A,T,C or G
  unsure (427): n=A,T,C or G
gttggctggaagtaccaggcagtgacagccaccctggaggagaagaggaaagagaaagccaagatccactaccggaagaagaaacagctcatgaggctacggaaacaggccgagaagaacgtggagaagaaaattgacaaatacacagaggtcctcaagacccacggactcctggtctgagcccaataaagactgttaattcctcatgcgttgcctgcccttcctccattgttgccctggaatgtacgggacccaggggcagcagcagtccaggtgccacaggcagccctgggacataggaagctgggagcaaggaaagggtcttagtcactgcctcccgaagttgcttgaaagcactcggagaattgtgcangtgtcatttatctatgaccaataggaagagcaaccagttactatgagtgaaagngagccagaagactgattggagggccctatcttgtgagtggggcatctgttggactttccacctggtcatatactctgcag

SEQ ID NO: 7868 - DNA, 478 bp, Homo sapiens; identical to SEQ ID NO: 277

SEQ ID NO: 7869 - DNA, 258 bp, Homo sapiens
cagaaacatccaattctcaaactgaagctcgcactctcgcccccagcatgaaagtctctgccgcccttctgtgcctgctgctcatagcagccaccttcattccccaagggctcgctcagccagatgcaatcaatgccccagtcacctgctgctataacttcaccaataggaagatctcagtgcagaggctcgcgagctatagaagaatcaccagcagcaagtgtcccaaagaagctgtgatcttcaagaccattgtgg

SEQ ID NO: 7870 - DNA, 567 bp, Homo sapiens
ccaagaacctcttccaccgggccatttctgagagtggcgtggccctcacttctgttctggtgaagaaaggtgatgtcaagcccttggctgagcaaatttctatcactgctgggtgcaaaaccaccacctctgttgtcatggttcactgcctgcgacagaagacggaagaggagctcttggagacgacattgaaaatgaaattcttatctctggacttacagggagaccccagagagagtcaaccccttctgggcactgtgattgatgggatgctgctgctgaaaacacctgaagagcttcaagctgaaaggaatttccacactgtcccctacatggtcggaattaacaagcaggagtttggctggttgattccaatgcagttgatgagctatccactctccgaagggcaactggaccagaagacagccatgtcactcctgtggaagtcctatccccttgtttgcattgctaaggaactgattccagaagccactgagaaatacttaggaggaacagacgacactgtcaaaaagaaagacctgttcctggacttgatagcagatgtga

SEQ ID NO: 7871 - DNA, 526 bp, Homo sapiens
ccacactctacttctgcttctgccacctatggggtcgaggcaggtgtgatgccttggctaagtccacagacttctgagaggcccacgctttcttcttctccagaaataaaccctgaaactcaagcagctttaatcagagggcaggattccacgatagcagcatcagaacagcaagtggcagcgagaattcttgattccaatgatcaggcaacagtaaaccctgtggaatttaatactgaggttgcaacaccaccattttcccttctggagacttctaatgaaacagatttcctgattggcattaatgaagagtcagtggaaggcacggcaatctatttaccaggacctgatcgctgcaaaatgaacccatgccttaacggaggcacctgttatcctactgaaacttcctacgtatgcacctgtgtgccaggatacagcggagaccaatgtgaacttggtaagatggtacttggctgaaaaggtgcagttctttcacagaagatatattgggggagaatttatgttg

SEQ ID NO: 7872 - DNA, 410 bp, Homo sapiens
  unsure (13): n=A,T,C or G
  unsure (15): n=A,T,C or G
  unsure (197): n=A,T,C or G
  unsure (226): n=A,T,C or G
  unsure (253): n=A,T,C or G
  unsure (259): n=A,T,C or G
  unsure (262): n=A,T,C or G
  unsure (268): n=A,T,C or G
  unsure (335): n=A,T,C or G
  unsure (347): n=A,T,C or G
  unsure (404): n=A,T,C or G
  unsure (405): n=A,T,C or G
  unsure (407): n=A,T,C or G
cctgtttgattgnanctatgttggtgtatctcgtgtacaagatggaaaagtgcttttgttgttctacctgatccagttgggggagcaggaatagggggtgcctgcctaacggcctctagcccatgtgcttatactgggatctgtcccgagggatctgcacctggttggcagtcattttgtggtggacgtggtaaatngcgagtgttaccatgatgacgaggcccangatgagccccaaaatcaggggcaaggnttcttncanttgctnccgctcatccactgggcatttatgctcttcactgaagacaaaatctgagataatgtcaaaaggttgnatgtggaccgcncacaggatcatggtgaccgtcttctgcggatcactagaggccagtgaaatggtttgnntnagc

SEQ ID NO: 7873 - DNA, 478 bp, Homo sapiens
ccagggaactccaaattcagctaatacccaaggaaattcaacaccaaatcctcaggtccctgattaccctccaaactatattttattccttaataacttaccagaagagactaatgagatgatgttatccatgctgtttaatcagttccctggcttcaaggaagtacgtctggtaccagggaggcatgacattgcttttgttgaatttgaaaatgatggacaggctggagctgccagggatgctttacagggatttaagatcacaccgtcccatgctatgaagatcacctatgccaagaaataacatttgggatagtcgtctttaaaagacttggtgttatttacagtgtttgttttgataacatttggctgggtcattttaatagttagagatgaggaggagtaaaagtgaaatttttgtgaaggacttaaattatccagtgtttctttagccttggtgaactatgaaatacgaagg

SEQ ID NO: 7874 - DNA, 519 bp, Homo sapiens
  unsure (481): n=A,T,C or G
ccttattctttagttctctactttacagtttcccattgtcctttgaagaacacatttgggcttgctctcagactcgccaacataaatcatcatttacatatcagggcatgtgtgagttccagcagttcactgaaataaaatccctgagccttaaccctcccatctcaaatacagtgaaaatttattttaatgataatgatggtaattttttatttgacactttttataatgctgatgttaaagtcaagaagcatttctctgtaatggaaaaaatgtctcatttttcttcctactgggcggtcagaagttggattttagaaaaaatatattgaatagggattataccgccttccttccttaaacctcataaagcaatggagtaggtggataagaagaaatagaaccaatttctggaaacaactttggagtaatgatcatagaagttacagatatccaagaatgcctaaagaaatatatctgnccttccatacccacgacacacaaataggatttatagtt

SEQ ID NO: 7875 - DNA, 474 bp, Homo sapiens
  unsure (9): n=A,T,C or G
  unsure (356): n=A,T,C or G
  unsure (362): n=A,T,C or G
  unsure (363): n=A,T,C or G
ctgtattanagggaatacacattttaattgctctttttgaaaatatcaccaggcagttcagaatgtctcatttattgagaatattgtgacaatcaaagaccttaatatcagccagatgctaacaattgggaatagggcagaatttaataatggaatgtatgggattctcatttttactcaatcttgaatcatctgagaatgttttctattcaagccagtatttttagataaacacagatatagatatcgctactttgaaaaaaatcacttattttaaactcagaatttcttagtactaaatgctaaccaatacacattttatacataatatgtacagactttgttaccaagcgccncacaannaggacaaacatattagttaccttggttttcaaaggttgtcaactctgcatattgtgtggcaaggagatactatcaacatttttttttgcataatgtgcaagtattatatgg

SEQ ID NO: 7876 - DNA, 384 bp, Homo sapiens
cctctctcacctctcctactcacttaaagcccgcctgacagaaaccacggccacatttggttctaagaaaccctctgtcattcgctcccacattctgatgagcaaccgcttccctatttatttatttatttgtttgtttgttttattcattggtctaatttattcaaagggggcaagaagtagcagtgtctgtaaaagagcctagtttttaatagctatggaatcaattcaatttggactggtgtgctctctttaaatcaagtcctttaattaacactgaaaatatataagctcagattatttaaatgggaatatttataaatgagcaaatatcatactgttcaatggttctgaaataaacttcactgaaaaaaaaaaaaaaaa

SEQ ID NO: 7877 - DNA, 564 bp, Homo sapiens
ctcaagaggctgaggcaggagaattgcttaaatctgggaggcggaagttgcagtgagccaagatcgcgccactgaactccagcctaggcaacaagagcaaaactccatctccaaaaaaaagaaaggaaaaacagggccaggtagccattgtggagagagcacacttaggaatcctgggatgttagtgttaaaagaaagctcctggagccagtgattctcaggtttgtcccagaacccttttttctaagccccatataaaaggtagattaaaaaaacaaagtagcatgagtgaaattgagagagggacaggtaatgcctttcagcccctaacttctaacaatctggaagcacaacgtgaaaatcacgtagcccaaccctatcattttcatattatgaaactgagtccaggtaagtgaatctgtccaaggtcacccagcaaggtatcagtagccctgagggtaaggactctgataaggctcgggagggtcctggaaagcctgaggcggcaggaagagtgtgcagagttgagcgtgtctggaaggctgatccactgctgggcccaca

SEQ ID NO: 7878 - DNA, 424 bp, Homo sapiens
gattttgataagcatcatcatatttagtgttatcagcaaagacacaagctcaaaagtgacatcttttccatgaatccaggaaagaagaaaaatccactcagttcagataaatcctagcaattcccaaagggaaaggcattggatatgtgtttgatgagaaagaaaatgaaaaaggggtggggtggtagtactcttctacctgcttctcaaaaccagaacattgctcggtcagattaaacccagtgaaaaacacttacaataaccagtatacagcatgttttcccacagcttatttggaaaaaaagacaggtaacagtcaaagttagagaagctgtaagcaatggacaggcttgatattaagtgtgcaggatctgggctaaatgccttaaaatgtgcaattcaactttccacttctgaatgtgga

SEQ ID NO: 7879 - DNA, 479 bp, Homo sapiens
  unsure (38): n=A,T,C or G
  unsure (331): n=A,T,C or G
  unsure (386): n=A,T,C or G
  unsure (387): n=A,T,C or G
ccaccaacagtttcccagccacatgctgggccctctangtctctccagcccactctaaggacccaagaaatgcagccacagtccatctctcttttttctctccttccgggggaccaaggtaccttctggggcatacaacatggcagcagggcctcgggaagaggggtaggaggaccgagcagcattctctgtagaggaagacaggaaaggagaccctcttggcacacatttatggagggttgtccctgaagagaagggcaggtgggagaggttccctgttacttaagagaaggcaccagtggcaaagagcacaatgaagaggatgatgatnaaaacaatcacgcagataaggacaatcatcttcacgttcttccaccagaattttnngagccaccttctgcgatgtcgtcttgaagtgctcagatgtggcttccagatcctctgtcttgttgcggagatgttccaagttttccccccgg

SEQ ID NO: 7880 - DNA, 490 bp, Homo sapiens
ctggctgtggatcaacttttttcagagaccttggcgataaagggctaatttcatataccgagtatcttttcttgcttacaatcctcactaaaccccattctggatttcatgttgcttttaaaatgctggatacagatggtaatgagatgattgaaaaaagggaattttttaagctgcagaagatcataagtaaacaagatgacttgatgacagtgaaaactaatgaaactggatatcaggaagcaatagtgaaagaacctgaaattaacacaactcttcagatgcgtttctttggaaaaagaggacaaagaaaacttcattataaagaatttcgaagatttatggaaaatttacaaacagagattcaagaaatggaattccttcagttttctaaaggtttgagtttcatgagaaaagaagactttgcagagtggctactttttttcactaacactgaaaataaagatatttattggaaaaatgtgagaga

SEQ ID NO: 7881 - DNA, 309 bp, Homo sapiens
  unsure (10): n=A,T,C or G
  unsure (14): n=A,T,C or G
  unsure (218): n=A,T,C or G
  unsure (302): n=A,T,C or G
  unsure (306): n=A,T,C or G
cctgtttgantgtngctatgttggtgtatctcgtgtacaagatggaaaagtgcttttgttgttctacctgatccagttgggggagcaggaatagggggtgcctgcctaacggcctctagcccatgtgcttatactgggatctgtcccgagggatctgcacctggttggcagtcattttgtggtggacgtggtaaatcgcgagtgttaccatgatgacnaggcccaagatgagccccaaaatcaggggcaaggtttcttccagttgctcccgctcatccactgggcatttatgctcttcactnaagncaa

SEQ ID NO: 7882 - DNA, 498 bp, Homo sapiens
tccggataggccgagaaagtgttgtgggaagaaagttagatttacgccgatgaatatgatagtgaaatggattttggcgtaggtttggtctagggtgtagcctgagaataggggaaatcagtgaatgaagcctcctatgatggcaaatacagctcctattgataggacatagtggaagtgggctacaacgtagtacgtgtcgtgtagtacgatgtctagtgatgagtttgctaatacaatgccagtcaggccacctacggtgaaaagaaagatgaatcctagggctcagagcactgcagcagatcatttcatattgcttccgtggagtgtggcgagtcagctaaatactttgacgccggtggggatagcgatgattatggtagcggaggtgaaatatgctcgtgtgtctacgtctattcctactgtaaatatatggtgtgctcacacgataaaccctaggaagccaattgatatcatagctcagaccatacctatgta

SEQ ID NO: 7883 - DNA, 556 bp, Homo sapiens
ctgggaagccacgagaatattgtgaacctgctgggggcgtgcacactgtcaggaccaatttacttgatttttgaatactgttgctatggtgatcttctcaactatctaagaagtaaaagagaaaaatttcacaggacttggacagagattttcaaggaacacaatttcagtttttaccccactttccaatcacatccaaattccagcatgcctggttcaagagaagttcagatacacccggactcggatcaaatctcagggcttcatgggaattcatttcactctgaagatgaaattgaatatgaaaaccaaaaaaggctggaagaagaggaggacttgaatgtgcttacatttgaagatcttctttgctttgcatatcaagttgccaaaggaatggaatttctggaatttaagtcgtgtgttcacagagacctggccgccaggaacgtgcttgtcacccacgggaaagtggtgaagatatgtgactttggattggctcgatatatcatgagtgattccaactatgttgtcaggggcaatgcccgtctgcctgtaa

SEQ ID NO: 7884 - DNA, 289 bp, Homo sapiens
  unsure (9): n=A,T,C or G
  unsure (13): n=A,T,C or G
  unsure (281): n=A,T,C or G
ctgggaggnaaanggtgactgtatttccaaagaagctcttttgattcagaactccaggagaccctgacatgaaaaccttaaagcaaatgactgtcacatgcttcaaggagtttatgtcaagacagttctacttatgtaaagtaagattataaaatgaaagagagtgtataaagaaaatcctaaggaatccactaaaaaacaactagaacgaagaggcaagttcagcaaggttgcaagatacaagacctatatataaaaatcaattgcatttctgtacactngtaataaa

SEQ ID NO: 7885 - DNA, 458 bp, Homo sapiens
ccttatttctcttgtcctttcgtacagggaggaatttgaagtagatagaaaccgacctggattactccggtctgaactcagatcacgtaggactttaatcgttgaacaaacgaacctttaatagcggctgcaccattgggatgtcctgatccaacatcgaggtcgtaaaccctattgttgatatggactctagaataggattgcgctgttatccctagggtaacttgttccgttggtcaagttattggatcaattgagtatagtagttcgctttgactggtgaagtcttagcatgtactgctcggaggttgggttctgctccgaggtcgccccaaccgaaatttttaatgcaggtttggtagtttaggacctgtgggtttgttaggtactgtttgcattaataaattaaagctccatagggtcttctcgtcttgctgtgttatgcccgcctcttcacg

SEQ ID NO: 7886 - DNA, 381 bp, Homo sapiens
  unsure (327): n=A,T,C or G
gggattacaggtgcatgccatcacgcctggctaattttttgtatttttagacgagacagggtttcaccctgttggccaggctggtctcaaactcctaacctcaggtgatccaactgcctcggcctcccaaagtgctgggattacaggtatgagccaccgtgcccagcagaattttttaactatttggttacgactaatttggataatgtagtgcatgcagctttgatttgtgccactaagagtgggcaaactgtcttcctttttgtgaatcagtaaaaattttccctcaacatgtgtttgacagttgtcattcactgctaagttaangcatttggtaaaccacacagcctctgcatccttcctagcgacagccacaagaaa

SEQ ID NO: 7887 - DNA, 581 bp, Homo sapiens
  unsure (520): n=A,T,C or G
  unsure (544): n=A,T,C or G
  unsure (552): n=A,T,C or G
ccatttaaaacaaagaaaaatactaaagccactagtaaacatctgatgtgcaaaatacaacatcctctagttggctttatgccattattacataagctccaaatagctcatcttaaattaaaaagaaaaagtggctgtcccatctctgctgcataaatcagatttttttttaaaggtttagagtactttaaggaagggaagttcaaaactgccagtgaaattcacagagaatacaaatttagcaatttaatttcccaaagctctttgaagaagcaagagagtctctcttcttaatgcagtgttctcccaagaggaactgtaattttgcttggtacttatgctgggagatatgcaaaatgtgtttttcaatgtttgctagaatataatgtttcctcttcagtgtctgtttcatcctggaactcatggcttaggagggacttcttggagccggtagacatcatgcgaatttcatcttcatactcatcatgatgctgcctgagccgatgaaagccatccttgngtctattagacttgattgagcagnatgcaccnaaataatgcaagctgttaggatcaatgcc

SEQ ID NO: 7888 - DNA, 357 bp, Homo sapiens
  unsure (345): n=A,T,C or G
  unsure (346): n=A,T,C or G
ccttattttttgaacaattgagcaaaagaaacagatgaaacctcatacaaaaccctccaaaatatgaaaatgtggggtttatttgtgctaatgctcttcttttggaaacatttgtgttaaaggatcttatggttggtgatgaggcaagtgaattacgatcaatgttagaagttaactaccctatggaaaatggcatagtacgaaattgggatgacatgaaacacctgtgggactacacatttggaccagagaaacttaatatagataccagaaattgtaaaatcttactcacagaacctcctatgaacccaaccaaaaacagagagaagattgtagaggtaatgnntgaaacttacc

SEQ ID NO: 7889 - DNA, 178 bp, Homo sapiens
  unsure (70): n=A,T,C or G
  unsure (71): n=A,T,C or G
  unsure (73): n=A,T,C or G
  unsure (83): n=A,T,C or G
  unsure (87): n=A,T,C or G
  unsure (88): n=A,T,C or G
  unsure (121): n=A,T,C or G
  unsure (124): n=A,T,C or G
  unsure (143): n=A,T,C or G
  unsure (157): n=A,T,C or G
  unsure (165): n=A,T,C or G
aattcattttatagaaagatttaaagtttttttctggaagtgatatatgtcaaattacatttcctactgnngnatttgagcangganngtcattttttaaatgtttttggccgggcgtggnggntcatgcctgtaatctcagnacattgggaggccnaggcaggnggatcacctgagg

SEQ ID NO: 7890 - DNA, 146 bp, Homo sapiens
ctgtccttccctttcagctttccaaacatgagcacagaaggtgtctagtctgggtgaccaaagtcctcaaacggcagccggtcaacacatcgtcttcctcgttaaccatgtcatcaggtggttccacacagcacagacatggctga

SEQ ID NO: 7891 - DNA, 454 bp, Homo sapiens
  unsure (323): n=A,T,C or G
  unsure (397): n=A,T,C or G
acgctttcttcttctccagaaataaaccctgaaactcaagcagctttaatcagagggcaggattccacgatagcagcatcagaacagcaagtggcagcgagaattcttgattccaatgatcaggcaacagtaaaccctgtggaatttaatactgaggttgcaacaccaccattttcccttctggagacttctaatgaaacagatttcctgattggcattaatgaagagtcagtggaaggcacggcaatctatttaccaggacctgatcgctgcaaaatgaacccgtgccttaacggaggcacctgttatcctactgaaacttnctacgtatgcacctgtgtgccaggatacagcggagaccagtgtgaacttgattttgatgaatgtcactctaatncctgtcgtaatggagccacttgtgttgatggttttaacacattcaggtgcctctgcc

SEQ ID NO: 7892 - DNA, 578 bp, Homo sapiens
  unsure (545): n=A,T,C or G
  unsure (560): n=A,T,C or G
ctgagggacctgactgttagaaggaaaactaacaaacagaaaggagtagcatcaacatcaacaaaaaggacatccacaacaaaacctcatctgtaggtcaccaacatcagagaccaaaggtagataaaaccacaaaggtggggagaaaccagagcagaaaagctgaaaattctaaaaactggagcacttcttctcctccaaaggattgcagctccttgccagcaacggaacaaagctggatggagaatgactttgacgagctgacagaagtaggcttcagaaggtcggcaataacaaacttttctgagctaaaggcagatgttcaaacccatcgcaaggaagctaaaaaccttgaaaaaagattagacgaatggctaactagaataaacagcgtagagaagaccttaaatgatctgatggagctgaaaaccatggcatgagaactacgtgacacatgcacaagcttcaatagccgattcgatcaagtggaagaaagggtatcagtgattgaagatcaaattaatgaaataaagtaagagagaagnttagagaaaaaagtnaaaagaaacaaacaaagc

SEQ ID NO: 7893 - DNA, 462 bp, Homo sapiens
  unsure (245): n=A,T,C or G
  unsure (289): n=A,T,C or G
cgcgtgctggtggtcttggcatcaatcttgcgactgctgatgtagtaattttgtatgattctgattggaatccccaagtagatcttcaggctatggaccgagcacatagaattgggcagactaagacagtcagagtgttccgctttataactgataacactgtagaagaaagaatagtagaacgtgctgagatgaaactcagactggattcaatagccattcaacaagggaggcttgtggatcanaatctgaacaaaattgggaaagatgaaatgcttcaaatgattanacatggagcaacacatgtgtttgcttcaaaggaaagtgagatcactgatgaagatatcgatggtattttggaaagaggtgcaaagaagactgcagagatgaatgaaaagctctccaagatgggcgaaagttcacttagaaactttacaatggatacagagtcaagtgtttata

SEQ ID NO: 7894 - DNA, 545 bp, Homo sapiens
  unsure (453): n=A,T,C or G
  unsure (475): n=A,T,C or G
  unsure (482): n=A,T,C or G
ccatagtaaataatgattatttatttgcaaagagaagacagagataacaatagcaataataataatgtatttcaaacaattaagagtaaatttcaaatgcctcaccacaaaatataagtaagcaaagtaaggcgatagtatgttaattagtatgatttaatcatactacattacacacatatatataaacattacgttgtaccctatgtgtacaattatgatttctgaattaatattagagtggggagaacaataatgattaatttttacttcttcagtaagattacaatgaaaatgtagagagcactagcattatagtaactatacgataggccactttaaataaatggcatcttttacaaaatttttagtcaataagttgattacgacatacttacgaactatttgctattaagtgtaagttaatttataattttagtattttcaaaaaangaacatattaaaatcctatcantatttcnaataatgacaaaattaatcatttttaatagaatccttactcaggtcctccaaaaacaatataa

SEQ ID NO: 7895 - DNA, 243 bp, Homo sapiens
cctctttttaccagctccgaggtgattttcatattgaattgcaaattcgaagaagcagcttcaaacctgccggggcttctcccgccttttttcccggcggcgggagaagtagattgaagccagttgattagggtgcttagctgttaactaagtgtttgtgggtttaagtcccattggtctagtaagggcttagcttaattaaagtggctgatttgcgttcagttgatgcagagtggggttttg

SEQ ID NO: 7896 - DNA, 341 bp, Homo sapiens
agatgtgcaaggatgtctgtgaagccatggaatacctggagtcaaagcagttccttcaccgagacctggtgggaccttagaaggattggcctaggacaaagggctgatggggtggaagtagcagtggaagatatatcatacatggttgaggggggctgctggtgccatcatttcaattttatctagaaagtactataagttaggcgtgcctctgccccagtgctgagcccatcaaatatctccagcctcagctccatgaagtctgccgtggtgggaatcagagcagtcactcactcccaaccccctaccacccacaagaaaatggtggggtctttcagtgg

SEQ ID NO: 7897 - DNA, 475 bp, Homo sapiens
  unsure (263): n=A,T,C or G
gttgggtgccggtggagtcgtgttggtcctcagaatccccgcgtagccgctgcctcctcctaccctcgccatgtttcttacccggtctgagtacgacaggggcgtgaatactttttctcccgaaggaagattatttcaagtggaatatgccattgaggctatcaagcttggttctacagccattgggatccagacatcagagggtgtgtgcctagctgtggagaagagaattacttccccactgatggagcccagcagcattnagaaaattgtagagattgatgctcacataggttgtgccatgagtgggctaattgctgatgctaagactttaattgataaagccagagtggagacacagaaccactggttcacctacaatgagacaatgacagtggagagtgtgacccaagctgtgtccaatctggctttgcagtttggagaagaagatgcagatccaggtgccatgtctcgt

SEQ ID NO: 7898 - DNA, 250 bp, Homo sapiens
ccatcacaagaaaatgtaaggctgatgatgggcttatttgatttgggaaatgtaatttctctcacaggctttaagtcccatgtgctccataaccttacaattccattttctaatcccccagcgattacattgatagatactccctcaggctggttggagaaagccacggaacagatgatctccctgcagtggacatgtccaacgagatccccgttcaccgtccagagtctgaggtcactgcctccgccag

SEQ ID NO: 7899 - DNA, 470 bp, Homo sapiens
  unsure (374): n=A,T,C or G
  unsure (381): n=A,T,C or G
  unsure (422): n=A,T,C or G
  unsure (440): n=A,T,C or G
  unsure (467): n=A,T,C or G
ccactagaggtctgtgtgccattgcccaggcagagtctctgcgttacaaactcctaggagggcttgctgtgcggagggcctgctatggtgtgctgcggttcatcatggagagtggggccaaaggctgcgaggttgtggtgtctgggaaactccgaggacagagggctaaatccatgaagtttgtggatggcctgatgatccacagcggagaccctgttaactactacgttgacactgctgtgcgccacgtgttgctcagacagggtgtgctgggcatcaaggtgaagatcatgctgccctgggacccaactggtaagattggccctaagaagcccctgcctgaccacgtgagcattgtggaacccaaagatganatactgnccaccacccccatctcagaacagaagggtgggaagccaganccgcctgccatgccccanccagtccccacagcataacagggtctnctt

SEQ ID NO: 7900 - DNA, 368 bp, Homo sapiens
  unsure (287): n=A,T,C or G
  unsure (288): n=A,T,C or G
ccatgtaaataagatgatttaatgttgattttaatcctgtatataaaataaaaagtcacaatgagtttgggcatatttaatgatgattatggagccttagaggtctttaatcattggttcggctgcttttatgtagtttaggctggaaatggtttcacttgctctttgactgtcagcaagactgaagatggcttttcctggacagctagaaaacacaaaatcttgtaggtcattgcacctatctcagccataggtgcagtttgcttctacatgatgctaaaggctgnnaatgggatcctgatggaactaaggactccaatgtcgaactcttctttgctgcattcctttttcttcacttacaagaaagg

SEQ ID NO: 7901 - DNA, 363 bp, Homo sapiens
  unsure (9): n=A,T,C or G
  unsure (23): n=A,T,C or G
  unsure (29): n=A,T,C or G
  unsure (74): n=A,T,C or G
ccatcacancttctcaagtcagntaagtnagacagaactgcagaggtagaagtagaagggaactcagattcttnctcagctagggtagaatccttggaacagtggaggtctttaaattctttacaatcgtcatatctaccattgttggactgttcttctgcatgctgtgacctgatatttgacatgtcttctgaaaacgaagatggaacttccattcggtattctttaacagaactattttcaggggaaggaagatcttgctcagttcctggatcaataattgaggagtctctggtctcattgtcagaagtgctcgttggggtcaggacctccctggtttctgttttcatgtcactgatgcag

SEQ ID NO: 7902 - DNA, 450 bp, Homo sapiens
  unsure (289): n=A,T,C or G
ctgccatctgggcatttgcaatgtccatgcatactcttgaagcagcattcaattctgttcccccttttcaatgtatggttcatggggtttggtatcttgataggactaaggaaggggaagctgtcataaaccaggaagggaaatatttaattggaaagaacaaggctgttcattcaaattgcatttcctacagatttatccaataatggacaagtcaagccgcacacgtcttgctctcattatctgcaatgaagaatttgacagtattcctagaagaactggagctgangttgacatcacaggcatgacaatgctgctacaaaatctggggtacagcgtagatgtgaaaaaaaatctcactgcttcggacatgactacagagctggaggcatttgcacaccgcccagagcacaagacctctgacagcacgttcctggtgttcatgtctca

SEQ ID NO: 7903 - DNA, 481 bp, Homo sapiens
  unsure (2): n=A,T,C or G
  unsure (36): n=A,T,C or G
  unsure (38): n=A,T,C or G
  unsure (44): n=A,T,C or G
  unsure (48): n=A,T,C or G
  unsure (50): n=A,T,C or G
  unsure (121): n=A,T,C or G
  unsure (123): n=A,T,C or G
  unsure (358): n=A,T,C or G
  unsure (406): n=A,T,C or G
  unsure (463): n=A,T,C or G
tntcaaggaagagaaagtaaagggtctccaaagaancngctggntgtncntctgtcgagaacgtccagcgtggagcggggcaaggagagggaggaggcttggagctttgacggggcattgnanaacaagcgaactgccgctaaggaatctgaggagaacaaggagaacctgatcataaattctgaactcaaagacgacttgcttttgtatcaggacgaggaggcgctgaacgactccattatttctggaacactgccacggaaatgcaagaaggagctcctggccgtgaagctaaggaaccggccaagcaaacaggaactagaagaccggaacattttccccagaaggactgatgaanaaagacaggagatccggcagcagatcgagatgaagctttccaaacggntgagccaaagacctgccgtggaagagctggagagaagaaatatcttgaaacaaaggnatgatcagacagagcagg

SEQ ID NO: 7904 - DNA, 532 bp, Homo sapiens
  unsure (456): n=A,T,C or G
  unsure (470): n=A,T,C or G
  unsure (497): n=A,T,C or G
cctagcccaactctccagaaaccaggggtagcctgctgagctctgaaatgccagaagtttaagaaaagagggaagggggcaagaggtggtggtggtagtggtactttgctatttaaaggtagaagaatgcaaggaagtaaaactttttttctccatttgttgtttggcgaccccattggagaattccaggaggcatgcaggatgacatcatgttttacaactgagaaatctcagtaattctgtaaaatggagtccctgcctgctccatgttcctgatggaagctgctttatatttatgtgcttaaagctgtattttatgtcacatttaaatgagggtttaataatcttaattatctaccaaaagtagattacgacgcatgaagatcacataaaatgaacttcacttctcagcatcacaaacatttggaatacaaaaagtccagggatggatattanaagtaagaaaagtncaaaagaggtttgcttagaaataacanaaaattaaaaaaaaaaaacggatcccccctccccc

SEQ ID NO: 7905 - DNA, 346 bp, Homo sapiens
cctggattagaagtgcgtaaacctctgtccatcttccttggccctgtggagctgcctgggaacattccatgattaactctcgtggcgtcctgggacgaccaggtgagcgataccatgtggcacctgggaacctgacgtacctttagatttccgaccatctccctgctgtggtgtctgaggaactgtgcctgggctcaagggctgaacttttgaatacagagtaagaagttttagaaagataaactcctggggaaatgggatcttttaaatccatgtaatttttaaagcagtttttttgcgggggggggcggtggtttgagataggttcttgccctgtggcccaagc

SEQ ID NO: 7906 - DNA, 198 bp, Homo sapiens
  unsure (197): n=A,T,C or G
gacaaattgaaccatatgtaagtaatcttttattttttattttttttttgagacagagtctcactctgtcacccaggctggagtgcagtggcgcgatcttggctctctgcaacctctgcctcccaggttcaagcctcctgagtaactgggactacaggcgtgcaccactacgcccaactaatttttttttttttttna

SEQ ID NO: 7907 - DNA, 394 bp, Homo sapiens
  unsure (243): n=A,T,C or G
  unsure (268): n=A,T,C or G
  unsure (365): n=A,T,C or G
ggcaagttctcccaggagaaagccatgttcagttcgagcgccaagatcgtgaagcccaatggcgagaagccggacgagttcgagtccggcatctcccaggctcttctggagctggagatgaactcggacctcaaggctcagctcagggagttgaatattacggcagctaaggaaattgaagttggtggtggtcggaaagctatcataatctttgttcccgttcctcaactgaaatctttccanaaaatccaagtccggctagtacgcnaattggagaaaaagttcagtgggaagcatgtcgtctttatcgctcagaggagaattctgcctaagccaactcgaaaaagccgtacaaaaaataagcnaaagcgtcccaggagccgtactctgacag

SEQ ID NO: 7908 - DNA, 486 bp, Homo sapiens
  unsure (75): n=A,T,C or G
  unsure (77): n=A,T,C or G
  unsure (383): n=A,T,C or G
  unsure (448): n=A,T,C or G
  unsure (468): n=A,T,C or G
gtctggtatagattcagttactaatgcagtagctaagaaaaaatgtgacttttcagtagcttcagggagagttgngnaagattccaagccatttgcatctggatctggagtagacatgttaactaaagaagtgtcttcctccttcatttctttatcatcactgtaagttttctttgttgttagtacagaataatctgtggttttgagttcagtttcagtaaatgtctgtgaatcaaagattgtttgttctgttgcaggagagttttgaggggattcaaatgacttttcttcttgaatttgttcctctgatgttgtttcactttcaatttcttgtcttacagggttgacttcttgcctagaccataatttggctggctctatantttggggaaagtttgttgaaactgtgccactgacctttacttcctccttctctactggagctttngtaccttccacttctgctgntggtaaaatggtggatct

SEQ ID NO: 7909 - DNA, 550 bp, Homo sapiens; identical to SEQ ID NO: 607
  unsure (20): n=A,T,C or G

SEQ ID NO: 7910 - DNA, 466 bp, Homo sapiens
  unsure (49): n=A,T,C or G
  unsure (53): n=A,T,C or G
  unsure (69): n=A,T,C or G
  unsure (90): n=A,T,C or G
  unsure (125): n=A,T,C or G
ccaggaactgctttcccataggagggccaagtttgcaaaagcggggctntttncttgggcccctccatntctgggaggacagcttctttnctgcgtgatccctgcccctgccttgatagcagctnctggctggcaggagaccatccttcactggaaacccaaagcgcccataaaagacttcctttttcacattgccaaaacttaattttataattgtctgacttacaccactgggcacatctgctaagcttgtgtgccttctagacatataaaaggctactgtgataccattaaatatcagcagtgtgctttgctgtgctttgagtttataagggtgaaaggtgattgtgcaggaaaatgggacagtatatttgctgtgagacaggcaccaagacttcactcccatactcagttataattcatgacagtactggtgggaagcccttatccctctgtggagttaatg

SEQ ID NO: 7911 - DNA, 308 bp, Homo sapiens
  unsure (10): n=A,T,C or G
  unsure (13): n=A,T,C or G
  unsure (26): n=A,T,C or G
  unsure (44): n=A,T,C or G
  unsure (53): n=A,T,C or G
  unsure (147): n=A,T,C or G
  unsure (150): n=A,T,C or G
  unsure (151): n=A,T,C or G
  unsure (172): n=A,T,C or G
  unsure (239): n=A,T,C or G
  unsure (291): n=A,T,C or G
  unsure (301): n=A,T,C or G
aatgccctcngtnacacagaggctgngagatcctgacataaatncttgtttgncggaatctgatgcttccaccagatgtctggatgaaaataactatgacagggaaaggtgttccacttacttcttgaggtacaaaaactgccgganatnntggaattctatcgtgatgcanagaagaaagaacggagtgaagccatttatgcctacggcagcagaaagagatgaaatcttgagagcantgggaaatatgccctattgaatgtttgcattaaaagtgtttatataacttanaaaaaaaaanaaaaaaa

SEQ ID NO: 7912 - DNA, 233 bp, Homo sapiens
  unsure (11): n=A,T,C or G
  unsure (14): n=A,T,C or G
  unsure (37): n=A,T,C or G
  unsure (84): n=A,T,C or G
  unsure (108): n=A,T,C or G
  unsure (120): n=A,T,C or G
  unsure (121): n=A,T,C or G
  unsure (132): n=A,T,C or G
  unsure (134): n=A,T,C or G
  unsure (135): n=A,T,C or G
  unsure (156): n=A,T,C or G
  unsure (158): n=A,T,C or G
  unsure (199): n=A,T,C or G
  unsure (201): n=A,T,C or G
  unsure (220): n=A,T,C or G
caagagccagnaanaaaccaccggaaggaaccatctnactgtgtgtaaacatgacttccaagctggccgtggctctcttggcanccttcctgatttctgcagctctgngtgaaggtgcanntttgccaaggnanntgctaaagaacttagatgtcngngcataaagacatactccaaacctttccaccccaaatttatnanagaactgagagtgattganagtggaccacact

SEQ ID NO: 7913 - DNA, 569 bp, Homo sapiens
  unsure (491): n=A,T,C or G
ctgagggctcaggtgagcaactggtcacagtcagcagctctgttgttccagtgcttcccagtgctgtgcaaaagttttctggtacagcttcctccattatcgacgaaggattgggagaagtgggtactgtcaatgaaattgatagaagatccaccattttaccaacagcagaagtggaaggtacgaaagctccagtagagaaggaggaagtaaaggtcagtggcacagtttcaacaaactttccccaaactatagagccagccaaattatggtctaggcaagaagtcaaccctgtaagacaagaaattgaaagtgaaacaacatcagaggaacaaattcaagaagaaaagtcatttgaatcccctcaaaactctcctgcaacagaacaaacaatctttgattcacagacatttactgaaactgaactcaaaaccacagattattctgtactaacaacaaagaaaacttacagtgatgataaagaaatgaangaggaagacacttctttagttaacatgtctactccagatccagatgcaaatggcttggaatcttacacaactctccct

SEQ ID NO: 7914 - DNA, 564 bp, Homo sapiens; identical to SEQ ID NO: 608

SEQ ID NO: 7915 - DNA, 373 bp, Homo sapiens
  unsure (124): n=A,T,C or G
  unsure (230): n=A,T,C or G
ccaaaagaagtaagacagcttgctgaagatttcctgaaagactatattcatataaacattggtgcacttgaactgagtgcaaaccacaacattcttcagattgtggatgtgtgtcatgacgtanaaaaggatgaaaaatttattcgtctaatggaagagatcatgagtgagaaggagaataaaaccattgtttttgtggaaaccaaaagaagatgtgatgagcttaccanaaaaatgaggagagatgggtggcctgccatgggtatccatggtgacaagagtcaacaagagtgtgactgggttctaaatgaattcaaacatggaaaagctcctattctgattgctacagatgtggcctccagagggctagatg

SEQ ID NO: 7916 - DNA, 516 bp, Homo sapiens
  unsure (382): n=A,T,C or G
  unsure (417): n=A,T,C or G
  unsure (441): n=A,T,C or G
  unsure (498): n=A,T,C or G
ctgcacatggattggttaacataatatatactgctatataatcttttaagggctaatatttgtagataatttaaaagcatgtcaatttcctctaagatttgattatttaacctgcacaaaggccaatcttcagttatcaatgacaagaaaactctagggctgccaaaataacttcattttagaccccagagttagtgttaggctggtaatgtttctaatttgggaataatgagactagaaagctaggagggccccctccaaatttctcccttgtattaggctgaagtagaacataacgtggcttaaagcataaacttaaagcatatgctttgagttttaaaaatgttaacctgtaattaattattagagtattatccatagnctactatgatagtcagttaatattctctaaatcanattatattcatttgaaaatgcatntgcatatttgcaaatgtgttattacacaagatcttacctatgtcaatttaaagaggntaaagatgcaggaagtcc

SEQ ID NO: 7917 - DNA, 499 bp, Homo sapiens
ctagaatgtgatatttgaagcatcacataaaaatgatgggacaataaattttgccataaagtcaaatttagctggaaatcctggatttttttctgttaaatctggcaaccctagtctgctagccaggatccacaagtccttgttccactgtgccttggtttctcctttatttctaagtggaaaaagtattagccaccatcttacctcacagtgatgttgtgaggacatgtggaagcactttaagttttttcatcataacataaattattttcaagtgtaacttattaacctatttattatttatgtatttatttaagcatcaaatatttgtgcaagaatttggaaaaatagaagatgaatcattgattgaatagttataaagatgttatagtaaatttattttattttagatattaaatgatgttttattagataaatttcaatcagggtttttagattaaacaaacaaacaattgggtacccagttaaattttcattt

SEQ ID NO: 7918 - DNA, 555 bp, Homo sapiens
ctgaaggtttttttattctttctttttttaaagtgagcccatgatttggtgtctttcccagattatcccctttgcgacaacacaagcaaaaatatttacaaaggtaaggcatagtcaaactacataaagagaaaaaatcatgaggaaaatacatgaaaaagactaaagacttcgccataacaaggtcttagtgataatagtgtccgtaaagatgtcatcagaattggtaaagtcaagcatgctgcaaatataccctttggattagaaaagagcacaattttctttttttgttttgttctgttttaagaagtggcatactgctctttctccctttggataatttcttttaagcccatcaaaggaaaaaacaaacacaattcaaacaaacactgtcaagtgattcaagatcaaatatttacaataatcaaatggagtatcagatttttttttccaaactgataccacaaatacagagctgaaatctctctttggctcctctatatgcaaaattgaattagtcttcattgaagacaattatatagtcagttccagatg

SEQ ID NO: 7919 - DNA, 545 bp, Homo sapiens
  unsure (533): n=A,T,C or G
ccaaaaaaatcaagatttaatttttttatttgtactgaaaaactaatcataactgttaattctcagccatctttgaagcttgaaagaagagtctttggtattttgtaaacgttagcagactttcctgccagtgtcagaaaatcctatttatgaatcctgtcggtattccttggtatctgaaaaaaataccaaatagtaccatacatgagttatttctaagtttgaaaaataaaaagaaattgcatcacactaattacaaaatacaagttctggaaaaaatatttttcttcattttaaaacttttttttaactaataatggctttgaaagaagaggcttaatttgggggtggtaactaaaatcaaaagaaatgattgacttgagggtctctgtttggtaagaatacatcattagcttaaataagcagcagaaggttagttttaattatgtagcttctgttaatattaagtgttttttgtctgttttacctcaatttgaacagataagtttgcctgcatgctggacatgcctcanaaccatgaatag

SEQ ID NO: 7920 - DNA, 584 bp, Homo sapiens
gagaattcataaaaaaattcattctctgtggtatccaagaatcagtgaagatgccagtgaaacttcaagcaaatctacttcaacacttcatgtattgtgtgggtctgttgtagggttgccagatgcaatacaagattcctggttaaatttgaatttcagtaaacaatgaatagtttttcattgtaccatgaaatatccagaacatacttatatgtaaagtattatttatttgaatctacaaaaaacaacaaataatttttaaatataaggattttcctagatattgcacgggagaatatacaaatagcaaaattgaggccaagggccaagagaatatccgaactttaatttcaggaattgaatgggtttgctagaatgtgatatttgaagcatcacataaaatgatgggacaataaattttgccataaagtcaaatttagctggaaatcctggatttttttctgttaaatctggcaaccctagtctgctagccaggatccacaagtccttgttccactgtgccttggtttctcctttatttctaagtggaaaaagtattagccaccatcttacctcacagtgat

SEQ ID NO: 7921 - DNA, 116 bp, Homo sapiens
ccaacgtggatggagatgcactcacgcatggttgctgcttcgcgactgccgagctgatggcggagacgaagaggagaggttgttgcttcttacagcgcgactcttaggcggtcgat

SEQ ID NO: 7922 - DNA, 260 bp, Homo sapiens
  unsure (31): n=A,T,C or G
  unsure (51): n=A,T,C or G
  unsure (111): n=A,T,C or G
  unsure (114): n=A,T,C or G
attgaatgcagactctaaggctccatggcancagttcatattatgcaacancatgaatggagggtcatagcgtcttcatgtcacttgggtagtaagattggcacagtttanaanagcaagaaaatgctgaaatctcttcatcagtaggctactacgtactctgtgacgctactgccttttcagaacacttattaaaaatttgactagagcagcagctctggactagactgtttcagaatgtttgtgcgcgtgtgtgtgtg

SEQ ID NO: 7923 - DNA, 434 bp, Homo sapiens
cctggctcaacaaaagggctggggattggccctgaaaggagagagctgactgtcctggctgatggacaggagatcctcttagcactaccctaaggcaggcagttgggcattggtgtagacaacaggaaagtccaggctatagccgtactcaaaaacctttctgttccctttctgccagccctagggattgagtccacattcagcacaggactctctgggtacagctctctttaggaagacacaaattgcatggtgaagtcagttatatcctggccgcctttggtccctcccaggaagacgggcatgttttctgcttgagaggtgctgatgtaccagttggggaactgggcagactcaaattccagcttgttattgatttctatcttgttgaagacaaatcgcttttccatcttcttctttgggtaatttttggg

SEQ ID NO: 7924 - DNA, 116 bp, Homo sapiens
  unsure (20): n=A,T,C or G
  unsure (50): n=A,T,C or G
  unsure (61): n=A,T,C or G
  unsure (91): n=A,T,C or G
  unsure (98): n=A,T,C or G
  unsure (105): n=A,T,C or G
cctactatgggtgttaaatnttttactctctctacaaggttttttcctantgtccaaaganctgttcctctttggactaacagttaaattnacaaggngatttanagggttctgtg

SEQ ID NO: 7925 - DNA, 234 bp, Homo sapiens
cctacccattctcctagtttcttgttgtcatcaaccttaattaggttgatttggtgttcagcacaaagggcctccaccaacttgacatacataggctcatcacagttggatgcaagcacacaaagatgggcttggcgcttgtctaaggctttggcagcttcgcgaattccacgtgctaggccatcgtggatgagggcagtcttcagaacctcttgtaaagcagtattaacgtcc

SEQ ID NO: 7926 - DNA, 564 bp, Homo sapiens
  unsure (196): n=A,T,C or G
  unsure (417): n=A,T,C or G
  unsure (551): n=A,T,C or G
ctgcacatggattggttaacataatatatactgctatataatcttttaagggctaatatttgtagataatttaaaagcatgtcaatttcctctaagatttgattatttaacctgcacaaaggccaatcttcagttatcaatgacaagaaaactctagggctgccaaaataacttcattttagaccccagagttagngttaggctggtaatgtttctaatttgggaataatgagactagaaagctaggagggccccctccaaatttctcccttgtattaggctgaagtagaacataacgtggcttaaagcataaacttaaagcatatgctttgagttttaaaaatgttaacctgtaattaattattagagtattatccatagtctactatgatagtcagttaatattctctaaatcanattatattcatttgaaaatgcatctgcatatttgcaaatgtgttattacacaagatcttacctatgtcaatttaaagaggttaaagatgcaggaagcccccactaaaatgtaaacacatttgtacgggtttcanaatgtttggactc

SEQ ID NO: 7927 - DNA, 604 bp, Homo sapiens
ccatctctaattttattaagatctttgattatgttatccaggtgacaaaattctccaatcacgactcacctccagaagcttaaaacataattgtttcatatactgttaaacacttaagagatttgtaattttccagactttcaatgtctttacttgaatgtctgccttgcttagttactgtaaggttttgatttatttctccagtgtcattgtttttcagctttattgtttgatatagtaagatttcacatgcctagcttacgatgctgtttaaacttacaagctaactttgcctttttactttttaataggtccctgattaccctccaaactatattttattccttaataacttaccagaagagactaatgagatgatgttatccatgctgtttaatcagttccctggcttcaaggaagtacgtctggtaccagggaggcatgacattgcttttgttgaatttgaaaatgatgggcaggctggagctgccagggatgctttacagggatttaagatcacaccgtcccatgctatgaagatcacctatgccaagaaataacatttgggatagtcgtctttaaaagacttggtgttatttacagt

SEQ ID NO: 7928 - DNA, 541 bp, Homo sapiens
ccatatctcaagcaggtctgtccaatggcttggaacatagacttttgcagtgaaactttaaaaacattacttgaattaggattacacaaaaaaaactaaattctaagtgagcacaactatcgctgagaccctgaaatttcaggaaataaacatggttcaaaactcaaactgttcatcaaaataattacgcaggtcagccaccactgcagaaccatcactgctcagagaaattgagtcagcaatgactgatctcatcatctcttcattagcacataagcggttcaacttgggatacgcaaggagtctctgcagaggtacgaaaaatttatctccaacacagaagggtgtgggagagttctctatcttgaccttctcaatctctgtgaagactggtccaaagcatgggacaggggcctttgagccaccaatgtctttgggcttatcgccccgttccccagcctgttctttccgccttggcaggtggctcactcttaagctttccacttgttgggacacctcattaaccaacacaagtttaaag

SEQ ID NO: 7929 - DNA, 600 bp, Homo sapiens
gttggcagagaaatgggggtggatgttcacttccctaaagcagaggccagcatccaagctggtgctggagacggcgagtgggaagagtctgaagtcaaactgaaaaagtccaagatcaaaatgcccaagtttaatttttccaaacctaaagggaaaggtggtgtcactggctcaccagaagcatcaatttctgggtccaaaggtgacctgaaaagttcaaaggccagcctgggctctctggaaggagaggcagaggccgaagcctcttcaccgaaaggcaaattctccttatttaaaagtaagaagccacggcaccgctcaaattcattcagtgatgaaagagagttctctggaccttccaccccgacggggacgctggagtttgaaggtggggaagtgtctctggaaggtgggaaagttaaagggaaacacgggaagctgaaattcggtacctttggtggattggggtcaaagagcaaaggccattatgaggtgactgggagcgatgatgagacaggcaagttacaggggagtggggtgtccctggcctctaagaagtcccgactgtcctcctcttctagcaatgacagtgggaataag

SEQ ID NO: 7930 - DNA, 416 bp, Homo sapiens
  unsure (410): n=A,T,C or G
cctactatgggtgttaaattttttactctctctacaaggttttttcctagtgtccaaagagctgttcctctttggactaacagttaaatttacaaggggatttagagggttctgtgggcaaatttaaagttgaactaagattctatcttggacaaccagctatcaccaggctcggtaggtttgtcgcctctacctataaatcttcccactattttgctacatagacgggtgtgctcttttagctgttcttaggtagctcgtctggtttcgggggtcttagctttggctctccttgcaaagttatttctagttaattcattatgcagaaggtataggggttagtccttgctatattatgcttggttataatttttcatctttcccttgcggtactatatctattgcgccangtttca

SEQ ID NO: 7931 - DNA, 265 bp, Homo sapiens
ctgaagaaggaactgaatgaactggtcagtgctattgaagaacattttttccagccacagaagtacaatctgcagccaaaagcagactaaaatagtccagccttgggtatacttgcatttacctacaattaagctgggtttaacttgttaagcaatatttttaagggccaaatgattcaaaacatcacaggtatttatgtgttttacaaagacctacattcctcattgtttcatgtttgacctttaaggtgaaaaaagaaaatgg

SEQ ID NO: 7932 - DNA, 523 bp, Homo sapiens
ctgcagaggctaaacaaaaatgagatgataacatgtgacctttcttaggcagatggctggttggggaaagtagatgaatgaaaagaggaaaagatctccagaagagcgggaaggtataaagtttctctaggacagtttcccaaatcgtgcttcattggacattgacacaggagaaggctgtgggggaaaagaaaattcatgatcagataggtatggcaaatgcctcattctatggtttcctctttgagattctcaatgcaacattagactattaaaggctctgaaaaatcctacaagaaaacacctgtataaccttgtgtgaccaagtaataccaaaatttatttgccctctgagtctgctattttgccctcttcctccagcccttgacactgtttctcaggaagaaaacatccttcatgctggctactacctcatatgctctataacattgtggtgttcacagtttgaatttttcaaaatccagggtagaatttggcccccaaacctaaagctagtggacaa

SEQ ID NO: 7933 - DNA, 565 bp, Homo sapiens
  unsure (512): n=A,T,C or G
  unsure (542): n=A,T,C or G
  unsure (554): n=A,T,C or G
ctgtcattgctggtggagttattggctttctctttgcaatttttcttatcctgctgttggtgtatcgcatgagaaagaaggatgaaggaagctatgaccttggagaacgcaaaccatccagtgctgcttatcagaaggcacctactaaggagttttatgcgtaaaactccaacttagtgtctctatttatgagatcactgaacttttcaaaataaagcttttgcatagaataatgaagatctttgttttttgttttcattaaagagccattctggcactttaatgataaaatcccattgtatttaaaacatttcatgtatttctttagaacaacataaaattaaaatttaacatctgcagtgttctgtgaatagcagtggcaaaatattatgttatgaaaaccctcgatgttcatggaattggtttaaacctttatgcgcaaatacaaaatgattgtctttttcctatgactcaaagatgaaagctgtttcatttgtgtcagcatgtctcanattgaccttaccaagttggtcttactttgntaatttatctgntgtccccttcc

SEQ ID NO: 7934 - DNA, 542 bp, Homo sapiens
ccagaaccctggtggcaggagcatctgatatccctgtctttttccaaaaacctaactgtgtacaaatatgcacacaaacttatcttatatgtgtccatttctcttaatgatatttaccagcttaagaaattaacaaacattttatgtgattctcagatttttcaagtcaaggacaaattcagttttcacattatttttcaagtgtatcttatcttcggaggcattaacagggcagtaacattattaccatcactgtatctgtcattctgttttgggggattaccattgttgccaataaaacttacatttcattcccatccttagcaaattaatttagttacatgcagggtccaaacaataattatgagtttagagagagcttcagaaagccagcgatcatctgtaaggtgtgggctgaaaccaacattggaggaaggtacggccttgattattcagcaactgaaatgacttcctttaattagctcttgaggacccaaagtgggccatctgggttaatttcagtcagctcaaatcaagcactc

SEQ ID NO: 7935 - DNA, 564 bp, Homo sapiens; identical to SEQ ID NO: 609

SEQ ID NO: 7936 - DNA, 527 bp, Homo sapiens
  unsure (80): n=A,T,C or G
  unsure (101): n=A,T,C or G
  unsure (141): n=A,T,C or G
  unsure (185): n=A,T,C or G
  unsure (187): n=A,T,C or G
  unsure (202): n=A,T,C or G
  unsure (209): n=A,T,C or G
  unsure (228): n=A,T,C or G
  unsure (245): n=A,T,C or G
  unsure (273): n=A,T,C or G
  unsure (296): n=A,T,C or G
  unsure (319): n=A,T,C or G
  unsure (347): n=A,T,C or G
  unsure (366): n=A,T,C or G
  unsure (404): n=A,T,C or G
  unsure (409): n=A,T,C or G
  unsure (448): n=A,T,C or G
  unsure (472): n=A,T,C or G
  unsure (482): n=A,T,C or G
  unsure (521): n=A,T,C or G
ctgagtatagttcaacagttttgctgacagatgggaacaatcttttttttttttttccaactgccatctatacaattttnttacagatgtcaaaagcagtntagtttatataagcattctgttacctgtgatattttttanactgaactgctccattcctagtcttaattaccatattcagggtncnaactggagggcttgngtgttancttctgaattggcaattgnaggcggtagtggtcgtncctgtgtgtatcaaaagggataggtatnttgcctcctttctctcaggcagngcaaatcaccctgtggaaaaccnatggacaggaaggagtgttacacactgnttaccctgatttattcagnggttttgttttcattctggaaccatactatcaaatggngacanactgttccgttccacccccgtgaagtaatcatgcaccgngtgaatagtatcaagcaggattgntttcattgtntggagcatgaccagcgtgtgactcattctgacatttcanatccta

SEQ ID NO: 7937 - DNA, 474 bp, Homo sapiens
ccttatttctcttgtcctttcgtacagggaggaatttgaagtagatagaaaccgacctggattactccggtctgaactcagatcacgtaggactttaatcgttgaacaaacgaacctttaatagcggctgcaccattgggatgtcctgatccaacatcgaggtcgtaaaccctattgttgatatggactctagaataggattgcgctgttatccctagggtaacttgttccgttggtcaagttattggatcaattgagtatagtagttcgctttgactggtgaagtcttagcatgtactgctcggaggttgggttctgctccgaggtcgccccaaccgaaatttttaatgcaggtttggtagtttaggacctgtgggtttgttaggtactgtttgcattaataaattaaagctccatagggtcttctcgtcttgctgtgttatgcccgcctcttcacgggcaggtcaatttcac

SEQ ID NO: 7938 - DNA, 355 bp, Homo sapiens
ctggatcacgaggtcaagagttcaagaccagtttggtcaagatggtgagacccccgtctctactaaaaatacaaaaattagccaggcatgacagcggatgcctgtaatcccagctattcgggaggctgaggcagagaatcgcttgaacttgggagggggaggttgcagtgagctgagatcaagccgctacactccaccttgggcaacagggtgagactctgactccatctcaaaaaaaaaaaaaaaaaaaatccaagagtagggctgagcatggtggctcacgcctgtaatcccagcactttgggaggacgaggagggtggatcacctgaagtcaggagtttaagaccagcctgg

SEQ ID NO: 7939 - DNA, 423 bp, Homo sapiens
  unsure (263): n=A,T,C or G
  unsure (298): n=A,T,C or G
  unsure (306): n=A,T,C or G
  unsure (345): n=A,T,C or G
  unsure (350): n=A,T,C or G
  unsure (371): n=A,T,C or G
gtcggcatcatactaaaagcaatgtttaaatcaaactaaagattaaaaattaaaattcgtttttgcaataatgacaaatgccctgcacctacccacatgcactcgtgtgagacaaggcccataggtatggccccccccttccccctcccagtactagttaattttgagtaattgtattgtcagaaaagtgattagtactatttttttttgttgtttcaaaaaaaaaatttttgtgtgtgtgtgtttttttttttttttttttngggggttaaaagcaaggcatgcttgtggatgactntgtaacanactaattggaattgttgaagctgctccctggttccactntgganagtaatctgggacatcttagngttttgttttgtttttttccctcctcttttttttgggggggagtgtgtgtgg

SEQ ID NO: 7940 - DNA, 138 bp, Homo sapiens
  unsure (105): n=A,T,C or G
aaagctgtctgagaccctcctcccctcctccccagcatggagagaataattgccatttcaccctacaaatccgaaagagtctcccccttccgtgggtttaagcanggacacaagccaagcaagcctcagatacccagg

SEQ ID NO: 7941 - DNA, 550 bp, Homo sapiens; identical to SEQ ID NO: 610

SEQ ID NO: 7942 - DNA, 559 bp, Homo sapiens
  unsure (91): n=A,T,C or G
  unsure (294): n=A,T,C or G
  unsure (493): n=A,T,C or G
  unsure (549): n=A,T,C or G
  unsure (555): n=A,T,C or G
ctgaactctctgaacttgtcttctccttttgatttgaattttccattgccaggagagaagggccctgcatgccttgtgaaggtttatgaanattgggattgtttcaaagtaaatgacattcttgagctatatggcatactgtctgtggatcctgtgctgagtatactgaataatgatgaaagggatgcctctgcactgctggatccgatggagtgcacagacacagcagaggagcagagagtacacagtcctcctgcttcattagtgccgagaattcatgtgatcttagcccanaagttgcaacacatcaacccattattgcctgcctgccttaacaaagaggagagcaaaacctgtaagtatatacaagaagagatgtccttccactaggaaaatttacagttaacttgagtggttgcccacggaatagtaccttcacagaacacttgtatcgaattattcaacatcttgttccagcatcttttcgtctgcngatgactatagagaacatgaaccatttgaaattcattccccacaaagactacacanccaatngctt

SEQ ID NO: 7943 - DNA, 260 bp, Homo sapiens
cctgaagtgaggaaaacctatttaggactgacatctaactagagaaagtcagggaatgaggcaggagaagaggcaaagtcctcatgaaccacaaagatagagtggaaaatcctaagtaggaaaaaatacatggaaaagggcaaatgagcaacagcagtgaatgagttgagattgaaaaggaaagagttcaaggaaggagaggcaatggggcaagacaaaataaatctgaggaaacagagcaaataaaaagtatggaggga

SEQ ID NO: 7944 - DNA, 600 bp, Homo sapiens
ccagtggaatgatgttccctgcaattaccatctcacctatacgtgcaagaaaggaacagttgcttgcggccagccccctgttgtagaaaatgccaagacctttggaaagatgaaacctcgttatgaaatcaactccctgattagataccactgcaaagatggtttcattcaacgtcaccttccaactatccggtgcttaggaaatggaagatgggctatacctaaaattacctgcatgaaccgtaagtggtcctttagaaagaatggactaccgtgctataacaactactagacaccttcattttacggctgtggtatcggcagtttagggtatggagcaagtaatattgtgtgttttctttttttctttctttccttccatgtagcatctgcataccaaaggacttattctatgaaatactttaaaaattcctcatcagcaaaggacaattcaataaatacatccaaacatgatcatcgttggagccggaggtggcaggagtcgaggcgctgatccctaaaatggcgaacatgtgttttcatcatttcagccaaagtcctaacttcctgtgcctttcctatcacctcgagaagtaatta

SEQ ID NO: 7945 - DNA, 150 bp, Homo sapiens
ctgcccaatgcaggcagaaggcaggaaggctatagtgttacagccctggcttgggaaatcctgatgtctcggcccccagaagtgtcactgcttttcactcctgcagtccagcaaatgggagcatgtcaccaccacagtttggtgagttgg

SEQ ID NO: 7946 - DNA, 519 bp, Homo sapiens
ccaacccaaagaacatctttcccatagcatctttgtcccttgccccacaaaaattcttctttctctttcgctgcagagtgtagatcccaaaaattacccaaagaagaagatggaaaagcgatttgtcttcaacaagatagaaatcaataacaagctggaatttgagtctgcccagttccccaactggtacatcagcacctctcaagcagaaaacatgcccgtcttcctgggaaggaccaaaggcggccaggatataactgacttcaccatgcaatttgtgtcttcctaaagagagctgtacccagagagtcctgtgctgaatgtggactcaatccctagggctggcagaaagggaacagaaaggtttttgagtacggctatagcctggactttcctgttgtctacaccaatgcccaactgcctgccttagggtagtgctaagaggatctcctgtccatcagccaggacagtcagctctctcctttcagggccaatccccagcccttttgttgagccagg

SEQ ID NO: 7947 - DNA, 383 bp, Homo sapiens
ccatggacaagctgaggaagatgctggttccctgcccacagaccttccaggagaatgacctgagcaccttctttcccttcatctttgaagaagaacctatcttctttgacacatgggataacgaggcttatgtgcacgatgcacctgtacgatcactgaactgcacgctccgggactcacagcaaaaaagcttggtgatgtctggtccatatgaactgaaagctctccacctccagggacaggatatggagcaacaagtggtgttctccatgtcctttgtacaaggagaagaaagtaatgacaaaatacctgtggccttgggcctcaaggaaaagaatctgtacctgtcctgcgtgttgaaagatgataagcccactctacag

SEQ ID NO: 7948 - DNA, 578 bp, Homo sapiens
cctcaatgacaagatgtttgagcatgacttccgttggactgatggcagcacactggtaagatgcccttgaaaatgatgtcaagttctaccttctggaaatttggtactgtgcactgattgtgcattacagagggtgcattagactggaggcaagttaaatgacttgctcaaggtcactcagtgaaacagagaagggttagaagagttccaagctacctgatccaacatccagtcctctcttcaatagttgtggttctcttcaaaagaggagtgtaccagatttctatcaaaccagaaaaccagacaattagtagaattgccttgggtctgtctttcagatggttatctttgctttttctagcttcagagcaaaaagagaagaataaaatgtagcagaaaaagtcattttaaaaaaatacctttccgtcttaaataattcactggaaatccgctataaggcatgactcatttccaagcaaaaatatccatttatttttatcttaaagaagactgttgatatgatcttgtgaatttctgccaactaattacatatttcaacttgttttctattttttgaa

SEQ ID NO: 7949 - DNA, 611 bp, Homo sapiens
  unsure (561): n=A,T,C or G
ctgcatcccatgtgcgtcgatgggcaaagtatttgtagcactgcccttggaatttgtgccagccatagtcacatgtctcggtatcttgctcacaaagtgcaccaacataacttggaaggcagaggcacctgaatgtgttaaaaccatcaacacaagtggctccattacgacagggattagagtgacattcatcaaaatcaagttcacactggtctccgctgtatcctggcacacaggtgcatacgtaggaagtttcagtaggataacaggtgcctccgttaaggcacgggttcattttgcagcgatcaggtcctggtaaatagattgccgtgccttccactgactcttcattaatgccaatcaggaaatctgtttcattagaagtctccagaagggaaaatggtggtgttgcaacctcagtattaaattccacagggtttactgttgcctgatcattggaatcaagaattctcgctgccacttgctgttctgatgctgctatcgtggaatcctgccctctgattaaagctgcttgagtttcagggtttatttctggagaanaagaaagcgtgggcctctcagaagtctgtggacttagccaaggcaccaca

SEQ ID NO: 7950 - DNA, 553 bp, Homo sapiens
  unsure (368): n=A,T,C or G
  unsure (493): n=A,T,C or G
  unsure (546): n=A,T,C or G
ccttctgctagtcctggtaagaaaaatcctatttcagaccattaaagctaagttattttgacataatcatgattcttttcaataaacattaaacatgacattgtggaatatcaaatctaaccaaaaatgcctgtacttaacaaaacgaagatttttgtccgaattatctctggctacactcaacacttccagcaggcagttgctcaactttccaatgtctgcataaaatacagttctgaagccaatttttttagattaaaataaaaagccactctttagcataaaccttcattcaacgaaattgggtaaataagatttaattaagaaaattaggagccgcgttcattgcaaaccgtagtttactttancatttcacttgtaattaagttaggggcttagggatgcattgaaaacaccaaaggataagtatctcaaagttctaaaaatgtctcaatactaaaatgatgttctggggtgattttgcaaggaccanaagacatcatacattgcgaacccagtgagggtggcatcgcggacgaacagaanatgcttt

SEQ ID NO: 7951 - DNA, 499 bp, Homo sapiens
ctgtttaaccagaaccaaggtgttcaccccccacagaatgtacatgaaacactagaggactgcatgtttttccctgagagaagcgtaagacaaacagaagtcaaaaagtagtcactgggagcgccatccttctaagcaaatcctccctttcccttttggaggatttgcccgaactacgtagccagtcagcacttagaccacctgcctcctcctccccctataaacccaccactcccctcctcctttcccaaaccacttggggtgtcctaagccctcactgccccaagcccaaaatatcaactaagatccttgtctgtatttccacagtcatacctaatgaattgggaagtggggcccctaaaaaccaattcacatctatgcacttgtttccactggatttggcagacaggcttttttagttaccgtaaccagatcttaagattaattaaaaactacataaagtgcttttaggtccttagagatacatgatataaataag

SEQ ID NO: 7952 - DNA, 503 bp, Homo sapiens
  unsure (6): n=A,T,C or G
  unsure (195): n=A,T,C or G
  unsure (314): n=A,T,C or G
  unsure (343): n=A,T,C or G
ttgcanagctgtgggctgagcactcaggcaatcacactctcagaaactgcggcggctctggactgcagcctcccaaggctccatgccagacaaagcatgcgtgtcacacttgctacaatagcctggatggtttcttttgtctccaattattcacacacagcaaatattttgccagatatcgaaaatgaagatttnatcaaagactgcgttcgaatccataacaagttccgatcagaggtgaaaccaacagccagtgatatgctatacatgacttgggacccagcactagcccaaattgcaaaagcatgggccancaattgccagttttcacataatacacggntgaagccaccccacaagctgcacccaaacttcacttcactgggagagaacatctggactgggtctgtgcccattttttctgtgtcttccgccatcacaaactggtatgacgaaatccaggactatgacttcaagactcggatatgcaaaaaagtctgtgg

SEQ ID NO: 7953 - DNA, 597 bp, Homo sapiens
tgcagattttggccttgctagagtaattgaagataatgagtacacagcaagggaaggtgctaagttccctattaagtggacggctccagaagcaatcaactttggatgtttcactattaagtctgatgtgtggtcctttggaatcctcctatacgaaattgtcacctatgggaaaattccctacccagggagaactaatgccgacgtgatgaccgccctgtcccagggctacaggatgccccgtgtggagaactgcccagatgagctctatgacattatgaaaatgtgctggaaagaaaaggcagaagagagaccaacgtttgactacttacagagcgtcctggatgatttctacacagccacggaagggcaataccagcagcagccttagagcacagggagacccgtccatttggcaggggtggctgcctcatttagagaggaaaagtaaccatcactggttgcacttatgatttcatgtgcggggatcatctgccgtgcctggatcctgaaatagaggctaaattactcaggaagaacaccctctaaatgggaaagtattctgtactcttagatggattctccactcagttgcaa

SEQ ID NO: 7954 - DNA, 519 bp, Homo sapiens
cctggctcaacaaaagggctggggattggccctgaaaggagagagctgactgtcctggctgatggacaggagatcctcttagcactaccctaaggcaggcagttgggcattggtgtagacaacaggaaagtccaggctatagccgtactcaaaaacctttctgttccctttctgccagccctagggattgagtccacattcagcacaggactctctgggtacagctctctttaggaagacacaaattgcatggtgaagtcagttatatcctggccgcctttggtccctcccaggaagacgggcatgttttctgcttgagaggtgctgatgtaccagttggggaactgggcagactcaaattccagcttgttattgatttctatcttgttgaagacaaatcgcttttccatcttcttctttgggtaatttttgggatctacactctgcagcgaaagagaaagaagaatttttgtggggcaagggacaaagatgctatgggaaagatgttctttgggttgg

SEQ ID NO: 7955 - DNA, 599 bp, Homo sapiens
ctggacaagaaagagcaaatgccaaaatagaacaagaatggttttgttgaggtgtttacagaataagcaaagcctgggttttaattggaatttaattcagagttctgtctgagtccatcaaatgatccctgttgaagattaaaagtttactgccttaggcagtaagtcttaaattatttttgatagtatttatttaaaaattttaaaaactatgtacctctcacattttaagttgccaacaaaattttttttcatcataaagttatacaactatagaggatgtaatttttgacctattttaaatattgtcattctaaaataagcatgtaatatcactttcaggatatattcagtggaatctaaatatcatagtggtttgacctcttacatcattcttttaaaagtagtcttttattaagagtcaaaaattttatatttttgttttcgttggactaattctaaaatttaagttcctcttacggaatgttatcaaaaattatatagttatatgcttagaagtcttctattgattaagccatcaaacttaagtacatcaaaatttgtactttaaagtttaaattcttttttccttgtgaaca

SEQ ID NO: 7956 - DNA, 392 bp, Homo sapiens; identical to SEQ ID NO: 7567

SEQ ID NO: 7957 - DNA, 350 bp, Homo sapiens
  unsure (20): n=A,T,C or G
  unsure (90): n=A,T,C or G
  unsure (130): n=A,T,C or G
  unsure (146): n=A,T,C or G
  unsure (152): n=A,T,C or G
  unsure (164): n=A,T,C or G
  unsure (185): n=A,T,C or G
  unsure (209): n=A,T,C or G
  unsure (247): n=A,T,C or G
  unsure (258): n=A,T,C or G
  unsure (266): n=A,T,C or G
  unsure (305): n=A,T,C or G
  unsure (326): n=A,T,C or G
  unsure (329): n=A,T,C or G
ttattttcactccaaaggcncatctactgttcctactattattgctacagatattccaaaaagtgagtaggtggaaagaagggattaaanaataccaccacaggaaaaaaatatttaacttatgacctanataattttagtcattnaatatnttaaaatatatnttatgacttaaaagagaaagnattctatttaccatatatacaaanaaaataccgtatttggaatccaatagacttggttccanaatacataaanaactgctncaactgatgataaataaataacctgaccttaaaaatggnacaaaacttttaaagagatgntcntaaaagaagatatacaaatgg

SEQ ID NO: 7958 - DNA, 487 bp, Homo sapiens
  unsure (19): n=A,T,C or G
cctttcttacaaccagcangactcccctcctttccatgagtacctaccccagtgttcctcctgagatggcctatggttggatggttgagcacaaacacaggcaccgtcacaaacacagagaacaccgttcttctgaacaaccccaggtttctatggacactggctcttcccgatctgtcctggaatctttgaagcgctatagatttggaaaggatgctgttggagagcgatataagcataaggaaaagcaccgttgtcacatgtcctgccctcatctctctccttcaaaaagcttaataaacagagaggaacagtgggtccaccgagagccttcagaatctagtccattggccttgggattgcagacacctttacagattgactgttcagaaagttctccaagcttatcccttggaggattcactcccaactctgagccagccagcagtgatgaacatacaaaccttttcacaagtgcaataggcag

SEQ ID NO: 7959 - DNA, 608 bp, Homo sapiens
  unsure (538): n=A,T,C or G
ccatgggaatctaattaatttcataatgatgttggttgaacatgataccaaaaaatgcaggtattttcaagaacaataagatagataacagcattaaagcataatcctttaagaattcatgagaaaaaaaaggatgataaaacttaagcttctttttcagatgtttaaaaatttctataaaattctttgtcccaagattaatcatataaccatggtacataaaatatgctaactacattgcctggtgtcaaggtgggaaaatcctcttttataacataaaatcctcttctaatccatgttgacccaagtcctggctgtctgagggcagattcctgtcaagagacctaaggttgtcatggaaagcatcactttcgtctactagttggtaatcctgttccatttccgttaggaagccactcccagatcctgatccagagccggagccggagccgaagcctgatccagagtagtcctcagaaagtgggaagatacgattcaagtcctggattcccgtctttggaaaaaggtcagtcctcanacgggggatcttgttggattcacctggaagtagttcgaacattggtcctttttcttcaaggcagtttgca

SEQ ID NO: 7960 - DNA, 606 bp, Homo sapiens
ccttatttgtagatttcattttggtttattatggtttctaattattcaaagtaataacaaagcatatacaaagagatgccacatgtcctgtactttttgcttggttttgaatacttaggaattcctcaaattactttttcatgaaaacatgactgatattactaatgggaaaaaaatctctgaaattaacaaaagaaaacacgcctacacatatatgcactaactaaagatatattctgagacctattctattactgtggtatgagggagagagaatttaattttccctttaaagaaggactggggatggcacagggagcgacaggaccagtcctgccagtgagcagcaatgtgtctgtgggtggctgtgcaagacggaaggcgaggctctcaagtaaggcacctggaaagacactcagtgtgaactactggcccaggaatcactcatggcaaaacgtaccaaggtcaccaggagaaaacagggttagaagcagcttctcataagaggctgcctgataagcaatgaaagtgatgatttgttttgggatctataggtttcagtactttgaaataacagatagtaaagccttcttcttttacacacct

SEQ ID NO: 7961 - DNA, 470 bp, Homo sapiens
  unsure (20): n=A,T,C or G
  unsure (113): n=A,T,C or G
  unsure (121): n=A,T,C or G
  unsure (171): n=A,T,C or G
  unsure (210): n=A,T,C or G
  unsure (216): n=A,T,C or G
  unsure (445): n=A,T,C or G
ttttttttttttttttttanaaatctatttatttatcaaaacagtattggcacagtaattctcatattatcatcaaataataaaattgctactttctgtactcaattctttanaatcctanaaattgcaaatgcattcaatttaacaatattgtaaataacaatacaaaanaaagaactctgcatatttatggaaacattgttgatggtncagttntactgaaactcatacacatttcactatttaatttacatatggtcttgttgaaaaaaaccagtatgttttactttttcaatttccttatgctaaaatacatgtaattctaaaggatatctcttaggtgttataaaaaccaaggaaggtccaccaccaagtcaaagttagagtcaaagatacttcaaagattccatgaaatgatctgaaaacaaatttaaccaaaaaatgngtactgtattggggcacatccatgg

SEQ ID NO: 7962 - DNA, 543 bp, Homo sapiens
cctttcttaaacaacttactctgcattaaaaagtcatcaataagaactgtaattcagtgtttttaaaaatgaaatgtttaacttcaaattgtttgtttaaaataaactgctattgtgccaaataatgaaactactattttattcattacaaacatcatataatcattctctataatcactataaaaatttaaatgcttcctttctcctgtatatgaagatggtagttctaaagcaacactctaaaagtgttaaaaagcccattcgtaacacacaccccacctcagtttttgaaagtcagtgcattcagtggttataaataggcatgatgttcttccacagctaagagttctgagtgtcaatcagttgtgtttttttctcccaagggaagacgttcccataactggagcaactgttcaccaacctgaggttctagttcctagataaatcagaagtcaaaataaacataaaaagaactggagtgaaaatttttaatgaccaaaacctacactgataaaaatgtaagaaaatcactttaaatttca

SEQ ID NO: 7963 - DNA, 560 bp, Homo sapiens
  unsure (446): n=A,T,C or G
  unsure (491): n=A,T,C or G
  unsure (536): n=A,T,C or G
  unsure (554): n=A,T,C or G
ctgaaaaccatgctgttcaagggtcaactgtgtgtggtatcggtgagactgaatgattatcgttggtgttcttaaattattttcaggtcctctagaaaataagataattatagcaaaaaataaaattgttttgaaattttgataaatatataaatgtatagaacctatttttttcaatgaaagaaaatgggaaacattttttaacattgctagattggcagtgctttcttttattatttcaagttatggaaatttgcacagttgaaaactggggataaattctacaaaagtgcaagaaaacaattcaaattagccagagccctgctaaaacttttaatgtaaaatttatttatttgcactgagctgttttaccttctttaaggccattgggacctctcaatgatgcatatgtttcatacatcttgtattttccaggtagaagtcanacttggttaataccaataaatacttctgtaatcctattggctcanttacctttataatgaagtatattctgtgtaaggtaattcttccantgatggtctgagtagtanagtctt

SEQ ID NO: 7964 - DNA, 598 bp, Homo sapiens
  unsure (593): n=A,T,C or G
ccttgtgggtaatggtgaaaattctggattttattctgagagcaacaggattccgctgaagaatttttaaccagagaggtaatgtgatctaatttgtttgaaaaagaacaggtctgttgctgaatgaaatagattagagggaaaagtgcagatatcaagtaggcaaataaatgtttggagctcagacctagagaggaagaggatcagggatcagcagttctgaaaagatctctaacttaccagcagactgtgatcgccttgtgggaagagacttgcgtttctgaattccctgttgtgtgtttgttttgagagaaaacagagcatatttgtatgctggcagaagtgacagaagtgatagaaaattctagaaagtaaagatgcaggaattaagagtgagataattaaagggtcaacttccttgagaaggtgtgcacatgtagagagattcattttgaaaggagagaggatacttcctctacaataaagagaggaaagggcaagctggaacagactctggcaggcgtgtggcatctgtggttggggtaggaaatgctcatttgctaatctgtactttctcagtgaagtcgagcggnaagga

SEQ ID NO: 7965 - DNA, 597 bp, Homo sapiens
gtcgaggcaggtgtggtgccttggctaagtccacagacttctgagaggcccacgctttcttcttctccagaaataaaccctgaaactcaagcagctttaatcagagggcaggattccacgatagcagcatcagaacagcaagtggcagcgagaattcttgattccaatgatcaggcaacagtaaaccctgtggaatttaatactgaggttgcaacaccaccattttcccttctggagacttctaatgaaacagatttcctgattggcattaatgaagagtcagtggaaggcacggcaatctatttaccaggacctgatcgctgcaaaatgaacccgtgccttaacggaggcacctgttatcctactgaaacttcctacgtatgcacctgtgtgccaggatacagcggagaccagtgtgaacttgattttgatgaatgtcactctaatccctgtcgtaatggagccacttgtgttgatggttttaacacattcaggtgcctctgccttccaagttatgttggtgcactttgtgagcaagataccgagacatgtgactatggctggcacaaattccaagggcagtgctacaaatacttt

SEQ ID NO: 7966 - DNA, 538 bp, Homo sapiens
ctgcaagcagccgaggcagatggagcccaagccctgttgcttgtggtcttggcttactgagcctgaatccacgaccggatcattagaaaagggacggtgtgtgtgcctacctttgaagccagtaggccaaaagaagggtgagcaggacagcgccataacacctagagttactgtgtttggttcacacttctggtttcctgcagaattgctagaatttttaaaaaaaggaagcagcaagttgagagcaactaaagtaaaaagagaaaagtgatacaaagggaaaggtttatttttggagctcttagattctgaaactccttctgactcttttatccttttacctctccctttctcctcactgggctctttgtcctcatggggactgtgcatctctggtctcactctagctctgggtcccttaggctcttctggttttctggctcctggagtgagccctttcaatgaggccctccctcaatttcccatccctcttgttcttctgccatccagactcatcacagcccaaatctgagaccag

SEQ ID NO: 7967 - DNA, 158 bp, Homo sapiens
cacgagtctgactggcctttgggtggcctttgtggacggctcgtagctggaaagtgttgatctgggttttctggcattcttttaagttaaaaagttgacatcgggacaggggtttgatcttttgttgtacctgatgacagtgcagagattctccacag

SEQ ID NO: 7968 - DNA, 474 bp, Homo sapiens
ttttgctcttggtttgcattccagtctcttctcgaagacaaaggtctggcagaggtgtctaaggttgcagagcaagtactgaatgccgtaaataaggggctctacagagaggccacagagctgtgggggaaagcagaaatgatcattgaacagaacacagatggggtgaacttctataacatcttaactaaaagcactcccacgtctacaatggagtcgagtctagaattcacacagagccacctagtttgtctttgtcagcgccacgtgagacacctacaacgagatgccttaagccagctcatgaatggccccatcagaaagaagctcaaaattattcctgaggatcaatcctggggaggccaggctaccaacgtctttgtgaacatggaggaggacttcatgaagccagtcattagcattgtggacgagttgctggaggcagggatcaacgtgacggtgtataatggacag

SEQ ID NO: 7969 - DNA, 417 bp, Homo sapiens
ctgcagtctcccagcctccactttcagagtgaaattcaaggcagcacggacatgtgcccatcaggcacagaagaaaacacgacgtcgtccattttggaagagacgaaagaaaggaaaataaactctttgtatgatatttattaggaggaaagaggactgaaaatgttcttgtgtagaaacagaaggacagcatttctgttagtcatttcctggaaaagtaatattttaaggggaaattatggaaacaatctaattgttcaattgctgtgctagtggtagggtttattttctgggaggtctctcctttgtgtgtctgtatgtttgtgtacacacacgtgcccatctgctgtcccagaggggaggggttgtgtgtgcgagtgtatggagttagtgtggaacttaagagctggaagacag

SEQ ID NO: 7970 - DNA, 449 bp, Homo sapiens
  unsure (13): n=A,T,C or G
ctggagagtgtanatcccaaaaattacccaaagaagaagatggaaaagcgatttgtcttcaacaagatagaaatcaataacaagctggaatttgagtctgcccagttccccaactggtacatcagcacctctcaagcagaaaacatgcccgtcttcctgggagggaccaaaggcggccaggatataactgacttcaccatgcaatttgtgtcttcctaaagagagctgtacccagagagtcctgtgctgaatgtggactcaatccctagggctggcagaaagggaacagaaaggtttttgagtacggctatagcctggactttcctgttgtctacaccaatgcccaactgcctgccttagggtagtgctaagaggatctcctgtccatcagccaggacagtcagctctctcctttcagggccaatccccagcccttttgttgagccagg

SEQ ID NO: 7971 - DNA, 383 bp, Homo sapiens; identical to SEQ ID NO: 7947

SEQ ID NO: 7972 - DNA, 572 bp, Homo sapiens
  unsure (564): n=A,T,C or G
gaaaaagctgatgctaataaccagacaacagaacctcagcttaagaaaggcagccaagtggaggcactcttcagttatgaggctacccaaccagaggacctggagtttcaggaaggggatataatcctggtgttatcaaaggtgaatgaagaatggctggaaggggagtgcaaagggaaggtgggcattttccccaaagtttttgttgaagactgcgcaactacagatttggaaagcactcggagagaagtctaggatgtttcacaaactacaaagctgaagaaaatgaagccctattacttgtttgtaagatttagcacccttctgctgtatactgtactgagacattacagtttggaagtgttaactatttattccctgttaaaatttaacctactagacaatgatgtgagtacccaggatgatttcctggggcacagtgggtgaggagatggggacaggtgaatggaggagttaggggagaggaaaagtggatggaagtgtctggaaagggcacgagagagtcttccaggtactgatcctgtttcttgctctgagtgctanctagccag

SEQ ID NO: 7973 - DNA, 375 bp, Homo sapiens
ccaccatgtgttctcattgctgtaataaaccaaaggacttactccaacacctgaagcttgcagtcggggtgcaagagtccctcacagagtagtttgatccccttgtctccgagagtgttgcctcgcaggtaaaggtgcgtgagattctgattagtgctgagtaccgaggacaaagctgaacaacagactgacgtaaggccagaattcaccaaccccagtttctgcaggttacactgtggattcttggctttttcacataaaattgcgactcctgagtctcccaaggcattctcccccacatagagtctggtcagggaatggctggtgctcaatactgatgcaagatcctgacaacatgctgatgtgaggcagcag

SEQ ID NO: 7974 - DNA, 599 bp, Homo sapiens
  unsure (590): n=A,T,C or G
ctgcctatgttaatgccattgagaaagtcttcaaagtgtacaatgaagctggtgtgaccttcacatagatggatcatggctgacttcctcactatcctcttcacatgtaacttctgcagacctatcacaagtttacatgtaaccacagaaatccctttctctcctgactcattaataatggataccattctcaacaagtcaatccaagtcagcccgttaaggagaaagaaattaaggttagcggatcatgtacaagctgagtgtgaaagtagaaatcacctacaccagagagccattttggtattttgcctttaaataaaaagcctcctttatctggctgtgcagccttgctctgtggcttttcccaacacaatcagtgctagtgctggggaggaacagtcaagagcagtcagttgcttgcttattttttctggatgagtctgggacacactgtaactttaacacatttaagaagtaggtgtgtggccttttcagaaggtggcatggtcctcaagtgagttcttagtattttatatcagcaaaataattcaattttgcaggttacaaacaaatataaaacctgtttctgnttatgaata

SEQ ID NO: 7975 - DNA, 265 bp, Homo sapiens
ctgaacagagaaaggaattaaaacgctttaattaaaaaatcacgagtggatgataaagtgtgtagaaactgaaaatttacaaactatttaaaacctggaatcgctgactgttcagaaactacacagatggatcatgggtggtggtgaacagcagaaagggattatggatgaatctgcattgttctagctgctccccatgccacccgtctccgaggaaagcctgtaacacagaaacaagaactcagttagtttccccagtgctcag

SEQ ID NO: 7976 - DNA, 597 bp, Homo sapiens
ctgggaagccacgagaatattgtgaacctgctgggggcgtgcacactgtcaggaccaatttacttgatttttgaatactgttgctatggtgatcttctcaactatctaagaagtaaaagagaaaaatttcacaggacttggacagagattttcaaggaacacaatttcagtttttaccccactttccaatcacatccaaattccagcatgcctggttcaagagaagttcagatacacccggactcggatcaaatctcagggcttcatgggaattcatttcactctgaagatgaaattgaatatgaaaaccaaaaaaggctggaagaagaggaggacttgaatgtgcttacatttgaagatcttctttgctttgcatatcaagttgccaaaggaatggaatttctggaatttaagtcgtgtgttcacagagacctggccgccaggaacgtgcttgtcacccacgggaaagtggtgaagatatgtgactttggattggctcgagatatcatgagtgattccaactatgttgtcaggggcaatgcccgtctgcctgtaaaatggatggcccccgaaagcctgtttgaaggcatctacacc

SEQ ID NO: 7977 - DNA, 596 bp, Homo sapiens
agtctaggcagaatgtaactctaaaccattgtagactgtcctgaagattcataatttctttccccaaaagaattattcttaatatgcacatttaacactgaaatgtagctgtaattcaaggtaagcttaggaacttcaccctctaagcacagacttctatgcagcacatacttctataatcagtaaacttaattcacaaaattagcgcataagggtattaagtgcatgggaagtaaacacagttatgttacacttaaaattacttttgaatgattgataaaggatttcttcatgattgattatcttaagaaaatggaagtctgtgtaacttgaatttggcagggcatgaaataagtggtaaaaacagcaaactgataacttgagaatcattttcgttttactgagaatactttatttgctggtagaagttgctaaaaatgcacagaacaaataccaatagaaaatgcactgtatttgaatctccctagtctatataaaatgaacggtgtacagcatctgttggaaaaatggctgcatggacatttcttattttatgcccacttataaataaaaataaaccttttattcaagagtat

SEQ ID NO: 7978 - DNA, 599 bp, Homo sapiens
  unsure (13): n=A,T,C or G
ccaccgtcacagnccaggatgaagaggagtacagggtcctgtgagctgtttgaccactgttctaagactatgtgtgcccaaaagcacataagcatctatgttgagagtaagtttgtatcctgcgttggtctcagaaagaacgtgaatgcttaagattttgaaagtacataatattttatactttgggagagagctttaagagtccctggaaatactttttaatttttttaacttaaaattcaagagactgaatcacttttctcattgattaaatgtaaagattattgagaaacctatagtaaatgaaatttgtaagatgttttctcaaatatatgctgtgcctgtacttatatacagtctttcaagagagatacaaacaaggcagaaacatttaaactagtattaaaggtagtttaccaaagcattttttgttttcttaccttgaaaacacagaaccgttaattccttggtttaagcagttgctaagttttttaattttaggctcagaggcccataggaggttttaagatttatgtttagtccgataggtgaggtctttgatattttgaattttaactccttttatgatacatcacagt

SEQ ID NO: 7979 - DNA, 575 bp, Homo sapiens
  unsure (19): n=A,T,C or G
  unsure (152): n=A,T,C or G
ctgggagagctagactaanttggtcatgatgcagaagctactcaaatgcagtcggcttgtcctggctcttgccctcatcctggttctggaatcctcagttcaaggttatcctacgcagagagccaggtaccaatgggtgcgctgcaatccanacagtaattctgcaaactgccttgaagaaaaaggaccaatgttcgaactacttccaggtgaatccaacaagatcccccgtctgaggactgacctttttccaaagacgagaatccaggacttgaatcgtatcttcccactttctgaggactactctggatcaggcttcggctccggctccggctctggatcaggatctgggagtggcttcctaacggaaatggaacaggattaccaactagtagacgaaagtgatgctttccatgacaaccttaggtctcttgacaggaatctgccctcagacagccaggacttgggtcaacatggattagaagaggattttatgttataaaagaggattttcccaccttgacaccaggcaatgtagttagcatattttatgtaccatggttatatgattaatc

SEQ ID NO: 7980 - DNA, 598 bp, Homo sapiens
  unsure (19): n=A,T,C or G
gcttctaggacaagagccnggaagaaaccaccggaaggaaccatctcactgtgtgtaaacatgacttccaagctggccgtggctctcttggcagccttcctgatttctgcagctctgtgtgaaggtgcagttttgccaaggagtgctaaagaacttagatgtcagtgcataaagacatactccaaacctttccaccccaaatttatcaaagaactgagagtgattgagagtggaccacactgcgccaacacagaaattattgtaaagctttctgatggaagagagctctgtctggaccccaaggaaaactgggtgcagagggttgtggagaagtttttgaagagggctgagaattcataaaaaaatttattctctgtggtatccaagaatcagtgaagatgccagtgaaacttcaagcaaatctacttcaacacttcatgtattgtgtgggtctgttgtagggttgccagatgcaatacaagattcctggttaaatttgaatttcagtaaacaatgaatagtttttcattgtaccatgaaatatccagaacatacttatatgtaaagtattatttatttgaatctacaaaaaacaaca

SEQ ID NO: 7981 - DNA, 450 bp, Homo sapiens
  unsure (414): n=A,T,C or G
ctagtcttaaaaaatatgatagtttctctactaaagtctaaaaaacaaatctgtgctatttaaagaaagctgaaaaaatctgttttatcaaataggtttcacattagttttttcaacaactctcaaatgactatagttttttttctaaataagtataaccaattacatggtatgatgacccttacttgtgacactagtgtctccctagaatagctttttgtctgtggatagagccaaagatgctagataaagttcaaattagggaaaataataaactcattcataaatcagaatcaaacttgtctctctgtgctaggttaagcattgctaatttaaataaaatctgcattaattgaaatatgctgaaaattttaagatatatttgcatttattatgatgcattttgcatcaganatattctattcttgatcaatatttctcaaatattgg

SEQ ID NO: 7982 - DNA, 603 bp, Homo sapiens
  unsure (20): n=A,T,C or G
  unsure (575): n=A,T,C or G
  unsure (588): n=A,T,C or G
ccatcggtgctgaaattgancattttaaatagtacagtaggctggtatacattaggaaatggactgcactggaggcaaatagaaaactaaagaaattagataggctggaaatgcttactttctgctctcattttctttcattttgtctgctgtctttttgaatgccaatactttcatttaaaatgttttgggagcacggcaacccaaaatgactgaacggtggtccaaaaatccaaaccaactgataattacttctcgaggtgataggaaaggcacaggaagttaggactttggctgaaatgatgaaaacacatgttcgccattttagggatcagcgcctcgactcctgccacctccggctccaacgatgatcatgtttggatgtatttattgaattgtcctttgctgatgaggaatttttaaagtatttcatagaataagtcctttggtatgcagatgctacatggaaggaaagaaagaaaaaaagaaaacacacaatattacttgctccataccctaaactgccgataccacagccgtaaaatgaaggtgtctagtagttgttatagcacggnagtccattctttntaaaggaccacttac

SEQ ID NO: 7983 - DNA, 155 bp, Homo sapiens
  unsure (148): n=A,T,C or G
  unsure (153): n=A,T,C or G
ctgagggctcaggtgagcaactggtcacagtcagcagctctgttgttccagtgcttcccagtgctgtgcaaaagttttctggtacagcttcctccattatcgacgaaggattgggagaagtgggtactgtcaatgaaattgatagaanatccncc

SEQ ID NO: 7984 - DNA, 603 bp, Homo sapiens
  unsure (11): n=A,T,C or G
  unsure (557): n=A,T,C or G
  unsure (599): n=A,T,C or G
ctgataatttncaatgtcataaagtttccagtttcacaatacaaaaaggataaaatgaaattgggtatcattttgttgcaatttatagaactttacccatacctgtaagaccctcaatgtatatgaaatcattttcactgggaaagtgacagttacagtaaaagcagaaccacacaaatctttatttaaaagccgaaatatcagccttctctctctcttttgctatttgaaaggtagtcttcaatttggcaggcaactgcttctctctccaaatagtaacaggttacaaacatgctactttaaatatgaataggacctaaggctttagtattttaaatcttgcccaatacagaaatgcctttcaagagactttagtgatgcttaatttatgaacaacaaggaattattttccttttgattattcactttttcaaaactcatagatcagaataaacaaaaaatcccccaacccatggtggggacacaaaagtaacataagtgactaaggtgtgccattcatagagaggttgaagactccatgccccaggaccacttanctgcaatagggtgaaatagtctactttttgatttcatgaatntttt

SEQ ID NO: 7985 - DNA, 489 bp, Homo sapiens
  unsure (13): n=A,T,C or G
  unsure (14): n=A,T,C or G
ccttatttctctnntcctttcgtacagggaggaatttgaagtagataggaaccgatctggattactccggtctgaactcagatcacgtaggactttaatcgttgaacaaacgaacctttaatagcggctgcaccatcgggatgtcctgatccaacatcgaggtcgtaaaccctattgttgatatggactctagaataggattgcgctgttatccctagggtaacttgttccgttggtcaagttattggatcaattgagtatagtagttcgctttgactggtgaagtcttagcatgtactgctcggaggttgggttctgctccgaggtcgccccaaccgaaatttttaatgcaggtttggtagtttaggacctgtgggtttgttaggtactgtttgcattaataaattaaagctccatagggtcttctcgtcttgctgtgttatgcccgcctcttcacgggcaggtcaatttcactggttaaaagtaaga

SEQ ID NO: 7986 - DNA, 392 bp, Homo sapiens; identical to SEQ ID NO: 7567

SEQ ID NO: 7987 - DNA, 367 bp, Homo sapiens
gcggcgaccatggcgtatcacggcctcactgtgcctctcattgtgatgagcgtgttctggggcttcgtcggcttcttggtgccttggttcatccctaagggtcctaaccggggagttatcattaccatgttggtgacctgttcagtttgctgctatctcttttggctgattgcaattctggcccaactcaaccctctctttggaccgcaattgaaaaatgaaaccatctggtatctgaagtatcattggccttgaggaagaagacatgctctacagtgctcagtctttgaggtcacgagaagagaatgccttctagatgcaaaatcacctccaaaccagaccacttttcttgacttgcctgttttgg

SEQ ID NO: 7988 - DNA, 485 bp, Homo sapiens
  unsure (20): n=A,T,C or G
  unsure (53): n=A,T,C or G
  unsure (54): n=A,T,C or G
  unsure (263): n=A,T,C or G
  unsure (266): n=A,T,C or G
  unsure (326): n=A,T,C or G
  unsure (375): n=A,T,C or G
  unsure (379): n=A,T,C or G
  unsure (409): n=A,T,C or G
  unsure (444): n=A,T,C or G
  unsure (453): n=A,T,C or G
  unsure (454): n=A,T,C or G
  unsure (472): n=A,T,C or G
ctgcaaaaaccacttcaggntcctagctctatttctagagctgtcttgtccannacagtggctgctacccacctgtggctcttgagcacctgaaaggtagatagtgcaaactgacatagtctttaagtgtaaagtacttgacaactttaaataagataataggaaaaaagaatgtaaaatttctcaataattttcatgtgggttacttattgaaacataataacttgaatacattaagtaaaatatattgttaaattactttnatntctttaatttcaattttttaaagatgcttacaattttatatggggttttcattatatttntattgaacagtgctattctacacacaagctcatcttccttaaatattgntggngcctccaaccatgattccatcacttctttncattggccaatttctttttttcttttttttgaatngagacatannttcactcttgtcacccangctggaatgcaat

SEQ ID NO: 7989 - DNA, 446 bp, Homo sapiens
  unsure (340): n=A,T,C or G
  unsure (341): n=A,T,C or G
  unsure (407): n=A,T,C or G
  unsure (421): n=A,T,C or G
  unsure (427): n=A,T,C or G
cctttcttaaacaacttactctgcattaaaaagtcatcaataagaactgtaattcagtgtttttaaaaatgaaatgtttaacttcaaattgtttgtttaaaataaactgctattgtgccaaataatgaaactactattttattcattacaaacatcatataatcattctctataatcactataaaaatttaaatgcttcctttctcctgtatatgaagatggtagttctaaagcaacactctaaaagtgttaaaaagcccattcgtaacacacaccccacctcagtttttgaaagtcagtgcattcagtggttataaataggcatgatgttcttccacanntaagagttctgagtgtcaatcagttgtgtttttttctcccaagggaagacgttcccataactggancaactgttcaccancctgangttctagttcctagataaa

SEQ ID NO: 7990 - DNA, 92 bp, Homo sapiens
  unsure (19): n=A,T,C or G
  unsure (21): n=A,T,C or G
ctcaggtgacactatggcnanattaacatctgggattaggactggaaacacatgtcattttgaactaagggaaactctttgtcatcctaatt

SEQ ID NO: 7991 - DNA, 88 bp, Homo sapiens
  unsure (23): n=A,T,C or G
  unsure (84): n=A,T,C or G
ctgggaagccacgagaatattgngaacctgctgggggcgtgcacactgtcaggaccaatttacttgatttttgaatactgttgntatg

SEQ ID NO: 7992 - DNA, 203 bp, Homo sapiens
cctttaagaattaagtgacttgtccaaggtcactatccgtattttaggagccaagacgagatcaagttcaatattccaggagtggtactgactagaccttgtagttattttgaaaatgttagcctccaattacaaaagcaagcatttcctagttctcactcaacttctccttttccctgttcctctcaaaaaaaaaaaaaaaa

SEQ ID NO: 7993 - DNA, 72 bp, Homo sapiens
  unsure (11): n=A,T,C or G
ctgaaccctcntggagccattcatacaggtccctaattaaggaacaagtgattatgctacctttgcacggtt

SEQ ID NO: 7994 - DNA, 577 bp, Homo sapiens
cctactcattattttagagaatgaatgaagcaacaaggaagagagaccatgactctatcgatgacactgtttatagaaacacaggagaggaagaatttggaatgaaaagcacttcgtcagaaccttctgtgggagccattgagagaaaagcatggtccagtgccttctgagaaaggccagagctttgggctttcctgctctgcttttgggtcgtcaatttgccatctctggttctgtgctataatcagaattgtaattatgttctccagaggccaatttcattaactctgattaattagaatcagctagccagattagtaacctctttgtccagccttgatttacagtgcagggtaaagtgcagaccttaaaaacagctaagtacctagaagagctccctgcaagtgtaaatattaaggatgacctgtgcaaaattatacccacaccagcactagtggtaattattctaaattattgccaaaaagttttttttaatctgtctttcaagtttacagaaaagaaagcagtaaatgcattgatgtcattttattatgtacatatatcatgtgcattcaag

SEQ ID NO: 7995 - DNA, 186 bp, Homo sapiens
cctttccactaaccctgaaaaagatatatttgtggtgcgggaaaatgggacgacgtgtctcatggcagagtttgcagccaaatttattgtaccttatgatgtgtgggccagcaactacgtagatctgatcacagaacaggccgatatcgcattgacccggggagctgaggtgaagggccgctgtgg

SEQ ID NO: 7996 - DNA, 236 bp, Homo sapiens
  unsure (216): n=A,T,C or G
cttacgtttagtgagggagagatttggtatatgattgagatgggggctagtttttgtcatgtgagaagaagcaggccggatgtcagaggggtgccttgggtaacctctgggactcagaagtgaaagggggctattcctagttttattgctatagccattatgattattaatgatgagtattgattggtagtattggttatggttcattgtccgganagtatattgttgaagaggat

SEQ ID NO: 7997 - DNA, 388 bp, Homo sapiens
  unsure (40): n=A,T,C or G
  unsure (375): n=A,T,C or G
  unsure (386): n=A,T,C or G
ctgaatttcacttttctttaaaaatttaatattaaaatgntttcatctcttaattattggcttgcttgcatggatcattcattaaataattttttatttgctagatacccataatatctgccgaacatctgactagccacaagtatgttacccagatgtagaattttcatcactaaacagtaagttcattatgtaatatatagttgcatatttgtggtggttttttttaagatagcaattgtatagtgcacttaaaattttgcgaaatctctgagaaaatatatacagatcacatttttatcttaaatgggtgtgaggaattttatcagacatctttataacaaatatgttaatatcacttaaatatacaaagtnctaagagaaanta

SEQ ID NO: 7998 - DNA, 388 bp, Homo sapiens
ctggcagaccccccaaccacatcagaggagttttcatttcttcctgggctgcttatctgggaagccttcaaagaattcgttacacatcatggcgatgcaggacaggaagacacagtactcttggaagtccacctcgttgtccctgttgctgtccaagttgctcatcagcttctggaaagcagcttcatctgtccttttccccaagaagctgggcagctcccgggtcagcagctcctttagttctgacttgttgagcttgaacttgtcaccctctttgcccgagtacttgtggaaggtggacaccatcacatccagggccttctccagagggcacgccatgacagcagtcaggatcaaaccaagaaagaagaagcgctgaggagagagg

SEQ ID NO: 7999 - DNA, 405 bp, Homo sapiens
  unsure (336): n=A,T,C or G
  unsure (352): n=A,T,C or G
cctggctcaacaaaagggctggggattggccctgaaaggagagagctgactgtcctggctgatggacaggagatcctcttagcactaccctaaggcaggcagttgggcattggtgtagacaacaggaaagtccaggctatagccgtactcaaaaacctttctgttccctttctgccagccctagggattgagtccacattcagcacaggactctctgggtacagctctctttaggaagacacaaattgcatggtgaagtcagttatatcctggccgcctttggtccctcccaggaagacgggcatgttttctgcttgagaggtgctgatgtgccanttggggaactgggcanactcaaattccagcttgttattgatttctatcttgttgaagacaaatcgcttt

SEQ ID NO: 8000 - DNA, 452 bp, Homo sapiens
cctgccttaccgagagccaaacagagcccagggagactccgctgtgggaaacctcattgttctgtacaaagtactagctaaaccagaaaggtgattccaggaggagttagccaaacaacaacaaaaacaaaaaatgtgctgttcaagttttcagctttaagatatctttggataatgttatttctattttttatttttttcattagaagttaccaaattaagatggtaagacctctgagaccaaaattttgtcccatctctaccccctcacaactgcttacagaatggatcatgtcccccttatgttgaggtgaccacttaattgctttcctgcctccttgaaagaaagaaagaaagaagactgtgtttttgccactgatttagccatgtgaaactcatctcattacccttttctgggtttgaagctgctgtctctagaagtgccatctcaa

SEQ ID NO: 8001 - DNA, 355 bp, Homo sapiens
gaagaacgtgagtaggccagatcagaaaagggagctcaggtaccttccagagagtgagacccagcgcccttgtctcgcacccagtaggctttcatccccgccatggcggagctgatccagaagaagctacagggagaagtggagaaatatcaacagctacagaaggacttaagtaaatccatgtcggggaggcagaaacttgaagcacaactaacagaaaataatatcgtgaaagaggaactggccctgctggatgggtccaacgtggtctttaaacttctgggtccggtgctagtcaaacaggagctgggggaggctcgggccacagtagggaagaggctggactatatcacag

SEQ ID NO: 8002 - DNA, 339 bp, Homo sapiens
ccagaggagggtcccatctgtcatccgcctggcactggctccagggactgccttccagagtatacccatcttcacacttcaaagtcacataatctccatagtgatatacttttttcatttctaactccttcgagattccattcataaacagtgggaagctacaatttacttctttgcaataatgatccaattggctccagattccctggtctgtacagaaaatgaagccctttcccactaacaggtagccggggtcacaaatgtagctgattgtcatcccaggaagatatagagatacgtgtcctccaatgtaatgcccgttttggatcttgggtggat

SEQ ID NO: 8003 - DNA, 393 bp, Homo sapiens
  unsure (354): n=A,T,C or G
  unsure (387): n=A,T,C or G
ccagtgtgaggtttgctccttcagcaaacctggaaggtaagaatggggcatatccacatccatagacccttttgtttccctcacagaattttgtgattttttttgtgtgtggcatttttgggggagcagggaacatcaactttgttgggggaaatttctctgcataccagcacgccagcgagggcagacggccttacacactggcctgtgaacatacctatttgttggcccgcttgtgtctgtacatctgcatcatcctctgtcggaacacatcgaatgtgtcttctttgtgctcctgcccgtcagcacccaacccttccccttccgagggggttcccctagggagtgaaaaanagagtcagttgtgcacctgagcccagggcctgncatgcc

SEQ ID NO: 8004 - DNA, 73 bp, Homo sapiens
  unsure (47): n=A,T,C or G
  unsure (64): n=A,T,C or G
  unsure (67): n=A,T,C or G
tcggcttgtcctggctcttgccctcatcctggttctggaatcctcanttcaaggttatcctacncanagagcc

SEQ ID NO: 8005 - DNA, 279 bp, Homo sapiens
gcacaaggcacaacaggctgctctgggattctcttcagccaatcttcattgctcaagtgtctgaagcagccatggcagaagtacctgagctcgccagtgaaatgatggcttattacagtggcaatgaggatgacttgttctttgaagctgatggccctaaacagatgaagtgctccttccaggacctggacctctgccctctggatggcggcatccagctacgaatctccgaccaccactacagcaagggcttcaggcaggccgcgtcagttgttgtgg

SEQ ID NO: 8006 - DNA, 271 bp, Homo sapiens
  unsure (130): n=A,T,C or G
  unsure (239): n=A,T,C or G
  unsure (242): n=A,T,C or G
  unsure (249): n=A,T,C or G
  unsure (250): n=A,T,C or G
  unsure (258): n=A,T,C or G
  unsure (262): n=A,T,C or G
ctgattgattgaatgcaatgtgattgattgattgattgattgatatataccaaaattcatatggatgtcacacagtgacagcattgtacaagtaacgttaatgacctccaacaaacacattttaaattanactggtcaagctaaaaggaatgttggagccaaaagaaatgtagtggaattcagattgtctattaagacttgaaactatacattagaatgatgtggaaccctaatactancancaactgnnacagcccncttnaaagatttg

SEQ ID NO: 8007 - DNA, 531 bp, Homo sapiens
  unsure (517): n=A,T,C or G
tgagtccaaacattctgaaaaccgtacaaatgtgtttacattttagtgggggcttcctgcatctttaacctctttaaattgacataggtaagatcttgtgtaataacacatttgcaaatatgcagatgcattttcaaatgaatataatctgatttagagaatattaactgactatcatagtagactatggataatactctaataattaattacaggttaacatttttaaaactcaaagcatatgctttaagtttatgctttaagccacgttatgttctacttcagcctaatacaagggagaaatttggagggggccctcctagctttctagtctcattattcccaaattagaaacattaccagcctaacactaactctggggtctaaaatgaagttattttggcagccctagagttttcttgtcattgataactgaagattggcctttgtgcaggttaaataatcaaatcttagaggaaattgacatgcttttaaattatctacaaatattagcccnttaaaagattatat

SEQ ID NO: 8008 - DNA, 449 bp, Homo sapiens; identical to SEQ ID NO: 7970
  unsure (13): n=A,T,C or G

SEQ ID NO: 8009 - DNA, 297 bp, Homo sapiens
cctgggtatctgaggcttgcttggcttgtgtccatgcttaaacccacggaagggggagactctttcggatttgtagggtgaaatggcaattattctctccatgctggggaggaggggaggagggtctcagacagctttcgtgctcatggtggcttggctttgactctccaaagagcaataaatgccacttggagctgtatctggccccaaagtttagggattgaaaacatgcttctttgaggaggaaacccctttaggttcagaagaatatggggtgctttgctcccttggacacag

SEQ ID NO: 8010 - DNA, 385 bp, Homo sapiens
ctggcagaccccccaaccacatcagaggagttttcatttcttcctgggctgcttatctgggaagccttcaaagaattcgttacacatcatggcgatgcaggacaggaagacacagtactcttggaagtccacctcgttgtccctgttgctgtccaagttgctcatcagcttctggaaagcagcttcatctgtccttttccccaagaagctgggcagctcccgggtcagcagctcctttagttctgacttgttgagcttgaacttgtcaccctctttgcccgagtacttgtggaaggtggacaccatcacatccagggccttctccagagggcacgccatgacagcagtcaggatcaaaccaagaaagaagaagcgctgaggagag

SEQ ID NO: 8011 - DNA, 398 bp, Homo sapiens
aatcgctgtcggatcgatacaggaaggactcccgtcgttgactgtggacaaaatttgcttggagaattagcccggatcctgggctggtcatgggatccaagggactccgtcccgcagatgtgccattgtccacatcaaaaccactggattctgcagaagtgatagcaatcagcggcagaatcttcagggggaggctggttggtcgttgaatgttctctgattcacttttcaagtcagcttgttccaactgtctgaaggcgagagggggaagctgaatattgcgacatgaaagtctccggacaagatagggttccattccgcggaaagggtcttcctcttcattactggaatgtagtgtttcctcagaggcacttttgctccgagaaagcaaatcacag

SEQ ID NO: 8012 - DNA, 278 bp, Homo sapiens
  unsure (5): n=A,T,C or G
  unsure (10): n=A,T,C or G
  unsure (21): n=A,T,C or G
aggtntgacntcctaaaaacnaagtcaaattagggaaggatggccgtttccttgagtcaaaagcccagcaggattgcattataatgtatatttcttctgcagcataaaatggctgatccattttaaatccattttgaatcagtttgtagaagttagcatcaaccggaatgccagggtaaggattcacaccaagtgagaagatttcccacagtaatattccatatgaccagacatcactcttaatggtgtagatgccttcaaacaggctttcgggggcc

SEQ ID NO: 8013 - DNA, 305 bp, Homo sapiens
  unsure (275): n=A,T,C or G
  unsure (291): n=A,T,C or G
ccaatatgcctttggagcacagcctatggtttatgtttcttttatgaccacctttaatatctgtcaaacgactagacatgctatagctttacccgaaggtaatttgattgactgtgctctgctagaagatggtgtatgggtccctctcgaggtaactgccaataaatgataagtggtatttgttttagataatgcctctacctcagtggtagctttgataatggcaaattgtaattgcaagtgccattttcagaataggcattggtttattttangaagaggataataaanttccttttagttat

SEQ ID NO: 8014 - DNA, 231 bp, Homo sapiens
ccatcatccatgaagaaaaggcactgaccatggaagtgatccgccaggtgaagggagacctggccttcctcaacttccagaacaacctgcagcagactccactccacttggctgtgatcaccaaccggccagaaattgctgaggcacttctgggagctggctgtgatcctgagctccgagactttcgaggaaatacccccctacaccttgcctgtgagcagggctgcctgg

SEQ ID NO: 8015 - DNA, 157 bp, Homo sapiens
  unsure (119): n=A,T,C or G
  unsure (128): n=A,T,C or G
ctggtgttaatggcatgcaggcatatgtgatgccaaccatgagggctggaagaaccagaagccaaagaagaatatgaccgcatctattctaaagctactgtggtggtttctcatgcttnagagtctcntaagtctcctggttcctggtgctcaggcc

SEQ ID NO: 8016 - DNA, 262 bp, Homo sapiens
  unsure (162): n=A,T,C or G
  unsure (248): n=A,T,C or G
  unsure (251): n=A,T,C or G
ccaacatggtgaaaccccagctctattaaaaataatagaaaaattagccaggcgtggtgacatgtgcttgtaggcccagctactcgaggctgaggcatgagaatcgcttgaacccatggaggtggaggttgcagtgccactgcactccagtctgggtgacanagcaagactccatcccaaaaaataaaaataaaactctaggtggaggcttaatcttttctttaaatcagcttcttagagcactctanaantcatctgtaac

SEQ ID NO: 8017 - DNA, 288 bp, Homo sapiens
ctgttgagaatatactgtagggggtgaggatggaagtgagggtggtatttggaaggctagtgcaataatccaggcaagaaatgaattaaatggtttgagtagggtgaaagcagttgttctgcatgtattttgaaggaaaacccaccaagatttgctgaaagattaaatgtgaaatacaagagaaaaagagaaatcggccgggcatggtggctcacacctgtaatcccagcactttgggagaccgaggtgggtggctcacctggggtcaggagttcgagactagcctgg

SEQ ID NO: 8018 - DNA, 309 bp, Homo sapiens
  unsure (42): n=A,T,C or G
  unsure (134): n=A,T,C or G
  unsure (185): n=A,T,C or G
  unsure (207): n=A,T,C or G
  unsure (210): n=A,T,C or G
  unsure (218): n=A,T,C or G
  unsure (221): n=A,T,C or G
  unsure (230): n=A,T,C or G
  unsure (231): n=A,T,C or G
  unsure (248): n=A,T,C or G
  unsure (256): n=A,T,C or G
  unsure (267): n=A,T,C or G
  unsure (276): n=A,T,C or G
  unsure (297): n=A,T,C or G
  unsure (298): n=A,T,C or G
cgcgtaggcgagttggtctgaaagcccccggtatcattcctngaatttcagtgcgggaaccaatgcagactggcattaaggctgtggatagcttggtgccaattggtcgtggtcagcgtgaactgattattggngaccgacagactgggaaaacctcaattgctattgacacaatcattaaccanaaacgtttcaatgatggatctnatnaaaagaanaanctgtactgnntttatgttgctattggncaaaaganatccactgttncccagttgntgaagagacttacagatgcannatgccatgaag

SEQ ID NO: 8019 - DNA, 620 bp, Homo sapiens
  unsure (480): n=A,T,C or G
  unsure (500): n=A,T,C or G
  unsure (503): n=A,T,C or G
  unsure (509): n=A,T,C or G
  unsure (598): n=A,T,C or G
tttagattatattcgataaaagtaattggactttttttctttttttgactcgttgacaagtgtctttgtaatatgtttttagttccctttttttgttgtattataggcagatgaacaaattaaatttggcctcaaagagagaacttactcccttctggatatttttgccacatttctttgcaaaaggagatatatatatctttagtcagttttgttgttatgagaaattatgggttattttgtggcatgctctttgggagctgcacagttatggggaggactcccactgctgtgcaagttaagtcttttacaaaacaaggacagcagaggagggtttgcagagacctccctctgaaaaacacaaagaatggactctctcctgggatgaggacttgctttctttacctccggttctttccatgtcttagttggatgtccctgaaatggacacaggctgtgccattgtgccagaaacattgngttatcttttatgttgttgntgntgctgntaaactataatatgtgacttctttttttattattttttggttgaatgctttaaaaatcttttaagtctgtggatctgctgatgtacagngcctttgctgctatggatcaaa

SEQ ID NO: 8020 - DNA, 446 bp, Homo sapiens
ctggtgcttctgccttaccccatcctctcctctcagattcaccgaggactgttcaggtggtaacattctcttagggtagggaactctgcagagggagagctgaggaggttccggccatagttgtttgtaatcttagggctctgggcttggctgaaacatgacggtattgcttggtttcaggcttgacactgccaggcgcctattgcttgacctctgtttaaatgagggacttcaagactagacagcatggctcttttcagtttattgcatgaaggagttacactagtccaagttaaaagcggaccccaaatggttacattatacaagctgtgaggtttttaaacctgtgacaagggagagaagggaaattctactcattgcaaggaaatcctcacttaagcttcagtgagccacaagcacttaaaacccatgaaccttcagacctc

SEQ ID NO: 8021 - DNA, 609 bp, Homo sapiens
  unsure (566): n=A,T,C or G
  unsure (572): n=A,T,C or G
  unsure (591): n=A,T,C or G
  unsure (592): n=A,T,C or G
ccaatgaaatttgaacatcactaaacaagcaaatggaatgactttggaccatatctagtatataatatttttgtcacgcacctgctgcattgctctaacttacacagaatgagaggagtaaatgttcttgccttcaaatagtgttttacgttttttatcctgctgaaaaagtatatataaaatatctaacattacaggatagaggttcagtttcttaaaaaattaaagctgctaaaattgagtggttaaaaaagataccttatcctattcctccccacccacccatgtttttaaactaatttatataaaatctggaggctgttacagctaacaaagcaggtgtgtggcagaaatattactttaaatttgtcttgtgagattttactatatctcagacagcataaatgctgttttagcactggattctttcactgagcacaaagagttgttggggctttagcatctgactgattttgttacggggttgattctgaccataggaagtatgcaatgtgaatcactatttacagagaaacctacaacaggatgcttgatgttgtagaaanctgggnacatataggataccaagcnnaaattataagaaaccta

SEQ ID NO: 8022 - DNA, 252 bp, Homo sapiens
  unsure (55): n=A,T,C or G
  unsure (124): n=A,T,C or G
  unsure (180): n=A,T,C or G
  unsure (240): n=A,T,C or G
tcttacaggcagaaactcttagagctcacaaattggaaacaactgcaaacttcanagtaaattcatagcttccaaatacaaatgttcacattgtccctccgctatttttacacaaatgcattcnggtgaagacagcaacacacattgggaaaggacatctgcttcctattttagtcccanaatcacttttgcttctagtcccaactgttccctctccccaatcccaaccttatccatgtnacagtatgaatt

SEQ ID NO: 8023 - DNA, 342 bp, Homo sapiens
cctgtttgattgtagctatgttggtgtatctcgtgtacaagatggaaaagtgcttttgttgttctacctgatccagttgggggagcaggaatagggggtgcctgcctaacggcctctagcccatgtgcttatactgggatctgtcccgagggatctgcacctggttggcagtcattttgtggtggacgtggtaaatcgcgagtgttaccatgatgacgaggcccaagatgagccccaaaatcaggggcaaggtttcttccagttgctcccgctcatccactgggcatttatgctcttcactgaagacaaaatctgagataatgtcaaaaggttggatgtgga

SEQ ID NO: 8024 - DNA, 274 bp, Homo sapiens
ccttggtcctagcacccactcgagaattggctcagcagatacagaaggtggtcatggcactaggagactacatgggcgcctcctgtcacgcctgtatcgggggcaccaacgtgcgtgctgaggtgcagaaactgcagatggaagctccccacatcatcgtgggtacccctggccgtgtgtttgatatgcttaaccggagatacctgtcccccaaatacatcaagatgtttgtactggatgaagctgacgaaatgttaagccgtggattcaagga

SEQ ID NO: 8025 - DNA, 178 bp, Homo sapiens
  unsure (131): n=A,T,C or G
  unsure (134): n=A,T,C or G
  unsure (150): n=A,T,C or G
  unsure (172): n=A,T,C or G
  unsure (173): n=A,T,C or G
ctgtttcatagtcattgttggtttcttcaggttgtctctttctgatggcaatcatttgacgtccaggtggctcaaattgggcagccttcacaggatcagtggaattggctgaaatccgctttttcctgcantanatcaaggccactacancagcaacaatggccagctacannaatcc

SEQ ID NO: 8026 - DNA, 321 bp, Homo sapiens
gggacgctctcagctctcggcgcacggcccagcttccttcaaaatgtctactgttcacgaaatcctgtgcaagctcagcttggagggtgatcactctacacccccaagtgcatatgggtctgtcaaagcctatactaactttgatgctgagcgggatgctttgaacattgaaacagccatcaagaccaaaggtgtggatgaggtcaccattgtcaacattttgaccaaccgcagcaatgcacagagacaggatattgccttcgcctaccagagaaggaccaaaaaggaacttgcatcagcactgaagtcagccttatctgg

SEQ ID NO: 8027 - DNA, 241 bp, Homo sapiens
ccaagggtcatgatggcaggagtaatcagaggtgttcttgtgttgtgataagggtggagaggttaaaggagccacttattagtaatgttgatagtagaatgatggctagggtgacttcatatgagattgtttgggctactgctcgcagtgcgccgatcagggcgtagtttgagtttgatgctcaccctgatcagaggattgagtaaacggctaggctagaggtggctagaataaataggag

SEQ ID NO: 8028 - DNA, 428 bp, Homo sapiens
ctgtggtttattctgcttgtatgtctgcacaggccggatgctcgtgttccttgtcttattctccatttactcagtcactggggctcactcccgtctgatgcactagccaagattgccttagtgtgctccagaaaagaaggccaaatcccaggcattgtcagggcagcagagctctacaggataggcttacctttcccacctgtgtggctagcacttcacagtttacaaattcctcccacctccactcagtgacacatgctgttctaacacaggtcaggcaggcattacagtccccatgttcagaatcaaagacctagcctcagagaagtgaagaaacatcatgccaaggtcattgactgccaagcggtagaggtggggttgcatccagagagcttcccggtatgcctctgcacaatgccattccttgg

SEQ ID NO: 8029 - DNA, 383 bp, Homo sapiens
ccatggacaagctgaggaagatgctggttccctgcccacagacctttcaggagaatgacctgagcaccttctttcccttcatctttgaagaagaacctatcttcttcgacacatgggataacgaggcttatgtgcacgatgcacctgtacgatcactgaactgcacgctccgggactcacagcaaaaaagcttggtgatgtctggtccatatgaactgaaagctctccacctccagggacaggatatggagcaacaagtggtgttctccatgtcctttgtacaaggagaagaaagtaatgacaaaatacctgtggccttgggcctcaaggaaaagaatctgtacctgtcctgcgtgttgaaagatgataagcccactctacag

SEQ ID NO: 8030 - DNA, 529 bp, Homo sapiens
  unsure (517): n=A,T,C or G
  unsure (526): n=A,T,C or G
cgccttttacttcggcccgcttcttctggtcactccgccaccgtagaatcgcctaccatttggtgcaagcaaaaagcaatcagcaattggacaggaaaagaatggcattgaagcagatttccagcaacaagtgctttgggggattgcagaaagtttttgaacatgacagtgttgaactaaactgcaaaatgaaatttgctgtctacttaccaccaaaggcagaaacaggaaagtgccctgcactgtattggctctcaggtttaacttgcacagagcaaaattttatatcaaaatctggttatcatcagtctgcttcagaacatggtcttgttgtcattgctccagataccagccctcgtggctgcaatattaaaggtgaagatgagagctgggactttggcactggtgctggattttatgttgatgccactgaagatccttggaaaaccaactacagaatgtactcttatgtcacagaggagcttccccaactcataaatgccaattttccagtggntccccaaangat

SEQ ID NO: 8031 - DNA, 382 bp, Homo sapiens
ctggagtgaaggctggatacactaattcttttaaacaagtgcccattatcacattttgcatttttgagtgcttctgagttgaaaattaaaaccatgaaatttgaactgcgttttatttttcacctgctgaaagaacaggatcctacagcaattaaaaaacaatcacataacaactatagctacagtgtgctgtttggtttgcctgtttatgatttaaattttgtgaaagtcaatacttgttttgaagatttttttgtgaacaataaaccactgaaattggcagaaactgatctgaataatatatgttcttagtatagttctttctctctttttttgttgaagttttaaacatgcagtagttttgaaaaatgtaaggaatatc

SEQ ID NO: 8032 - DNA, 508 bp, Homo sapiens
  unsure (491): n=A,T,C or G
ctgccgctgctcgttgttttttctgcaatgatatttgggactattacaaatcaagatctgcctgtgattaagtgtgttttaatcaatcataagaacaatgattcatcagtggggaagtcatcatcatatcccatggtatcagaatccccggaagacctcgggtgtgcgttgagaccccagagctcagggacagtgtacgaagctgccgctgtagaagtggatgtatctgcttccatcacactgcaagtgctggtcgatgccccagggaacatttcctgtctctgggtctttaagcacagctccctgaattgccagccacattttgatttacaaaacagaggagttgtttccatggtcattttgaaaatgacagaaacccaagctggagaatacctactttttattcagagtgaagctaccaattacacaatattgtttacagtgagtataagaaataccctgctttacacattaagaagaccttactttanaaaaatggaaaaccagg

SEQ ID NO: 8033 - DNA, 394 bp, Homo sapiens
ccaggacagcctgtacttctgttgaggagtttcaagtttttaagaagctcctggctcgggaggaggaggagtctgagagcagcacatctgatgacaaaagggcaagtctggatgaggatgaggatgacgatgatgaggaggacaatgatgaggatgacaatgacgaggatgacgatgatgaggacgacgacgaggcggaggacaatgatgaggatgaggacgacgacgaggaggaatagctgtgatggaaggactagagcgaaagggcccagagatatcaaggaagcttttcattctcttaaagcttttgggtcctttacttgaatcttctcaagttattttttattctaaaactggtctcttgatgaaaaaaattataagtcacctgagaggc

SEQ ID NO: 8034 - DNA, 550 bp, Homo sapiens
  unsure (128): n=A,T,C or G
ccttggtcctagcacccactcgagaattggctcagcagatacagaaggtggtcatggcactaggagactacatgggcgcctcctgtcacgcctgtatcgggggcaccaacgtgcgtgctgaggtgcanaaactgcagatggaagctccccacatcatcgtgggtacccctggccgtgtgtttgatatgcttaaccggagatacctgtcccccaaatacatcaagatgtttgtactggatgaagctgacgaaatgttaagccgtggattcaaggaccagatctatgacatattccaaaagctcaacagcaacacccaggtagttttgctgtcagccacaatgccttctgatgtgcttgaggtgaccaagaagttcatgagggaccccattcggattcttgtcaagaaggaagagttgaccctggagggtatccgccagttctacatcaacgtggaacgagaggagtggaagctggacacactatgtgacttgtatgaaaccctgaccatcacccaggcagtcatcttcatcaacacccggaggaaggtgga

SEQ ID NO: 8035 - DNA, 337 bp, Homo sapiens
  unsure (156): n=A,T,C or G
  unsure (168): n=A,T,C or G
ctgtttcatagtcattgttggtttcttcaggttgtctctttctgatggcaatcatttgacgtccaggtggctcaaattgggcagccttcacaggatcagtggaattggctgaaatccgctttttcctgcagtagatcaaggccactacagcagcancaatggccgctncagcaatcccagtgaccacagccacaatgatccccatcggtgaagagctgggagcttggacagtgatggtcacaggcttggatgagtacagcgtgtagcctatgtttcctgtgcagtggtaatcaccactgtgactgtggtttgcttgtgggatggagaagttgggatc

SEQ ID NO: 8036 - DNA, 449 bp, Homo sapiens
ctggagagtgtagatcccaaaaattacccaaagaagaagatggaaaagcgatttgtcttcaacaagatagaaatcaataacaagctggaatttgagtctgcccagttccccaactggtacatcagcacctctcaagcagaaaacatgcccgtcttcctgggagggaccaaaggcggccaggatataactgacttcaccatgcaatttgtgtcttcctaaagagagctgtacccagagagtcctgtgctgaatgtggactcaatccctagggctggcagaaagggaacagaaaggtttttgagtacggctatagcctggactttcctgttgtctacaccaatgcccaactgcctgccttagggtagtgctaagaggatctcctgtccatcagccaggacagtcagctctctcctttcagggccaatccccagcccttttgttgagccagg

SEQ ID NO: 8037 - DNA, 383 bp, Homo sapiens
ccatggacaagctgaggaagatgctggttccctgcccacagaccttccaggagaatgacctgagcaccttctttcccttcatctttgaagaagaacctatcttcttcgacacatgggataacgaggcttatgtgcacgatgcacctgtacgatcactgaactgcacgctccgggactcacagcaaaaaagcttggtgatgtctggtccatatgaactgaaagctctccacctccagggacaggatatggagcaacaagtggtgttctccatgtcctttgtacaaggagaagaaagtaatgacaaaatacctgtggccttgggcctcaaggaaaagaatctgtacctgtcctgcgtgttgaaagatgataagcccactctacag

SEQ ID NO: 8038 - DNA, 626 bp, Homo sapiens
tgacatcaaggactcaaaagcttattaccacctgcttgagcaggtggctccaaaaggagatgaagaaggtgttcctgctgttgttattgacatgtcaggactgcgggagaaggatgacatccagagggcagaatgcatgctgcagcaggcggagaggctgggctgccggcagtttgtcacagccacagatgttgtccgagggaaccccaagttgaacttggcttttattgccaacctctttaacagataccctgccctgcacaaaccagagaaccaggacattgactggggggctcttgaaggtgagacgagagaagagcggacatttaggaactggatgaactccctgggtgttaaccctcgagtcaatcatttgtacagtgacttatcagatgccctggtcatcttccagctctatgaaaagatcaaagttcctgttgactggaacagagtaaacaaaccgccataccccaaactgggaggcaatatgaagaagcttgagaattgtaactacgcggtagaattggggaagaatcaagcgaagttctccctggttggcatcggtggacaagatctcaatgaaggaaaccgcactctcacactggccttgatttggcagctaatga

SEQ ID NO: 8039 - DNA, 388 bp, Homo sapiens
ctgcttcaggggaaggcttgtggcttatatctattttgttgtattcctctagttcaacatgtctgcccccacccttacttctaacacctctgcccactccagtattccctcagaacctagcctggtaacgaatatatggacaattaaattacatcccaacatcattcatactttaatatataagaaatcagagcagagaatcagggcagccagtccctgaaggaaaagtctgtgacaaatcacaagtatgatcacagcacgaacttttctattctagcctggcctctaggaagaaaacagagagtgttaccggacttagggggaaaaaggacatgcttgatgaaggacagaaccccattgttctccacatttcctggctcacagaagg

SEQ ID NO: 8040 - DNA, 198 bp, Homo sapiens
cctgaaatacgttcagcacacctacaggactggggtgaaagtggataaagcaacatttatggttggcagctatggacctcggcctgaggagtatgagttcctcactccagttgaggaggctcccaagggcatgctggcccgaggcacgtaccacaacaagtccttcttcaccgacgatgacaagcaagaccacctcag

SEQ ID NO: 8041 - DNA, 344 bp, Homo sapiens
  unsure (12): n=A,T,C or G
  unsure (13): n=A,T,C or G
  unsure (318): n=A,T,C or G
  unsure (319): n=A,T,C or G
gttaaacactannttaaaaaattttaaaatgaatgatgccacatttctatataaagaaatgagcattattaatccctgttgttgtaaaacatcattgaaattgtatgctattctctttatataaagtcattctaattatgtcacatgttgaagatgtaaccaaactattataaaggctgcttatccattcacatattgaatagattaagtttgggttttttaagattgttaatttgttattttctctttcctctagtcaaagtgggaaaaagcccaccggtgaggggctccctctctggaaaagtcagcctaccttgnnatttttcaacgatgcatactttgcc

SEQ ID NO: 8042 - DNA, 480 bp, Homo sapiens
ctgcagatgtgctggctcctgagggacccgggggcttactctgctcttgggacaccttattccttttggcttcagtcttttctttgtttggagtttttcttttctgagctacaggaatcctccctcttgcttccgatgtcagtttgtttcttgcggtgggtgcaggtgccgcaagacccacttcttcctggtttatttttttcactggagctttttcttgtgttttaattttcttagcaacttttgacttctcttttcgaagattgttaacaaggtttttaagtgatggcatatctttggcaagttctattagtttgtctagacaggcaacgccttggaactttttttccatcaaatctgtaatcttaattctgttgtattcctcttgcatttttgtagttagtcctaaatcataggccagtaaggacttaattgatgtaaaatgataatcatccatgagctcaaatcctttcagcaaaa

SEQ ID NO: 8043 - DNA, 549 bp, Homo sapiens
ctgttttcctgttggaaagagctctttgatggacccctttccatccacccttattaggtagtagtctctcttgaaacccacacagatagaattttcacaccacgccatggacttgggcacatctggcacactaaagtccccctgcaattcatgaaattccctgtccttccagaaatagagctgcagcttcttttttactgccacacacatccgtaacacctcctcaccggtctctgtgtgctggaggtcacaagtaaacagtgatgctccctttgcctttgaaaccgtagtgatttgttgaaatgtcaataggtcatggacataaatgttattttctgtttgggaggaggtataacatcaggatcaatgatcataattctctagcatagccactatcgaggcaaaaaaagtaactgtgttaacatctagaagaagcaaatggcagatgttggttgaagatgtcccttcagtttcactaggatgattcattctcacctataaccagtacaaagcatttaagaggtcacttggtcttctaaacttggatat

SEQ ID NO: 8044 - DNA, 444 bp, Homo sapiens
ccagttttgaggatcagaggaagaaaggcttcctctgtgacattactttaatcgtggagaatgtacatttccgggcccacaaagccttacttgctgccagtagtgaatacttctcaatgatgtttgcagaagagggggaaatcggccaatccatttatatgctggaaggcatggttgcagacacctttggtatcctgctggaatttatctacacaggttatctccatgccagtgagaaaagtacagaacaaatcctggctactgctcagttcttaaaagtctatgacctggtaaaggcttacacagacttccaaaataatcatagctccccaaagccaacaactttgaacactgctggtgccccagtggttgttatctctaataagaaaaacgatcctccaaagcggaaacggggaagaccaaaaaaagtcaatacattgcagg

SEQ ID NO: 8045 - DNA, 258 bp, Homo sapiens
  unsure (257): n=A,T,C or G
gaagaggcagaataaaccaagcctgggacacctccctcctgtctaggtgtactcattcttctgtttcaaaagaaggcaaggacatgaagtcaacttctacctatcttctgctgctggtgtcttatgtattctcagtttgacctgattcctcttctgtcttttgacttaacattaggggttcttggtcataacctgctctgatgtacataaagatttcaggttcaatatcaatgtgtcttaaaacagaagtattttanc

SEQ ID NO: 8046 - DNA, 496 bp, Homo sapiens
gaaatttttccttaagtgtctggtgatccctggatttctgctcataattaaggaaaagaatgctgactcactggacccaggcagggcttctctcccagattgcaggcttgcctcggggatacacgggtttcccaaatgctagaatgaaaagagattttattttggcttgctaacatcaaagatactagtttctccagatggtttattcagaacactgttgtcttatttttatttgtctgagattaaatgtcttcccctttaattaaagggaggtctctgatgaagtaggtttgggaactgctaccttggtgacagcttgagtctttcctttagtgaagtgcagcacaattccacgtgctcggtgaccttctcttgattagggtgccttggaatgtacagaacctaacttgaatatacagcactggtttcttggataagaagtgtacagtgatctaaacttgcaaaccaaaatacagagatgatgggaccaaaaatt

SEQ ID NO: 8047 - DNA, 605 bp, Homo sapiens
  unsure (542): n=A,T,C or G
  unsure (592): n=A,T,C or G
ctgggaagccacgagaatattgtgaacctgctgggggcgtgcacactgtcaggaccaatttacttgatttttgaatactgttgctatggtgatcttctcaactatctaagaagtaaaagagaaaaatttcacaggacttggacagagattttcaaggaacacaatttcagtttttaccccactttccaatcacatccaaattccagcatgcctggttcaagagaagttcagatacacccggactcggatcaaatctcagggcttcatgggaattcatttcactctgaagatgaaattgaatatgaaaaccaaaaaaggctggaagaagaggaggacttgaatgtgcttacatttgaagatcttctttgctttgcatatcaagttgccaaaggaatggaatttctggaatttaagtcgtgtgttcacagagacctggccgccaggaacgtgcttgtcacccacgggaaagtggtgaagatatgtgactttggattggctcgatatatcatgagtgattccaactatgttgtcaggggcaatgncccgtctgcctgtaaaatggatggcccccgaaagcctgtttgaaggcatntacaccattaaga

SEQ ID NO: 8048 - DNA, 341 bp, Homo sapiens
  unsure (298): n=A,T,C or G
  unsure (305): n=A,T,C or G
  unsure (318): n=A,T,C or G
cctgtttgattgtagctatgttggtgtatctcgtgtacaagatggaaaagtgcttttgttgttctacctgatccagttgggggagcaggaatagggggtgcctgcctaacggcctctagcccatgtgcttatactgggatctgtcccgagggatctgcacctggttggcagtcattttgtggtggacgtggtaaatcgcgagtgttaccatgatgacgaggcccaagatgagccccaaaatcaggggcaaggtttcttccagttgctcccgctcatccactgggcatttatgctcttnactgaanacaaaatctgagntaatgtcaaaaggttggatgtgg

SEQ ID NO: 8049 - DNA, 390 bp, Homo sapiens
ccttggatgcagatcaatgctccaataaagttcattatcagctcctcctgccttgtgacaggatgatttgattttacaaaagtccctttgaaaacaagagtaaacgcagacagcttctagagaaaagtctggtgaagcagcagttgataatagattttcttttagtgatgaaattaatcttgttttggtaatctacagcctgttagggataggtggagggatgaagtccttaaaactaaattgttcctctacgaatcttcgacctgagcctgcggagagagtagccccaaatccatctctctgctgaaaggtcgcctgttttggtaggtgtgaggacattccgaaacacggccatccacattctgatacatcgcttcttctgcatctgcc

SEQ ID NO: 8050 - DNA, 630 bp, Homo sapiens
  unsure (596): n=A,T,C or G
  unsure (609): n=A,T,C or G
  unsure (611): n=A,T,C or G
cctctggcctcctgttcgcctcctctacaatttgccattgtttctcctgggttaggccccggcttcactggttgagtgttgctctctagtttccagaggcttaatcacaccgtcctccacgccatttccttttccttcaagcctagcccttctctcatcatttctctctgaccctctccccactgctcatttggatcccaggggagtgttcagggccagccctggctggcatggagggtgaggctgggtgtctggaagcatggagcatgggactgttcttttacaagacaggaccctgggaccacagagggcaggaacttgcacaaaatcacacagccaagccaatcaaggatggatgcagatccagaggtttctggcagccagtacctcctgccccatgctgcccgcttctcaccctatgtgggtggggccacagactcacatcctgaccttgcacaaacagcccctctggacacagccccatgtacacggcctcaagggatgtctcacatcctctgtctatttgagacttagaaaaatcctacaaggctggcagtgacagaactaagatgatcatctccagtttatagaccagnaaccagagctcananaggctagatgattgattac

SEQ ID NO: 8051 - DNA, 553 bp, Homo sapiens
attgctctttttcagctttatttttaagagtacagtcaggaaaccaacaaggggcctaagagtggctgcccctgcttgggacattacagcaagtgaaacaaagttaatgtgacaagctttgctttgttatcattggtcttcactagaggataccttttacatgtacttctctcttggatcaaatatgtctttaactgtacatctcagtggctggaggccatgccttttaagcatgtgtaaaatttttaaagaaatgaacatacacatagttattttagtaatatttcctgaaagaaaaaccaaattctgctataagtcttgatcttcaatgaacttttaaataatgcatttagctggaaaacaagactttcccagcttgtattacctagaagcgtgaatgtataggatacctgactactaagactatattctcagccctgccctgtcttttatttgcgggtctaatctaatattagaatatattaaccgcttaaggcattgaagccatatgggatggggaatgcatttcttcagtgtttctccgagagacttt

SEQ ID NO: 8052 - DNA, 317 bp, Homo sapiens
ctgtgttggactcagggttcagagctgccagcttggggtacctgggagggcacagcactgcctccagaaattcctcaatcttgttggtgtctgtgtgcacttcagtgccatacagcaggaatgggagctgcccccctgggcacagcttctgcactgtctcggtccgccttttggtgtcaacggtggtaacattgaaggtgactcccttgagccacagtaccatgaacagtctctgggagaatgggcagttcccaatcttggccccatcactgccagccttcacgaacaattcgacctgcggttgttcttcagccatg

SEQ ID NO: 8053 - DNA, 386 bp, Homo sapiens
  unsure (11): n=A,T,C or G
  unsure (371): n=A,T,C or G
cgagcggccgnccggcaggtccaagatggttggggcataccttggttttatacattttagggagacataagacattaatcaatatatgtaagaagaacattggttcagtggggagggagcttccaggtcacagataggtgagacacaaacagttgcattcttttgagtttctgattagcctttccaaaggaggcaatcagatatgtatctatctcagtgagcagagagataactttgaatagagtgggaggtgggtttgccctaagaagtttccctaagcttgagttttccttagtgattctggggccccaagatattttcctgtcacagttgacatccccaacacagtgtttagggctcagaaaaagatncccctaaaatagggt

SEQ ID NO: 8054 - DNA, 414 bp, Homo sapiens
  unsure (13): n=A,T,C or G
  unsure (14): n=A,T,C or G
  unsure (195): n=A,T,C or G
  unsure (201): n=A,T,C or G
  unsure (211): n=A,T,C or G
  unsure (340): n=A,T,C or G
  unsure (355): n=A,T,C or G
  unsure (395): n=A,T,C or G
ggatctgggagtnncttcctaacggaaatggaacaggattaccaactagtagacgaaagtgatgctttccatgacaaccttaggtctcttgacaggaatctgccctcagacagccaggacttgggtcaacatggattagaagaggattttatgttataaaagaggattttcccaccttgacaccaggcaatgtanttagcntattttatgnaccatggttatatgattaatcttgggacaaagaattttatagaaatttttaaacatctgaaaaagaagcttaagttttatcatccttttttttctcatgaattcttaaaggattatgctttaatgctgntatctatcttattgntcttgaaaatacctgcattttttggtatcatgttcaaccnacatcattatgaaattaat

SEQ ID NO: 8055 - DNA, 367 bp, Homo sapiens
  unsure (331): n=A,T,C or G
  unsure (361): n=A,T,C or G
ccaaatgggagagtggttacaacacacgagctacaaactacaatgctggagacagaagcactgattatgggatatttcagatcaatagccgctactggtgtaatgatggcaaaaccccaggagcagttaatgcctgtcatttatcctgcagtgctttgctgcaagataacatcgctgatgctgtagcttgtgcaaagagggttgtccgtgatccacaaggcattagagcatgggtggcatggagaaatcgttgtcaaaacagagatgtccgtcagtatgttcaaggttgtggagtgtaactccagaattttccttcttcagctcattttgnctctctcacattaagggagtaggaattaantgaaag

SEQ ID NO: 8056 - DNA, 513 bp, Homo sapiens
ccaagggaaactgtctggattggattgtcgaggttttcgcttttgtaaagcttgacccataatgtaggaaggtattcagaggaagtgatcacatttccacttaaatcaaattgattaatctgccggaaaactatgatgtttacatcatcgatgtcattattcccaacctcaatcaccctatggtgggggagcgcccgctcaatgtggtcgttgccttctgccttgagctgaacgtggtacacacatcccggcagcaatccacgtaatctgaacttgccctcttcgtctgtcacggtgtcttctccgtaaatgctgcagtcgttctggcccaccgcttccatggcaaccccttgttcgggctctccgtttaaggaagacactgtgccatagcaactgtaagcggttcggtaccccgtgatggtgatcttcaggttctggccttcctgcacctcgatcatctgtgaggatggctcaaaccggaactccttcatcatgggtttgaagtaatactgg

SEQ ID NO: 8057 - DNA, 452 bp, Homo sapiens
  unsure (16): n=A,T,C or G
  unsure (26): n=A,T,C or G
  unsure (28): n=A,T,C or G
  unsure (61): n=A,T,C or G
  unsure (97): n=A,T,C or G
  unsure (122): n=A,T,C or G
  unsure (160): n=A,T,C or G
  unsure (175): n=A,T,C or G
  unsure (364): n=A,T,C or G
  unsure (366): n=A,T,C or G
ctggtgaactgaatgngagtcacctntnttccagttgctttttcttttttatttacaatgntcaatttctgaatgatgtaatctggacatcttttgngctggttgatctttacaacaacatntccaaaagcccgagtgccctcttccattgacggccagnattctgcacacttgntcctgtttccttcttcacatcgagtgaccatgacaataactgtggctttctgttcccaaatcatcctccagaaatcatcaacagtttcatccctgggaccttgtgcagcaatgtatttcctgggttctttgaaaccatcaatatagctggcatttatgtagtttgaccctgcatctccgtttatctcananagttcaacacggttataatcataaggaagaatgtcaacataacggtttttattctggttaaagggctttcgagcttcctttatagg

SEQ ID NO: 8058 - DNA, 190 bp, Homo sapiens
  unsure (8): n=A,T,C or G
  unsure (11): n=A,T,C or G
  unsure (18): n=A,T,C or G
  unsure (19): n=A,T,C or G
ctgggacnacnggcaccnnccaccatgcctggctaaatttttgtatttttagtagagacagggtttcactgtgttaaccaggatagtctcaatctcctgacctcatgatccgcctgctttggcctcccaaagtgctgcaattacaggcgtgagccactgcgcccagcccaaagtggttaatattaatatg

SEQ ID NO: 8059 - DNA, 328 bp, Homo sapiens
ccaggaagccggccagttgagttagaaaacatctctctttgaggtttacgaactgctgtttgttctctgccaactgggggcgcaatttctcgttgatttctagaatgttcatctctgccttctcgttggaccaagggccggctgataccaccatgctgacgtttgtggcagaagaggtggagtcagggacttactgttgtgaaaaatgtgatcactcccacagcactttaggatccttcaccacaaaaacaaggttcgaggtgcctcaactcagagctgaaagcactgccagtagctcagactctgataagagtgaggtagattgtgg

SEQ ID NO: 8060 - DNA, 294 bp, Homo sapiens
ctgggcggatagcaccggacatattttggaatggatgaggtctggcaccctgagcagtccagcgaggacttggtcttagttgagcaatttggctaggaggatagtatgcagcacggttctgagtctgtgggatagctgccatgaagtaacctgaaggaggtgctggctggtaggggttgattacagggttgggaacagctcgtacacttgccattctctgcatatactggttagtgaggtgagcctggcgctcttctttgcgctgagctaaagctacatacaatggctttgtgg

SEQ ID NO: 8061 - DNA, 549 bp, Homo sapiens
ctgccaaaatgtctacaggtccaactgctgccactggcagtaatcgaagacttcagcagacacaaaatcaagtagatgaggtggtggacataatgcgagttaacgtggacaaggttctggaaagagaccagaagctctctgagttagacgaccgtgcagacgcactgcaggcaggcgcttctcaatttgaaacgagcgcagccaagttgaagaggaaatattggtggaagaattgcaagatgtgggcaatcgggattactgttctggttatcttcatcatcatcatcatcgtgtgggttgtctcttcatgaagaaccagcggaactcaaaactgctgttcaagaaacctcttcaagacttttgacttagaacctgctatattatcaagcttacctactgttatctctaaaattttttttgtgttaatgtaaagttgaatttctaggaaacgtgcctttgttttttaatatgcactccaaattagaaggccggccccgtccacattttgcacagtgcctttacagatttacgtatgggctgatgaagagg

SEQ ID NO: 8062 - DNA, 515 bp, Homo sapiens
aagtcaaagcaggagagtaattatgaatagcgcagcgggattctcacacctagaccgtcgcgagcgggttctcaagttaggggagagtttcgagaagcagccgcgctgcgccttccacactgtgcgctatgacttcaaacctgcttctattgacacttcttctgaaggataccttgaggttggcgaaggtgaacaggtgaccataactctgccaaatatagaaggttcaactccaccagtaactgttttcaaaggttcaaaaaaaccttacttaaaagaatgcattttgattattaaccatgatactggagaatgtcggctagaaaaactcagcagcaacatcactgtaaaaaaaacaagagttgaaggaagcagtaaaattcagtatcgtaaagaacaacagcaacaacaaatgtggaattcagccaggactcccaatcttgtaaaacattctccatctgaagataagatgtccccagcatctccaatagatgatatcgaaagagaactgaagg

SEQ ID NO: 8063 - DNA, 457 bp, Homo sapiens
  unsure (437): n=A,T,C or G
cctttgaaaggtaagttctggcaggaggaacagtgtatctgtggcaactttgtttttccttattccattttatgaagactcagttctaaatgtcagccatgttaggaacttcataaatggagctatttttggtcattactatggaaggacctcttttctaagaagccataaagaaaagttgcaagttagtcacagaagttttggattgcctgtagatttctttatgataggaaattagtgagttaatattctgtttattttctgacacagatttttctttgataaataaaagactcttattcattaagatcagcttcttgttctgtttttcttggagtaaataactgtgaatttgggtagattgattttactttgttcagtttcctctgtaaaatgaggattttgaactgtatagtcaaatatactctattcattgntgaagtaagaaatcttatgc

SEQ ID NO: 8064 - DNA, 193 bp, Homo sapiens
  unsure (185): n=A,T,C or G
  unsure (191): n=A,T,C or G
tcatcaatggagaaacagagtctgagtggggttaaagaacgggcttcccaatgtcacacagtggtgctagaatttgaagcaaagtacgtcagattctaaagccacaatctttctacactttcaccccaaaatgaggagtaagaatgaaagtgacactgtggatttaaggaagataatagaaagtntattanaa

SEQ ID NO: 8065 - DNA, 447 bp, Homo sapiens
ctgttggagacccctgaatcttgggctaaagagactttccttacccagaagctccgtgtacctgccaaatggatccacgaggccaaagctgtgcgagcacacatggaatctgacaagcacttagaggccctttgcttatttaaggctgagcactggaaccgctgccacaagctcatcatccgacacttagcttctgatgccatcattaatgagaactatgactacctgaaggggttcttggaagacctggcacctccagagcgcagcagcctaattcaggattgggaaacatctgggcttgtttacctggactatattagagtcattgaaatgctccgccatatacagcaggtggattgctcaggtaatgacctggagcagttacacatcaaagtgacttcactgtgcagtcggatagagcagattcagtgttacagtgctaaagat

SEQ ID NO: 8066 - DNA, 145 bp, Homo sapiens
gtggcttctggactgcgcgatgactggacgcaagtaacttctaggtctgcagacaagaggaagagaagatgaaggaagactgtctgccgagttctcacgtgcccatcagtgacagcaagtccattcagaagtcggagctcttagg

SEQ ID NO: 8067 - DNA, 436 bp, Homo sapiens
  unsure (11): n=A,T,C or G
  unsure (16): n=A,T,C or G
  unsure (184): n=A,T,C or G
  unsure (188): n=A,T,C or G
  unsure (213): n=A,T,C or G
  unsure (298): n=A,T,C or G
  unsure (346): n=A,T,C or G
ctggctaaagntcaanaaaatactattgcttctttaagaaatgctgctagtcatggtgcagcctttgtagaatttgacgtacacctttcaaaggactttgtgcccgtggtatatcatgatcttacctgttgtttgactatgaaaaagaaatttgatgctgatacagttgaattatttgaaattncagnaaaagaattaacatttgaccaactncagttgttaaagctcactcatgtgactgcactgaaatctaaggatcgaaaagaatctgtggttcaggaggaaaattccttttcanaaaatcagccatttccttctcttaagatggttttagagtctttgccanaagatgtagggtttaacattgaaataaaatggatctgccagcaaagggatggaatgtggggatggtaacttatcaacatattttgacatg

SEQ ID NO: 8068 - DNA, 454 bp, Homo sapiens
ccaacacccacttctctggttgtataagacagggacctaaaaagggaaaggatgggaggaggatcatcctgcagtgatcatgtagggcttcatgctataaatggttttgcatttccggagatgaaacaagtctcttcaccacagaactactgcagatcatagccctatggtctggctggttttgtcaatctggcagttcagggtcagtgcaaaggacatccccaacacctcaatcacacatacacagatggtgatgattccgatatacaggaaattggaatgaagccacagtcttgctttcgcatagcaaccctccacttttcgatctgaggggcaagatgctggtgggccactggtccaatcactcgtgccatttataccacaacactgcagaaatgactggatggagtcccacgctgccttggtgctattgtctgagtggtaacggtggatg

SEQ ID NO: 8069 - DNA, 449 bp, Homo sapiens
ctggagagtgtagatcccaaaaattacccaaagaagaagatggaaaagcgatttgtcttcaacaagatagaaatcaataacaagctggaatttgagtctgcccagttccccaactagtacatcagcacctctcaagcagaaaacatgcccgtcttcctgggagggaccaaaggcggccaggatataactgacttcaccatgcaatttgtgtcttcctaaagagagctgtacccagagagtcctgtgctgaatgtggactcaatccctagggctggcagaaagggaacagaaaggtttttgagtacggctatagcctggactttcctgttgtctacaccaatgcccaactgcctgccttagggtagtgctaagaggatctcctgtccatcagccaggacagtcagctctctcctttcagggccaatccccagcccttttgttgagccagg

SEQ ID NO: 8070 - DNA, 513 bp, Homo sapiens
  unsure (354): n=A,T,C or G
gtgttagtggttacccagttagctctcaagttatcagggtattccagagtggggatatgatttaaatcagccgtgtaaccatggacccaaaatttaccagaccacaaaacttttctaatactctaccctcttagaaaaaccaccaccatcaccagacaggtgcgaaaggatgaaagtgaccatgttttgtttacggttttccaggtttaagctgttactgtcttcagtaagccgtgattttcattgctgggcttgtctgtagattttagaccctattgctgcttgaggcaactcatcttaggttggcaaaaaggcaggatggccgggcgcggtggctcacgcctgtaatcctancactttgggaggccaaggtgggaggattgcttgagctcaggagtttgagaccaacctgggtaacatagtgagacaccatctctattatgaacaataacagttaagaaaaaaaaaggcaggcaggcggttatggtggttccctcccatcccaccacataa

SEQ ID NO: 8071 - DNA, 447 bp, Homo sapiens
ccagcagaacacagagtggattttggtcccgtttgttccccagtggggtatctatccttgtgcagggcacaagcctacatggtggctctggtcatatcattagaaaatagacagaaatgggctgcacaccagaatgaatgaattgaattgaaagggaggagtgatggtggaaaaaaaaaacaagtcaattcatttagactggtagaaccagaaccactgtgtagtacatccaaacggttaaaattccctggaagatgttacataatcctatcatggtgtttatttatggaaatctattttaaaaattttatgtaatactgcacagtctgtttgcatgatgtcttgtacgtagtagcaactcagtaaatactttttgaatgaactagtatagtattttaattagctagtcttcatgtactggtacaaaagaacagtgtcatcttacag

SEQ ID NO: 8072 - DNA, 442 bp, Homo sapiens
ccaatgtctgttaaccattaactctcttcatgattgcaccagttagaccatttgccctgatggggggaaaaagaagaagaaaaaacaaaatagaagaaaaaaagtgacaagagaaagcaagctgctaatggccgatcccaacacactttctgggagacagtagatgaaatcacagcacagtgaacacatgctgcctaaaatcagccttgttggggagtaatcccaactgccacccccaagacacagggtccagtccacttatctatagtctgagatgttcaccaacaaaaatggattaaagaatcttggacacaaagggccagaagaaaaagcctgagatgatcggttctgtgatttgttgcagagtgataaagagtaaatggtgagtaagtgttgtgtccaaaggtggagactccatagtcggcagacaggagagggatgg

SEQ ID NO: 8073 - DNA, 595 bp, Homo sapiens
  unsure (461): n=A,T,C or G
cctcctcgaccaaggcagggaacttcaatctgtataagtatctgcagttgctggaataatttgaagaccccatggagctaaggagattaagtggaggattttcattgtttcagaggggcaaggggcaaatccattgctaattctttaatgatgaaaaatggtaagaagttgttaaactcctttggggattttaaaaagtgatacgtaaacagaagagagagagagagagagaaatcacagtagtgaggctaacaaaaataatgataaaaaggttagaagaacccaggatacttagtggatgcctagacaacataaaaatagatttatagaaggaagcaatggaatttgaatataaaagggtatcagaaagttaatgtgttgcatctgaaattcaaagtatttccttttggctacacaagaaagacttttaataaaaccctttgtatatatttctgaaaggnaaatattttatagggaaatggaggattggaagaaaatctgttccatcatgtctgggtattagaattttgcttaataacttgccaaaatattacgcttccaagggctatggcattatgtgtgtacccaattaaag

SEQ ID NO: 8074 - DNA, 231 bp, Homo sapiens
gaaaaacaagatggagatccagggcaaccccaaataccgcgccctctctgagcaaggcgtctgcaccctagagatccggaaaccctgcccctttgattctggggtctacacctgcaaggccataaatgtgctgggggaggcatctgtggactgccggctggaggtcaaagcctcagccgcacactgaagagtcacgggaggaggctgtgatgaggagccaggtgctgcagg

SEQ ID NO: 8075 - DNA, 291 bp, Homo sapiens
cctgttctggaaatggcaggtcacagcagcgggcagtcatgttgtggatcagcccaggaatatgtttatgcttggtgagaactctttggtttccacagaggtggcccatgaggttgggggtgactcgaccgatgtcaatggtcaagatgtcccggtcatagttggggtaaggagcccgacgggcaaagcactcatcccgagtagggctgggagggtggcggcaacacaagtggtggtgggtcttcacagcatactcccggtcacagtatttgtcaagggtatcctcccagg

SEQ ID NO: 8076 - DNA, 504 bp, Homo sapiens
  unsure (496): n=A,T,C or G
ccacatcttcgaacaccgggtcaccagtgaggctgctcagggtggcaaattcaacaatgaaggtcccaatccctgccgtacaggtgacaggggtctctcctgggttcacgccatgaagtaagttcactgttccatatggcatgccagtgggggtctgaaaggctgggaggagttttcgggccgcctcctcagccattctcaggagaggcccggaacagggccatccagcctctacttccaccccagccttcttggagagcagatgagcagacaggagtcctcctaccactcgaatgtttgtttcaaacacagaggcgttcacatcaatatcaaagtccacgctgtcctggagcacttcaaccactctttggaattctgagacattccccaaaatcagcaaggtgtccagtgcatcaattagagtcagagaaaaactgccccaggtgtcgtgcccgtcacaggtgagaggtcgcagctcatcgaagggaaaggcatnctccaggt

SEQ ID NO: 8077 - DNA, 427 bp, Homo sapiens
  unsure (306): n=A,T,C or G
  unsure (353): n=A,T,C or G
  unsure (387): n=A,T,C or G
  unsure (407): n=A,T,C or G
  unsure (415): n=A,T,C or G
  unsure (421): n=A,T,C or G
ccagggggaattgagggaggctctaagctaggggcactgcatggtgggacaggatggccccttgaggactgaaccctggggagaagacaaacagtaataataaaaacaaataacaagtactttaagaatggattgtatgacctatagtgacagatgacatcactaatactgaaagcttcttatattaataattttggcaaaatgtcattttgtaatatagtatatgctttccaggtgtgggggtggtaaagtaatgaggccaaaatcatcctgccccaagactaatatcttctaatggtgcattancaaggaaggcagaaatcaatatttagatatcagtagagtacataatnctgtagaaagaagaagagcacacatgagacaganaaggaggtggatgctcctgngttgagancaaggngtgggg

SEQ ID NO: 8078 - DNA, 370 bp, Homo sapiens
ctggcagaccccccaaccacatcagaggagttttcatttcttcctgggctgcttatctgggaagccttcaaagaattcgttacacatcatggcgatgcaggacaggaagacacagtactcttggaagtccacctcgttgtccctgttgctgtccaagttgctcatcagcttctggaaagcagcttcatctgtccttttccccaagaagctgggcagctcccgggtcagcagctcctttagttctgacttgttgagcttgaacttgtcaccctctttgcccgagtacttgtggaaggtggacaccatcacatccagggccttctccagagggcacgccatgacagcagtcaggatcaaaccaagaaagaag

SEQ ID NO: 8079 - DNA, 582 bp, Homo sapiens
tagtaaaataattttatttagtttcttattttaaaaaaggtagcatttcaacatataaatttagactcaagattacagtgtatatttgccaaaaggaacaccccgaaagacggccagcctcagagctgagagggcacagggaggcacactcctcacacatggagtttaagcagaagtgctttaagacttcacagcggcatttccctgttcctcagccccgcctccagggccatcactttggggcaacagcttttgctcatgtaactataaaacatctctaggaatgaaagcacagaggtcaatgatccagattttccacaacaatcatctgcagcaacaattcgacaggtaaagattttatttttataattcaaaagttcttttaaggagaactaaagaacacaaaattcatttataaagagaatttatagaattaaatgagcaaaaatgaaaaattattttctccatattacaaatgcctctataggataaggcccaggggaaagacccattcaaatctgggctttcctttcccaaataaagtgtttggcacaaccaacaaactgtcatgagactgacagg

SEQ ID NO: 8080 - DNA, 604 bp, Homo sapiens
ctgcaccattttgcattctcgctagcaatgtgcaaggattacagttttttcacatcctcgccaacacttgtcttttgtctcttcaacaaatggtgttgggaaaacaatacccacattcgaaagaatgaaattggacccttatcttatgtcatacacaaaaatgaactcaaaatggatcaatgacttaaatgtatgacccaaaactgtaaaactcctaagaaaaaaaaacaggagaaaagctctatgacgttgatcttggcagtgacttcatggatatgacaccaaaagcacaggcaacagaaacaaaaataagtaagtgggactacatcaaactaaaaagcttctgcacagcaaagaaaacaatcaacagagtgaaaaaaacaacctacaaaatgtaagaaaatatttgcaagtcatatgtctgaaaagtagttaatatccaaaatatataaggaactcctacaacacaatggtaaaaataaatgaacaatttgattacaaaatgggccaaggacttgaatagacatttctccaaagaagacataagaatgccaacagctatatgaaaaaatgcttggccgggcccagtggctcacccctgtaa

SEQ ID NO: 8081 - DNA, 151 bp, Homo sapiens
ctgcaagaggaggcccacctcaacacctcctttaagcactttattttctttgttcaggagtttaatctgattgataggcgtgagctggcacctcttcaagaattaatagagaaacttggatcaaaagacagataaatgtttcttctagaac

SEQ ID NO: 8082 - DNA, 482 bp, Homo sapiens
  unsure (39): n=A,T,C or G
  unsure (479): n=A,T,C or G
ctgtggcgagtccgtcctttctttattctggcaggcttnggtttggggatgtactgattatttgcctggtactcgagttctttacggaagtagtgaattgctttgtttaaaccttcctccagcgggaccacgggctcccaccccagcatcagctttgcttttttgatgtctggttttcttttctgtgggtcatcctgggcttcggagagaaactgaatttcacttccgctaccaacaaggtttttaattaactgagcaaattctaggattgtgtgttcttctgggttccccaggttgaccgggctgctgacgttgctgttcatgagagccacgaggccattcactagatcgctgacgtactggaacgcccttgtctgagacccggatccgtataccgtgagtggctccccctggagcgcctgcaggatgaagttgctgactactcgcccatcgttcatgtgcatgcgtggcccaaaggngtt

SEQ ID NO: 8083 - DNA, 558 bp, Homo sapiens
ttctgctctgtgagttaccacacccaggattcctcctgatcccagagaaatcggatctgcgaacagtggcaccagcctctagtctcaatgtgaggtttgactccaggacgatgaatttaagctgggactgccaagaaaacacaaccttcagcaagtgtttcttaactgacaagaagaacagagtcgtggaacccaggctcagtaacaacgaatgttcgtgcacatttcgtgaaatttgtctgcatgaaggagtcacatttgaggttcacgtgaatactagtcaaagaggatttcaacagaaactgctttatccaaattcaggaagggagggtaccgctgctcagaatttctcctgtttcatctacaatgcggatttaatgaactgtacctgggcgaggggtccgacggccccccgtgacgtccagtattttttgtacatacgaaactcaaagagaaggagggagatccggtgtccttattacatacaagactcaggaacccatgtgggatgtcacctggataacctgtcaggattaacgtctcgcaattactttctgg

SEQ ID NO: 8084 - DNA, 373 bp, Homo sapiens
cctgagctcatcctgagctagtgatgccagtgtccagagcacatggagtgaccctctgagtgccgagtgcttaggcagagctgccgtgctctgaacttgagctctggtggggctcccagctccatcatgcatggtgactaggggaaagatggggctggcccaggactcatgctgaaagagaaattcaatctaacaaggcccatattaattatattaacccgggaaatatgatgatgagcaagaaaggagcttatgattcattttatgagaaggataagctcccaagtcattacagcataggaagaactctagagccacaagagatgcttcctgatgtcagggggttggtgaggagaatatcatgccaagctgg

SEQ ID NO: 8085 - DNA, 610 bp, Homo sapiens
ctgggaagccacgagaatattgtgaacctgctgggggcgtgcacactgtcaggaccaatttacttgatttttgaatactgttgctatggtgatcttctcaactatctaagaagtaaaagagaaaaatttcacaggacttggacagagattttcaaggaacacaatttcagtttttaccccactttccaatcacatccaaattccagcatgcctggttcaagagaagttcagatacacccggactcggatcaaatctcagggcttcatgggaattcatttcactctgaagatgaaattgaatatgaaaaccaaaaaaggctggaagaagaggaggacttgaatgtgcttacatttgaagatcttctttgctttgcatatcaagttgccaaaggaatggaatttctggaatttaagtcgtgtgttcacagagacctggccgccaggaacgtgcttgtcacccacgggaaagtggtgaagatatgtgactttggattggctcgatatatcatgagtgattccaactatgttgtcaggggcaatgcccgtctgcctgtaaaatggatggcccccgaaagcctgtttgaaggcatctacaccattaagagtgatg

SEQ ID NO: 8086 - DNA, 468 bp, Homo sapiens
ctgcagtggaggcggcggtgggaaagcctggcccacacacgtggtctgtagcgacagcggcttggaagtgctctaccagagttgcgatccattacaagattttggcttttctgttgaaaagtgttccaagcaattaaaatcaaatatcaacattagatttggaattattctgagagaggacatcaaagagctttttcttgacctagctctcatgtctcaaggctcatctgttttgaatttctcctatcccatctgtgaggcggctctgcccaagttttctttctgtggaagaaggaaaagagagcagatttactatgctgggcctgtcaataatcctgaatttactattcctcagggagaataccaggttttgctggaactgtacactgaaaaacggtccaccgtggcctgtgccaatgctactatcatgtgctcctgactgtggcctgtagcaaaaatcacagccag

SEQ ID NO: 8087 - DNA, 387 bp, Homo sapiens
ccaggttgggatgcagagaaaaacaggcaggagggtgtcaatctatagcatcctgaaccccaaaaggtctgtaactggattctctaagccttgagaagttcagaccaaagcttcagaccagggaaaatattttggaaagatcagtctttccaagattgagctcctttccaagaagctggacaggaaacccaataaatgtggatctgaaaaaacaaaatccaagagagaagcaaaatgggctgggggtgtgcaataagagaagcaaggaaaatggaaagactgtagctgaggatcttttattaaaaaaaaatggatgggactttggtgatgagagagaaaaagggcaaaagtctgcagttaggaatttaggtgaccgaagactgtcct

SEQ ID NO: 8088 - DNA, 386 bp, Homo sapiens
ccaggctgaggttccagatctgttgccatcatggccccttcagggtcctgggaaattcctggcttctcctaaatcagggtgaactgggcctccaggatcaggtctggagcaggcccaaatatagtcctggatctgcctggattaggtgccaatgtctgagtctgggttccagatcaactccagaccccaggctggatctggccccatttgagttctgattccccttggagctgggctctgggccctgggccagcatctatccttgtgtggcatctgtcctgagctggtcctggggcaccatgcatagttagtgttctttgttggcccaccagggtggggctgtccagagctgccaggtcttaactccccaagttccaggttcttag

SEQ ID NO: 8089 - DNA, 560 bp, Homo sapiens
tcgagcggccgcccgacaggtccacactctacttctgcttctgccacctatggggtcgaggcaggtgtggtgccttggctaagtccacagacttctgagaggcccacgctttcttcttctccagaaataaaccctgaaactcaagcagctttaatcagagggcaggattccacgatagcagcatcagaacagcaagtggcagcgagaattcttgattccaatgatcaggcaacagtaaaccctgtggaatttaatactgaggttgcaacaccaccattttcccttctggagacttctaatgaaacagatttcctgattggcattaatgaagagtcagtggaaggcacggcaatctatttaccaggacctgatcgctgcaaaatgaacccgtgccttaacggaggcacctgttatcctactgaaacttcctacgtatgcacctgtgtgccaggatacagcggagaccagtgtgaacttgattttgatgaatgtcactctaatccctgtcgtaatggagccacttgtgttgatggttttaacacattcaggtgcctctgcct

SEQ ID NO: 8090 - DNA, 337 bp, Homo sapiens; identical to SEQ ID NO: 7576

SEQ ID NO: 8091 - DNA, 604 bp, Homo sapiens
cctacaccccagcaaccatgtccaagggacctgcagttggtattgatcttggcaccacctactcttgtgtgggtgttttccagcacggaaaagtcgagataattgccaatgatcagggaaaccgaaccactccaagctatgtcgcctttacggacactgaacggttgatcggtgatgccgcaaagaatcaagttgcaatgaaccccaccaacacagtttttgatgccaaacgtctgattggacgcagatttgatgatgctgttgtccagtctgatatgaaacattggccctttatggtggtgaatgatgctggcaggcccaaggtccaagtagaatacaagggagagaccaaaagcttctatccagaggaggtgtcttctatggttctgacaaagatgaaggaaattgcagaagcctaccttgggaagactgttaccaatgctgtggtcacagtgccagcttactttaatgactctcagcgtcaggctaccaaagatgctggaactattgctggtctcaatgtacttagaattattaatgagccaactgctgctgctattgcttacggcttagacaaaaaggttggagcagaaagaaacgtgct

SEQ ID NO: 8092 - DNA, 555 bp, Homo sapiens
cttcatcctaattgaggtgatacaaaatataagaatattccttcatcctggggcatcatgtggtcatctgagagctcatttgattacattaaaaatcgtgttccttagagagagagtgccagtatttagactttttgagtgtgaatcaggagggaaacacacatccattgacaagaagatggatataattatttttaaaaagagtgatttgatcctttggaggaaaataaattctggtggaccttctaagtaactgctagaatgattgggtaatgtatacagcttttgcttctccataaataatgtaagtattaaaaaggagattttaaactagaaggaaggaatctctggagtgagaggaaaagtttaattgtatttcagtatctatgtctatgaaaagttgatatacggtgtcactgtggtatacccaaacttgtttatacacatgtataaccagtacacagtaagtaccatgagtggcttttagtgattttatctttttaccttgtagtacagtctccctggtgtctcacaaggctagtttacttactttgg

SEQ ID NO: 8093 - DNA, 564 bp, Homo sapiens
  unsure (550): n=A,T,C or G
ccaatatgcctttggagcacagcctatggtttatgtttcttttatgaccacctttaatatctgtcaaacgactagacatgctatagctttacccgaaggtaatttgattgactgtgctctgctagaagatggtgtatgggtctctctcgaggtaactgccaataaatgataagtggtatttgttttagataatgcctctacctcagtggtagctttgataatggcaaattgtaattgcaagtgccattttcagaataggcattggtttattttaggaagaggataataaagttccttttagttatcaaagtaacaccttttattgttaaatctcaacttttgaagaaaacactttcaatttcttaactttttcctcagggttagtgagttagtacaactacccaaagaagtgttaaaatattgagattctatatgtgtgtgtttatatgtgcatctatgtattacgtatacaaaatatttcacctcaaaggactttttgaaaaggtaatctttggtctatagtacagtgttaagctcactgataatttanaatcattaagttcg

SEQ ID NO: 8094 - DNA, 556 bp, Homo sapiens
cctttgaggattggaataagacagagctagactcattcctgattgaaatcacagccaatattctcaagttccaagacaccgatggcaaacacctgctgccaaagatcagggacagcgtggggcagaagggcacagggaagtggaccgccatctccgccctggaatacggcgtacccgtcaccctcattggagaagctgtctttgctcggtgcttatcatctctgaaggatgagagaattcaagctagcaaaaagctgaagggtccccagaagttccagtttgatggtgataagaaatcattcctggaggacattcggaaggcactctacgcttccaagatcatctcttacgctcaaggctttatgctgctaaggcaggcagccaccgagtttggctggactctcaattatggtggcatcgccctgatgtggagagggggctgcatcattagaagtgtattcctaggaaagataaaggatgcatttgatcgaaacccggaacttcagaacctcctactggacgacttctttaagtcagacctcggcccgaccacgct

SEQ ID NO: 8095 - DNA, 212 bp, Homo sapiens
cctggctcctctttcatccttggtaaagagctctggggggtttccccagaggagcctgtccctctgccccaaatcctatcatgctcccttatgaccttctttccagaccccctgagtgccgatcccacctgtgaaaggggaggagcagatctggggaagggatatgcccagaggaaatcaacaagaccaaagagacgtcagagtcctgatgg

SEQ ID NO: 8096 - DNA, 566 bp, Homo sapiens
ccactgtgaaaaaacaaccccctcaaaacttcaggagaatgtatataataaatgaaggtacaatttcataccttcacaggattattgagaaggtcaaattacataacagatatgaaagcactgtgtaaactatgcggactatgctgcaccaaataactgtaaagaattattaactagactgtaaatgccttgagggcaaggaatgcatctgcaacgggtatttgtgaagtacttgacagtttgctaaggacttctgtggattttcctcatatgctactcataacaaccctggaaggtaaggggaattgttatcccaaattccaaataaagacactgcaggtcagacatcacacaggtggtaaatagcaattctggtacttactttagatattctgctacaggcttgctattcaaagtgtggtatgtagaccagcaacattgactctctgtgctatctttcttttttataaactcggaattatttcaaaataagaagtttctaacaaaagagattcagaagagtcaaacccttgggtgtgaaaaagttttaggaagactttcctgaa

SEQ ID NO: 8097 - DNA, 136 bp, Homo sapiens
  unsure (21): n=A,T,C or G
  unsure (51): n=A,T,C or G
  unsure (71): n=A,T,C or G
  unsure (77): n=A,T,C or G
  unsure (103): n=A,T,C or G
  unsure (113): n=A,T,C or G
  unsure (132): n=A,T,C or G
ccccccccttttttttttttnttttttttttttttcgcattcaacttaaangcttttattgacaatgtctnggaacnataagcaaacaatgcttaaatttttnattcaaattnactttccacatgtcaaaanacct

SEQ ID NO: 8098 - DNA, 431 bp, Homo sapiens
ccacttcacatgatggcgggcctttaagagcacaaagaagtttaatatggacaacaacaggaaaaagcaagaagaaaacaagtagggaaaaacagctaacctggagagaaagaatttctttaacctttatgttcttcattaaaaatcttatcttggactgatttgagggatttttagaaacatggccttattttatataagcattaccttcccaggaatctttgttgtatattaatttttgataaccatttgattaactttaaaattaagtatatgtgtgtatatatacatatgtatgtttatatacacacatgtatctgtatagttttatatatacatatatacacatagacatacagagaaccactactttgtaatagtgtacagtttgttttatatctctttactttttttgttactattttatctgg

SEQ ID NO: 8099 - DNA, 590 bp, Homo sapiens
gagctagactaagttggtcatgatgcagaagctactcaaatgcagtcggcttgtcctggctcttgccctcatcctggttctggaatcctcagttcaaggttatcctacgcagagagccaggtaccaatgggtgcgctgcaatccagacagtaattctgcaaactgccttgaagaaaaaggaccaatgttcgaactacttccaggtgaatccaacaagatcccccgtctgaggactgacctttttccaaagacgagaatccaggacttgaatcgtatcttcccactttctgaggactactctggatcaggcttcggctccggctccggctctggatcaggatctgggagtggcttcctaacggaaatggaacaggattaccaactagtagacgaaagtgatgctttccatgacaaccttaggtctcttgacaggaatctgccctcagacagccaggacttgggtcaacatggattagaagaggattttatgttataaaagaggattttcccaccttgacaccaggcaatgtagttagcatattttatgtaccatggttatatgattaatcttgggacaaagaattttatag

SEQ ID NO: 8100 - DNA, 601 bp, Homo sapiens
ccatcggtgctgaaattgagcattttaaatagtacagtaggctggtatacattaggaaatggactgcactggaggcaaatagaaaactaaagaaattagataggctggaaatgcttactttctgctctcattttctttcattttgtctgctgtctttttgaatgccaatactttcatttaaaatgttttgggagcacggcaacccaaaatgactgaacggtggtccaaaaatccaaaccaactgataattacttctcgaggtgataggaaaggcacaggaagttaggactttggctgaaatgatgaaaacacatgttcgccattttagggatcagcgcctcgactcctgccacctccggctccaacgatgatcatgtttggatgtatttattgaattgtcctttgctgatgaggaatttttaaagtatttcatagaataagtcctttggtatgcagatgctacatggaaggaaagaaagaaaaaaagaaaacacacaatattacttgctccataccctaaactgccgataccacagccgtaaaatgaaggtgtctagtagttgttatagcacggtagtccattctttctaaaggaccactt

SEQ ID NO: 8101 - DNA, 594 bp, Homo sapiens
  unsure (511): n=A,T,C or G
  unsure (549): n=A,T,C or G
tctaaataagaaaataaataaataaaattccagctaggtacatattcttcttgggtacaaagctcaagtcaactatcaattacataattgtaatactattacttgaatcagccattaaaaaatgctctgaatttattagtaaagagctatgaagaagagtcatttgtaatatcatacaaaaaaaaacaaacaaacaaacaaaaaaaaacatgcttttaccaacctgggctgagaaaccacagaagaaaccaaaccagaaatgcacaagtgtaaatgcaaaattcttatagaagaaatagcataagaatttgtacattcggaaataagaccaccttccatgaacaaggagaagcctttggagatatctaaactgtgcaaatgaatagtcgctggctaagactgcttgcaatccttcctggccgctgatgccaacaccaatgtgagcacctacaaaggaaagaggaacactgtcactcccaaaacaaagccacgatctcttttggaaacttgncattcctcttttatttacggaaaacttacagccattgnaattataatttttcacatatattatctgatgaaacacttatgata

SEQ ID NO: 8102 - DNA, 428 bp, Homo sapiens
cctcagttttttctctgtgcatcaacagtctacatatcaagtttgatgagtacctctgaaaaaatatcctaacacttgcagcattggagtcatgctagaatcttttctgcaataaagtattttcacttcttttcttcttctcaatcttctcaatcacctgcccctagaatctgagtggtcctaacctagacctcttgctggccgagatttagacaatgtggttgtttttccttatcttgactaatcttcccgaatcttacattgtgccttaatttgcacatctgcacctctaatgtctgcctatattatctccttggctcacaaggaccttgtgggagagctgctcacatctcaacatgtaaataaaatgtgcctttgggtcaacacaggagaggtgattccaacgttaacaagttagtcaaggaaac

SEQ ID NO: 8103 - DNA, 401 bp, Homo sapiens
ctgaattggcaaagtaaggtttactacacaagcccctctttttcttctgatatccccactcaaatggaagcacactccccagcacatggggatcccttattaatctttactaaagaaccgtgaaccagcattttccagttatcaactggatatttaggcatgaatctggacatgtccatctgcttaagaaatctgcttaagaaatctgtaacagctacaggaaaagacacacccagggccagagattctacaaatgccagaagagtggatgtgatagagaattttttctcaagttttgggttagggcaccagttgcaattttaatccaggggaggatctgggctgctgctgtagggggcaagtacaccagggaggtgggtgtggacagaggcactgggcag

SEQ ID NO: 8104 - DNA, 530 bp, Homo sapiens
  unsure (342): n=A,T,C or G
  unsure (440): n=A,T,C or G
  unsure (442): n=A,T,C or G
cctcaggaaatgggtagaaatcacaggacaatctctcttcccaccaaaaaaaagttgcatattttggtaagtgtttgtcctagagggaaaaacaactgaaatttacattagcagtgctgtgcaagattcttacataattcaagacctaaaaccagcctgcagtggaggtttcagtcctctgttcaggtgcttagacagaagccataagctgatgagcatgacagggaaaaggaggcagtgaagacaggtgacaggcacctggcagggaagaaggattcaggaatgccagactccttgaaatcatgtgggttttttttttttttttccttttaaagtcatctntataggaaggtgctgggcagggatcccagagaaagaaagggtccaagactccattaactgccctggatgaagggcactgctacagcagctagtaccananactctcctatctcacggttgaggcagacccaggatagaatagagaataaaaggaatgcttataggaaacaattttgtatggaatgcta

SEQ ID NO: 8105 - DNA, 603 bp, Homo sapiens
cctcagtgtccaccctccacttccaacccaggaccataccaggtgaagtgagatatgaagaagcatatggtctctttgtacatctgcctcagaacttctttccatcttccaaaatggagagaaaacatgcctaaatggtgccagcatactagctggtaatgaccacattagaacagcattgctactttgacttagtgacttacattttgcttcagttcctcaaataagcattgcgtcttctatctctgacttttctgtcttttctcaatttcaatctgtcaaaacactactcgacctataagacctagtatgaatgttattagatattccctaataacctcagccagaagtggctatacattttttaatttctatatcttttgtttatttttttagaacaccgtatcatatgactattgatatatattattttcactatctgacagtggaatcctgagtacagggtaatgtttgatagatctctatataacctcacaatttaaagccatgattgcaataggggctcaataaaagtttattaaattgataaatttactgaattcctaaactattatacaatcagtgtatattttacacagtgaa

SEQ ID NO: 8106 - DNA, 111 bp, Homo sapiens
  unsure (11): n=A,T,C or G
  unsure (20): n=A,T,C or G
  unsure (23): n=A,T,C or G
  unsure (26): n=A,T,C or G
  unsure (50): n=A,T,C or G
  unsure (96): n=A,T,C or G
ttttttttttnttttgggtnccnatnaaattttattaacaaaatatgacngtgggggggccacagtttgccaaactttgccttggaggacatgcanaggcaccctcaaaat

SEQ ID NO: 8107 - DNA, 392 bp, Homo sapiens
ctggcagatgcagaagaagcgatgtatcagaatgtggatggccgtgtttcggaatgtcctcacacctaccaaaacaggcgacctttcagcagagagatggatttggggctactctctccgcaggctcaggtcgaagattcgtagaggaacaatttagttttaaggacttcatccctccacctatccctaacaggctgtagattaccaaaacaagattaatttcatcactaaaagaaaatctattatcaactgctgcttcaccagacttttctctagaagctgtctgcgtttactcttgttttcaaagggacttttgtaaaatcaaatcatcctgtcacaaggcaggaggaactgataatgaactttattggagcattgatctgcatccaagg

SEQ ID NO: 8108 - DNA, 555 bp, Homo sapiens
ctggggcacgccgagggagcagttccttttgcaaagatgagttagtgcggatcagcacattagcaaagcaaaatatttaaacatttttaaaagctgctaatccttccaatttccctcctgattgtagctcaagctgcagcctctaaacctgctaaaaatcaggaagaaacccctcctctggagggcagatggactgaagtggctacagccagtgtgggtacggaaagcctcccgctgaactgtgatcatgtgacacctgcagaccctgggaagggctgatctgaatcctggcagcaaactcaacctcttcttttgcttggggggcttgtgtttaatacaggtcattgcgatggaagaagtctcagagtctctctcacatcaagaggacagatggggacagggatcctggagcttttcttctcctgtgttctggttgcatacttgaatcccaggaaacagtgtgacacggtgccaatttactgccaaacatgcccggtttgtcaacagagccagacaaggaggagaggagagattcatgccccaaacacaggccag

SEQ ID NO: 8109 - DNA, 608 bp, Homo sapiens
  unsure (453): n=A,T,C or G
  unsure (595): n=A,T,C or G
cctggggctggtactaaaaggaaaaagaggaaagtgaatctgagagaggactgggaatatatttctccctcctcaagcaaacagcaaatcagcatatagttaccaagtgttcacctataatacacagctagaacattactttcagttgccaactggagaatccaggaggccagtggtattggtgaggccacacatacaaaaaagggccacagagaatgtcaagaagatgctgctttccaaagaaatttgagcaaaagctgaaactgaatttaaagtataagaagagctaggctcagaaaaagttgtactgtccccaagtcagcagagaaccaagccctcctaagagtatgttgtctgctacatagacttctgaaataacagtttgctttgtgtatgcctataattgaaactgtaactatttcaggaccaatttacttgatttttgaatactgntgctatggtgatcttctcaactatctaagaagtaaaagagaaaaatttcacaggacttggacagagattttcaaggaacacaatttcagtttttaccccactttccaatcacatccaaattccagcatgcctggttcaaganaagttcagataca

SEQ ID NO: 8110 - DNA, 328 bp, Homo sapiens
ctgtattcagaagagggcaaaggcgtgtttgactgcaggaagaacgtgctgggtcacatgcagcagggtggggcaccctctccatttgatagaaactttggaaccaaaatctctgccagagctatggagtggatcactgcaaaactcaaggaggcccggggcagaggaaaaaaatttaccaccgatgattccatttgtgtgctgggaataagcaaaagaaacgttatttttcaacctgtggcagagctgaagaagcaaacggattttgagcacaggattcccaaagaacagtggtggctcaagctacggcccctcatgaaaatcctgg

SEQ ID NO: 8111 - DNA, 569 bp, Homo sapiens
  unsure (535): n=A,T,C or G
cctcttggctctggagaaggcatccttagcatcctcttctgaagggtgatcataagccccaagttaattaaataggcccaatgtctgcctgctctttctgtattcccttcctgaatctagttcatgtcaacaaatgtgtactattattgtagaaaatcgaatgctctcatacttttaataggtttgcttcttggttaatatgcccaggtcaggaagtggcttatatttcaggagtgctctctaatacttattgcagatattcaagcatttattctctcacacacacgcacttaaaaaccgcacactacctcacactctgcaataatccgatagtatggtggtcatcatacccacatatatacatgataagatagaatgcattgcttaaatagcacataagtcatctataatcctccacaccctgtaataccagtagcacaatggttttctatttggaggttgccaggagcactcaaaagtaagcttctggctcctacaacaacacatccaactgccttggggacaacatgattgncatccttctagtacacactcagtccaaggccagg

SEQ ID NO: 8112 - DNA, 348 bp, Homo sapiens
ctgcataccgctgggtacaggagaaagttcctggaataccaccgccctccaggagctttgcatacctgcgggggcccgggggcattccacctcatcgtgcacctgaaggcgggagatgcagtcaacgtcgtggtgactgggggcaagctggctcacacagactttgatgaaatgtactccacatttagtggggttttcttatatcctttcctttcccacctctaaggtggctggggagatgtcaggggaaagatagatagttgtaaaaactctaaagctttaatatattcggtttgtatgtaatggaagcacggggctagagtttccacataggccccaacataaagg

SEQ ID NO: 8113 - DNA, 177 bp, Homo sapiens
ctgctcagcctcctcattcagtgaagtgagggtgagttgtgaggcaggcaggctcctcagaggggagggggaggggaaacgtcagttacttgggctgtgtccttacgccaagactacaaaacatcgtaagcctcactatacaacactgagctatttacaatggaaattctcaatcag

SEQ ID NO: 8114 - DNA, 606 bp, Homo sapiens
ctgctctggagaatctcaataaggctctcctagcagacattgaagcccactatcaggacccttcacttccttaccccaaagaagataacacacttttatatgaaatcacagcctatctggaggcagcgaggagggcaactactttgagatgagtacctattcaacaaacagaactatgatacggattctgtttgcttttgtatcatcagtggcaagaaacgacaccggatactacacttgttcctcttcaaagcatcccagtcaatcagctttggttaccatcgtagaaaagggatttataaatgctaccaattcaagtgaagattatgaaattgaccaatatgaagagttttgtttttctgtcaggtttaaagcctacccacaaatcagatgtacgtggaccttctctcgaaaatcatttccttgtgagcaaaagggtcttgataacggatacagcatatccaagttttgcaatcataagcaccagccaggagaatatatattccatgcagaaaatgatgatgcccaatttaccaaaatgttcacgctgaatataagaaggaaacctcaagtgctcgcagaagcatcggcaagtcaggcgtcctg

SEQ ID NO: 8115 - DNA, 421 bp, Homo sapiens
  unsure (370): n=A,T,C or G
cgcgtgagccactgcgcccggcctagtttgtgctttttacttaccagttaggggttatattactgtgtaacaaaatggacggttatttctattcattaacaagattcaagtaatagcctctttagccacatattccttaataacacctttagaccttataggggtaattattttctatatacttttccaatgtatttgaaagtttgttggctcttcttccgtaattatactatatcctcagtaaagaaagtttggcatacagaaaagttgaaggaagaaaattttcaatcactgttgttccactaccaagaaataatacttggaggtatttcctttcaatcttcaacatgaggatgctaatgtccccctnataaggggccttaaagtcactgactctgtgcactatttcatgagaacattg

SEQ ID NO: 8116 - DNA, 563 bp, Homo sapiens
  unsure (561): n=A,T,C or G
aggacctgaaggaggggaagccttatctggtcctgggacttctgtggcaagtcatcaagattgggttgtttgctgacattgaactcagcagaaatgaagctctgattgctcttttgagagaaggtgagagcctggaggatttgatgaaactctcccctgaagagctcttgctgaggtgggctaattaccacctggaaaatgcaggctgcaacaaaattggcaacttcagtactgacatcaaggactcaaaagcttattaccacctgcttgagcaggtggctccaaaaggagatgaagaaggtgttcctgctgttgttattgacatgtcaggactgcgggagaaggatgacatccagagggcagaatgcatgctgcagcaggcggagaggctgggctgccggcagtttgtcacagccacagatgttgtccgagggaaccccaagttgaacttggcttttattgccaacctctttaacagataccctgccctgcacaaaccagagaaccaggacattgactggggggctcttgaaggtgagacgagagaagagcggacatttngg

SEQ ID NO: 8117 - DNA, 542 bp, Homo sapiens
caaaacgcagcagtatgactgcaaatggtacattccgctcacggatctcagcttccagatggtggatgaactggaggcagtgcccaacatccccctggtgcccgatgaggagctggacgctttgaagatcaagatctcccagatcaagaatgacatccagagagagaagagggcgaacaagggcagcaaggctacggagaggctgaagaagaagctgtcggagcaggagtcactgctgctgcttatgtctcccagcatggccttcagggtgcacagccgcaacggcaagagttacacgttcctgatctcctctgactatgagcgtgcagagtggagggagaacatccgggagcagcagaagaagtgtttcagaagcttctccctgacatccgtggagctgcagatgctgaccaactcgtgtgtgaaactccagactgtccacagcattccgctgaccatcaataaggaagatgatgagtctccggggctctatgggtttctgaatgtcatcgtccactcagccactggatttaagcagagtt

SEQ ID NO: 8118 - DNA, 408 bp, Homo sapiens
ccgcactagaaagttcatgaccaaccgactacttcagaggaaacaaatggtcattgatgtccttcaccccgggaaggcgacagtgcctaagacagaaattcgggaaaaactagccaaaatgtacaagaccacaccggatgtcatctttgtatttggattcagaactcattttggtggtggcaagacaactggctttggcatgatttatgattccctggattatgcaaagaaaaatgaacccaaacatagacttgcaagacatggcctgtatgagaagaaaaagacctcaagaaagcaacgaaaggaacgcaagaacagaatgaagaaagtcagggggactgcaaaggccaatgttggtgctggcaaaaagccgaaggagtaaaggtgctgcaatgatgttagctgtgg

SEQ ID NO: 8119 - DNA, 567 bp, Homo sapiens
cctgaacttctccccagcaaatgaagttagttgctttagaaagagatttagaactctgtcttacagcatacttctccccctaggcaagtctctatctctggagctggggaacaatggtgcacttctctttgaatgacaacccagctagaggacaaaaacactttgtggagttggggcaacagcctcgggtctcaacttgcctctcccaatgtggaactgctggattacaagctggggcatgggtgactgtgccttcagtattctcagtggtactgtacacaggtacagcctctgtaccatgagtaagaaatagttcctgcctctcagccccactcatccagaacttgacctcaccaacaggccactaaaaaaaaaaatcttgatatcctattcctttgagaaagataccctccaactaggaaataaaggaacaggtaatcttgtgttcttggctgcaccagtctggagtgaagtttctatctcagcaagctgggaaagaggaaaaggagtgggtcttggttcaataccacagaaattcaatgttcttaccaagttttagtagatatt

SEQ ID NO: 8120 - DNA, 493 bp, Homo sapiens
  unsure (408): n=A,T,C or G
gggatggggaggttgcgatgggccgagattgcaccactacaccccagcctggataacaagagtgaaactccgtctcaaaaaataaaaatagaaaaggactcagaagccaacttgaagtgcctctcgctgccaaagataggatagtctgagaataaaaagaataatgactgcaattagttgaaacacatggaaataaaaagaaacgtaaggtcatagtgatactttttaaaaggccaaggaaacacagtgaaacaaaattcattggtcccattagagtaatagggcaccaattccttactttgaaatttggcaattaaaggaacagaattcagcatttattctgcctttcctgaatgaactgtattttagagtaaccaaatagtcctagttgatgagggaatattttgntcgtttaatatgaaaaaatattctgatgtttagtttaaagaaaaatggactccaaatatttcacttagtatactagagtatttca

SEQ ID NO: 8121 - DNA, 284 bp, Homo sapiens
ccaattgatttgatggtaagggagggatcgttgacctcgtctgttatgtaaaggatgcgtagggatgggagggcgatgaggattaggatgatggcgggcaggatagttcagacggtttctatttcctgagcgtctgagatgttagtattagttagttttgttgtgagtgttaggaaaagggcatacaggactaggaagcagataaggaaaatgattatgagggcgtgatcatgaaaggtgataagctcttctatgataggggaagtagcgtcttgtagacctac

SEQ ID NO: 8122 - DNA, 568 bp, Homo sapiens
  unsure (549): n=A,T,C or G
  unsure (562): n=A,T,C or G
atgaaggcagaagactatgatgttgtaaaagttattggaagaggtgcttttggtgaagtgcagttggttcgtcacaaggcatcgcagaaggtttatgctatgaagcttcttagtaagtttgaaatgataaaaagatcagattctgcctttttttgggaagaaagagatattatggcctttgccaatagcccctgggtggttcagcttttttatgcctttcaagatgataggtatctgtacatggtaatggagtacatgcctggtggagaccttgtaaaccttatgagtaattatgatgtgcctgaaaaatgggccaaattttacactgctgaagttgttcttgctctggatgcaatacactccatgggtttaatacacagagatgtgaagcctgacaacatgctcttggataaacatggacatctaaaattagcagattttggcacgtgtatgaagatggatgaaacaggcatggtacattgtgatacagcagttggaacaccggattatatatcacctgaggttctgaaatcacaagggggtgatggnttctatgggcganaatgtg

SEQ ID NO: 8123 - DNA, 252 bp, Homo sapiens
ctggcttcccacttcttggtacccggttaactgccaggtgggtgacagtgatgccaggctcgcccactactgcactggacacagcctcaccaatgccaccttcataataatggtcctccacggtgaggatcctgcccttggtggcacgagcgctgtcgagaatgagttttctgtccaggggcttgatggtgaaggggtccagcacgcggatgttgatcttttctttcttcagcagttcggcagcggccaagg

SEQ ID NO: 8124 - DNA, 454 bp, Homo sapiens
ctggcttcactgctcaggtgattatcctgaaccatccaggccaaataagcgccggctatgcccctgtattggattgccacacggctcacattgcatgcaagtttgctgagctgaaggaaaagattgatcgccgttctggtaaaaagctggaagatggccctaaattcttgaagtctggtgatgctgccattgttgatatggttcctggcaagcccatgtgtgttgagagcttctcagactatccacctttgggtcgctttgctgttcgtgatatgagacagacagttgcggtgggtgtcatcaaagcagtggacaagaaggctgctggagctggcaaggtcaccaagtctgcccagaaagctcagaaggctaaatgaatattatccctaatacctgccaccccactcttaatcagtggtggaagaacggtctcagaactgtttgtttcaattgg

SEQ ID NO: 8125 - DNA, 487 bp, Homo sapiens
ccaagacagcctgtttcagagggttgttttgtttggggtgtgggtgttatcaagtgaattagtcacttgaaagatgggcgtcagacttgcatacgcagcagatcagcatccttcgctgccccttagcaacttaggtggttgatttgaaactgtgaaggtgtgattttttcaggagctggaagtcttagaaaagccttgtaaatgcctatattgtgggcttttaacgtatttaagggaccacttaagacgagattagatgggctcttctggatttgttcctcatttgtcacaggtgtcttgtgattgaaaatcatgagcgaagtgaaattgcattgaatttcaagggaatttagtatgtaaatcgtgccttagaaacacatctgttgtcttttctgtgtttggtcgatattaataatggcaaaatttttgcctatctagtatcttcaaattgtagtctttgtaacaaccaaataaccttttgtacaag

SEQ ID NO: 8126 - DNA, 606 bp, Homo sapiens
  unsure (589): n=A,T,C or G
  unsure (599): n=A,T,C or G
ctgtggaaagaagtcgcaaaacactggaagcaagagaaaaagaggaagaaatgaacagagagaaagaattaagaagacaaaatgaagatattgagccaacatcctcaagatcaaatgtggtcagagattgctccaaatcatcttccagggatacgagcagcagtgaaagtgaacagagttctgactcttctgatgatgagttaattggccctcctttaccccctaaaatggtaggaaaaccagttaattttatggaggaagatatcctcggtcctttacctccacctcttaatgaagaagaagaagaagcagaggaagaagaagaggaagaggaggaagaggaaaatcctgttcacaagattcctgactcgcatgagataacgctgaagcatggcactaaaacagtgtctgctttgggtctggatccctcaggtgcccgtttggtgacaggaggatatgactatgatgttaagttttgggattttgctggaatggatgcttcttttaaggcatttcgatcccttcagccctgtgagtgccatcagatcaagtcattacagtatagtaacacaggagacatgattcttgntgtatctggnaagctct

SEQ ID NO: 8127 - DNA, 567 bp, Homo sapiens
ctgggagagctagactaagttggtcatgatgcagaagctactcaaatgcagtcggcttgtcctggctcttgccctcatcctggttctggaatcctcagttcaaggttatcctacgcagagagccaggtaccaatgggtgcgctgcaatccagacagtaattctgcaaactgccttgaagaaaaaggaccaatgttcgaactacttccaggtgaatccaacaagatcccccgtctgaggactgacctttttccaaagacgagaatccaggacttgaatcgtatcttcccactttctgaggactactctggatcaggcttcggctccggctccggctctggatcaggatctgggagtggcttcctaacggaaatggaacaggattaccaactagtagacgaaagtgatgctttccatgacaaccttaggtctcttgacaggaatctgccctcagacagccaggacttgggtcaacatggattagaagaggattttatgttataaaagaggattttcccaccttgacaccaggcaatgtagttagcatattttatgtaccatggttatat

SEQ ID NO: 8128 - DNA, 605 bp, Homo sapiens
  unsure (505): n=A,T,C or G
  unsure (577): n=A,T,C or G
gcactaaaatggagtggagagttggggtggaaataagacatccttaaaaggttaaattgtctgcaaagcacctagcccagtgccgagctcccagtaggtgttcagtaaagcttagtgcctgactttctgaacactgattcctcctgtttggagtcactgggatactctcattgccgttgggatgttcctcactccttcccagttcgtggctgaggcagaacccagactgaagagggaagagacattccagaggaggattgccttcgtcagggtaagggatgggctgctcaggggccctacccttcacccccttctgtatcagattggccctcccactcccatctcactctgcgtgtacaatcttccatatccgcaagttcactggcactcttctggcacctgggcaagatcccagaacagaggatggagtgactggcctcacagagcttagtgcccgactcaggggaaatgggactggtgcatgggaaatggtcagcctaggatnggacacgagagtctgaaattcaaagcaaccagcttgaagtggtttgagaagctggaagcaaacatgggctanagagatagggcagaagtcaagacgagga

SEQ ID NO: 8129 - DNA, 317 bp, Homo sapiens
gcctagctgtggagaagagaattacttccccactgatggagcccagcagcattgagaaaattgtagagattgatgctcacataggttgtgccatgagtgggctaattgctgatgctaagactttaattgataaagccagagtggagacacagaaccactggttcacctacaatgagacaatgacagtggagagtgtgacccaagctgtgtccaatctggctttgcagtttggagaagaagatgcagatccaggtgccatgtctcgtccctttggagtagcattattatttggaggagttgatgagaaaggaccccag

SEQ ID NO: 8130 - DNA, 608 bp, Homo sapiens
  unsure (511): n=A,T,C or G
  unsure (598): n=A,T,C or G
ctgctggagtagctcgtggtgctgattgatctgcttggagattcttgtgcatcttcacctgttagagctggaaagatgctcaggactatacagcccagcccttctggtttacatataatgaaactaaggcccaccttagtcaactaatgtgcttaaactcaagcaaatggcaaatggcaaaactcaggactctgtcaatgagttttcattctttttctttattcttctagacacatattttataaagaaatgaggcagcatgatgtttaaaatacttaaagtgagaatgagaaaaactgatgtctacatatcatgaaatggttaaaaagtttaacgtgcattgtcttctccattagaacttcttttacgaatttttttctcaaaatctggctcagaaatcttgttttaaaagctccctaaacattcctaggcagaattagtaacgccttcctctttgctaacaaggaactgtgcatattcctgtaatagaatacttaccatattatattgnaagtattaaattattcatctgccctcctcccacctacccactggatcaggcttcccaggaacagcaacagagagcccagcaatttgngtgttctcag

SEQ ID NO: 8131 - DNA, 540 bp, Homo sapiens
ctgatatgctttattgtgccgagtcccatatccgaatgattaagactggagaaagtggcatgatagttttccggcttcttacaaaaaacaaccgatggacttgggtccagtctaatgcacgcctgctttataaaaatggaagaccagattatatcattgtaactcagagaccactaacagatgaggaaggaacagagcatttacgaaaacgaaatacgaagttgccttttatgtttaccactggagaagctgtgttgtatgaggcaaccaacccttttcctgccataatggatcccttaccactaaggactaaaaatggcactagtggaaaagactctgctaccacatccactctaagcaaggactctctcaatcctagttccctcctggctgccatgatgcaacaagatgagtctatttatctctatcctgcttcaagtacttcaagtactgcaccttttgaaaacaactttttcaacgaatctatgaatgaatgcagaaattggcaagataatactgcaccgatgggaaatgatacta

SEQ ID NO: 8132 - DNA, 608 bp, Homo sapiens
ctgacatcctaaaaacgaagtcaaattagggaaggatggccgtttccttgagtcaaaagcccagcaggattgcattataatgtatatttcttctgtagcataaaatggctgatccattttaaatccattttgaatcagtttgtagaagttagcatcaaccggaatgccagggtaagaattcacaccaagtgagaagatttcccacagtaatattccatatgaccagacatcactcttaatggtgtagatgccttcaaacaggctttcgggggccatccattttacaggcagacgggcattgcccctgacaacatagttggaatcactcatgatatctcgagccaatccaaagtcacatatcttcaccactttcccgtgggtgacaagcacgttcctggcggccaggtctctgtgaacacacgacttaaattccagaaattccattcctttggcaacttgatatgcaaagcaaagaagatcttcaaatgtaagcacattcaagtcctcctcttcttccagccttttttggttttcatattcaatttcatcttcagagtgaaatgaattcccatgaagccctgagatttgatccgagtccgggtgtatct

SEQ ID NO: 8133 - DNA, 367 bp, Homo sapiens
ctgttaattctaaaatgaaaccagtcagaccactgacttataaaaatatggtactcatatagatttagcattataaagaaggaatatattatttaaaacatttaaatagtgcatatggacatttttgcatgtggtatataaaataaaacattcatataagatacacagtgcacataaaattagatgtttggatacactcctatctggagactgaaggaaattatctgaaatgtacactgcatgatggattcaaataaaaatgatacatcttttggtattttcaatttcacttttctaggtatacattatgaataacctagttgtatcaaaaggaaaccacacaaaaagggcaggatttagtgctttt

SEQ ID NO: 8134 - DNA, 567 bp, Homo sapiens
  unsure (554): n=A,T,C or G
gctagactaagttggtcatgatgcagaagctactcaaatgcagtcggcttgtcctggctcttgccctcatcctggttctggaatcctcagttcaaggttatcctacgcagagagccaggtaccaatgggtgcgctgcaatccagacagtaattctgcaaactgccttgaagaaaaaggaccaatgttcgaactacttccaggtgaatccaacaagatcccccgtctgaggactgacctttttccaaagacgagaatccaggacttgaatcgtatcttcccactttctgaggactactctggatcaggcttcggctccggctccggctctggatcaggatctgggagtggcttcctaacggaaatggaacaggattaccaactagtagacgaaagtgatgctttccatgacaaccttaggtctcttgacaggaatctgccctcagacagccaggacttgggtcaacatggattagaagaggattttatgttataaaagaggattttcccaccttgacaccaggcaatgtagttagcatattttatgtaccatggntatatgattaatc

SEQ ID NO: 8135 - DNA, 594 bp, Homo sapiens
ctgttgttaaaaaggaggaaaaagtgcttcatgaattatttgggacggacataaggtgctgtgccagaaatgaactgggcagggaatgcaccaggctgttcacaatagatctaaatcaaactcctcagaccacattgccacaattatttcttaaagtaggggaacccttatggataaggtgcaaagctgttcatgtgaaccatggatttgggctcacctgggaattagaaaacaaagcactcgaggagggcaactactttgagatgagtacctattcaacaaacagaactatgatacggattctgtttgcttttgtatcatcagtggcaagaaacgacaccggatactacacttgttcctcttcaaagcatcccagtcaatcagctttggttaccatcgtagaaaagggatttataaatgctaccaattcaagtgaagattatgaaattgaccaatatgaagagttttgtttttctgtcaggtttaaagcctacccacaaatcagatgtacgtggaccttctctcgaaaatcatttccttgtgagcaaaagggtcttgataacggatacagcatatccaagttttgcaatcata

SEQ ID NO: 8136 - DNA, 515 bp, Homo sapiens
gtggaggcactcttcagttatgaggctacccaaccagaggacctggagtttcaggaaggggatataatcctggtgttatcaaaggtgaatgaagaatggctggaaggggagtgcaaagggaaggtgggcattttccccaaagtttttgttgaagactgcgcaactacagatttggaaagcactcggagagaagtctaggatgtttcacaaactacaaagctgaagaaaatgaagccctattacttgtttgtaagatttagcacccttctgctgtatactgtactgagacattacagtttggaagtgttaactatttattccctgttaaaatttaacctactagacaatgatgtgagtacccaggatgatttcctggggcacagtgggtgaggagatggggacaggtgaatggaggagttaggggagaggaaaagtggatggaagtgtctggaaagggcacgagagagtcttccaggtactgatcctgtttcttgctctgagtgctagctagccag

SEQ ID NO: 8137 - DNA, 501 bp, Homo sapiens
ctgcttttccttgctttaaaataagctaccagtaattctaaatcagactaaaatgtactgttcctagaccaaatacaggcattcatccttgcaaaaatgttttgcaatgagttcttggcctatatgaaaagcatcaaatagctaaggagagactagaatttatttccaaattctgtgactgacttccaataatcccttatcagtacgagtaccaggaaaatatcagatattaaagatcagatttaattctttggtataagcatgaaactgttactgatagctttccatggcgagcataaaccatgaagcaactcaagaagcatgagagacaacaatgaaatctagtatacaatgcagggcaggccaagaacgatgtctgctttacaggaaaagtcaacactaacaatctactcctgagaaactaacacctatttagatgtttttaacataatggcaaactaaaatgtcaagcttcaaaatgaccaaacttgtaacgtacag

SEQ ID NO: 8138 - DNA, 563 bp, Homo sapiens
ggacgttctgccaaactcagatttcctggtgcatttttaccttgtgatgcacctgggattaaccagcgaggatcaggatatcttaaatacgatcataaggcactgtccaccccgctttttctccctgggttttcctggcttctcaatgctggtgggggacttcatcacggccgctgccagggtccttagcacagacattttgacggcgcctcgttcagaggctgtcactgtcctcggctctctggtctgctttccaaatacctaccaggagattcctttactgcagtcagtgccagaagtaaatgaggccattacaggaactgaagatgtcaagcattacctcataaatattttactgaagaatgccacagaagaaccaaatgaatatgcaagatgcattgctgtttgctcccttggggtctggatatgtgaagagcttgcacagtgtacaagccaccctcaggtgaaagaggccatcaatgtgataggagtaactctgaagtttcccaacaaaatcgtggcccaggtagcttgcgatgtccttcagttgctggtttcctact

SEQ ID NO: 8139 - DNA, 166 bp, Homo sapiens
cttttgttcagtaaagcccaaaatctaggccaatggttctcaaagtgtagttccaggagcagcaacagcagcatccctggagagggagaaagagagagagagtgtatgtgtgtgtgtgtgtatgtgtatgtgtgtgtgtgtgtgtgtgtgtgaagctgtttgtata

SEQ ID NO: 8140 - DNA, 188 bp, Homo sapiens
  unsure (118): n=A,T,C or G
ctgagaagctgatagaggagaagggagctgtggaagctctggcagcagcactggcccatatttcaggtgccacgtccgtagaccagcgctccttgatcaactcaaatgtgggttttgngaccatgatcttgcagtgctcaattgaaatgccaaatattagttatgcttggaaagaacttaaagagcag

SEQ ID NO: 8141 - DNA, 284 bp, Homo sapiens
  unsure (21): n=A,T,C or G
  unsure (24): n=A,T,C or G
  unsure (36): n=A,T,C or G
  unsure (42): n=A,T,C or G
  unsure (47): n=A,T,C or G
  unsure (49): n=A,T,C or G
  unsure (64): n=A,T,C or G
  unsure (169): n=A,T,C or G
  unsure (219): n=A,T,C or G
  unsure (221): n=A,T,C or G
  unsure (230): n=A,T,C or G
  unsure (243): n=A,T,C or G
  unsure (246): n=A,T,C or G
  unsure (248): n=A,T,C or G
  unsure (271): n=A,T,C or G
  unsure (279): n=A,T,C or G
cctttttaagatgatactttnganatgcacgatatnatgagngggangnttttaaaaacgcctntttaataaactacctctaacactatttctgcggtaatagatattagcagattaattgggttatttgcattatttaatttttttgattccaagttttggtcttgtnaccactataactctctgtgaacgtttttccaggtggctggaagaaggaananaacctgatntagccaatgctgntgnantcgtttcctcagcctcatctcantgtgctgnggtct

SEQ ID NO: 8142 - DNA, 604 bp, Homo sapiens
  unsure (596): n=A,T,C or G
ccactcgagcacggtagggacagttcacaggtatatgaagataattgggtcccaggcgatggcggtgagtgtcaggataggcaaaaaggcggccctgaagcattttgtcaggactggcctcaatgccaggtggcatgttgcttgggtcgaaggctatctgttcaacctcagcaaagtaattaactggattccggtttaagaccagtttaccaactgggatgagagggtagtccttgtgaggccaaaccttggtgagatcgaatggattaaatggaaaagtttctgcctgattaaatgtcatgacctggatgtaaaaagtccaggaggggtactttcctgtggcaatggcgttaaaaagatcccggatgccatagtcaggatcttcctgggaaagtctcgccgcatcttcaacagaaaggtttttgatgccctggtcagtcttataatggaatttgcaataaactgcctccccatttgcattaaccagcttgaaagtatgtgatccatatccattcatgtggcgatgtccatctggaatcccccgatcactgaacaagaaagaaacctgatgcagagactcaggacgtaggctccanaagtccca

SEQ ID NO: 8143 - DNA, 600 bp, Homo sapiens
  unsure (488): n=A,T,C or G
  unsure (511): n=A,T,C or G
atgactttagtcccagctacttggggggctgaggcaggagggtcgcttgagcccaggaaagttcgagtccaagctgggcaacagagcaaaaccttgtctcttaaaaaagaaaaaaaatagagttcagaatagataaaagagttgttattctaagaaaatagactactgaaggagaaaggctttaataatattaaaaataggcaaggtaatgcttttcatagtatagtaagatttgcctaataccatcttatttctttgattaaaagttacttagcttcagcatgcgtgtacattcaaaatacaaaattaaagcatgagttgtcattaatttgcagaattctatgattgaagcctctaaatgaattgtgcaggagagggagtttgtaaacaactgactacagacattcacattgggtcatctttaaaaagctggactctgcttttggatgcttctcggaggcgagttggattttggactgaagtactgncgttccattcctttttttgaggngttatgagtggggctataacatcgccatcctgcggcttggtgaaatttctgtctgcacaccactgaacaaaatattgtcttgcggcata

SEQ ID NO: 8144 - DNA, 595 bp, Homo sapiens
  unsure (513): n=A,T,C or G
ccagctagtcacagttgttgggtcagtagtacagtgctcaagaacaattcagactaacatgccaaggagcctgaggaaaagtctggtagtcatggctctcccagccagcattcccagtgggggaaactagaagacaccagcctggagaggctgaatattcaggagtccctgagatggggaatggaacagaggaaagtgtcttttgactcatcttaagtactcccctccccaaatagaaacctcaaagactgatccatttcccctagggcctgggccaggagtagctcactgctcactgctgaggagaaaggcacaagatataatgtcataagagcaggacagtggctcagcctacagagttccctataggggaaagaaggcaggaaataggcgcagggtctggtcctgtccctgcaccaccctgagtagctagtcttgggaagggattacaggccctgggccataggctgctcgccattctgctttcctatcctgtttctctccctgtgctgntcccttttagccagggctgagaaatgttcagcacctgaggcaaaactgccatagtacctctgaaagctgaatcaagggggaa

SEQ ID NO: 8145 - DNA, 465 bp, Homo sapiens
taaatctgtatcaagacggttcttttctagatttcctctacctttttgctcttaaaactgcttctctgctctgagaagcacagctacctgccttcactgaaatatacctcaggctgaaatttggggtgggatagcaggtcagttgatcttctgcaggaaggtgcagcttttccatatcagctcaaccacgccgccagtccattcttaaggaactgccgactaggactgatgatgcattttagctttgagcttttgggggttattctaccaacaaacagtccattggaaagaaaacagtccctggaattaacagatcagaatgttcacactggttaatctttttttaacaatgagcatgaaggtagcagaagctggtgtgtttccagatggttcttctaaccaaactaatttttcactgttgacaagcgaggcaagggttgcactggaccaaaggctgaggcttgg

SEQ ID NO: 8146 - DNA, 597 bp, Homo sapiens
  unsure (543): n=A,T,C or G
cctggtgcctacagcacaggctacgggggctacgaggagtacagtggcctcagtgatggctacggcttcaccaccgacctgttcgggagagacctcagctactgtctctccggaatgtatgaccacagatacggcgacagtgagttcacagtgcagagcaccacaggccactgtgtccacatgaggggcctgccgtacaaagcgaccgagaacgacatttacaacttcttctctcctctcaaccctgtgagagtccatattgagattggcccagatggaagagtgacgggtgaagcagatgttgagtttgctactcatgaagaagctgtggcagctatgtccaaagacagggccaatatgcagcacagatatatagaactcttcttgaattcaacaacaggggccagcaatggggcgtatagcagccaggtgatgcaaggcatgggggtgtctgctgcccaggccacttacagtggcctggagagccagtcagtgagtggctgttacggggccggctacagtgggcagaacagcatgggtggntatgactagttttgttaggaacatttgagttacttcaatcattttcacaggcag

SEQ ID NO: 8147 - DNA, 536 bp, Homo sapiens
ccaggcaggtctcgaactcctggcctcagatgatctgcccaccgtagcctcccaaagtgctgggattacaggtatgagccactccacccagcccagagttttcatttgttccttaaaataattaagctggaaaggcaaggacaattatgagcacaactgtagtcaagttgagaagacctcaaaaaagtcaagtttagaccttcggattttccatagaagagaaaaagatactaggttttagggtacagagagccagatctgaagagtagctgcagggggaaggtgctgttagaaggaggatatagacacattctctggggggaacatatggtgactgacccatgcacacaaagggggccttagcgaaactgcagaggactgatccttaaaccaatcacatctttgccaatctctgtcactgtggtgaccctgcagatttgacctttgaactcaggggaatagcaggccccactgagtggacacttttctactggctttccacggtagatgggccgatatgatgcagcacaaatgtc

SEQ ID NO: 8148 - DNA, 392 bp, Homo sapiens; identical to SEQ ID NO: 7567

SEQ ID NO: 8149 - DNA, 467 bp, Homo sapiens
cctggacctgtgtaaaccttcaaacactcttttttacattaggtcatgaagttaaattttttactgtttctgtgctacagactcttcaaaggaaaatagttaagtcaatttcaaagaaaatgaccagcacatttttaaaacattagaaatgatttgactttgactatctactgccaaaaaaaggttaaggaatttgtaatgagaagctaaaaactttaaggaattttaaggaactcaaaacaaaaactcattaaatgtaattaaagtgaattctacaaataaagcctcttaatacatttctataatagtcacttaagacttaaattcaaacactagcaaaccacaaaatcagactgtatgactgacatccaaaagataaatataaatcaaaatccgaccccagcattagccaaggggtaggtgttcctcttgaggaaggcaggaattcctcttctgccacctgttgg

SEQ ID NO: 8150 - DNA, 564 bp, Homo sapiens
  unsure (562): n=A,T,C or G
ctggtgggagggatgaaggaaattatctggacgatgctctcgtgagacaggatgcccaggacctgtatgaggctggagagaagaaatgggggacagatgaggtgaaatttctaactgttctctgttcccggaaccgaaatcacctgttgcatgtgtttgatgaatacaaaaggatatcacagaaggatattgaacagagtattaaatctgaaacatctggtagctttgaagatgctctgctggctatagtaaagtgcatgaggaacaaatctgcatattttgctgaaaagctctataaatcgatgaagggcttgggcaccgatgataacaccctcatcagagtgatggtttctcgagcagaaattgacatgttggatatccgggcacacttcaagagactctatggaaagtctctgtactcgttcatcaagggtgacacatctggagactacaggaaagtactgcttgttctctgtggaggagatgattaaaataaaaatcccagaaggacaggaggattctcaacactttgaatttttttaacttcatttttctacactgnta

SEQ ID NO: 8151 - DNA, 596 bp, Homo sapiens
  unsure (351): n=A,T,C or G
  unsure (571): n=A,T,C or G
ccagtggaatgatgttccctgcaattaccatctcacctatacgtgcaagaaaggaacagttgcttgcggccagccccctgttgtagaaaatgccaagacctttggaaagatgaaacctcgttatgaaatcaactccctgattagataccactgcaaagatggtttcattcaacgtcaccttccaactatccggtgcttaggaaatggaagatgggctatacctaaaattacctgcatgaaccgtaagtggtcctttagaaagaatggactaccgtgctataacaactactagacaccttcattttacggctgtggtatcggcagtttagggtatggagcaagtaatattgngtgttttctttttttctttctttccttccatgtagcatctgcataccaaaggacttattctatgaaatactttaaaaattcctcatcagcaaaggacaattcaataaatacatccaaacatgatcatcgttggagccggaggtggcaggagtcgaggcgctgatccctaaaatggcgaacatgtgttttcatcatttcagccaaagtcctaacttcctgngcctttcctatcacctcgagaagta

SEQ ID NO: 8152 - DNA, 547 bp, Homo sapiens
  unsure (516): n=A,T,C or G
ccactactatgagcagggagttcaggctgtccccttgggacctcgctttgtcccaggcacagtcaccctttccataaccatcactagaaatcccaaaccccagaatcctgctcacctaagctcaaagaaggaagctgttgctggcaggtgcttctcagaagtctggcacatctgtgtatttcttgtctaattcttctcattggcctggagcatctcttcacatttttctctagagagcctggcacttttttttccccaacaacctgaccattttatcttctcagtctagggcttctggggtcaaaagaaaggactgaaatacagtatcacctatatgaatgtctgctcctgagggaagttaacaaaagccagattagatactgactggattttggtgtctctctcaagtggagaagatgtgaatagaaacagaagtttacaaaacactatagcctaacaaataggtaaaagctgtgatttaaagctggctcaagactggcccaggcataatactgncaatctaaaggtaaccggcaacatcaaaaag

SEQ ID NO: 8153 - DNA, 591 bp, Homo sapiens
  unsure (28): n=A,T,C or G
  unsure (56): n=A,T,C or G
  unsure (68): n=A,T,C or G
  unsure (76): n=A,T,C or G
  unsure (107): n=A,T,C or G
agcggattctgcttttaggagtacccgncaacaagcgggaccgagcaggaatccgnatctgggaacanagcccttngctcctccctcagaatgaacggagaccaganttcagatgtttatgcccaagaaaagcaggatttcgttcagcacttctcccagatcgttagggtgctgactgaggatgagatggggcacccagagataggagatgctattgcccggctcaaggaggtcctggagtacaatgccattggaggcaagtataaccggggtttgacggtggtagtagcattccgggagctggtggagccaaggaaacaggatgctgatagtctccagcgggcctggactgtgggctggtgtgtggaactgctgcaagctttcttcctggtggcagatgacatcatggattcatcccttacccgccggggacagatctgctggtatcagaagccgggcgtgggtttggatgccatcaatgatgctaacctcctggaagcatgtatctaccgcctgctgaagctctattgccgggagcagccctattacctgaacctgatcgagctcttcctgcagagttcctatcagact

SEQ ID NO: 8154 - DNA, 460 bp, Homo sapiens
ctgctcttcctaatgttggtccagtcctttaaacctgccctacggattctagtctgcccttctttgcccttaattgcttgacctcttatgcttgcctttttttttttttatcacttattttgttcatgttaaacactaagttaaaaaattttaaaatgaatgatgccacatttctatataaagaaatgagcattattaatccctgttgttgtaaaacatcattgaaattgtatgctattctctttatataaagtcattctaattatgtcacatgttgaagatgtaaccaaactattataaaggctgcttatccattcacatattgaatagattaagtttgggttttttaagattgttaatttgttattttctctttcctctagtcaaagtgggaaaaagcccaccggtgaggggctccctctctggaaaagtcagcctaccttgtcatttttcaacgatg

SEQ ID NO: 8155 - DNA, 444 bp, Homo sapiens
ctgttcttagaaagcattccatatagttatccagagcactcaagttttggttctcttttacatagctgcattcggagatactctatgtgagacatgtttaaaaaaagagaaacatttatacctggaatttatattcttccaagtaatcttttagtcttgttggtaaaggcagtccccagatggcaccggtacatttgttaatggtgagcctacagagatgctgcagagatggtgctgacgtgtagagcggtttggtcagataaaggtgaacagtgccgttccggggggcttctggacctgtccgcttatccttgcacatctgaacatagtagtcgatcagatgaaccacactgtcaaattgtttaagcttggatttgacacatatgatagagtccaatctgaattttccgtcttggtattcgattcgaagattagttggtccag

SEQ ID NO: 8156 - DNA, 605 bp, Homo sapiens
ctgtcagcttcagcagaccttggaaaggaaaatggtttgccttagttttacagtttgttttgagaaagaaaaccattcatttgtatcctttctaagttgcaatataaataactgtcattgttcttgtattcttcacaataatgtccattaaacatatatgtatcacatattttacctcactagggactaaggcattgcattatgtcaggattgtattacttttccctctcatattcgtgtcttactcttaataggaagtatgagtaaatcaggtatttttctaaaggtaattttcatttatttagaacacatttctttttggtgacataaattatcaggaacatcatcactccggaaaaaatacagtgggggttctcttgtacataatcctttgaaaataacattgaactaaacatgaaacatacatttatttctctgaaataatttctcttgaatatttctacaaaagtaatttttccccacatctgttattgtctttaatctcctagtccccagaactatctataaccaagttagttccattatttaatctctactcatcacaccacacaaaccccaaaatacaggtagtcagtcacaaaata

SEQ ID NO: 8157 - DNA, 467 bp, Homo sapiens
  unsure (245): n=A,T,C or G
  unsure (266): n=A,T,C or G
  unsure (450): n=A,T,C or G
  unsure (456): n=A,T,C or G
ctgagtctgtcacttctaaaaagacaggaccccttagtgcccagccctctgttgaaaaagagaacttggcaatagaaagtcaatcgaaaactcagaaaaaagggaagatatctcatgacaaaaggaagaaatcaagaagtaaagccataggctcagatacttctgacattgtgcacatttggtgtccagaaggaatgaaaaccagtgacatcaaggagttgaatattgttttgcctgaatttganaaaacccacctagagcatcancaaagaatagaatctaaagtttgtaaggcagccatcgccacattttatgttaatgttaaagaacaattcatcaaaatgcttaaagaaagccagatgttgacaaatctgaaaaggaagaatgctaagatgatttcagatatcgaaaagaaaaggcagcgtatgattgaagtccaggatgaactgnttcggntagagccacag

SEQ ID NO: 8158 - DNA, 500 bp, Homo sapiens
  unsure (119): n=A,T,C or G
  unsure (380): n=A,T,C or G
  unsure (401): n=A,T,C or G
  unsure (412): n=A,T,C or G
  unsure (438): n=A,T,C or G
  unsure (440): n=A,T,C or G
  unsure (451): n=A,T,C or G
  unsure (470): n=A,T,C or G
  unsure (482): n=A,T,C or G
  unsure (496): n=A,T,C or G
ccaagaattcaaggacttgtaggagataagtgaaggctattacagggattttgtcctggtttggtaggtttctcttggagaaataccactacaccctggtctagaaatgagttttgaanacttggggagttaaagggcactgagttttgctctcaccgtaccctgattccaggttttacatggagaaataacctgagggactttatttctatccaatgccctggtttccatcctgaccagaggatgatgacatccgctgataggccatgcttctgtcttctcttatgtgcctcatgccaagcctcgaaatataccttctggaccatcatttccacatctaccttgtgactagaagtcctagttatggtattttgaaattnatgatccataatccttgccanaaatcctgcancgaaccatggcatggcatcatcctantnattgatttcantcttttgccttttgctccnctggaatcttgngccaattgcaggangggg

SEQ ID NO: 8159 - DNA, 448 bp, Homo sapiens
  unsure (445): n=A,T,C or G
ctgctggtggagatggatggttttaatacaacaacaaatgtcgtcattttggccggcaccaatcgaccagatatcctggaccccgcgctgcttaggccggggcgtttcgacaggcagatctttattggaccaccagacataaaaggaagagcttctattttcaaagttcatctccgaccgctaaaactggacagtaccctggagaaggataaattggcaagaaaactggcatctttaactccagggttttcaggtgctgatgttgctaatgtctgtaatgaagctgcgttgattgctgcaaggcatctgtcagattccataaatcagaaacactttgaacaggcaattgaacgagtgattggtggcttagagaagaaaacgcaggttctgcagcctgaggagaagaagactgtggcataccacgaagcaggccatgcggttgccngct

SEQ ID NO: 8160 - DNA, 381 bp, Homo sapiens
ctggagcagttcaagaaggacaacgaggaaacaggcttcggctcaggcacccgggccctggagcaagccctggagaagacgaaagccaacatcaagtgggtgaaggagaacaaggaggtggtgctccagtggttcacagaaaacagcaaatagtccccagcccttgaagtcacccggccccgatgcaaggtgcccacatgtgtccatcccagcggctggtgcagggcctccattcctggagcccgaggcaccagtgtcctcccctcaaggacaaagtctccagcccacgttctctctgcctgtgagccagtctagttcctgatgacccaggctgcctgagcacctcccagcccctgcccctcatgccaaccccgccctagg

SEQ ID NO: 8161 - DNA, 313 bp, Homo sapiens
ctggtggtgattgcacacgacgtggatcccatcgaggtgcgtttgcctgttgactgctaacccaagggcttctggcagtaccaggaagagagagtagacctaatgccaagtcagtgatgggaccgaagtgggtgagggcagtactgacacagatccaacacatgcgtggctcttgcaatgatgtgaatctctcactgaattcaaccttgaagtgcgaatccatgagctttttaaccctgagcaattgttacaagctaactgaaatttgctgcttttggtcaaaatacagtcttcagctaatgctttcttccag

SEQ ID NO: 8162 - DNA, 200 bp, Homo sapiens
ctgcccttcctggacagcctatggaggctccagtcatgctgtgggatgagtccagcttccctgacatcccaggggctgtaagtgccaacatgactgtgaagggccagagtgaagaccctggctccctcctttccttgttccggcggctgagtgaccagcggagtaaggagcgctccctactgcatggggacttccacgcg

SEQ ID NO: 8163 - DNA, 459 bp, Homo sapiens
  unsure (236): n=A,T,C or G
  unsure (368): n=A,T,C or G
gctggtctcaaactcctgaccttgtgctctgcccgccgtggcctctcaaagtactgcacactatcttaaaggcagtaaatgaatctgagtaagtgagtaagcaatgacagaaaactgcttttcctaccaataaaaaacctgcatatatggtcaagtgacatgatctattcaaagtgattaaaaattgtctttgacaagagattacattaaaaaaataaattttttttactgacctnataattgatttgcattgttcattttgctgcatgttctcattatcattaacatgtatgtttaatacactgttttattacagtatgtataattaatatactgctttattacatgtactaaactagactcatatncacttaaaaaaaaaaagatatgtggagatatccacataccataatagtcacccttttaaaggtacacaattcagtggtttttagacctcgg

SEQ ID NO: 8164 - DNA, 266 bp, Homo sapiens
cacgcccagctaatttttgtatttttttagtagacatggggtttcgccatgttggcgaggctggtctcgatctcctgaccttgtgatccacccacctcggcctcccaaagtgctgggattacaggcgtgagccactgcgcccggccacattcagttcttatcaaagaaataacccagacttaatcttgaatgatacgattatgcccaatattaagtaaaaaatataagaaaaggttatcttaaatagatcttaggcaaaataccag

SEQ ID NO: 8165 - DNA, 477 bp, Homo sapiens
atcacctggagcgtgaagggccacatgtattgtttggaaggccatctggagcctacattctagtaggagagggaagaaacagatgtagccaaccacagtatgaggtggaaacataaaattacaaagggaaaagaagagaatgacttacagttagatcactggtccttagcctggttgctcattggattcacctggggagtttttagtcgtctcatgccagccccgttgcacccaggaccagtcaaatcagaatctgtgagggcatagtcagggagcatgagtaggagattccagtgtgcagccaaagttgagagctagggaacagatgggggtggggtggagaggcaggccaacaagttgcaagtaattcaaatctccattggaaggggcttctcacagagcaaggcggcagctccagggctctctagtcctttccctcagctatcctctgccactgccatgcagatggcaagatgg

SEQ ID NO: 8166 - DNA, 297 bp, Homo sapiens; identical to SEQ ID NO: 7858

SEQ ID NO: 8167 - DNA, 527 bp, Homo sapiens
ttttttttttggtataaaagcatttttaaactttattattaatactcaggacattaggaatttccagatttttttcagtagcatttgtagaaccacttttggtaacaaatacagtagttaggaatatgcatccaattcagaatgcataataatgtttatcctgaatcctttccggctaaaaacagggctggcgctgtgatgagatatagaacgagaatctacaaaaaacactgtaacatgtttgttttttcccagaggctacatcctcttttgctggaatactttataaatacatattaaaaagtaaggcaacaactccaaacagtccaagctgtttgctcaactcttttcccaattagatttgcaatcccggtgatcaatttcatggttgtattgtttagtgtttgtctttcttatttcaaatggtccaaaaggatgtttttctcacatttctaaaacatctctggtatgtgtgttcaatgatatatgcaactaatactggtcaggtactgaagcctgtgatgtcc

SEQ ID NO: 8168 - DNA, 426 bp, Homo sapiens
cgttgaccgcatggcagctccgagagcagaggctctatttgacttcactggaaacagcaaactggagctgaatttcaaagctggagatgtgatcttcctcctcagtcggatcaacaaagactggctggagggcactgtccggggagccacgggcatcttccctctctccttcgtgaagatcctcaaagacttccctgaggaggacgaccccaccaactggctgcgttgctactactacgaagacaccatcagcaccatcaagtctgtggcctgggagggaggggcctgtccagccttcctgccatccctacgaccactgcccctcacatcaccttctcatgggtccctctcccactccaaagcccccagtggctcccagatgagccacaatgctgtaacaagccatcaacgtccagggtggcctgg

SEQ ID NO: 8169 - DNA, 131 bp, Homo sapiens
ccagtttgtaaatctgctccttcacgtcgtcagatgtcaacttcaaccaagtggggacgctgcgtcgatagggtaaagccgactgggacaggcccttcccgggagcatgcatgcgacccatgatggcggcg

(The sequence listing continues in the following parts.)
